(19) United States
(12) Patent Application Publication
(10) Pub. No.: US 2022/0175781 A1
(43) Pub. Date: Jun. 9, 2022

(54) CD40L COMPOSITIONS AND METHODS FOR TUNABLE REGULATION

(71) Applicant: Obsidian Therapeutics, Inc., Cambridge, MA (US)

(72) Inventors: Michael SCHEBESTA, Cambrdige, MA (US); Michelle Lois FLEURY, Cambridge, MA (US); Kutlu Goksu ELPEK, Cambridge, MA (US); Elizabeth Jane WEISMAN, Jamaica Plain, MA (US); Vipin SURI, Belmont, MA (US); Dexue SUN, Cambridge, MA (US); Dan Jun LI, Cambridge, MA (US); Steven Mark SHAMAH, Acton, MA (US); Michael Joseph BRISKIN, Lexington, MA (US); Celeste RICHARDSON, Brookline, MA (US); Tariq A. KASSUM, Boston, MA (US); Michelle Lynn OLS, Northborough, MA (US); Brian DOLINSKI, Cambridge, MA (US); Mara Christine INNISS, Beverly, MA (US); Emily BRIDEAU, Cambridge, MA (US); Jennifer Leah GORI, Jamaica Plain, MA (US); Dhruv Kam SETHI, Westwood, MA (US)

(73) Assignee: Obsidian Therapeutics, Inc., Cambridge, MA (US)

(21) Appl. No.: 17/436,997

(22) PCT Filed: Mar. 6, 2020
(86) PCT No.: PCT/US2020/021582

§ 371 Date: Sep. 7, 2021

Related U.S. Application Data
(60) Provisional application No. 62/860,356, filed on Jun. 12, 2019.
(60) Provisional application No. 62/835,554, filed on Apr. 18, 2019.
(60) Provisional application No. 62/815,404, filed on Mar. 8, 2019.

(51) Int. Cl. A61K 31/519; C12N 9/06; A61K 31/55

(52) U.S. Cl. CPC A61K 31/519; C12N 9/003; C12Y 105/01003; C07K 2319/33; A61K 31/55

(57) ABSTRACT

The present disclosure provides regulatable biocircuit systems, effector modules and compositions for cancer immunotherapy. Methods for inducing anti-cancer immune responses in a subject are also provided.

### CROSS REFERENCE TO RELATED APPLICATIONS

[0001] The present application claims priority to and the benefit of U.S. Provisional Application No. 62/815,404, filed Mar. 8, 2019; U.S. Provisional Application No. 62/835,554, filed Apr. 18, 2019; and U.S. Provisional Application No. 62/860,356, filed Jun. 12, 2019, the contents of each of which are herein incorporated by reference in their entirety.

### REFERENCE TO THE SEQUENCE LISTING

[0002] The present application is being filed along with a Sequence Listing in electronic format. The Sequence Listing is provided as a file entitled 2095_1216PCT_ST25.txt, created on Mar. 4, 2020, which is 10.8 MB in size. The information in the electronic format of the sequence listing is incorporated herein by reference in its entirety.

### BACKGROUND

[0003] Gene and cell therapies are revolutionizing medicine and offering new promise for the treatment of previously intractable conditions. However, most current technologies do not allow titration of the timing or levels of target protein induction. This has rendered many potential gene and cell therapy applications difficult or impossible to safely and effectively deploy.

[0004] Inadequate exogenous and/or endogenous gene control is a critical issue in many gene and cell therapy settings. This lack of tunability also makes it difficult to safely express proteins with narrow or uncertain therapeutic windows or those requiring more titrated or transient expression.

[0005] One approach to regulated protein expression or function is the use of drug responsive domains (DRDs), also known as destabilizing domains (DDs). Drug responsive domains are small protein domains that can be appended to a target protein of interest. DRDs render the attached protein of interest unstable in the absence of a DRD-binding ligand and the protein of interest is rapidly degraded by the ubiquitin-proteasome system of the cell. However, when a specific small molecule DRD-binding ligand binds to the DRD, the attached protein of interest is stabilized, and protein function is achieved.

[0006] The role of the immune system in tumor control, in particular T cell-mediated cytotoxicity, is well recognized. There is mounting evidence that T cells can control tumor growth and survival in cancer patients, both in early and late stages of the disease. However, tumor-specific T-cell responses are difficult to mount and sustain in cancer patients.

[0007] T cell pathways receiving significant attention to date include signaling through cytotoxic T lymphocyte antigen-4 (CTLA-4, CD152) and programmed death ligand 1 (PD-L1, also known as B7-H1 or CD274). Recently however, other molecules that signal through T cell pathways, including CD40 ligand (CD40L), have generated interest as mediators for tumor control.

[0008] CD40L (also known as CD154, CD40 ligand, gp39 or TBAM) is a 33 kDa, Type II membrane glycoprotein (Swiss-ProtAcc-No P29965). Additionally, shorter 18 kDa CD40L soluble forms exist, (also known as sCD40L or soluble CD40L). These soluble forms of CD40L are generated by proteolytic processing of the membrane bound protein, but the cellular activity of the soluble species is weak in the absence of higher order oligomerization (e.g., trimerization). CD40L binds and activates CD40.

[0009] CD40L is a member of the TNF family of molecules which is primarily expressed on activated T cells (including Th0, Th1, and Th2 subtypes), and forms homotrimers similar to other members of this family. Further, CD40L has also been found expressed on mast cells, and activated basophils and eosinophils. CD40L binds to its receptor CD40 on antigen-presenting cells (APC), which leads to many effects depending on the target cell type. In general, CD40L plays the role of a costimulatory molecule and induces activation in APC in association with T cell receptor stimulation by MHC molecules on the APC. CD40L also may bind to B cells, monocytes, macrophages, platelets, neutrophils, dendritic cells, endothelial cells, and αSMC (smooth muscle cells). Binding of CD40L to CD40 expressed on dendritic cells may promote dendritic cell (DC) licensing. DCs may be converted to a functional state by an antigen-specific T helper cell in order to activate cytotoxic CD8+ T cells, a process referred to as DC licensing. CD40 engagement on DCs results in DC stimulation as evidenced by the surface expression of costimulatory and MHC molecules; proinflammatory cytokine production (e.g. IL12 and TNF) as well as epitope spreading, all immune responses that are believed to assist in tumor eradication and anti-tumor effects.

[0010] Despite the significant progress made over the past decade in developing strategies for combatting cancer and other diseases, patients with advanced, refractory and metastatic disease have limited clinical options. Chemotherapy, irradiation, and high dose chemotherapy have become dose limiting. There remains a substantial unmet need for new less-toxic methods and therapeutics that have better therapeutic efficacy, longer clinical benefit, and improved safety profiles, particularly for those patients with advanced disease or cancers that are resistant to existing therapeutics.

### SUMMARY

[0011] The present disclosure provides novel protein domains displaying small molecule dependent stability. Such protein domains are called drug responsive domains (DRDs). In the absence of its binding ligand, the DRD is destabilizing and causes degradation of a payload or protein of interest (POI) (used interchangeably herein) fused to the DRD, while in the presence of its binding ligand, the operably linked DRD and payload can be stabilized, and its stability is dose dependent.

[0012] Provided herein are compositions which include an effector module. The effector module may include a stimulus response element (SRE) which is operably linked to one or more payloads. In various embodiments, the SRE comprises a drug responsive domain (DRD), or consists essentially of a drug responsive domain (DRD), or consists of a drug responsive domain (DRD). As used herein, an SRE may also be referred to as a DRD, or DD.

[0013] Compositions that are exemplified herein, include, but are not limited to a composition comprising an effector module, said effector module comprising a stimulus response element (SRE) operably linked to a first payload, wherein said first payload comprises human CD40L (SEQ ID NO: 3820) or a mutant CD40L comprising one or more mutations selected from Y170G, Y172G, H224G, G226F, G226H, G226W, or G227F relative to SEQ ID NO: 3820, said payload is attached, appended or associated with said SRE. The compositions illustrated above may comprise a DRD, wherein the DRD comprises, in whole or in part, a ER, an ecDHFR, a FKBP, a PDE5, or an hDHFR protein, wherein the DRD further comprises one or more mutations in said amino acid sequence of the ER, ecDHFR, FKBP, PDE5, or hDHFR protein.

[0014] Exemplary CD40L payloads described herein may include one or more mutations relative to SEQ ID NO: 3820, such as but not limited to Y170G, Y172G, H224G, G226F, G226H, G226W, or G227F. The first payload may include, in whole or in part, the human CD40L (SEQ ID NO: 3820). In some embodiments, the first payload may be the whole CD40L (SEQ ID NO: 3820). Non-limiting examples of payloads comprising the whole CD40L may be CD40L (H224G, G226F) (SEQ ID NO: 6598); CD40L (H224G, G226H) (SEQ ID NO: 6600); CD40L (Y172G, G226F) (SEQ ID NO: 6602); CD40L (Y170G, H224G, G226W) (SEQ ID NO: 6604); or CD40L (H125G, G227F) (SEQ ID NO: 6606).

[0015] The SRE described herein may be responsive to or interact with at least one stimulus. In one embodiment, the stimulus may be a small molecule.

[0016] The present disclosure provides compositions that include effector modules with SREs derived from the whole or portion of a parent protein, such as ecDHFR and a first payload which includes in whole or in part the human CD40L (SEQ ID NO: 3820). In one embodiment, the SRE includes amino acids 2-159 of ecDHFR. In some embodiments, the SRE may include one or more mutations compared to the parent protein. The SRE may include but is not limited to SEQ ID NO: 6554, 6556, 6558, 6560, 6562, 6564, 6566, 6568, 6570, 6572, 6574, 6576, 6578, 6580, 6582, 6584, 6586, 6588, or 6590.

[0017] The SRE described herein may be responsive to or interact with at least one stimulus. In one aspect, the stimulus may be a small molecule such as but not limited to TMP.

[0018] Also provided herein are polynucleotides encoding the compositions described herein as well as vectors encoding the polynucleotides, and host cells containing the vectors described herein. The present disclosure also provides pharmaceutical compositions that include the compositions described herein and a pharmaceutically acceptable excipient as well as modified cells or engineered cells expressing the compositions described herein.

[0019] Also exemplified herein are methods for the treatment of disease, for example, a subject having cancer in need of such treatment. An exemplary method for treating cancer in accordance with the embodiments of the present disclosure comprises a method of reducing a tumor burden in a subject comprising: (a) administering to the subject a therapeutically effective amount of immune cells as disclosed herein, wherein the immune cells comprise an effector module comprising at least one stimulus response element (SRE), the SRE operably linked to a first payload, wherein said first payload comprises in whole or in part the human CD40L (SEQ ID NO. 3820), or a mutant CD40L thereof; and (b) administering to the subject, a therapeutically effective amount of a stimulus, to modulate the expression of the first payload, thereby reducing the tumor burden. In related embodiments, the effector module may comprise a second payload that is expressed in the immune cells with or without linkage to the same or different DRD as the first payload. In some related aspects, the second payload is a chimeric antigen receptor (CAR), for example, a CD19 CAR as described herein.

[0020] In an illustrative example, the present disclosure provides a method of activating dendritic cells in a subject comprising the steps of (a) administering to the subject one or more immune cells, said one or more immune cells comprising an effector module, the effector module having at least one stimulus response element (SRE) operably linked to a first payload, wherein said first payload comprises in whole or in part the human CD40L (SEQ ID NO. 3820), or a mutant thereof; wherein the immune cell is a T cell; (b) administering to the subject, a therapeutically effective amount of a stimulus wherein the stimulus is a ligand, to modulate the expression of the first payload; and (c) measuring dendritic cell activation marker, IL12 in the subject in response to the ligand to measure dendritic cell activation.

### DETAILED DESCRIPTION

[0021] The details of one or more embodiments of the disclosure are set forth in the accompanying description below. Although any materials and methods similar or equivalent to those described herein can be used in the practice or testing of the present disclosure, the preferred materials and methods are now described. Other features, objects and advantages of the disclosure will be apparent from the description. In the description, the singular forms also include the plural unless the context clearly dictates otherwise. Unless defined otherwise, all technical and scientific terms used herein have the same meaning as commonly understood by one of ordinary skill in the art to which this disclosure belongs. In the case of conflict, the present description will control.

### A. Compositions

[0022] The present disclosure provides modified cells, nucleic acid molecules, vectors, and cell and gene therapies in which the timing or levels of a native therapeutic protein can be regulated through administration of an oral small molecule drug. Additionally, the present disclosure provides compositions, systems and methods for tunable expression of a protein of interest (POI, also referred to herein as “payload” which may be used interchangeably). The compositions relate to systems for the tunable expression of a protein of interest in a cell and agents that induce the translation of a polynucleotide encoding at least one drug responsive domain (DRD) operably linked to at least one protein of interest. Compositions provided by the present disclosure include nucleic acid molecules, polypeptides, and modified cells related to systems for the tunable expression of a protein of interest for use in treating a disease in the presence of a ligand that stabilizes the DRD. Methods related to tunable systems for protein expression that are provided by the present disclosure include methods of producing modified cells and methods of treating or preventing disease.

[0023] In various embodiments, the present disclosure provides a method for treating a disease in a subject in need thereof, the method comprising: a. providing a population of cells; b. introducing at least one nucleic acid into at least one cell in the population of cells, wherein the nucleic acid molecule comprises at least one nucleic acid sequence that encodes a protein of interest operably linked to a drug responsive domain (DRD); c. Delivering the cell into the subject; and d. administering a ligand to the subject that stabilizes the DRD sufficiently to enable expression of the protein of interest in the at least one cell; wherein expression of the protein of interest is regulated by the presence of ligand in the subject, and the amount and/or duration of ligand administration is sufficient to produce a therapeutically effective amount of the protein of interest in the at least one cell in the population of cells.

[0024] 1. Tunable Protein Expression Systems

[0025] In general, a stimulus response element (SRE) comprising the DRD may be operably linked to a payload construct which could be any payload (e.g., an immunotherapeutic agent), to form an effector module. The SRE, when activated by a particular stimulus, stabilizing ligand or simply ligand (used interchangeably herein), e.g., a small molecule, can produce a signal or outcome, to regulate transcription, translation, and/or protein levels of the linked payload in the engineered cell. The tunable expression of the payload can be modulated either up or down by providing or excluding a stabilizing ligand which stabilizes the DRD to effect tunable expression of the operably linked payload. In various embodiments, the present disclosure provides polynucleotides that encode a SRE that tune expression levels and activities of any agents used for immunotherapy.

[0026] As used herein, a “biocircuit” or “biocircuit system” is defined as a circuit within or useful in biologic systems comprising a stimulus and at least one effector module responsive to a stimulus, where the response to the stimulus produces at least one signal or outcome within, between, as an indicator of, or on a biologic system. Biologic systems are generally understood to be any cell, tissue, organ, organ system or organism, whether animal, plant, fungi, bacterial, or viral. It is also understood that biocircuits may be artificial circuits which employ the stimuli or effector modules taught by the present disclosure and effect signals or outcomes in acellular environments such as with diagnostic, reporter systems, devices, assays or kits. The artificial circuits may be associated with one or more electronic, magnetic, or radioactive components or parts.

[0027] 2. Effector Modules and Stimulus Response Elements (SREs)

[0028] The systems, compositions and methods of the present disclosure include at least one stimulus response element as a component of an effector module system. As used herein, an “effector module” is a single or multi-component construct or complex comprising at least (a) one or more stimulus response elements and (b) one or more payloads (e.g. payloads of interest or proteins of interest (POIs)). In one embodiment, the DRD of the SRE comprises, in whole or in part, a ER, an ecDHFR, a FKBP, a PDE5, or an hdhdr hDHFR protein, wherein the DRD further comprises one or more mutations in said amino acid sequence of the ER, ecDHFR, FKBP, PDE5, or hDHFR protein. In one embodiment, the payload comprises human CD40L (SEQ ID NO: 3820) or a mutant CD40L comprising one or more mutations selected from Y170G, Y172G, H224G, G226F, G226H, G226W, or G227F relative to SEQ ID NO: 3820.

[0029] As used herein a “stimulus response element (SRE)” is a component of an effector module which is joined, attached, operably linked to, or associated with one or more payloads of the effector module and in some instances, is responsible for the responsive nature of the effector module to one or more stimuli. As used herein, the “responsive” nature of an SRE to a stimulus may be characterized by a covalent or non-covalent interaction, a direct or indirect association or a structural or chemical reaction to the stimulus. Further, the response of any SRE to a stimulus may be a matter of degree or kind. The response may be a partial response. The response may be a reversible response. The response may ultimately lead to a regulated signal or output. Such output signal may be of a relative nature to the stimulus, e.g., producing a modulatory effect of between 1% and 100% or a factored increase or decrease such as 2-fold, 3-fold, 4-fold, 5-fold, 10-fold or more.

[0030] In some embodiments, the present disclosure provides methods for modulating protein expression, function or level. In some aspects, the modulation of protein expression, function or level refers to modulation of expression, function or level by at least about 20%, such as by at least about 30%, 40%, 50%, 60%, 70%, 80%, 85%, 90%, 95% and 100%, or at least 20-30%, 20-40%, 20-50%, 20-60%, 20-70%, 20-80%, 20-90%, 20-95%, 20-100%, 30-40%, 30-50%, 30-60%, 30-70%, 30-80%, 30-90%, 30-95%, 30-100%, 40-50%, 40-60%, 40-70%, 40-80%, 40-90%, 40-95%, 40-100%, 50-60%, 50-70%, 50-80%, 50-90%, 50-95%, 50-100%, 60-70%, 60-80%, 60-90%, 60-95%, 60-100%, 70-80%, 70-90%, 70-95%, 70-100%, 80-90%, 80-95%, 80-100%, 90-95%, 90-100% or 95-100%.

[0031] 3. Characterization of Ligand-Dependent Activity of a Tunable Protein Expression System

[0032] Ligand-dependent activity of a tunable protein expression system may be characterized by various methods.

[0033] In some embodiments, ligand-dependent activity of a tunable protein expression system is characterized by ligand-dependent regulation of a DRD. In some embodiments, ligand-dependent activity of a tunable protein expression system is characterized by ligand dose-dependent regulation of a DRD. Ligand-dependent regulation of a DRD transcription factor polypeptide may be characterized by various methods. In some aspects, ligand-dependent regulation of a DRD may be assessed by measuring the levels of the DRD, the operably linked protein of interest, or both, such as by an immunoassay targeted to measure the levels of the DRD, protein of interest, or both.

[0034] In some embodiments, ligand-dependent activity of a tunable protein expression system is characterized by ligand-dependent expression of the payload operably linked to a DRD. Expression of the payload may be assessed by various methods. In some aspects, expression of the payload is assessed by measuring protein/polypeptide levels.

[0035] In some embodiments, a tunable protein expression system may be compared to a control tunable protein expression system that lacks a DRD. In some embodiments, ligand-dependent activity of a tunable protein expression system may be analyzed or characterized relative to the activity of a tunable protein expression system comprising a payload containing construct that lacks a DRD.

[0036] In various embodiments, the tunable protein expression system provides for the tunable expression of a protein of interest or payload (used interchangeably herein). In various embodiments, a nucleic acid sequence of the present disclosure comprises a nucleotide sequence which encodes the protein of interest and is operably linked to a nucleotide sequence which encodes a DRD. The nucleotide sequence which encodes the DRD may be positioned upstream or downstream of the nucleic acid sequence which encodes the payload.

[0037] When a cell or organism comprising a DRD is exposed to an exogenous stabilizing ligand, the DRD is stabilized. The stabilized DRD and any polypeptide sequences positioned upstream or downstream from the DRD is also stabilized and not transported to the ubiquitin proteasome degradation pathway. In the absence of the exogenous stabilizing ligand, the DRD and any operably linked polypeptide sequences operably linked to the DRD upstream and/or downstream from the DRD is degraded and eliminated in the cell. Thus, both the amount and the timing of protein expression can be controlled by administering the exogenous stabilizing ligand to the cell or organism.

[0038] In various embodiments, the DRD and the protein of interest are typically operably linked or may be separated by one or more intervening nucleotide, peptide, polypeptide or protein sequences, for example, a linker, a signal sequence, a leader sequence, a transmembrane domain, an intra tail domain of a cleavage site. In various embodiments, a first polynucleotide may include a first nucleic acid sequence that encodes a drug responsive domain (DRD) and a second nucleic acid sequence that encodes a protein of interest. In such embodiments, the protein of interest as described herein in the cell, is operably linked to the DRD. In addition, the cell may also include other optional nucleotide, peptide, polypeptide or protein sequences which may be operably linked to the DRD, the protein of interest, or both.

[0039] In some embodiments, a vector comprises the polynucleotides described herein. In some embodiments, the vector comprises at least a first polynucleotide may include a first nucleic acid sequence that encodes a payload; a second nucleic acid sequence that encodes a drug responsive domain (DRD) which is operably linked to the payload. Optionally, in some embodiments, the first polynucleotide and/or vector may comprise additional components of the tunable protein expression system, for example, for monocistronic and/or bicistronic expression of the one or more payloads and one or more DRDs, for example, IRES sequences and cleavage sites, with optional intervening peptide or polypeptide sequences positioned upstream or downstream from the payload; or upstream, or downstream from the DRD.

[0040] In some embodiments, the vectors also possess an origin of replication (ori) which permits amplification of the vector, for example in bacteria. Additionally, or alternatively, the vector includes selectable markers such as antibiotic resistance genes, genes for colored markers and suicide genes, and other regulatory sequences which permit cloning and/or expression in bacteria, viruses and in eukaryotic cells.

[0041] 4. Drug Responsive Domains (DRDs)

[0042] Drug responsive domains (DRDs or DDs) are protein domains that are unstable and are degraded in the absence of ligand, but whose stability is rescued by binding to a corresponding DRD-binding ligand, also referred to herein as a stimulus, or stimulus ligand or simply a ligand. The term drug responsive domain (DRD) is interchangeable with the term destabilizing domain (DD). Drug responsive domains (DRDs) can be appended to a polypeptide or protein of interest and can render the attached polypeptide or protein unstable in the absence of a DRD-binding ligand. DRDs convey their destabilizing property to the attached polypeptide or protein via protein degradation. Without wishing to be bound by any particular theory, it is believed that in the absence of a DRD-binding ligand, the appended or operably linked polypeptide or protein is rapidly degraded by the ubiquitin-proteasome system of a cell. A ligand that binds to or interacts with a DRD can, upon such binding or interaction, modulate the stability of the DRD and any appended or operably linked polypeptide or protein. When a ligand binds its intended DRD, the instability is reversed and function of the appended polypeptide or protein can be restored. The conditional nature of DRD stability allows a rapid and non-perturbing switch from stable protein to unstable substrate for degradation. Moreover, its dependency on the concentration of its ligand further provides tunable control of degradation rates.

[0043] In some embodiments, DRDs of the present disclosure may be derived from known polypeptides that are capable of post-translational regulation of proteins. In some embodiments, DRDs of the present disclosure may be developed or derived from known proteins. Regions or portions or domains of wild type proteins may be utilized as DRDs in whole or in part. They may be combined or rearranged to create new peptides, proteins, regions or domains of which any may be used as DRDs or the starting point for the design of further DRDs.

[0044] In some embodiments, a DRD may be derived from a parent protein or from a mutant protein having one, two, three, or more amino acid mutations compared to the parent protein. In some embodiments, the parent protein may be selected from, but is not limited to, FKBP; human protein FKBP; human DHFR (hDHFR); E. coli DHFR (ecDHFR); PDE5 (phosphodiesterase 5); and ER (estrogen receptor). Examples of proteins that may be used to develop DRDs and their ligands are listed in Table 1.

TABLE 1
DRDs and their binding ligands

| | | | Nucleic | |
|---|---|---|---|---|
| | | Protein | Acid | |
| | | SEQ ID | SEQ ID | |
| DRD Identifier | Protein | NO: | NO: | Ligands |
| PDE5DD-187 | Human Phosphodiesterase 5 | 1 | 2 | Sildenafil; |
| | (hPDE5) (Uniprot ID: O76074) | | | Vardenafil; |
| | | | | Tadalafil |
| PDE5DD-229 | Human Phosphodiesterase 5 | 23 | 24 | |
| | (hPDE5) Isoform 2 | | | |
| PDE5DD-232 | Human Phosphodiesterase 5 | 25 | 26-27 | |
| | (hPDE5) Isoform 3 | | | |
| PDE5DD-234 | Human Phosphodiesterase 5 | 28 | 29 | |
| | (hPDE5) Isoform X1 | | | |
| hDHFRDD-84 | Human Dihydrofolate reductase | 30 | 31 | Methotrexate |
| | (hDHFR) Isoform 1 (Uniprot ID: | | | (MTX), |
| | P00374.2) | | | Trimethoprim |
| | | | | (TMP) |
| hDHFRDD-87 | Human Dihydrofolate reductase | 32 | | Methotrexate |
| | (hDHFR) Variant | | | (MTX), |
| | | | | Trimethoprim |
| | | | | (TMP) |
| hDHFRDD-88 | Dihydrofolate reductase 2 | 33 | 34 | Methotrexate |
| | (hDHFR2) (DHFRL1) | | | (MTX), |
| | | | | Trimethoprim |
| | | | | (TMP) |
| ecDHFRDD-6 | E. coli Dihydrofolate reductase | 35 | 36 | Methotrexate |
| | (ecDHFR) (Uniprot ID: P0ABQ4) | | | (MTX), |
| | | | | Trimethoprim |
| | | | | (TMP) |
| FKBPDD-8 | FK506 binding protein (FKBP) | 37 | | Shield-1 |
| | (Uniprot ID: P62942) | | | |
| ERDD-4 | Estrogen Receptor (ER) (Uniprot | 42 | | Bazedoxifene, |
| | ID: P03372.2) | | | Raloxifene 4- |
| | | | | hydroxytamoxifen |
| | | | | (4-OHT), |
| | | | | fulvestrant, |
| | | | | oremifene, |
| | | | | lasofoxifene, |
| | | | | clomifene, |
| | | | | femarelle, |
| | | | | ormeloxifene |

[0045] In some embodiments, the sequence of a protein used to develop DRDs may comprise all, part of, or a region thereof of a protein sequence in Table 1. In some embodiments, proteins that may be used to develop DRDs include isoforms of proteins listed in Table 1.

[0046] In some embodiments, a DRD of the present disclosure is derived from hPDE5. In some embodiments, a DRD of the present disclosure is derived from hPDE5 isoform 2. In some embodiments, a DRD of the present disclosure is derived from hPDE5 isoform 3. In some embodiments, a DRD of the present disclosure is derived from hPDE5 isoform Xl.

[0047] In some embodiments, a DRD of the present disclosure is derived from a human dihydrofolate reductase (hDHFR) protein such as, but not limited to, human dihydrofolate reductase 1 (hDHFR1), human dihydrofolate reductase 2 (hDHFR2), or a fragment or variant thereof.

[0048] In some embodiments, the DRD may be derived from an hDHFR protein and include at least one mutation. In some embodiments, the DRD may be derived from an hDHFR protein and include more than one mutation. In some embodiments, the DRD may be derived from an hDHFR protein and include two, three, four or five mutations.

[0049] In some embodiments, a DRD of the present disclosure is derived from E. coli dihydrofolate reductase (ecDHFR). In some embodiments, the DRD may be derived from an ecDHFR protein and include at least one mutation. In some embodiments, the DRD may be derived from an ecDHFR protein and include more than one mutation. In some embodiments, the DRD may be derived from an ecDHFR protein and include two, three, four or five mutations.

[0050] In some embodiments, a DRD of the present disclosure is derived from a FK506 binding protein (FKBP) protein or a fragment or variant thereof. In some embodiments, the DRD may be derived from a FKBP protein and include at least one mutation. In some embodiments, the DRD may be derived from a FKBP protein and include more than one mutation. In some embodiments, the DRD may be derived from an FKBP protein and include two, three, four or five mutations.

[0051] In some embodiments, a DRD of the present disclosure is derived from an Estrogen Receptor (ER) protein or a fragment or variant thereof. In some embodiments, the DRD may be derived from an ER protein and include at least one mutation. In some embodiments, the DRD may be derived from an ER protein and include more than one mutation. In some embodiments, the DRD may be derived from an ER protein and include two, three, four or five mutations.

[0052] The amino acid sequences of the DRDs encompassed in the present disclosure have at least about 70% identity, preferably at least about 75% or 80% identity, more preferably at least about 85%, 86%, 87%, 88%, 89% or 90% identity, and further preferably at least about 91%, 92%, 93%, 94%, 95%, 96%, 97%, 98% or 99% identity to the amino acid sequence of a parent protein from which it is derived.

[0053] Examples of DRDs of the present disclosure include those derived from: human DHFR, ecDHFR, human estrogen receptor (ER), FKBP, human protein FKBP, and human PDE5. Suitable DRDs, which may be referred to as drug responsive domains or ligand binding domains, are also known in the art. See, e.g., WO2018/161000; WO2018/231759; WO2019/241315; U.S. Pat. Nos. 8,173,792; 8,530,636; WO2018/237323; WO2017/181119; US2017/0114346; US2019/0300864; WO2017/156238; Miyazaki et al., J Am Chem Soc, 134:3942 (2012); Banaszynski et al. (2006) Cell 126:995-1004; Stankunas, K. et al. (2003) Mol. Cell 12:1615-1624; Banaszynski et al. (2008) Nat. Med. 14:1123-1127; Iwamoto et al. (2010) Chem. Biol. 17:981-988; Armstrong et al. (2007) Nat. Methods 4:1007-1009; Madeira da Silva et al. (2009) Proc. Natl. Acad. Sci. USA 106:7583-7588; Pruett-Miller et al. (2009) PLoS Genet. 5:e1000376; and Feng et al. (2015) Elife 4:e10606.

[0054] In some embodiments, a DRD of the present disclosure is derived from a human dihydrofolate reductase (hDHFR) protein such as, but not limited to, human dihydrofolate reductase 1 (hDHFR1), human dihydrofolate reductase 2 (hDHFR2), or a fragment or variant thereof.

[0055] In some embodiments, the DRD may be derived from an hDHFR protein and include at least one mutation. In some embodiments, the DRD may be derived from an hDHFR protein and include more than one mutation. In some embodiments, the DRD may be derived from an hDHFR protein and include two, three, four or five mutations.

[0056] In some embodiments, a DRD of the present disclosure is derived from E. coli dihydrofolate reductase (ecDHFR). In some embodiments, the DRD may be derived from an ecDHFR protein and include at least one mutation. In some embodiments, the DRD may be derived from an ecDHFR protein and include more than one mutation. In some embodiments, the DRD may be derived from an ecDHFR protein and include two, three, four or five mutations.

[0057] In some embodiments, a DRD of the present disclosure is derived from a FK506 binding protein (FKBP) protein or a fragment or variant thereof. In some embodiments, the DRD may be derived from a FKBP protein and include at least one mutation. In some embodiments, the DRD may be derived from a FKBP protein and include more than one mutation. In some embodiments, the DRD may be derived from an FKBP protein and include two, three, four or five mutations.

[0058] In some embodiments, a DRD of the present disclosure is derived from an Estrogen Receptor (ER) protein or a fragment or variant thereof. In some embodiments, the DRD may be derived from an ER protein and include at least one mutation. In some embodiments, the DRD may be derived from an ER protein and include more than one mutation. In some embodiments, the DRD may be derived from an ER protein and include two, three, four or five mutations.

[0059] The amino acid sequences of the DRDs encompassed in the present disclosure have at least about 70% identity, preferably at least about 75% or 80% identity, more preferably at least about 85%, 86%, 87%, 88%, 89% or 90% identity, and further preferably at least about 91%, 92%, 93%, 94%, 95%, 96%, 97%, 98% or 99% identity to the amino acid sequence of a parent protein from which it is derived.

[0060] Examples of DRDs of the present disclosure include those derived from: human DHFR, ecDHFR, human estrogen receptor (ER), FKBP, human protein FKBP, and human PDE5. Suitable DRDs, which may be referred to as drug responsive domains or ligand binding domains, are also known in the art. See, e.g., WO2018/161000; WO2018/231759; WO2019/241315; U.S. Pat. Nos. 8,173,792; 8,530,636; WO2018/237323; WO2017/181119; US2017/0114346; US2019/0300864; WO2017/156238; Miyazaki et al., J Am Chem Soc, 134:3942 (2012); Banaszynski et al. (2006) Cell 126:995-1004; Stankunas, K. et al. (2003) Mol. Cell 12:1615-1624; Banaszynski et al. (2008) Nat. Med. 14:1123-1127; Iwamoto et al. (2010) Chem. Biol. 17:981-988; Armstrong et al. (2007) Nat. Methods 4:1007-1009; Madeira da Silva et al. (2009) Proc. Natl. Acad. Sci. USA 106:7583-7588; Pruett-Miller et al. (2009) PLoS Genet. 5:e1000376; and Feng et al. (2015) Elife 4:e10606.

[0061] In one embodiment, the SRE is derived from a region of parent protein or from a mutant protein. The region of the parent protein may be 10, 11, 12, 13, 14, 15, 16, 17, 18, 19, 20, 21, 22, 23, 24, 25, 26, 27, 28, 29, 30, 31, 32, 33, 34, 35, 36, 37, 38, 39, 40, 41, 42, 43, 44, 45, 46, 47, 48, 49, 50, 51, 52, 53, 54, 55, 56, 57, 58, 59, 60, 61, 62, 63, 64, 65, 66, 67, 68, 69, 70, 71, 72, 73, 74, 75, 76, 77, 78, 79, 80, 81, 82, 83, 84, 85, 86, 87, 88, 89, 90, 91, 92, 93, 94, 95, 96, 97, 98, 99, 100, 101, 102, 103, 104, 105, 106, 107, 108, 109, 110, 111, 112, 113, 114, 115, 116, 117, 118, 119, 120, 121, 122, 123, 124, 125, 126, 127, 128, 129, 130, 131, 132, 133, 134, 135, 136, 137, 138, 139, 140, 141, 142, 143, 144, 145, 146, 147, 148, 149, 150, 151, 152, 153, 154, 155, 156, 157, 158, 159, 160, 161, 162, 163, 164, 165, 166, 167, 168, 169, 170, 171, 172, 173, 174, 175, 176, 177, 178, 179, 180, 181, 182, 183, 184, 185, 186, 187, 188, 189, 190, 191, 192, 193, 194, 195, 196, 197, 198, 199, 200, 201, 202, 203, 204, 205, 206, 207, 208, 209, 210, 211, 212, 213, 214, 215, 216, 217, 218, 219, 220, 221, 222, 223, 224, 225, 226, 227, 228, 229, 230, 231, 232, 233, 234, 235, 236, 237, 238, 239, 240, 241, 242, 243, 244, 245, 246, 247, 248, 249, 250, 251, 252, 253, 254, 255, 256, 257, 258, 259, 260, 261, 262, 263, 264, 265, 266, 267, 268, 269, 270, 271, 272, 273, 274, 275, 276, 277, 278, 279, 280, 281, 282, 283, 284, 285, 286, 287, 288, 289, 290, 291, 292, 293, 294, 295, 296, 297, 298, 299, 300, 301, 302, 303, 304, 305, 306, 307, 308, 309, 310, 311, 312, 313, 314, 315, 316, 317, 318, 319, 320, 321, 322, 323, 324, 325, 326, 327, 328, 329, 330, 331, 332, 333, 334, 335, 336, 337, 338, 339, 340, 341, 342, 343, 344, 345, 346, 347, 348, 349, 350, 351, 352, 353, 354, 355, 356, 357, 358, 359, 360, 361, 362, 363, 364, 365, 366, 367, 368, 369, 370, 371, 372, 373, 374, 375, 376, 377, 378, 379, 380, 381, 382, 383, 384, 385, 386, 387, 388, 389, 390, 391, 392, 393, 394, 395, 396, 397, 398, 399, 400, 401, 402, 403, 404, 405, 406, 407, 408, 409, 410, 411, 412, 413, 414, 415, 416, 417, 418, 419, 420, 421, 422, 423, 424, 425, 426, 427, 428, 429, 430, 431, 432, 433, 434, 435, 436, 437, 438, 439, 440, 441, 442, 443, 444, 445, 446, 447, 448, 449, 450, or more than 450 amino acids in length. The region of the parent protein may be 5-50, 25-75, 50-100, 75-125, 100-150, 125-175, 150-200, 175-225, 200-250, 225-275, 250-300, 275-325, 300-350, 325-375, 350-400, 375-425, or 400-450 amino acids in length.

[0062] In one embodiment, the SRE is derived from a parent protein or from a mutant protein and includes a region of the parent protein. The SRE may include a region of the parent protein which is 1%, 5%, 10%, 15%, 20%, 25%, 30%, 35%, 40%, 45%, 50%, 55%, 60%, 65%, 70%, 75%, 80%, 85%, 90%, 95%, 99%, or 100%, 5-10%, 10-15%, 15-20%, 20-25%, 25-30%, 30-35%, 35-40%, 40-45%, 45-50%, 50-55%, 55-60%, 60-65%, 65-70%, 70-75%, 75-80%, 80-85%, 85-90%, 90-95%, 95-100%, 10-20%, 20-30%, 30-40%, 40-50%, 50-60%, 60-70%, 70-80%, 80-90%, 90-100%, 10-30%, 20-40%, 30-50%, 40-60%, 50-70%, 60-80%, 70-90%, 80-100%, 10-40%, 20-50%, 30-60%, 40-70%, 50-80%, 60-90%, 70-100%, 10-50%, 20-60%, 30-70%, 40-80%, 50-90%, 60-100%, 10-60%, 20-70%, 30-80%, 40-90%, 50-100%, 10-70%, 20-80%, 30-90%, 40-100%, 10-80%, 20-90%, 30-100%, 10-90%, 20-100%, 25-50%, 50-75%, or 75-100% of the parent protein or mutant protein.

[0063] In one embodiment, the SRE is derived from a parent protein or from a mutant protein and may have 1%, 5%, 10%, 15%, 20%, 25%, 30%, 35%, 40%, 45%, 50%, 55%, 60%, 65%, 70%, 75%, 80%, 85%, 90%, 95%, 99%, or 100%, 5-10%, 10-15%, 15-20%, 20-25%, 25-30%, 30-35%, 35-40%, 40-45%, 45-50%, 50-55%, 55-60%, 60-65%, 65-70%, 70-75%, 75-80%, 80-85%, 85-90%, 90-95%, 95-100%, 10-20%, 20-30%, 30-40%, 40-50%, 50-60%, 60-70%, 70-80%, 80-90%, 90-100%, 10-30%, 20-40%, 30-50%, 40-60%, 50-70%, 60-80%, 70-90%, 80-100%, 10-40%, 20-50%, 30-60%, 40-70%, 50-80%, 60-90%, 70-100%, 10-50%, 20-60%, 30-70%, 40-80%, 50-90%, 60-100%, 10-60%, 20-70%, 30-80%, 40-90%, 50-100%, 10-70%, 20-80%, 30-90%, 40-100%, 10-80%, 20-90%, 30-100%, 10-90%, 20-100%, 25-50%, 50-75%, or 75-100% identity to the parent protein or mutant protein.

[0064] In one embodiment, the effector modules and/or SREs of the present disclosure may include at least one drug responsive domain (DRD). The effector modules and/or SRE may include 1, 2, 3, 4, 5, 6, 7, 8, 9, 10 or more than 10 DRDs. When there are more than one DRDs, each of the DRDs may be derived from the same parent protein (e.g., PDE5), from different parent proteins (e.g., PDE5 and hDHFR), may be a fusion of two different parent proteins, or may be artificial.

[0065] In one embodiment, the effector modules and/or SREs of the present disclosure may include 2 DRDs. In one embodiment, the effector modules and/or SREs of the present disclosure may include 3 DRDs. In one embodiment, the effector modules and/or SREs of the present disclosure may include 4 DRDs. In one embodiment, the effector modules and/or SREs of the present disclosure may include 5 DRDs. In one embodiment, the effector modules and/or SREs of the present disclosure may include 6 DRDs. In one embodiment, the effector modules and/or SREs of the present disclosure may include 7 DRDs. In one embodiment, the effector modules and/or SREs of the present disclosure may include 8 DRDs. In one embodiment, the effector modules and/or SREs of the present disclosure may include 9 DRDs. In one embodiment, the effector modules and/or SREs of the present disclosure may include 10 DRDs. The DRDs may be derived from any parent protein known in the art and/or described herein. In some embodiments the DRDs are derived from the same parent protein (e.g., PDE5). In some embodiments the DRDs are derived from different regions of the same parent protein (e.g., amino acid 535-860 and amino acid 590-836 of PDE5). In some embodiments, the DRDs are derived from different parent proteins (e.g., PDE5 and hDHFR).

[0066] 5. Human Dihydrofolate Reductase (hDHFR) Derived Drug Responsive Domains (DRDs)

[0067] In one embodiment, the SRE may include at least one drug responsive domain (DD) derived from a human dihydrofolate reductase (hDHFR) protein such as, but not limited to, human dihydrofolate reductase 1 (hDHFR1), human dihydrofolate reductase 2 (hDHFR2), or a fragment or variant thereof. As a non-limiting example, the SRE comprises at least one DRD derived from hDHFR1. As a non-limiting example, the SRE comprises at least one DRD derived from hDHFR2.

[0068] In some embodiments, DRDs of the disclosure may be derived from human dihydrofolate reductase (hDHFR). hDHFR is a small (18 kDa) enzyme that catalyzes the reduction of dihydrofolate and plays a vital role in variety of anabolic pathway. Dihydrofolate reductase (DHFR) is an essential enzyme that converts 7,8-dihydrofolate (DHF) to 5,6,7,8, tetrahydrofolate (THF) in the presence of nicotinamide adenine dihydrogen phosphate (NADPH). Anti-folate drugs such as methotrexate (MTX), a structural analogue of folic acid, which bind to DHFR more strongly than the natural substrate DHF, interferes with folate metabolism, mainly by inhibition of dihydrofolate reductase, resulting in the suppression of purine and pyrimidine precursor synthesis. Other inhibitors of hDHFR such as folate, TQD, Trimethoprim (TMP), epigallocatechin gallate (EGCG) and ECG (epicatechin gallate) can also bind to hDHFR and regulates its stability.

[0069] In one embodiment, the SRE comprises a region of the hDHFR protein. The region of the hDHFR protein may be 10, 11, 12, 13, 14, 15, 16, 17, 18, 19, 20, 21, 22, 23, 24, 25, 26, 27, 28, 29, 30, 31, 32, 33, 34, 35, 36, 37, 38, 39, 40, 41, 42, 43, 44, 45, 46, 47, 48, 49, 50, 51, 52, 53, 54, 55, 56, 57, 58, 59, 60, 61, 62, 63, 64, 65, 66, 67, 68, 69, 70, 71, 72, 73, 74, 75, 76, 77, 78, 79, 80, 81, 82, 83, 84, 85, 86, 87, 88, 89, 90, 91, 92, 93, 94, 95, 96, 97, 98, 99, 100, 101, 102, 103, 104, 105, 106, 107, 108, 109, 110, 111, 112, 113, 114, 115, 116, 117, 118, 119, 120, 121, 122, 123, 124, 125, 126, 127, 128, 129, 130, 131, 132, 133, 134, 135, 136, 137, 138, 139, 140, 141, 142, 143, 144, 145, 146, 147, 148, 149, 150, 151, 152, 153, 154, 155, 156, 157, 158, 159, 160, 161, 162, 163, 164, 165, 166, 167, 168, 169, 170, 171, 172, 173, 174, 175, 176, 177, 178, 179, 180, 181, 182, 183, 184, 185, 186, 187, 188, 189, 190, 191, 192, 193, 194, 195, 196, 197, 198, 199, 200, 201, 202, 203, 204, 205, 206, 207, 208, 209, 210, 211, 212, 213, 214, 215, 216, 217, 218, 219, 220, 221, 222, 223, 224, 225, 226, 227, 228, 229, 230, 231, 232, 233, 234, 235, 236, 237, 238, 239, 240, 241, 242, 243, 244, 245, 246, 247, 248, 249, 250, 251, 252, 253, 254, 255, 256, 257, 258, 259, 260, 261, 262, 263, 264, 265, 266, 267, 268, 269, 270, 271, 272, 273, 274, 275, 276, 277, 278, 279, 280, 281, 282, 283, 284, 285, 286, 287, 288, 289, 290, 291, 292, 293, 294, 295, 296, 297, 298, 299, 300, 301, 302, 303, 304, 305, 306, 307, 308, 309, 310, 311, 312, 313, 314, 315, 316, 317, 318, 319, 320, 321, 322, 323, 324, 325, 326, 327, 328, 329, 330, 331, 332, 333, 334, 335, 336, 337, 338, 339, 340, 341, 342, 343, 344, 345, 346, 347, 348, 349, 350, 351, 352, 353, 354, 355, 356, 357, 358, 359, 360, 361, 362, 363, 364, 365, 366, 367, 368, 369, 370, 371, 372, 373, 374, 375, 376, 377, 378, 379, 380, 381, 382, 383, 384, 385, 386, 387, 388, 389, 390, 391, 392, 393, 394, 395, 396, 397, 398, 399, 400, 401, 402, 403, 404, 405, 406, 407, 408, 409, 410, 411, 412, 413, 414, 415, 416, 417, 418, 419, 420, 421, 422, 423, 424, 425, 426, 427, 428, 429, 430, 431, 432, 433, 434, 435, 436, 437, 438, 439, 440, 441, 442, 443, 444, 445, 446, 447, 448, 449, 450, or more than 450 amino acids in length. The region of the parent protein may be 5-50, 25-75, 50-100, 75-125, 100-150, 125-175, 150-200, 175-225, 200-250, 225-275, 250-300, 275-325, 300-350, 325-375, 350-400, 375-425, or 400-450 amino acids in length.

[0070] In one embodiment, the DRD may be derived from an hDHFR protein and include at least one mutation. Non-limiting examples of mutations include M1del, V2A, C7R, I8V, V9A, A10T, A10V, Q13R, N14S, G16S, I17N, I17V, K19E, N20D, G21E, G21T, D22S, L23S, P24S, L28P, N30D, N30H, N30S, E31D, E31G, F32M, R33G, R33S, F35L, Q36F, Q36K, Q36R, Q36S, R37G, M38T, M38V, T40A, V44A, K47R, N49D, N49S, M53T, G54R, K56E, K56R, T57A, F59S, I61T, E63G, K64R, N65A, N65D, N65F, N65S, L68S, K69E, K69R, R71G, I72A, I72T, I72V, N73G, L74N, V75F, R78G, L80P, K81R, E82G, H88Y, F89L, R92G, S93G, S93R, L94A, D96G, A97T, L98S, K99G, K99R, L100P, E102G, Q103R, P104S, E105G, M112T, M112V, V113A, W114R, I115L, I115V, V116I, G117D, V121A, Y122C, Y122D, Y122I, Y122N, A107T, A107V, N108D, K109E, K109R, V110A, D111N, K123E, K123R, A125F, M1261, N127R, N127S, N127Y, H128R, H128Y, H131R, L132P, K133E, L134P, F135L, F135P, F135S, F135V, V136M, T137R, R138G, R1381, I139T, I139V, M140I, M140V, Q141R, D142G, F143L, F143S, E144G, D146G, T147A, F148L, F148S, F149L, P150L, E151G, I152V, D153A, D153G, E155G, K156R, Y157C, Y157R, K158E, K158R, L159P, L160P, E162G, Y163C, V166A, N168D, S168C, D169G, V170A, Q171R, E172G, E173A, E173G, K174R, I176A, I176F, I176T, K177E, K177R, Y178C, Y178H, F180L, E181G, V182A, Y183C, Y183H, E184G, E184R, K185del, K185E, K185R, N186D, N186S, D187G, and D187N.

[0071] In one embodiment, the DRD may be derived from an hDHFR protein and include more than one mutation. Any of the mutations listed herein may be included in the DRD. Non-limiting examples of double mutations include C7R, Y163C; A10V, H88Y; I17V, Y122I; G21T, Y122I; Q36K, Y122I; M53T, R1381; T57A, I72A; E63G, I176F; L74N, Y122I; V75F, Y122I; L94A, T147A; V121A, Y122I; Y122I, A125F; Y122I, N127Y; Y122I, M140I; H131R, E144G; T137R, F143L; E162G, I176F; Y178H, E181G; Y183H, K185E; M1del, I17V; M1del, Y122I; M1del, K185E; M1del, N127Y; M1del, N168D; and M1del, M140I. Non-limiting examples of triple mutations include I8V, K133E, Y163C; V9A, S93R, P150L; K19E, F89L, E181G; G21E, I72V, I176T; L23S, V121A, Y157C; E31D, F32M, V116I; Q36F, N65F, Y122I; Q36K, N65F, Y122I; Q36F, Y122I, A125F; N49D, F59S, D153G; V110A, V136M, K177R; Y122I, H131R, E144G; M1del, I17V, Y122I; M1del, G21T, Y122I; M1del, G21T, Y122N; M1del, Q36K, Y122I; M1del, M53T, R1381; M1del, L74N, Y122I; M1del, V75F, Y122I; M1del, L94A, T147A; M1del, V121A, Y122I; M1del, Y122I, A125F; M1del, Y122I, M140I; M1del, Y122I, N127Y; M1del, H131R, E144G; and M1del, E162G, I176F. Non-limiting examples of four mutations include G54R, I115L, M140V, S168C; M1del, E31D, F32M, V116I; M1del, Q36F, N65F, Y122I; M1del, Q36F, Y122I, A125F; M1del, Q36K, N65F, Y122I; and M1del, Y122I, H131R, E144G. Non-limiting examples of five mutations include V2A, R33G, Q36R, L100P, K185R; D22S, F32M, R33S, Q36S, N65S; and M1del, D22S, F32M, R33S, Q36S, N65S. Non-limiting example of more than five mutations include I17N, L98S, K99R, M112T, E151G, E162G, E172G; G16S, I17V, F89L, D96G, K123E, M140V, D146G, K156R; K81R, K99R, L100P, E102G, N108D, K123R, H128R, D142G, F180L, K185E; R138G, D142G, F143S, K156R, K158E, E162G, V166A, K177E, Y178C, K185E, N186S; N14S, P24S, F35L, M53T, K56E, R92G, S93G, N127S, H128Y, F135L, F143S, L159P, L160P, E173A, F180L; F35L, R37G, N65A, L68S, K69E, R71G, L80P, K99G, G117D, L132P, I139V, M140I, D142G, D146G, E173G, D187G; L28P, N30H, M38V, V44A, L68S, N73G, R78G, A97T, K99R, A107T, K109R, D111N, L134P, F135V, T147A, I152V, K158R, E172G, V182A, E184R; V2A, I17V, N30D, E31G, Q36R, F59S, K69E, I72T, H88Y, F89L, N108D, K109E, V110A, I115V, Y122D, L132P, F135S, M140V, E144G, T147A, Y157C, V170A, K174R, N186S; L100P, E102G, Q103R, P104S, E105G, N108D, V113A, W114R, Y122C, M1261, N127R, H128Y, L132P, F135P, I139T, F148S, F149L, I152V, D153A, D169G, V170A, I176A, K177R, V182A, K185R, N186S; and A10T, Q13R, N14S, N20D, P24S, N30S, M38T, T40A, K47R, N49S, K56R, I61T, K64R, K69R, I72A, R78G, E82G, F89L, D96G, N108D, M112V, W114R, Y122D, K123E, I139V, Q141R, D142G, F148L, E151G, E155G, Y157R, Q171R, Y183C, E184G, K185del, D187N.

[0072] In some embodiments, DRDs derived from hDHFR may comprise amino acids 2-187 of the parent hDHFR sequence. This is referred to herein as an M1del mutation.

[0073] In one embodiment, the stimulus is a small molecule that binds to a SRE to post-translationally regulate protein levels. In one aspect, DHFR ligands: trimethoprim (TMP) and methotrexate (MTX) are used to stabilize hDHFR mutants.

[0074] A non-limiting listing of hDHFR derived drug responsive domains (amino acid and nucleic acid sequences) are listed in Table 2. The position of the mutated amino acid listed in Table 2 is relative to human DHFR (Uniprot ID: P00374) of SEQ ID NO: 30 for DRDs derived from hDHFR (referred to in Table 2 as the “WT”). In Table 2, “del” means that the mutation is the deletion of the amino acid at that position relative to the wild type sequence. In Table 2, a DHFR derived drug responsive domain comprising amino acids 1-187 of the parent hDHFR sequence is denoted as hDHFR with the identity of the mutations within parenthesis e.g. hDHFR (Y122I).

TABLE 2
hDHFR Derived Drug responsive domains (DDs)

| | | Amino acid | Nucleic Acid |
|---|---|---|---|
| DRD Identifier | hDHFR Regions and Mutations | SEQ ID | SEQ ID |
| hDHFRDD-1 | hDHFR (Y122I) | 78 | 79 |
| hDHFRDD-2 | hDHFR (K81R) | 80 | 81 |
| hDHFRDD-3 | hDHFR (F59S) | 82 | 83 |
| hDHFRDD-4 | hDHFR (I17V) | 84 | 85 |
| hDHFRDD-5 | hDHFR (N65D) | 86 | 87 |
| hDHFRDD-6 | hDHFR (A107V) | 88 | 89 |
| hDHFRDD-7 | hDHFR (N127Y) | 90 | 91 |
| hDHFRDD-8 | hDHFR (M140I) | 92 | 93 |
| hDHFRDD-9 | hDHFR (K185E) | 94 | 95 |
| hDHFRDD-10 | hDHFR (N186D) | 96 | 97 |
| hDHFRDD-11 | hDHFR (2-187 of WT) | 98 | 99 |
| hDHFRDD-12 | hDHFR (2-187 of WT, N168D) | 100 | 101 |
| hDHFRDD-13 | hDHFR (2-187 of WT, M140I) | 102 | 103 |
| hDHFRDD-14 | hDHFR (C7R, Y163C) | 104 | 105 |
| hDHFRDD-15 | hDHFR (A10V, H88Y) | 106 | 107 |
| hDHFRDD-16 | hDHFR (I17V, Y122I) | 108 | 109 |
| hDHFRDD-17 | hDHFR (G21T, Y122I) | 110 | 111 |
| hDHFRDD-18 | hDHFR (Q36K, Y122I) | 112 | 113 |
| hDHFRDD-19 | hDHFR (M53T, R138I) | 114 | 115 |
| hDHFRDD-20 | hDHFR (T57A, I72A) | 116 | 117 |
| hDHFRDD-21 | hDHFR (E63G, I176F) | 118 | — |
| hDHFRDD-22 | hDHFR (L74N, Y122I) | 119 | 120 |
| hDHFRDD-23 | hDHFR(V75F, Y122I) | 121 | 122 |
| hDHFRDD-24 | hDHFR(L94A, T147A) | 123 | 124 |
| hDHFRDD-25 | hDHFR(V121A, Y122I) | 125 | 126 |
| hDHFRDD-26 | hDHFR(Y122I, A125F) | 127 | 128 |
| hDHFRDD-27 | hDHFR(Y122I, N127Y) | 129 | 130 |
| hDHFRDD-28 | hDHFR(Y122I, M140I) | 131 | 132 |
| hDHFRDD-29 | hDHFR(H131R, E144G) | 133 | 134 |
| hDHFRDD-30 | hDHFR(T137R, F143L) | 135 | 136 |
| hDHFRDD-31 | hDHFR(E162G, I176F) | 137 | 138 |
| hDHFRDD-32 | hDHFR(Y178H, E181G) | 139 | 140 |
| hDHFRDD-33 | hDHFR(Y183H, K185E) | 141 | 142 |
| hDHFRDD-34 | hDHFR(2-187 of WT, I17V) | 143 | 144 |
| hDHFRDD-35 | hDHFR(2-187 of WT, Y122I) | 145 | 146-148 |
| hDHFRDD-36 | hDHFR(2-187 of WT, K185E) | 149 | 150 |
| hDHFRDD-37 | hDHFR(2-187 of WT, N127Y) | 151 | 152 |
| hDHFRDD-38 | hDHFR(I8V, K133E, Y163C) | 153 | 154 |
| hDHFRDD-39 | hDHFR(V9A, S93R, P150L) | 155 | 156 |
| hDHFRDD-40 | hDHFR(K19E, F89L, E181G) | 157 | 158 |
| hDHFRDD-41 | hDHFR(G21E, I72V, I176T) | 159 | 160 |
| hDHFRDD-42 | hDHFR(L23S, V121A, Y157C) | 161 | 162 |
| hDHFRDD-43 | hDHFR(E31D, F32M, V116I) | 163 | 164 |
| hDHFRDD-44 | hDHFR(Q36F, N65F, Y122I) | 165 | — |
| hDHFRDD-45 | hDHFR(Q36K, N65F, Y122I) | 166 | 167 |
| hDHFRDD-46 | hDHFR(Q36F, Y122I, A125F) | 168 | 169 |
| hDHFRDD-47 | hDHFR(N49D, F59S, D153G) | 170 | 171 |
| hDHFRDD-48 | hDHFR(V110A, V136M, K177R) | 172 | 173 |
| hDHFRDD-49 | hDHFR(Y122I, H131R, E144G) | 174 | 175 |
| hDHFRDD-50 | hDHFR(2-187 of WT, I17V, Y122I) | 176 | 177-178 |
| hDHFRDD-51 | hDHFR(2-187 of WT, G21T, Y122I) | 179 | 180 |
| hDHFRDD-52 | hDHFR(2-187 of WT, G21T, Y122N) | 181 | 182 |
| hDHFRDD-53 | hDHFR(2-187 of WT, Q36K, Y122I) | 183 | 184-186 |
| hDHFRDD-54 | hDHFR(2-187 of WT, M53T, R138I) | 187 | 188 |
| hDHFRDD-55 | hDHFR(2-187 of WT, L74N, Y122I) | 189 | 190 |
| hDHFRDD-56 | hDHFR(2-187 of WT, V75F, Y122I) | 191 | 192 |
| hDHFRDD-57 | hDHFR(2-187 of WT, L94A, T147A) | 193 | 194 |
| hDHFRDD-58 | hDHFR(2-187 of WT, V121A, Y122I) | 195 | 196 |
| hDHFRDD-59 | hDHFR(2-187 of WT, Y122I, A125F) | 197 | 198-200 |
| hDHFRDD-60 | hDHFR(2-187 of WT, Y122I, M140I) | 201 | 202 |
| hDHFRDD-61 | hDHFR(2-187 of WT, Y122I, N127Y) | 203 | 204 |
| hDHFRDD-62 | hDHFR(2-187 of WT, H131R, E144G) | 205 | 206 |
| hDHFRDD-63 | hDHFR(2-187 of WT, E162G, I176F) | 207 | 208 |
| hDHFRDD-64 | hDHFR(G54R, M140V, S168C) | 209 | — |
| hDHFRDD-65 | hDHFR(G54R, I115L, M140V, S168C) | 210 | 211 |
| hDHFRDD-66 | hDHFR(V2A, R33G, Q36R, L100P, | 212 | 213 |
| | K185R) | | |
| hDHFRDD-67 | hDHFR(D22S, F32M, R33S, Q36S, | 214 | 215 |
| | N65S) | | |
| hDHFRDD-68 | hDHFR(2-187 of WT, E31D, F32M, | 216 | 217 |
| | V116I) | | |
| hDHFRDD-69 | hDHFR(2-187 of WT, Q36F, N65F, | 218 | 219-220 |
| | Y122I) | | |
| hDHFRDD-70 | hDHFR(2-187 of WT, Q36F, Y122I, | 221 | 222 |
| | A125F) | | |
| hDHFRDD-71 | hDHFR(2-187 of WT, Q36K, N65F, | 223 | 224 |
| | Y122I) | | |
| hDHFRDD-72 | hDHFR(2-187 of WT, Y122I, H131R, | 225 | 226 |
| | E144G) | | |
| hDHFRDD-73 | hDHFR(2-187 of WT, D22S, F32M, | 227 | 228 |
| | R33S, Q36S, N65S) | | |
| hDHFRDD-74 | hDHFR(I17N, L98S, K99R, M112T, | 229 | 230 |
| | E151G, E162G, E172G) | | |
| hDHFRDD-75 | hDHFR(G16S, I17V, F89L, D96G, | 231 | 232 |
| | K123E, M140V, D146G, K156R) | | |
| hDHFRDD-76 | hDHFR(K81R, K99R, L100P, E102G, | 233 | 234 |
| | N108D, K123R, H128R, D142G, F180L, | | |
| | K185E) | | |
| hDHFRDD-77 | hDHFR(R138G, D142G, F143S, K156R, | 235 | 236 |
| | K158E, E162G, V166A, K177E, Y178C, | | |
| | K185E, N186S) | | |
| hDHFRDD-78 | hDHFR(N14S, P24S, F35L, M53T, | 237 | 238 |
| | K56E, R92G, S93G, N127S, H128Y, | | |
| | F135L, F143S, L159P, L160P, E173A, | | |
| | F180L) | | |
| hDHFRDD-79 | hDHFR(F35L, R37G, N65A, L68S, | 239 | 240 |
| | K69E, R71G, L80P, K99G, G117D, | | |
| | L132P, I139V, M140I, D142G, D146G, | | |
| | E173G, D187G) | | |
| hDHFRDD-80 | hDHFR(L28P, N30H, M38V, V44A, | 241 | 242 |
| | L68S, N73G, R78G, A97T, K99R, | | |
| | A107T, K109R, D111N, L134P, F135V, | | |
| | T147A, I152V, K158R, E172G, V182A, | | |
| | E184R) | | |
| hDHFRDD-81 | hDHFR(V2A, I17V, N30D, E31G, Q36R, | 243 | 244 |
| | F59S, K69E, I72T, H88Y, F89L, N108D, | | |
| | K109E, V110A, I115V, Y122D, L132P, | | |
| | F135S, M140V, E144G, T147A, Y157C, | | |
| | V170A, K174R, N186S) | | |
| hDHFRDD-82 | hDHFR(L100P, E102G, Q103R, P104S, | 245 | 246 |
| | E105G, N108D, V113A, W114R, Y122C, | | |
| | M126I, N127R, H128Y, L132P, F135P, | | |
| | I139T, F148S, F149L, I152V, D153A, | | |
| | D169G, V170A, I176A, K177R, V182A, | | |
| | K185R, N186S) | | |
| hDHFRDD-83 | hDHFR(A10T, Q13R, N14S, N20D, | 247 | 248 |
| | P24S, N30S, M38T, T40A, K47R, N49S, | | |
| | K56R, I61T, K64R, K69R, I72A, R78G, | | |
| | E82G, F89L, D96G, N108D, M112V, | | |
| | W114R, Y122D, K123E, I139V, Q141R, | | |
| | D142G, F148L, E151G, E155G, Y157R, | | |
| | Q171R, Y183C, E184G, K185del, | | |
| | D187N) | | |
| hDHFRDD-84 | hDHFR(2-187 of WT, I17A) | 249 | 250 |
| hDHFRDD-85 | hDHFR(2-187 of WT, I17A, Y122I) | 251 | 252 |
| hDHFRDD-86 | hDHFR (aa 2-187 of WT, K55R, N65K, | 6552 | 6553 |
| | Y122I) | | |

[0075] In one embodiment, the SRE may include at least one hDHFR-derived drug responsive domain (DD) such as, but not limited to, hDHFRDD-1, hDHFRDD-2, hDHFRDD-3, hDHFRDD-4, hDHFRDD-5, hDHFRDD-6, hDHFRDD-7, hDHFRDD-8, hDHFRDD-9, hDHFRDD-10, hDHFRDD-11, hDHFRDD-12, hDHFRDD-13, hDHFRDD-14, hDHFRDD-15, hDHFRDD-16, hDHFRDD-17, hDHFRDD-18, hDHFRDD-19, hDHFRDD-20, hDHFRDD-21, hDHFRDD-22, hDHFRDD-23, hDHFRDD-24, hDHFRDD-25, hDHFRDD-26, hDHFRDD-27, hDHFRDD-28, hDHFRDD-29, hDHFRDD-30, hDHFRDD-31, hDHFRDD-32, hDHFRDD-33, hDHFRDD-34, hDHFRDD-35, hDHFRDD-36, hDHFRDD-37, hDHFRDD-38, hDHFRDD-39, hDHFRDD-40, hDHFRDD-41, hDHFRDD-42, hDHFRDD-43, hDHFRDD-44, hDHFRDD-45, hDHFRDD-46, hDHFRDD-47, hDHFRDD-48, hDHFRDD-49, hDHFRDD-50, hDHFRDD-51, hDHFRDD-52, hDHFRDD-53, hDHFRDD-54, hDHFRDD-55, hDHFRDD-56, hDHFRDD-57, hDHFRDD-58, hDHFRDD-59, hDHFRDD-60, hDHFRDD-61, hDHFRDD-62, hDHFRDD-63, hDHFRDD-64, hDHFRDD-65, hDHFRDD-66, hDHFRDD-67, hDHFRDD-68, hDHFRDD-69, hDHFRDD-70, hDHFRDD-71, hDHFRDD-72, hDHFRDD-73, hDHFRDD-74, hDHFRDD-75, hDHFRDD-76, hDHFRDD-77, hDHFRDD-78, hDHFRDD-79, hDHFRDD-80, hDHFRDD-81, hDHFRDD-82, hDHFRDD-83, hDHFRDD-84, hDHFRDD-85 and hDHFRDD-86.

[0076] 6. E. coli Dihydrofolate Reductase (ecDHFR) Derived Drug Responsive Domains (DRDs)

[0077] In one embodiment, the SRE may include at least one drug responsive domain (DRD) derived from an E. coli dihydrofolate reductase (ecDHFR) protein or a fragment or variant thereof.

[0078] In one embodiment, the SRE comprises a region of the ecDHFR protein. The region of the ecDHFR protein may be 10, 11, 12, 13, 14, 15, 16, 17, 18, 19, 20, 21, 22, 23, 24, 25, 26, 27, 28, 29, 30, 31, 32, 33, 34, 35, 36, 37, 38, 39, 40, 41, 42, 43, 44, 45, 46, 47, 48, 49, 50, 51, 52, 53, 54, 55, 56, 57, 58, 59, 60, 61, 62, 63, 64, 65, 66, 67, 68, 69, 70, 71, 72, 73, 74, 75, 76, 77, 78, 79, 80, 81, 82, 83, 84, 85, 86, 87, 88, 89, 90, 91, 92, 93, 94, 95, 96, 97, 98, 99, 100, 101, 102, 103, 104, 105, 106, 107, 108, 109, 110, 111, 112, 113, 114, 115, 116, 117, 118, 119, 120, 121, 122, 123, 124, 125, 126, 127, 128, 129, 130, 131, 132, 133, 134, 135, 136, 137, 138, 139, 140, 141, 142, 143, 144, 145, 146, 147, 148, 149, 150, 151, 152, 153, 154, 155, 156, 157, 158, 159, 160, 161, 162, 163, 164, 165, 166, 167, 168, 169, 170, 171, 172, 173, 174, 175, 176, 177, 178, 179, 180, 181, 182, 183, 184, 185, 186, 187, 188, 189, 190, 191, 192, 193, 194, 195, 196, 197, 198, 199, 200, 201, 202, 203, 204, 205, 206, 207, 208, 209, 210, 211, 212, 213, 214, 215, 216, 217, 218, 219, 220, 221, 222, 223, 224, 225, 226, 227, 228, 229, 230, 231, 232, 233, 234, 235, 236, 237, 238, 239, 240, 241, 242, 243, 244, 245, 246, 247, 248, 249, 250, 251, 252, 253, 254, 255, 256, 257, 258, 259, 260, 261, 262, 263, 264, 265, 266, 267, 268, 269, 270, 271, 272, 273, 274, 275, 276, 277, 278, 279, 280, 281, 282, 283, 284, 285, 286, 287, 288, 289, 290, 291, 292, 293, 294, 295, 296, 297, 298, 299, 300, 301, 302, 303, 304, 305, 306, 307, 308, 309, 310, 311, 312, 313, 314, 315, 316, 317, 318, 319, 320, 321, 322, 323, 324, 325, 326, 327, 328, 329, 330, 331, 332, 333, 334, 335, 336, 337, 338, 339, 340, 341, 342, 343, 344, 345, 346, 347, 348, 349, 350, 351, 352, 353, 354, 355, 356, 357, 358, 359, 360, 361, 362, 363, 364, 365, 366, 367, 368, 369, 370, 371, 372, 373, 374, 375, 376, 377, 378, 379, 380, 381, 382, 383, 384, 385, 386, 387, 388, 389, 390, 391, 392, 393, 394, 395, 396, 397, 398, 399, 400, 401, 402, 403, 404, 405, 406, 407, 408, 409, 410, 411, 412, 413, 414, 415, 416, 417, 418, 419, 420, 421, 422, 423, 424, 425, 426, 427, 428, 429, 430, 431, 432, 433, 434, 435, 436, 437, 438, 439, 440, 441, 442, 443, 444, 445, 446, 447, 448, 449, 450, or more than 450 amino acids in length. The region of the parent protein may be 5-50, 25-75, 50-100, 75-125, 100-150, 125-175, 150-200, 175-225, 200-250, 225-275, 250-300, 275-325, 300-350, 325-375, 350-400, 375-425, or 400-450 amino acids in length.

[0079] In one embodiment, the DRD may be derived from an ecDHFR protein and include at least one mutation. Non-limiting examples of mutations include M1del, R12Y, R12H, G27S, Y100I, and E129K.

[0080] In one embodiment, the DRD may be derived from an ecDHFR protein and include more than one mutation. Any of the mutations listed herein may be included in the DRD. Non-limiting examples of double mutations include R12Y and Y100I. Non-limiting examples of triple mutations include M1del, R12Y, Y100I; M1del, R12Y, E129K; and M1del, R12H, E129K. Non-limiting examples of four mutations include M1del, R12Y, G27S, Y100I.

[0081] In some embodiments, DRDs derived from ecDHFR may comprise amino acids 2-159 of the parent ecDHFR sequence. This is referred to herein as an M1del mutation.

[0082] In one embodiment, the stimulus is a small molecule that binds to a SRE to post-translationally regulate protein levels. In one aspect, ecDHFR ligands: trimethoprim (TMP) and methotrexate (MTX) are used to stabilize ecDHFR mutants.

[0083] A non-limiting listing of ecDHFR derived drug responsive domains (amino acid and nucleic acid sequences) are listed in Table 3. The position of the mutated amino acid listed in Table 3 is relative to E. coli DHFR (Uniprot ID: P0ABQ4) of SEQ ID NO: 35 (referred to Table 3 as the “WT”. In Table 3, “del” means that the mutation is the deletion of the amino acid at that position relative to the wild type sequence. In Table 3, a ecDHFR derived drug responsive domain comprising amino acids 1-159 of the parent ecDHFR sequence is denoted as ecDHFR with the identity of the mutations within parenthesis e.g. ecDHFR (R12Y, Y100I).

TABLE 3
ecDHFR Derived Drug responsive domains (DDs)

| | | Amino | Nucleic |
|---|---|---|---|
| | | acid SEQ | Acid |
| DRD Identifier | ecDHFR Mutations | ID | SEQ ID |
| ecDHFRDD-1 | ecDHFR (R12Y, Y100I) | 253 | 254 |
| ecDHFRDD-2 | ecDHFR (aa 2-159 of WT, | 255 | 256-263 |
| | R12Y, Y100I) | | |
| ecDHFRDD-3 | ecDHFR (aa 2-159 of WT, | 264 | 265-266 |
| | R12H, E129K) | | |
| ecDHFRDD-4 | ecDHFR (aa 2-159 of WT, | 267 | 268 |
| | R12Y, E129K) | | |
| ecDHFRDD-5 | ecDHFR (aa 2-159 of WT, | 269 | — |
| | R12Y, G27S, Y100I) | | |
| ecDHFRDD-6 | ecDHFR (aa 2-159 of WT, | 6554 | 6555 |
| | Y100A) | | |
| ecDHFRDD-7 | ecDHFR (aa 2-159 of WT, | 6556 | 6557 |
| | Y100C) | | |
| ecDHFRDD-8 | ecDHFR (aa 2-159 of WT, | 6558 | 6559 |
| | Y100D) | | |
| ecDHFRDD-9 | ecDHFR (aa 2-159 of WT, | 6560 | 6561 |
| | Y100E) | | |
| ecDHFRDD-10 | ecDHFR (aa 2-159 of WT, | 6562 | 6563 |
| | Y100F) | | |
| ecDHFRDD-11 | ecDHFR (aa 2-159 of WT, | 6564 | 6565 |
| | Y100G) | | |
| ecDHFRDD-12 | ecDHFR (aa 2-159 of WT, | 6566 | 6567 |
| | Y100H) | | |
| ecDHFRDD-13 | ecDHFR (aa 2-159 of WT, | 6568 | 6569 |
| | Y100I) | | |
| ecDHFRDD-14 | ecDHFR (aa 2-159 of WT, | 6570 | 6571 |
| | Y100K) | | |
| ecDHFRDD-15 | ecDHFR (aa 2-159 of WT, | 6572 | 6573 |
| | Y100L) | | |
| ecDHFRDD-16 | ecDHFR (aa 2-159 of WT, | 6574 | 6575 |
| | Y100M) | | |
| ecDHFRDD-17 | ecDHFR (aa 2-159 of WT, | 6576 | 6577 |
| | Y100N) | | |
| ecDHFRDD-18 | ecDHFR (aa 2-159 of WT, | 6578 | 6579 |
| | Y100P) | | |
| ecDHFRDD-19 | ecDHFR (aa 2-159 of WT, | 6580 | 6581 |
| | Y100Q) | | |
| ecDHFRDD-20 | ecDHFR (aa 2-159 of WT, | 6582 | 6583 |
| | Y100R) | | |
| ecDHFRDD-21 | ecDHFR (aa 2-159 of WT, | 6584 | 6585 |
| | Y100S) | | |
| ecDHFRDD-22 | ecDHFR (aa 2-159 of WT, | 6586 | 6587 |
| | Y100T) | | |
| ecDHFRDD-23 | ecDHFR (aa 2-159 of WT, | 6588 | 6589 |
| | Y100V) | | |
| ecDHFRDD-24 | ecDHFR (aa 2-159 of WT, | 6590 | 6591 |
| | Y100W) | | |
| ecDHFRDD-25 | ecDHFR (aa 2-159 of WT) | 6592 | 6593 |

[0084] In one embodiment, the SRE may include at least one ecDHFR-derived drug responsive domain (DD) such as, but not limited to, ecDHFRDD-1, ecDHFRDD-2, ecDHFRDD-3, ecDHFRDD-4, ecDHFRDD-5, ecDHFRDD-6, ecDHFRDD-7, ecDHFRDD-8, ecDHFRDD-9, ecDHFRDD-10, ecDHFRDD-11, ecDHFRDD-12, ecDHFRDD-13, ecDHFRDD-14, ecDHFRDD-15, ecDHFRDD-16, ecDHFRDD-17, ecDHFRDD-18, ecDHFRDD-19, ecDHFRDD-20, ecDHFRDD-21, ecDHFRDD-22, ecDHFRDD-23, ecDHFRDD-24, and ecDHFRDD-25.

[0085] FK506 Binding Protein (FKBP) Derived Drug Responsive Domains (DRDs)

[0086] In one embodiment, the SRE may include at least one drug responsive domain (DRD) derived from a FK506 binding protein (FKBP) protein or a fragment or variant thereof.

[0087] In one embodiment, the SRE comprises a region of the FKBP protein. The region of the FKBP protein may be 10, 11, 12, 13, 14, 15, 16, 17, 18, 19, 20, 21, 22, 23, 24, 25, 26, 27, 28, 29, 30, 31, 32, 33, 34, 35, 36, 37, 38, 39, 40, 41, 42, 43, 44, 45, 46, 47, 48, 49, 50, 51, 52, 53, 54, 55, 56, 57, 58, 59, 60, 61, 62, 63, 64, 65, 66, 67, 68, 69, 70, 71, 72, 73, 74, 75, 76, 77, 78, 79, 80, 81, 82, 83, 84, 85, 86, 87, 88, 89, 90, 91, 92, 93, 94, 95, 96, 97, 98, 99, 100, 101, 102, 103, 104, 105, 106, 107, 108, 109, 110, 111, 112, 113, 114, 115, 116, 117, 118, 119, 120, 121, 122, 123, 124, 125, 126, 127, 128, 129, 130, 131, 132, 133, 134, 135, 136, 137, 138, 139, 140, 141, 142, 143, 144, 145, 146, 147, 148, 149, 150, 151, 152, 153, 154, 155, 156, 157, 158, 159, 160, 161, 162, 163, 164, 165, 166, 167, 168, 169, 170, 171, 172, 173, 174, 175, 176, 177, 178, 179, 180, 181, 182, 183, 184, 185, 186, 187, 188, 189, 190, 191, 192, 193, 194, 195, 196, 197, 198, 199, 200, 201, 202, 203, 204, 205, 206, 207, 208, 209, 210, 211, 212, 213, 214, 215, 216, 217, 218, 219, 220, 221, 222, 223, 224, 225, 226, 227, 228, 229, 230, 231, 232, 233, 234, 235, 236, 237, 238, 239, 240, 241, 242, 243, 244, 245, 246, 247, 248, 249, 250, 251, 252, 253, 254, 255, 256, 257, 258, 259, 260, 261, 262, 263, 264, 265, 266, 267, 268, 269, 270, 271, 272, 273, 274, 275, 276, 277, 278, 279, 280, 281, 282, 283, 284, 285, 286, 287, 288, 289, 290, 291, 292, 293, 294, 295, 296, 297, 298, 299, 300, 301, 302, 303, 304, 305, 306, 307, 308, 309, 310, 311, 312, 313, 314, 315, 316, 317, 318, 319, 320, 321, 322, 323, 324, 325, 326, 327, 328, 329, 330, 331, 332, 333, 334, 335, 336, 337, 338, 339, 340, 341, 342, 343, 344, 345, 346, 347, 348, 349, 350, 351, 352, 353, 354, 355, 356, 357, 358, 359, 360, 361, 362, 363, 364, 365, 366, 367, 368, 369, 370, 371, 372, 373, 374, 375, 376, 377, 378, 379, 380, 381, 382, 383, 384, 385, 386, 387, 388, 389, 390, 391, 392, 393, 394, 395, 396, 397, 398, 399, 400, 401, 402, 403, 404, 405, 406, 407, 408, 409, 410, 411, 412, 413, 414, 415, 416, 417, 418, 419, 420, 421, 422, 423, 424, 425, 426, 427, 428, 429, 430, 431, 432, 433, 434, 435, 436, 437, 438, 439, 440, 441, 442, 443, 444, 445, 446, 447, 448, 449, 450, or more than 450 amino acids in length. The region of the parent protein may be 5-50, 25-75, 50-100, 75-125, 100-150, 125-175, 150-200, 175-225, 200-250, 225-275, 250-300, 275-325, 300-350, 325-375, 350-400, 375-425, or 400-450 amino acids in length.

[0088] In one embodiment, the DRD may be derived from a FKBP protein and include at least one mutation. Non-limiting examples of mutations include M1del, E32G, F37V, R72G, K106E, and L109P.

[0089] In one embodiment, the DRD may be derived from a FKBP protein and include more than one mutation. Any of the mutations listed herein may be included in the DD. Non-limiting examples of double mutations include M1del, F37V; F37V, L107P. A non-limiting example of triple mutations include M1del, F37V, L107P. A non-limiting example of four mutations include E32G, F37V, R72G, K106E. A non-limiting example of five mutations include M1del, E32G, F37V, R72G, K106E.

[0090] In some embodiments, DRDs derived from FKBP may comprise amino acids 2-108 of the parent FKBP sequence. This is referred to herein as an M1del mutation.

[0091] In one embodiment, the stimulus is a small molecule that binds to a SRE to post-translationally regulate protein levels. In one aspect, FKBP ligand Shield-1 is used to stabilize FKBP mutants.

[0092] A non-limiting listing of FKBP derived drug responsive domains (amino acid and nucleic acid sequences) are listed in Table 4. The position of the mutated amino acid listed in Table 4 is relative to FKBP (Uniprot ID: P62942) of SEQ ID NO: 37 (referred to in Table 4 as the “WT”). In Table 4, “del” means that the mutation is the deletion of the amino acid at that position relative to the wild type sequence. In Table 4, a FKBP derived drug responsive domain comprising amino acids 1-108 of the parent FKBP sequence is denoted as FKBP with the identity of the mutations within parenthesis e.g. FKBP (F37V).

TABLE 4
FKBP Derived Drug responsive domains (DRDs)

| DRD | | Amino acid | Nucleic Acid |
|---|---|---|---|
| Identifier | FKBP Mutations | SEQ ID | SEQ ID |
| FKBPDD-1 | FKBP (2-108 of WT) | 270 | |
| FKBPDD-2 | FKBP (F37V) | 271 | |
| FKBPDD-3 | FKBP (2-108 of WT, F37V) | 272 | 273 |
| FKBPDD-4 | FKBP(F37V, L107P) | 274 | 275-276 |
| FKBPDD-5 | FKBP(2-108 of WT, F37V, | 277 | 278-284 |
| | L107P) | | |
| FKBPDD-6 | FKBP(E32G, F37V, R72G, | 285 | |
| | K106E) | | |
| FKBPDD-7 | FKBP(2-108 of WT, E32G, | 286 | 287-293 |
| | F37V, R72G, K106E) | | |

[0093] In one embodiment, the SRE may include at least one FKBP-derived drug responsive domain (DD) such as, but not limited to, FKBPDD-1, FKBPDD-2, FKBPDD-3, FKBPDD-4, FKBPDD-5, FKBPDD-6, and FKBPDD-7.

[0094] 7. Human Phosphodiesterase (hPDE) Derived Drug Responsive Domains (DRDs)

[0095] In one embodiment, the SRE may include at least one drug responsive domain (DRD) derived from a human phosphodiesterase (hPDE) protein such as, but not limited to, human phosphodiesterase 1A (hPDE1A), human phosphodiesterase 1B (hPDE1B), human phosphodiesterase 1C (hPDE1C), human phosphodiesterase 1D (hPDE1D), human phosphodiesterase 2A (hPDE2A), human phosphodiesterase 3A (hPDE3A), human phosphodiesterase 3B (hPDE3B), human phosphodiesterase 4A (hPDE4A), human phosphodiesterase 4B (hPDE4B), human phosphodiesterase 4C (hPDE4C), human phosphodiesterase 4D (hPDE4D), human phosphodiesterase 6A (hPDE6A), human phosphodiesterase 6B (hPDE6B), human phosphodiesterase 6C (hPDE6C), human phosphodiesterase 7A (hPDE7A), human phosphodiesterase 7B (hPDE7B), human phosphodiesterase 8A (hPDE8A), human phosphodiesterase 8B (hPDE8B), human phosphodiesterase 9A (hPDE9A), human phosphodiesterase 10A (hPDE10A), and human phosphodiesterase 11A (hPDE11A), or a fragment or variant thereof. As a non-limiting example, the SRE comprises at least one DD derived from hPDE1A. As a non-limiting example, the SRE comprises at least one DD derived from hPDE1B. As a non-limiting example, the SRE comprises at least one DD derived from hPDE1C. As a non-limiting example, the SRE comprises at least one DD derived from hPDE1D. As a non-limiting example, the SRE comprises at least one DD derived from hPDE2A. As a non-limiting example, the SRE comprises at least one DD derived from hPDE3A. As a non-limiting example, the SRE comprises at least one DD derived from h hPDE3B. As a non-limiting example, the SRE comprises at least one DD derived from hPDE4A. As a non-limiting example, the SRE comprises at least one DD derived from hPDE4B. As a non-limiting example, the SRE comprises at least one DD derived from hPDE4C. As a non-limiting example, the SRE comprises at least one DD derived from hPDE4D. As a non-limiting example, the SRE comprises at least one DD derived from hPDE6A. As a non-limiting example, the SRE comprises at least one DD derived from hPDE6B. As a non-limiting example, the SRE comprises at least one DD derived from hPDE6C. As a non-limiting example, the SRE comprises at least one DD derived from hPDE7A. As a non-limiting example, the SRE comprises at least one DD derived from hPDE7B. As a non-limiting example, the SRE comprises at least one DD derived from hPDE8A. As a non-limiting example, the SRE comprises at least one DD derived from hPDE8B. As a non-limiting example, the SRE comprises at least one DD derived from hPDE9A. As a non-limiting example, the SRE comprises at least one DD derived from hPDE10A. As a non-limiting example, the SRE comprises at least one DD derived from hPDE11A.

[0096] In one embodiment, the SRE comprises a region of the hPDE protein. The region of the hPDE protein may be 10, 11, 12, 13, 14, 15, 16, 17, 18, 19, 20, 21, 22, 23, 24, 25, 26, 27, 28, 29, 30, 31, 32, 33, 34, 35, 36, 37, 38, 39, 40, 41, 42, 43, 44, 45, 46, 47, 48, 49, 50, 51, 52, 53, 54, 55, 56, 57, 58, 59, 60, 61, 62, 63, 64, 65, 66, 67, 68, 69, 70, 71, 72, 73, 74, 75, 76, 77, 78, 79, 80, 81, 82, 83, 84, 85, 86, 87, 88, 89, 90, 91, 92, 93, 94, 95, 96, 97, 98, 99, 100, 101, 102, 103, 104, 105, 106, 107, 108, 109, 110, 111, 112, 113, 114, 115, 116, 117, 118, 119, 120, 121, 122, 123, 124, 125, 126, 127, 128, 129, 130, 131, 132, 133, 134, 135, 136, 137, 138, 139, 140, 141, 142, 143, 144, 145, 146, 147, 148, 149, 150, 151, 152, 153, 154, 155, 156, 157, 158, 159, 160, 161, 162, 163, 164, 165, 166, 167, 168, 169, 170, 171, 172, 173, 174, 175, 176, 177, 178, 179, 180, 181, 182, 183, 184, 185, 186, 187, 188, 189, 190, 191, 192, 193, 194, 195, 196, 197, 198, 199, 200, 201, 202, 203, 204, 205, 206, 207, 208, 209, 210, 211, 212, 213, 214, 215, 216, 217, 218, 219, 220, 221, 222, 223, 224, 225, 226, 227, 228, 229, 230, 231, 232, 233, 234, 235, 236, 237, 238, 239, 240, 241, 242, 243, 244, 245, 246, 247, 248, 249, 250, 251, 252, 253, 254, 255, 256, 257, 258, 259, 260, 261, 262, 263, 264, 265, 266, 267, 268, 269, 270, 271, 272, 273, 274, 275, 276, 277, 278, 279, 280, 281, 282, 283, 284, 285, 286, 287, 288, 289, 290, 291, 292, 293, 294, 295, 296, 297, 298, 299, 300, 301, 302, 303, 304, 305, 306, 307, 308, 309, 310, 311, 312, 313, 314, 315, 316, 317, 318, 319, 320, 321, 322, 323, 324, 325, 326, 327, 328, 329, 330, 331, 332, 333, 334, 335, 336, 337, 338, 339, 340, 341, 342, 343, 344, 345, 346, 347, 348, 349, 350, 351, 352, 353, 354, 355, 356, 357, 358, 359, 360, 361, 362, 363, 364, 365, 366, 367, 368, 369, 370, 371, 372, 373, 374, 375, 376, 377, 378, 379, 380, 381, 382, 383, 384, 385, 386, 387, 388, 389, 390, 391, 392, 393, 394, 395, 396, 397, 398, 399, 400, 401, 402, 403, 404, 405, 406, 407, 408, 409, 410, 411, 412, 413, 414, 415, 416, 417, 418, 419, 420, 421, 422, 423, 424, 425, 426, 427, 428, 429, 430, 431, 432, 433, 434, 435, 436, 437, 438, 439, 440, 441, 442, 443, 444, 445, 446, 447, 448, 449, 450, or more than 450 amino acids in length. The region of the parent protein may be 5-50, 25-75, 50-100, 75-125, 100-150, 125-175, 150-200, 175-225, 200-250, 225-275, 250-300, 275-325, 300-350, 325-375, 350-400, 375-425, or 400-450 amino acids in length.

[0097] In one embodiment, the DRD may be derived from a PDE protein and include at least one mutation.

[0098] In one embodiment, the DRD may be derived from a PDE5 protein and include at least one mutation. Non-limiting examples of mutations include E535D, E536G, Q541R, S542L, V548M, P549S, S550F, L554R, K555R, I556S, F559L, S560G, F561L, S562G, F564L, F564S, F564I, L569M, T571S, T571I, L573M, C574Y, V585A, V585M, N587S, Q586L, Q586P, Q589E, K591E, H592R, V594I, I599V, K604R, K604E, N605D, N605Y, R607W, R607Q, K608E, N609H, N609Y, A611T, Y612F, Y612W, Y612A, H613L, H613R, W615R, H617L, N620S, M625I, K630R, K633E, N636S, I648V, H653A, D656L, R658H, G659A, N661S, N662Y, S663Y, S663P, Q666H, L675P, Y676D, Y676N, C677R, H678R, I680S, E682A, D687A, H685L, M691I, L693P, I700F, I706N, E708V, Y709H, K710N, T711A, T712S, T712M, I715K, A722V, T723S, T723R, D724Y, D724A, D724N, D724G, L727P, Y728L, K730E, R732L, R732G, R732A, R732V, R7321, R732P, R732F, R732W, R732Y, R732H, R732S, R732T, R732D, R732E, R732Q, R732N, R732M, R732C, R732K, F735L, F736A, F736G, F736L, F736M, F736R, F736W, F736K, F736Q, F736E, F736S, F736P, F736V, F736C, F736Y, F736H, F736I, F736N, F736D, F736T, L738H, N742S, Q743L, F744L, L746S, F755L, F755Y, M758I, M7601, A762T, A762S, D764N, D764G, D764V, D764A, S766F, A767E, I768N, K770Q, W772C, A779T, L781P, T784I, F787V, F787A, K795E, E795R, K795N, E796G, E796D, L797F, I799L, I799T, T802P, D803N, L804P, E808G, S815C, M816A, M816T, F820I, I821A, A823T, I824T, Y829A, T833S, C839S, F840S, R847G, R847T, K848N, K852E, W853F, E858V, and Q859R.

[0099] In one embodiment, the DRD may be derived from a PDE5 protein and include more than one mutation. Any of the mutations listed herein may be included in the DD. Non-limiting examples of double mutations include Y612A, R732L; Y612F, R732L; Y612W, R732L; Y709H, F787V; Y728L, D764N; L569M, T833S; D724A, R732L; D724G, D764G; D724G, K848N; E682A, R732L; F736A, D764N; G659A, T784I; H617L, A722V; H653A, R732L; I556S, E796D; I700F, E796G; K770Q, K848N; L573M, F735L; N605Y, I715K; N609Y, I799L; R732L, D764A; R732L, D764N; R732L, F736A; S550F, L554R; V548M, D803N; V548M, F820I. A non-limiting example of triple mutations include A722V, F755L, M7601; F561L, G659A, T784I; H613L, D724Y, F755Y; L554R, Q589E, A823T; L554R, Q589E, M691I; S542L, E708V, W772C; S562G, L727P, R847T; T571S, V585M, T723S; T712M, M758I, Q859R. A non-limiting example of four mutations include L554R, Q586P, K710N, K730E; Q586L, S663Y, A762T, E808G; T571I, K604R, I706N, E795R; W615R, T723R, A762T, E808G. A non-limiting example of five mutations include F564I, N662Y, H685L, L693P, F736I; P549S, F564I, R658H, A779T, R847G.

[0100] In some embodiments, DRDs derived from PDE5 may comprise amino acids 2-875 of the parent PDE5 sequence. This is referred to herein as an M1del mutation.

[0101] In some embodiments, DRDs are derived from a region of the PDE5 protein. As a non-limiting example, the region is amino acid 535-860 of hPDE5 (SEQ ID NO: 43). As a non-limiting example, the region is amino acid 535-830 of hPDE5 (SEQ ID NO: 44). As a non-limiting example, the region is amino acid 535-836 of hPDE5 (SEQ ID NO: 45). As a non-limiting example, the region is amino acid 567-860 of hPDE5 (SEQ ID NO: 46). As a non-limiting example, the region is amino acid 590-836 of hPDE5 (SEQ ID NO: 47). As a non-limiting example, the region is amino acid 590-860 of hPDE5 (SEQ ID NO: 48).

[0102] In one embodiment, the stimulus is a small molecule that binds to a SRE to post-translationally regulate protein levels. In one aspect, PDE5 ligands Sildenafil, Vardenafil, or Tadalafil are used to stabilize PDE5 mutants.

[0103] A non-limiting listing of PDE5 derived drug responsive domains (amino acid and nucleic acid sequences) are listed in Table 5. The position of the mutated amino acid listed in Table 5 is relative to PDE5 (Uniprot ID: 076074) of SEQ ID NO: 1. In Table 5, “del” means that the mutation is the deletion of the amino acid at that position relative to the wild type sequence.

TABLE 5
PDE5 Derived Drug responsive domains (DRDs)

| | | Amino | Nucleic |
|---|---|---|---|
| DRD | | acid | Acid |
| Identifier | PDE5 region and Mutations) | SEQ ID | SEQ ID |
| PDE5DD-1 | PDE5 (aa 535-860 of WT, W853F) | 294 | 295 |
| PDE5DD-2 | PDE5 (aa 535-860 of WT, I821A) | 296 | 297 |
| PDE5DD-3 | PDE5 (aa 535-860 of WT, Y829A) | 298 | 299 |
| PDE5DD-4 | PDE5 (aa 535-860 of WT, F787A) | 300 | 301 |
| PDE5DD-5 | PDE5 (aa 535-860 of WT, F736A) | 302 | 303-305 |
| PDE5DD-6 | PDE5 (aa 535-860 of WT, Y728L) | 306 | 307 |
| PDE5DD-7 | PDE5 (aa 535-860 of WT, R732L) | 308 | 309-312 |
| PDE5DD-8 | PDE5 (aa 535-860 of WT, M625I) | 313 | 314 |
| PDE5DD-9 | PDE5 (aa 535-860 of WT, D656L) | 315 | 316 |
| PDE5DD-10 | PDE5 (aa 535-860 of WT, E535D) | 317 | — |
| PDE5DD-11 | PDE5 (aa 535-860 of WT, E536G) | 318 | — |
| PDE5DD-12 | PDE5 (aa 535-860 of WT, Q541R) | 319 | — |
| PDE5DD-13 | PDE5 (aa 535-860 of WT, K555R) | 320 | — |
| PDE5DD-14 | PDE5 (aa 535-860 of WT, F559L) | 321 | — |
| PDE5DD-15 | PDE5 (aa 535-860 of WT, F561L) | 322 | — |
| PDE5DD-16 | PDE5 (aa 535-860 of WT, F564L) | 323 | — |
| PDE5DD-17 | PDE5 (aa 535-860 of WT, F564S) | 324 | — |
| PDE5DD-18 | PDE5 (aa 535-860 of WT, K591E) | 325 | — |
| PDE5DD-19 | PDE5 (aa 535-860 of WT, N587S) | 326 | — |
| PDE5DD-20 | PDE5 (aa 535-860 of WT, K604E) | 327 | — |
| PDE5DD-21 | PDE5 (aa 535-860 of WT, K608E) | 328 | — |
| PDE5DD-22 | PDE5 (aa 535-860 of WT, N609H) | 329 | — |
| PDE5DD-23 | PDE5 (aa 535-860 of WT, K630R) | 330 | — |
| PDE5DD-24 | PDE5 (aa 535-860 of WT, K633E) | 331 | — |
| PDE5DD-25 | PDE5 (aa 535-860 of WT, N636S) | 332 | — |
| PDE5DD-26 | PDE5 (aa 535-860 of WT, N661S) | 333 | 334 |
| PDE5DD-27 | PDE5 (aa 535-860 of WT, Y676D) | 335 | — |
| PDE5DD-28 | PDE5 (aa 535-860 of WT, Y676N) | 336 | — |
| PDE5DD-29 | PDE5 (aa 535-860 of WT, C677R) | 337 | — |
| PDE5DD-30 | PDE5 (aa 535-860 of WT, H678R) | 338 | — |
| PDE5DD-31 | PDE5 (aa 535-860 of WT, D687A) | 339 | — |
| PDE5DD-32 | PDE5 (aa 535-860 of WT, T712S) | 340 | — |
| PDE5DD-33 | PDE5 (aa 535-860 of WT, D724N) | 341 | — |
| PDE5DD-34 | PDE5 (aa 535-860 of WT, D724G) | 342 | — |
| PDE5DD-35 | PDE5 (aa 535-860 of WT, L738H) | 343 | — |
| PDE5DD-36 | PDE5 (aa 535-860 of WT, N742S) | 344 | — |
| PDE5DD-37 | PDE5 (aa 535-860 of WT, A762S) | 345 | — |
| PDE5DD-38 | PDE5 (aa 535-860 of WT, D764N) | 346 | — |
| PDE5DD-39 | PDE5 (aa 535-860 of WT, D764G) | 347 | — |
| PDE5DD-40 | PDE5 (aa 535-860 of WT, D764V) | 348 | — |
| PDE5DD-41 | PDE5 (aa 535-860 of WT, S766F) | 349 | — |
| PDE5DD-42 | PDE5 (aa 535-860 of WT, K795E) | 350 | — |
| PDE5DD-43 | PDE5 (aa 535-860 of WT, L797F) | 351 | — |
| PDE5DD-44 | PDE5 (aa 535-860 of WT, I799T) | 352 | — |
| PDE5DD-45 | PDE5 (aa 535-860 of WT, T802P) | 353 | — |
| PDE5DD-46 | PDE5 (aa 535-860 of WT, S815C) | 354 | — |
| PDE5DD-47 | PDE5 (aa 535-860 of WT, M816A) | 355 | — |
| PDE5DD-48 | PDE5 (aa 535-860 of WT, I824T) | 356 | — |
| PDE5DD-49 | PDE5 (aa 535-860 of WT, C839S) | 357 | — |
| PDE5DD-50 | PDE5 (aa 535-860 of WT, K852E) | 358 | — |
| PDE5DD-51 | PDE5 (aa 535-860 of WT, S560G) | 359 | — |
| PDE5DD-52 | PDE5 (aa 535-860 of WT, V585A) | 360 | — |
| PDE5DD-53 | PDE5 (aa 535-860 of WT, I599V) | 361 | — |
| PDE5DD-54 | PDE5 (aa 535-860 of WT, I648V) | 362 | — |
| PDE5DD-55 | PDE5 (aa 535-860 of WT, S663P) | 363 | — |
| PDE5DD-56 | PDE5 (aa 535-860 of WT, L675P) | 364 | — |
| PDE5DD-57 | PDE5 (aa 535-860 of WT, T711A) | 365 | — |
| PDE5DD-58 | PDE5 (aa 535-860 of WT, F744L) | 366 | — |
| PDE5DD-59 | PDE5 (aa 535-860 of WT, L746S) | 367 | — |
| PDE5DD-60 | PDE5 (aa 535-860 of WT, F755L) | 368 | — |
| PDE5DD-61 | PDE5 (aa 535-860 of WT, L804P) | 369 | — |
| PDE5DD-62 | PDE5 (aa 535-860 of WT, M816T) | 370 | — |
| PDE5DD-63 | PDE5 (aa 535-860 of WT, F840S) | 371 | — |
| PDE5DD-64 | PDE5 (aa 535-860 of WT, R732G) | 372 | 373-374 |
| PDE5DD-65 | PDE5 (aa 535-860 of WT, R732A) | 375 | 376-377 |
| PDE5DD-66 | PDE5 (aa 535-860 of WT, R732V) | 378 | 379-380 |
| PDE5DD-67 | PDE5 (aa 535-860 of WT, R732I) | 381 | 382-383 |
| PDE5DD-68 | PDE5 (aa 535-860 of WT, R732P) | 384 | 385-386 |
| PDE5DD-69 | PDE5 (aa 535-860 of WT, R732F) | 387 | 388 |
| PDE5DD-70 | PDE5 (aa 535-860 of WT, R732W) | 389 | 390 |
| PDE5DD-71 | PDE5 (aa 535-860 of WT, R732Y) | 391 | 392-393 |
| PDE5DD-72 | PDE5 (aa 535-860 of WT, R732H) | 394 | 395-396 |
| PDE5DD-73 | PDE5 (aa 535-860 of WT, R732S) | 397 | 398-399 |
| PDE5DD-74 | PDE5 (aa 535-860 of WT, R732T) | 400 | 401-402 |
| PDE5DD-75 | PDE5 (aa 535-860 of WT, R732D) | 403 | 404-405 |
| PDE5DD-76 | PDE5 (aa 535-860 of WT, R732E) | 406 | 407-408 |
| PDE5DD-77 | PDE5 (aa 535-860 of WT, R732Q) | 409 | 410-411 |
| PDE5DD-78 | PDE5 (aa 535-860 of WT, R732N) | 412 | 413-414 |
| PDE5DD-79 | PDE5 (aa 535-860 of WT, R732M) | 415 | 416 |
| PDE5DD-80 | PDE5 (aa 535-860 of WT, R732C) | 417 | 418-419 |
| PDE5DD-81 | PDE5 (aa 535-860 of WT, R732K) | 420 | 421 |
| PDE5DD-82 | PDE5 (aa 535-860 of WT, H653A) | 422 | 423 |
| PDE5DD-83 | PDE5 (aa 535-860 of WT, D764A) | 424 | 425 |
| PDE5DD-84 | PDE5 (aa 535-860 of WT, R658H) | 426 | 427 |
| PDE5DD-85 | PDE5 (aa 535-860 of WT, Q666H) | 428 | 429 |
| PDE5DD-86 | PDE5 (aa 535-860 of WT, L781P) | 430 | 431 |
| PDE5DD-87 | PDE5 (aa 535-860 of WT, A767E) | 432 | 433 |
| PDE5DD-88 | PDE5 (aa 535-860 of WT, Q743L) | 434 | 435 |
| PDE5DD-89 | PDE5 (aa 535-860 of WT, V594I) | 436 | 437 |
| PDE5DD-90 | PDE5 (aa 535-860 of WT, H592R) | 438 | 439 |
| PDE5DD-91 | PDE5 (aa 535-860 of WT, E858V) | 440 | 441 |
| PDE5DD-92 | PDE5 (aa 535-860 of WT, T784I) | 442 | 443 |
| PDE5DD-93 | PDE5 (aa 535-860 of WT, F736G) | 444 | 445 |
| PDE5DD-94 | PDE5 (aa 535-860 of WT, F736L) | 446 | 447 |
| PDE5DD-95 | PDE5 (aa 535-860 of WT, F736M) | 448 | 449 |
| PDE5DD-96 | PDE5 (aa 535-860 of WT, F736R) | 450 | 451 |
| PDE5DD-97 | PDE5 (aa 535-860 of WT, F736W) | 452 | 453 |
| PDE5DD-98 | PDE5 (aa 535-860 of WT, F736K) | 454 | 455 |
| PDE5DD-99 | PDE5 (aa 535-860 of WT, F736Q) | 456 | 457 |
| PDE5DD-100 | PDE5 (aa 535-860 of WT, F736E) | 458 | 459 |
| PDE5DD-101 | PDE5 (aa 535-860 of WT, F736S) | 460 | 461 |
| PDE5DD-102 | PDE5 (aa 535-860 of WT, F736P) | 462 | 463 |
| PDE5DD-103 | PDE5 (aa 535-860 of WT, F736V) | 464 | 465 |
| PDE5DD-104 | PDE5 (aa 535-860 of WT, F736I) | 466 | 467 |
| PDE5DD-105 | PDE5 (aa 535-860 of WT, F736C) | 468 | 469 |
| PDE5DD-106 | PDE5 (aa 535-860 of WT, F736Y) | 470 | 471 |
| PDE5DD-107 | PDE5 (aa 535-860 of WT, F736H) | 472 | 473 |
| PDE5DD-108 | PDE5 (aa 535-860 of WT, F736N) | 474 | 475 |
| PDE5DD-109 | PDE5 (aa 535-860 of WT, F736D) | 476 | 477 |
| PDE5DD-110 | PDE5 (aa 535-860 of WT, F736T) | 478 | 479 |
| PDE5DD-111 | PDE5 (aa 535-860 of WT, I680S) | 480 | 481 |
| PDE5DD-112 | PDE5 (aa 535-860 of WT, A611T) | 482 | 483 |
| PDE5DD-113 | PDE5 (aa 535-860 of WT, I768N) | 484 | 485 |
| PDE5DD-114 | PDE5 (aa 535-860 of WT, R607W) | 486 | 487 |
| PDE5DD-115 | PDE5 (aa 535-860 of WT, N620S) | 488 | 489 |
| PDE5DD-116 | PDE5 (aa 535-860 of WT, C574Y) | 490 | 491 |
| PDE5DD-117 | PDE5 (aa 535-860 of WT, H613R) | 492 | 493 |
| PDE5DD-118 | PDE5 (aa 535-860 of WT, K795N) | 494 | 495 |
| PDE5DD-119 | PDE5 (aa 535-860 of WT, N605D) | 496 | 497 |
| PDE5DD-120 | PDE5 (aa 535-860 of WT, I799L) | 498 | 499 |
| PDE5DD-121 | PDE5 (aa 535-860 of WT, R607Q) | 500 | 501 |
| PDE5DD-122 | PDE5 (aa 535-860 of WT, E682A) | 502 | 503 |
| PDE5DD-123 | PDE5 (aa 535-860 of WT, D724A) | 504 | 505 |
| PDE5DD-124 | PDE5 (aa 590-860 of WT, R732L) | 506 | 507 |
| PDE5DD-125 | PDE5 (aa 567-860 of WT, R732L) | 508 | 509 |
| PDE5DD-126 | PDE5 (aa 590-836 of WT, R732G) | 510 | 511 |
| PDE5DD-127 | PDE5 (aa 590-836 of WT, R732A) | 512 | 513 |
| PDE5DD-128 | PDE5 (aa 590-836 of WT, R732V) | 514 | 515 |
| PDE5DD-129 | PDE5 (aa 590-836 of WT, R732I) | 516 | 517 |
| PDE5DD-130 | PDE5 (aa 590-836 of WT, R732P) | 518 | 519 |
| PDE5DD-131 | PDE5 (aa 590-836 of WT, R732F) | 520 | 521 |
| PDE5DD-132 | PDE5 (aa 590-836 of WT, R732W) | 522 | 523 |
| PDE5DD-133 | PDE5 (aa 590-836 of WT, R732Y) | 524 | 525 |
| PDE5DD-134 | PDE5 (aa 590-836 of WT, R732H) | 526 | 527 |
| PDE5DD-135 | PDE5 (aa 590-836 of WT, R732S) | 528 | 529 |
| PDE5DD-136 | PDE5 (aa 590-836 of WT, R732T) | 530 | 531 |
| PDE5DD-137 | PDE5 (aa 590-836 of WT, R732D) | 532 | 533 |
| PDE5DD-138 | PDE5 (aa 590-836 of WT, R732E) | 534 | 535 |
| PDE5DD-139 | PDE5 (aa 590-836 of WT, R732Q) | 536 | 537 |
| PDE5DD-140 | PDE5 (aa 590-836 of WT, R732N) | 538 | 539 |
| PDE5DD-141 | PDE5 (aa 590-836 of WT, R732M) | 540 | 541 |
| PDE5DD-142 | PDE5 (aa 590-836 of WT, R732C) | 542 | 543 |
| PDE5DD-143 | PDE5 (aa 590-836 of WT, R732K) | 544 | 545 |
| PDE5DD-144 | PDE5 (aa 590-836 of WT, R732L) | 546 | 547 |
| PDE5DD-145 | PDE5 (aa 535-836 of WT, R732L) | 548 | 549 |
| PDE5DD-146 | PDE5 (aa 535-860 of WT, Y612F, | 550 | 551 |
| | R732L) | | |
| PDE5DD-147 | PDE5 (aa 535-860 of WT, Y612W, | 552 | 553 |
| | R732L) | | |
| PDE5DD-148 | PDE5 (aa 535-860 of WT, Y612A, | 554 | 555 |
| | R732L) | | |
| PDE5DD-149 | PDE5 (aa 535-860 of WT, F736A, | 556 | 557 |
| | D764N) | | |
| PDE5DD-150 | PDE5 (aa 535-860 of WT, R732L, | 558 | 559 |
| | D764N) | | |
| PDE5DD-151 | PDE5 (aa 535-860 of WT, R732L, | 560 | 561-562 |
| | F736A) | | |
| PDE5DD-152 | PDE5 (aa 535-860 of WT, H653A, | 563 | 564 |
| | R732L) | | |
| PDE5DD-153 | PDE5 (aa 535-860 of WT, R732L, | 565 | 566 |
| | D764A) | | |
| PDE5DD-154 | PDE5 (aa 535-860 of WT, L573M, | 567 | 568 |
| | F735L) | | |
| PDE5DD-155 | PDE5 (aa 535-860 of WT, Y709H, | 569 | 570 |
| | F787V) | | |
| PDE5DD-156 | PDE5 (aa 535-860 of WT, N605Y, | 571 | 572 |
| | I715K) | | |
| PDE5DD-157 | PDE5 (aa 535-860 of WT, I700F, | 573 | 574 |
| | E796G) | | |
| PDE5DD-158 | PDE5 (aa 535-860 of WT, D724G, | 575 | 576 |
| | K848N) | | |
| PDE5DD-159 | PDE5 (aa 535-860 of WT, I556S, | 577 | 578 |
| | E796D) | | |
| PDE5DD-160 | PDE5 (aa 535-860 of WT, L569M, | 579 | 580 |
| | T833S) | | |
| PDE5DD-161 | PDE5 (aa 535-860 of WT, V548M, | 581 | 582 |
| | D803N) | | |
| PDE5DD-162 | PDE5 (aa 535-860 of WT, G659A, | 583 | 584 |
| | T784I) | | |
| PDE5DD-163 | PDE5 (aa 535-860 of WT, H617L, | 585 | 586 |
| | A722V) | | |
| PDE5DD-164 | PDE5 (aa 535-860 of WT, N609Y, | 587 | 588 |
| | I799L) | | |
| PDE5DD-165 | PDE5 (aa 535-860 of WT, K770Q, | 589 | 590 |
| | K848N) | | |
| PDE5DD-166 | PDE5 (aa 535-860 of WT, V548M, | 591 | 592 |
| | F820I) | | |
| PDE5DD-167 | PDE5 (aa 535-860 of WT, S550F, | 593 | 594 |
| | L554R) | | |
| PDE5DD-168 | PDE5 (aa 535-860 of WT, D724G, | 595 | 596 |
| | D764G) | | |
| PDE5DD-169 | PDE5 (aa 535-860 of WT, Y728L, | 597 | 598 |
| | D764N) | | |
| PDE5DD-170 | PDE5 (aa 535-860 of WT, E682A, | 599 | 600 |
| | R732L) | | |
| PDE5DD-171 | PDE5 (aa 535-860 of WT, D724A, | 601 | 602 |
| | R732L) | | |
| PDE5DD-172 | PDE5 (aa 535-860 of WT, S562G, | 603 | 604 |
| | L727P, R847T) | | |
| PDE5DD-173 | PDE5 (aa 535-860 of WT, T571S, | 605 | 606 |
| | V585M, T723S) | | |
| PDE5DD-174 | PDE5 (aa 535-860 of WT, A722V, | 607 | 608 |
| | F755L, M760I) | | |
| PDE5DD-175 | PDE5 (aa 535-860 of WT, S542L, | 609 | 610 |
| | E708V, W772C) | | |
| PDE5DD-176 | PDE5 (aa 535-860 of WT, T712M, | 611 | 612 |
| | M758I, Q859R) | | |
| PDE5DD-177 | PDE5 (aa 535-860 of WT, H613L, | 613 | 614 |
| | D724Y, F755Y) | | |
| PDE5DD-178 | PDE5 (aa 535-860 of WT, L554R, | 615 | 616 |
| | Q589E, M691I) | | |
| PDE5DD-179 | PDE5 (aa 535-860 of WT, L554R, | 617 | 618 |
| | Q589E, A823T) | | |
| PDE5DD-180 | PDE5 (aa 535-860 of WT, F561L, | 619 | 620 |
| | G659A, T784I) | | |
| PDE5DD-181 | PDE5 (aa 535-860 of WT, W615R, | 621 | 622 |
| | T723R, A762T, E808G) | | |
| PDE5DD-182 | PDE5 (aa 535-860 of WT, L554R, | 623 | 624 |
| | Q586P, K710N, K730E) | | |
| PDE5DD-183 | PDE5 (aa 535-860 of WT, Q586L, | 625 | 626 |
| | S663Y, A762T, E808G) | | |
| PDE5DD-184 | PDE5 (aa 535-860 of WT, T571I, | 627 | 628 |
| | K604R, I706N, E795R) | | |
| PDE5DD-185 | PDE5 (aa 535-860 of WT, F564I, | 629 | 630 |
| | N662Y, H685L, L693P, F736I) | | |
| PDE5DD-186 | PDE5 (aa 535-860 of WT, P549S, | 631 | 632 |
| | F564I, R658H, A779T, R847G) | | |
| PDE5DD-187 | PDE5 (aa 535-860 of WT, R732D, | 6406 | 6407 |
| | F736S) | | |
| PDE5DD-188 | PDE5 (aa 535-860 of WT, R732E, | 6408 | 6409 |
| | F736D) | | |
| PDE5DD-189 | PDE5 (aa 535-860 of WT, R732V, | 6410 | 6411 |
| | F736G) | | |
| PDE5DD-190 | PDE5 (aa 535-860 of WT, R732W, | 6412 | 6413 |
| | F736G) | | |
| PDE5DD-191 | PDE5 (aa 535-860 of WT, R732W, | 6414 | 6415 |
| | F736V) | | |
| PDE5DD-192 | PDE5 (aa 535-860 of WT, R732L, | 6416 | 6417 |
| | F736W) | | |
| PDE5DD-193 | PDE5 (aa 535-860 of WT, R732P, | 6418 | 6419 |
| | F736Q) | | |
| PDE5DD-194 | PDE5 (aa 535-860 of WT, R732A, | 6420 | 6421 |
| | F736A) | | |
| PDE5DD-195 | PDE5 (aa 535-860 of WT, R732S, | 6422 | 6423 |
| | F736G) | | |
| PDE5DD-196 | PDE5 (aa 535-860 of WT, R732T, | 6424 | 6425 |
| | F736P) | | |
| PDE5DD-197 | PDE5 (aa 535-860 of WT, R732M, | 6426 | 6427 |
| | F736H) | | |
| PDE5DD-198 | PDE5 (aa 535-860 of WT, R732Y, | 6428 | 6429 |
| | F736M) | | |
| PDE5DD-199 | PDE5 (aa 535-860 of WT, R732P, | 6430 | 6431 |
| | F736D) | | |
| PDE5DD-200 | PDE5 (aa 535-860 of WT, R732P, | 6432 | 6433 |
| | F736G) | | |
| PDE5DD-201 | PDE5 (aa 535-860 of WT, R732W, | 6434 | 6435 |
| | F736L) | | |
| PDE5DD-202 | PDE5 (aa 535-860 of WT, R732L, | 6436 | 6437 |
| | F736S) | | |
| PDE5DD-203 | PDE5 (aa 535-860 of WT, R732D, | 6438 | 6439 |
| | F736T) | | |
| PDE5DD-204 | PDE5 (aa 535-860 of WT, R732L, | 6440 | 6441 |
| | F736V) | | |
| PDE5DD-205 | PDE5 (aa 535-860 of WT, R732G, | 6442 | 6443 |
| | F736V) | | |
| PDE5DD-206 | PDE5 (aa 535-860 of WT, R732W, | 6444 | 6445 |
| | F736A) | | |
| PDE5DD-207 | PDE5 (aa 535-860 of WT, C574N) | 6446 | 6447 |
| PDE5DD-208 | PDE5 (aa 535-860 of WT, E536K, | 6448 | 6449 |
| | I739W) | | |
| PDE5DD-209 | PDE5 (aa 535-860 of WT, H678F, | 6450 | 6451 |
| | S702F) | | |
| PDE5DD-210 | PDE5 (aa 535-860 of WT, E669G, | 6452 | 6453 |
| | I700T) | | |
| PDE5DD-211 | PDE5 (aa 535-860 of WT, G632S, | 6454 | 6455 |
| | I648T) | | |
| PDE5DD-212 | PDE5 (aa 535-774 of WT, L646S) | 6456 | 6457 |
| PDE5DD-213 | PDE5 (aa 535-860 of WT, A762V) | 6458 | 6459 |
| PDE5DD-214 | PDE5 (aa 535-860 of WT, D640N) | 6460 | 6461 |
| PDE5DD-215 | PDE5 (aa 535-860 of WT, N636S) | 6462 | 6463 |
| PDE5DD-216 | PDE5 (aa 535-860 of WT, Q623R, | 6464 | 6465 |
| | D654G, K741N) | | |
| PDE5DD-217 | PDE5 (aa 535-860 of WT, A673T, | 6466 | 6467 |
| | L756V, C846Y) | | |
| PDE5DD-218 | PDE5 (aa 535-860 of WT, V660A, | 6468 | 6469 |
| | L781F, R794G, C825R, E858G) | | |
| PDE5DD-219 | PDE5 (aa 535-860 of WT, E642G, | 6470 | 6471 |
| | G697D, I813T) | | |
| PDE5DD-220 | PDE5 (aa 535-860 of WT, M758T) | 6472 | 6473 |
| PDE5DD-221 | PDE5 (aa 535-860 of WT, K752E) | 6474 | 6475 |
| PDE5DD-222 | PDE5 (aa 535-860 of WT, C677Y, | 6476 | 6477 |
| | H685R, A722V) | | |
| PDE5DD-223 | PDE5 (aa 535-860 of WT, T639S, | 6478 | 6479 |
| | M816R) | | |
| PDE5DD-224 | PDE5 (aa 535-860 of WT, T537A, | 6480 | 6481 |
| | D558G, I706T, F744L, D764N) | | |
| PDE5DD-225 | PDE5 (aa 535-860 of WT, Q586R, | 6482 | 6483 |
| | D724G) | | |
| PDE5DD-226 | PDE5 (aa 535-860 of WT, F686S) | 6484 | 6485 |
| PDE5DD-227 | PDE5 (aa 535-860 of WT, E539G, | 6486 | 6487 |
| | L738I) | | |
| PDE5DD-228 | PDE5 (aa 535-860 of WT, Q635R, | 6488 | 6489 |
| | E753K, I813T) | | |
| PDE5DD-229 | PDE5 (aa 535-860 of WT, L672P, | 6490 | 6491 |
| | S836L) | | |
| PDE5DD-230 | PDE5 (aa 535-860 of WT, M691T, | 6492 | 6493 |
| | D764N) | | |
| PDE5DD-231 | PDE5 (aa 535-860 of WT, R807G) | 6494 | 6495 |
| PDE5DD-232 | PDE5 (aa 535-860 of WT, R577Q, | 6496 | 6497 |
| | C596R, V660A, I715V, E785K, | | |
| | L856P) | | |
| PDE5DD-233 | PDE5 (aa 535-860 of WT, I720V, | 6498 | 6499 |
| | F820S) | | |
| PDE5DD-234 | PDE5 (aa 535-860 of WT, S695G, | 6500 | 6501 |
| | E707K, I739M, C763R) | | |
| PDE5DD-235 | PDE5 (aa 535-860 of WT, Y709H, | 6502 | 6503 |
| | K812R, L832P) | | |
| PDE5DD-236 | PDE5 (aa 535-860 of WT, N583S, | 6504 | 6505 |
| | K752E, C846S) | | |
| PDE5DD-237 | PDE5 (aa 535-860 of WT, E682G, | 6506 | 6507 |
| | D748N) | | |
| PDE5DD-238 | PDE5 (aa 535-860 of WT, K591R, | 6508 | 6509 |
| | I643T, L856P) | | |
| PDE5DD-239 | PDE5 (aa 535-860 of WT, F619S, | 6510 | 6511 |
| | V818A, Y829C) | | |
| PDE5DD-240 | PDE5 (aa 535-860 of WT, V548E, | 6512 | 6513 |
| | Q589L, K633I, M681T, S702I, | | |
| | K752E, L781P, A857T) | | |
| PDE5DD-241 | PDE5 (aa 535-860 of WT, S652G, | 6514 | 6515 |
| | Q688R) | | |
| PDE5DD-242 | PDE5 (aa 535-860 of WT, E565G) | 6516 | 6517 |
| PDE5DD-243 | PDE5 (aa 535-860 of WT, I774V) | 6518 | 6519 |
| PDE5DD-244 | PDE5 (aa 535-860 of WT, K591R) | 6520 | 6521 |
| PDE5DD-245 | PDE5 (aa 535-860 of WT, F559S, | 6522 | 6523 |
| | Y709C, M760T) | | |
| PDE5DD-246 | PDE5 (aa 535-860 of WT, A649V, | 6524 | 6525 |
| | A650T, K730E, E830K) | | |
| PDE5DD-247 | PDE5 (aa 535-860 of WT, Y728C, | 6526 | 6527 |
| | Q817R) | | |
| PDE5DD-248 | PDE5 (aa 535-860 of WT, L595P, | 6528 | 6529 |
| | K741R) | | |
| PDE5DD-249 | PDE5 (aa 535-860 of WT, R577W, | 6530 | 6531 |
| | W615R, M805T, I821V) | | |

[0104] In one embodiment, the SRE may include at least one PDE5-derived drug responsive domain (DD) such as, but not limited to, PDE5DD-1, PDE5DD-2, PDE5DD-3, PDE5DD-4, PDE5DD-5, PDE5DD-6, PDE5DD-7, PDE5DD-8, PDE5DD-9, PDE5DD-10, PDE5DD-11, PDE5DD-12, PDE5DD-13, PDE5DD-14, PDE5DD-15, PDE5DD-16, PDE5DD-17, PDE5DD-18, PDE5DD-19, PDE5DD-20, PDE5DD-21, PDE5DD-22, PDE5DD-23, PDE5DD-24, PDE5DD-25, PDE5DD-26, PDE5DD-27, PDE5DD-28, PDE5DD-29, PDE5DD-30, PDE5DD-31, PDE5DD-32, PDE5DD-33, PDE5DD-34, PDE5DD-35, PDE5DD-36, PDE5DD-37, PDE5DD-38, PDE5DD-39, PDE5DD-40, PDE5DD-41, PDE5DD-42, PDE5DD-43, PDE5DD-44, PDE5DD-45, PDE5DD-46, PDE5DD-47, PDE5DD-48, PDE5DD-49, PDE5DD-50, PDE5DD-51, PDE5DD-52, PDE5DD-53, PDE5DD-54, PDE5DD-55, PDE5DD-56, PDE5DD-57, PDE5DD-58, PDE5DD-59, PDE5DD-60, PDE5DD-61, PDE5DD-62, PDE5DD-63, PDE5DD-64, PDE5DD-65, PDE5DD-66, PDE5DD-67, PDE5DD-68, PDE5DD-69, PDE5DD-70, PDE5DD-71, PDE5DD-72, PDE5DD-73, PDE5DD-74, PDE5DD-75, PDE5DD-76, PDE5DD-77, PDE5DD-78, PDE5DD-79, PDE5DD-80, PDE5DD-81, PDE5DD-82, PDE5DD-83, PDE5DD-84, PDE5DD-85, PDE5DD-86, PDE5DD-87, PDE5DD-88, PDE5DD-89, PDE5DD-90, PDE5DD-91, PDE5DD-92, PDE5DD-93, PDE5DD-94, PDE5DD-95, PDE5DD-96, PDE5DD-97, PDE5DD-98, PDE5DD-99, PDE5DD-100, PDE5DD-101, PDE5DD-102, PDE5DD-103, PDE5DD-104, PDE5DD-105, PDE5DD-106, PDE5DD-107, PDE5DD-108, PDE5DD-109, PDE5DD-110, PDE5DD-111, PDE5DD-112, PDE5DD-113, PDE5DD-114, PDE5DD-115, PDE5DD-116, PDE5DD-117, PDE5DD-118, PDE5DD-119, PDE5DD-120, PDE5DD-121, PDE5DD-122, PDE5DD-123, PDE5DD-124, PDE5DD-125, PDE5DD-126, PDE5DD-127, PDE5DD-128, PDE5DD-129, PDE5DD-130, PDE5DD-131, PDE5DD-132, PDE5DD-133, PDE5DD-134, PDE5DD-135, PDE5DD-136, PDE5DD-137, PDE5DD-138, PDE5DD-139, PDE5DD-140, PDE5DD-141, PDE5DD-142, PDE5DD-143, PDE5DD-144, PDE5DD-145, PDE5DD-146, PDE5DD-147, PDE5DD-148, PDE5DD-149, PDE5DD-150, PDE5DD-151, PDE5DD-152, PDE5DD-153, PDE5DD-154, PDE5DD-155, PDE5DD-156, PDE5DD-157, PDE5DD-158, PDE5DD-159, PDE5DD-160, PDE5DD-161, PDE5DD-162, PDE5DD-163, PDE5DD-164, PDE5DD-165, PDE5DD-166, PDE5DD-167, PDE5DD-168, PDE5DD-169, PDE5DD-170, PDE5DD-171, PDE5DD-172, PDE5DD-173, PDE5DD-174, PDE5DD-175, PDE5DD-176, PDE5DD-177, PDE5DD-178, PDE5DD-179, PDE5DD-180, PDE5DD-181, PDE5DD-182, PDE5DD-183, PDE5DD-184, PDE5DD-185, PDE5DD-186, PDE5DD-187, PDE5DD-188, PDE5DD-189, PDE5DD-190, PDE5DD-191, PDE5DD-192, PDE5DD-193, PDE5DD-194, PDE5DD-195, PDE5DD-196, PDE5DD-197, PDE5DD-198, PDE5DD-199, PDE5DD-200, PDE5DD-201, PDE5DD-202, PDE5DD-203, PDE5DD-204, PDE5DD-205, PDE5DD-206, PDE5DD-207, PDE5DD-208, PDE5DD-209, PDE5DD-210, PDE5DD-211, PDE5DD-212, PDE5DD-213, PDE5DD-214, PDE5DD-215, PDE5DD-216, PDE5DD-217, PDE5DD-218, PDE5DD-219, PDE5DD-220, PDE5DD-221, PDE5DD-222, PDE5DD-223, PDE5DD-224, PDE5DD-225, PDE5DD-226, PDE5DD-227, PDE5DD-228, PDE5DD-229, PDE5DD-230, PDE5DD-231, PDE5DD-232, PDE5DD-233, PDE5DD-234, PDE5DD-235, PDE5DD-236, PDE5DD-237, PDE5DD-238, PDE5DD-239, PDE5DD-240, PDE5DD-241, PDE5DD-242, PDE5DD-243, PDE5DD-244, PDE5DD-245, PDE5DD-246, PDE5DD-247, PDE5DD-248, and PDE5DD-249.

[0105] 8. PPAR Gamma (PPARg) Derived Drug Responsive Domains (DDs)

[0106] In one embodiment, the SRE may include at least one drug responsive domain (DD) derived from a PPAR gamma (PPARg) protein or a fragment or variant thereof.

[0107] In one embodiment, the SRE comprises a region of the PPARg protein. The region of the PPARg protein may be 10, 11, 12, 13, 14, 15, 16, 17, 18, 19, 20, 21, 22, 23, 24, 25, 26, 27, 28, 29, 30, 31, 32, 33, 34, 35, 36, 37, 38, 39, 40, 41, 42, 43, 44, 45, 46, 47, 48, 49, 50, 51, 52, 53, 54, 55, 56, 57, 58, 59, 60, 61, 62, 63, 64, 65, 66, 67, 68, 69, 70, 71, 72, 73, 74, 75, 76, 77, 78, 79, 80, 81, 82, 83, 84, 85, 86, 87, 88, 89, 90, 91, 92, 93, 94, 95, 96, 97, 98, 99, 100, 101, 102, 103, 104, 105, 106, 107, 108, 109, 110, 111, 112, 113, 114, 115, 116, 117, 118, 119, 120, 121, 122, 123, 124, 125, 126, 127, 128, 129, 130, 131, 132, 133, 134, 135, 136, 137, 138, 139, 140, 141, 142, 143, 144, 145, 146, 147, 148, 149, 150, 151, 152, 153, 154, 155, 156, 157, 158, 159, 160, 161, 162, 163, 164, 165, 166, 167, 168, 169, 170, 171, 172, 173, 174, 175, 176, 177, 178, 179, 180, 181, 182, 183, 184, 185, 186, 187, 188, 189, 190, 191, 192, 193, 194, 195, 196, 197, 198, 199, 200, 201, 202, 203, 204, 205, 206, 207, 208, 209, 210, 211, 212, 213, 214, 215, 216, 217, 218, 219, 220, 221, 222, 223, 224, 225, 226, 227, 228, 229, 230, 231, 232, 233, 234, 235, 236, 237, 238, 239, 240, 241, 242, 243, 244, 245, 246, 247, 248, 249, 250, 251, 252, 253, 254, 255, 256, 257, 258, 259, 260, 261, 262, 263, 264, 265, 266, 267, 268, 269, 270, 271, 272, 273, 274, 275, 276, 277, 278, 279, 280, 281, 282, 283, 284, 285, 286, 287, 288, 289, 290, 291, 292, 293, 294, 295, 296, 297, 298, 299, 300, 301, 302, 303, 304, 305, 306, 307, 308, 309, 310, 311, 312, 313, 314, 315, 316, 317, 318, 319, 320, 321, 322, 323, 324, 325, 326, 327, 328, 329, 330, 331, 332, 333, 334, 335, 336, 337, 338, 339, 340, 341, 342, 343, 344, 345, 346, 347, 348, 349, 350, 351, 352, 353, 354, 355, 356, 357, 358, 359, 360, 361, 362, 363, 364, 365, 366, 367, 368, 369, 370, 371, 372, 373, 374, 375, 376, 377, 378, 379, 380, 381, 382, 383, 384, 385, 386, 387, 388, 389, 390, 391, 392, 393, 394, 395, 396, 397, 398, 399, 400, 401, 402, 403, 404, 405, 406, 407, 408, 409, 410, 411, 412, 413, 414, 415, 416, 417, 418, 419, 420, 421, 422, 423, 424, 425, 426, 427, 428, 429, 430, 431, 432, 433, 434, 435, 436, 437, 438, 439, 440, 441, 442, 443, 444, 445, 446, 447, 448, 449, 450, or more than 450 amino acids in length. The region of the parent protein may be 5-50, 25-75, 50-100, 75-125, 100-150, 125-175, 150-200, 175-225, 200-250, 225-275, 250-300, 275-325, 300-350, 325-375, 350-400, 375-425, or 400-450 amino acids in length.

[0108] 9. Estrogen Receptor (ER) Derived Drug Responsive Domains (DRDs)

[0109] In one embodiment, the SRE may include at least one drug responsive domain (DRD) derived from an Estrogen Receptor (ER) protein or a fragment or variant thereof.

[0110] In one embodiment, the SRE comprises a region of the ER protein. The region of the ER protein may be 10, 11, 12, 13, 14, 15, 16, 17, 18, 19, 20, 21, 22, 23, 24, 25, 26, 27, 28, 29, 30, 31, 32, 33, 34, 35, 36, 37, 38, 39, 40, 41, 42, 43, 44, 45, 46, 47, 48, 49, 50, 51, 52, 53, 54, 55, 56, 57, 58, 59, 60, 61, 62, 63, 64, 65, 66, 67, 68, 69, 70, 71, 72, 73, 74, 75, 76, 77, 78, 79, 80, 81, 82, 83, 84, 85, 86, 87, 88, 89, 90, 91, 92, 93, 94, 95, 96, 97, 98, 99, 100, 101, 102, 103, 104, 105, 106, 107, 108, 109, 110, 111, 112, 113, 114, 115, 116, 117, 118, 119, 120, 121, 122, 123, 124, 125, 126, 127, 128, 129, 130, 131, 132, 133, 134, 135, 136, 137, 138, 139, 140, 141, 142, 143, 144, 145, 146, 147, 148, 149, 150, 151, 152, 153, 154, 155, 156, 157, 158, 159, 160, 161, 162, 163, 164, 165, 166, 167, 168, 169, 170, 171, 172, 173, 174, 175, 176, 177, 178, 179, 180, 181, 182, 183, 184, 185, 186, 187, 188, 189, 190, 191, 192, 193, 194, 195, 196, 197, 198, 199, 200, 201, 202, 203, 204, 205, 206, 207, 208, 209, 210, 211, 212, 213, 214, 215, 216, 217, 218, 219, 220, 221, 222, 223, 224, 225, 226, 227, 228, 229, 230, 231, 232, 233, 234, 235, 236, 237, 238, 239, 240, 241, 242, 243, 244, 245, 246, 247, 248, 249, 250, 251, 252, 253, 254, 255, 256, 257, 258, 259, 260, 261, 262, 263, 264, 265, 266, 267, 268, 269, 270, 271, 272, 273, 274, 275, 276, 277, 278, 279, 280, 281, 282, 283, 284, 285, 286, 287, 288, 289, 290, 291, 292, 293, 294, 295, 296, 297, 298, 299, 300, 301, 302, 303, 304, 305, 306, 307, 308, 309, 310, 311, 312, 313, 314, 315, 316, 317, 318, 319, 320, 321, 322, 323, 324, 325, 326, 327, 328, 329, 330, 331, 332, 333, 334, 335, 336, 337, 338, 339, 340, 341, 342, 343, 344, 345, 346, 347, 348, 349, 350, 351, 352, 353, 354, 355, 356, 357, 358, 359, 360, 361, 362, 363, 364, 365, 366, 367, 368, 369, 370, 371, 372, 373, 374, 375, 376, 377, 378, 379, 380, 381, 382, 383, 384, 385, 386, 387, 388, 389, 390, 391, 392, 393, 394, 395, 396, 397, 398, 399, 400, 401, 402, 403, 404, 405, 406, 407, 408, 409, 410, 411, 412, 413, 414, 415, 416, 417, 418, 419, 420, 421, 422, 423, 424, 425, 426, 427, 428, 429, 430, 431, 432, 433, 434, 435, 436, 437, 438, 439, 440, 441, 442, 443, 444, 445, 446, 447, 448, 449, 450, or more than 450 amino acids in length. The region of the parent protein may be 5-50, 25-75, 50-100, 75-125, 100-150, 125-175, 150-200, 175-225, 200-250, 225-275, 250-300, 275-325, 300-350, 325-375, 350-400, 375-425, or 400-450 amino acids in length.

[0111] In one embodiment, the DRD may be derived from an ER protein and include at least one mutation. Non-limiting examples of mutations include K303R, N304S, T371A, L384M, M421G, N519S, G521G, Y537S.

[0112] In one embodiment, the DRD may be derived from an ER protein and include more than one mutation. Any of the mutations listed herein may be included in the DRD. Non-limiting examples of four mutations include L384M, M421G, G521R, Y537S. Non-limiting examples of six mutations include T371A, L384M, M421G, N519S, G521R, Y537S. Non-limiting examples of eight mutations include K303R, N304S, T371A, L384M, M421G, N519S, G521R, Y537S.

[0113] In some embodiments, DRDs derived from ER may comprise amino acids 2-595 of the parent ER sequence. This is referred to herein as an M1del mutation.

[0114] In one embodiment, the stimulus is a small molecule that binds to a SRE to post-translationally regulate protein levels.

[0115] In some embodiments, DRDs derived from ER may comprise amino acids 2-875 of the parent ER sequence. This is referred to herein as an M1del mutation.

[0116] In some embodiments, DDs are derived from a region of the ER protein. As a non-limiting example, the region is amino acid 305-549 of ER (SEQ ID NO: 76).

[0117] A non-limiting listing of ER drug responsive domain (amino acid and nucleic acid sequences) are listed in Table 6. The position of the mutated amino acid listed in Table 6 is relative to ER (Uniprot ID: P03372.2) of SEQ ID NO: 42. In Table 6, “del” means that the mutation is the deletion of the amino acid at that position relative to the wild type sequence.

TABLE 6
ER Derived Drug responsive domains (DDs)

| | | Amino | Nucleic |
|---|---|---|---|
| DRD | | acid | Acid |
| Identifier | ER Regions and Mutations | SEQ ID | SEQ ID |
| ERDD-1 | ER (aa 305-549 of WT, T371A, L384M, M421G, N519S, | 633 | 634-636 |
| | G521R, Y537S) | | |
| ERDD-2 | ER (aa 305-549 of WT, L384M, M421G, G521R, Y537S) | 637 | 638-640 |
| ERDD-3 | ER (aa 303-549 of WT, K303R, N304S, T371A, L384M, | 641 | — |
| | M421G, N519S, G521R, Y537S) | | |
| ERDD-6 | ER (aa 305-549 of WT, R335G, L384M, M421G, N519S, | 642 | 643 |
| | G521R, Y537S) | | |
| ERDD-7 | ER (aa 305-549 of WT, R335G, L384M, M421G, G521R, | 644 | 645 |
| | E523G, Y537S, A546T) | | |
| ERDD-8 | ER (aa 305-549 of WT, L384M; M421G; T431I; G521R, | 646 | 647 |
| | Y537S) | | |
| ERDD-9 | ER (aa 305-549 of WT, L384M, N413D, M421G, G521R, | 648 | 649 |
| | Y537S) | | |
| ERDD-10 | ER (aa 305-549 of WT, L384M, M421G, N519S, G521R, | 650 | 651 |
| | Y537S) | | |
| ERDD-11 | ER (aa 305-549 of WT, L384M, M421G, Q502R, G521R, | 652 | 653 |
| | Y537S) | | |
| ERDD-12 | ER (aa 305-549 of WT, S305N, L384M, M421G, G442V, | 654 | 655 |
| | G521R, Y537S) | | |
| ERDD-13 | ER (aa 305-549 of WT, L384M, N413F, M421G, G521R, | 656 | 657 |
| | Y537S) | | |
| ERDD-14 | ER (aa 305-549 of WT, L384M, N413L, M421G, G521R, | 658 | 659 |
| | Y537S) | | |
| ERDD-15 | ER (aa 305-549 of WT, L384M, N413Y, M421G, G521R, | 660 | 661 |
| | Y537S) | | |
| ERDD-16 | ER (aa 305-549 of WT, L384M, N413H, M421G, G521R, | 662 | 663 |
| | Y537S) | | |
| ERDD-17 | ER (aa 305-549 of WT, L384M, N413Q, M421G, G521R, | 664 | 665 |
| | Y537S) | | |
| ERDD-18 | ER (aa 305-549 of WT, L384M, N413I, M421G, G521R, | 666 | 667 |
| | Y537S) | | |
| ERDD-19 | ER (aa 305-549 of WT, L384M, N413M, M421G, | 668 | 669 |
| | G521R, Y537S) | | |
| ERDD-20 | ER (aa 305-549 of WT, L384M, N413K, M421G, G521R, | 670 | 671 |
| | Y537S) | | |
| ERDD-21 | ER (aa 305-549 of WT, L384M, N413V, M421G, G521R, | 672 | 673 |
| | Y537S) | | |
| ERDD-22 | ER (aa 305-549 of WT, L384M, N413S, M421G, G521R, | 674 | 675 |
| | Y537S) | | |
| ERDD-23 | ER (aa 305-549 of WT, L384M, N413C, M421G, G521R, | 676 | 677 |
| | Y537S) | | |
| ERDD-24 | ER (aa 305-549 of WT, L384M, N413W, M421G, | 678 | 679 |
| | G521R, Y537S) | | |
| ERDD-25 | ER (aa 305-549 of WT, L384M, N413P, M421G, G521R, | 680 | 681 |
| | Y537S) | | |
| ERDD-26 | ER (aa 305-549 of WT, L384M, N413R, M421G, G521R, | 682 | 683 |
| | Y537S) | | |
| ERDD-27 | ER (aa 305-549 of WT, L384M, N413T, M421G, G521R, | 684 | 685 |
| | Y537S) | | |
| ERDD-28 | ER (aa 305-549 of WT, L384M, N413A, M421G, G521R, | 686 | 687 |
| | Y537S) | | |
| ERDD-29 | ER (aa 305-549 of WT, L384M, N413E, M421G, G521R, | 688 | 689 |
| | Y537S) | | |
| ERDD-30 | ER (aa 305-549 of WT, L384M, N413G, M421G, G521R, | 690 | 691 |
| | Y537S) | | |
| ERDD-31 | ER (aa 305-549 of WT, L384M, M421G, Q502F, G521R, | 692 | 693 |
| | Y537S) | | |
| ERDD-32 | ER (aa 305-549 of WT, L384M, M421G, Q502L, G521R, | 694 | 695 |
| | Y537S) | | |
| ERDD-33 | ER (aa 305-549 of WT, L384M, M421G, Q502Y, G521R, | 696 | 697 |
| | Y537S) | | |
| ERDD-34 | ER (aa 305-549 of WT, L384M, M421G, Q502H, G521R, | 698 | 699 |
| | Y537S) | | |
| ERDD-35 | ER (aa 305-549 of WT, L384M, M421G, Q502I, G521R, | 700 | 701 |
| | Y537S) | | |
| ERDD-36 | ER (aa 305-549 of WT, L384M, M421G, Q502M, G521R, | 702 | 703 |
| | Y537S) | | |
| ERDD-37 | ER (aa 305-549 of WT, L384M, M421G, Q502N, G521R, | 704 | 705 |
| | Y537S) | | |
| ERDD-38 | ER (aa 305-549 of WT, L384M, M421G, Q502K, G521R, | 706 | 707 |
| | Y537S) | | |
| ERDD-39 | ER (aa 305-549 of WT, L384M, M421G, Q502V, G521R, | 708 | 709 |
| | Y537S) | | |
| ERDD-40 | ER (aa 305-549 of WT, L384M, M421G, Q502S, G521R, | 710 | 711 |
| | Y537S) | | |
| ERDD-41 | ER (aa 305-549 of WT, L384M, M421G, Q502C, G521R, | 712 | 713 |
| | Y537S) | | |
| ERDD-42 | ER (aa 305-549 of WT, L384M, M421G, Q502W, G521R, | 714 | 715 |
| | Y537S) | | |
| ERDD-43 | ER (aa 305-549 of WT, L384M, M421G, Q502P, G521R, | 716 | 717 |
| | Y537S) | | |
| ERDD-44 | ER (aa 305-549 of WT, L384M, M421G, Q502T, G521R, | 718 | 719 |
| | Y537S) | | |
| ERDD-45 | ER (aa 305-549 of WT, L384M, M421G, Q502A, G521R, | 720 | 721 |
| | Y537S) | | |
| ERDD-46 | ER (aa 305-549 of WT, L384M, M421G, Q502D, G521R, | 722 | 723 |
| | Y537S) | | |
| ERDD-47 | ER (aa 305-549 of WT, L384M, M421G, Q502E, G521R, | 724 | 725 |
| | Y537S) | | |
| ERDD-48 | ER (aa 305-549 of WT, L384M, M421G, Q502G, G521R, | 726 | 727 |
| | Y537S) | | |

[0118] In one embodiment, the SRE may include at least one ER-derived drug responsive domain (DRD) such as, but not limited to, ERDD-1, ERDD-2, ERDD-3, ERDD-6, ERDD-7, ERDD-8, ERDD-9, ERDD-10, ERDD-11, ERDD-12, ERDD-13, ERDD-14, ERDD-15, ERDD-16, ERDD-17, ERDD-18, ERDD-19, ERDD-20, ERDD-21, ERDD-22, ERDD-23, ERDD-24, ERDD-25, ERDD-26, ERDD-27, ERDD-28, ERDD-29, ERDD-30, ERDD-31, ERDD-32, ERDD-33, ERDD-34, ERDD-35, ERDD-36, ERDD-37, ERDD-38, ERDD-39, ERDD-40, ERDD-41, ERDD-42, ERDD-43, ERDD-44, ERDD-45, ERDD-46, ERDD-47, and ERDD-48.

[0119] In some embodiments, ERDD may include one or more mutations selected from but not limited to N413T, N413H, N413A, N413Q, N413V, N413C, N413K, N413M, N413R, N413S, N413W, N413I, N413E, N413L, N413P, N413F, N413Y, N413G Q502D, Q502H, Q502E, Q502V, Q502A, Q502T, Q502N, Q502K, Q502S, Q502L, Q502Y, Q502W, Q502F, Q502I, Q502G, Q502P, Q502M, Q502C, L384M, M421G, G521R, Y537S, K303R, N304S, S305N, R335G, T371A, T431I, N519S, E523G, A546T, and G442V.

[0120] The present disclosure provides compositions that include effector modules with SREs derived from the whole or portion of a parent protein, such as PDE5 and a first payload which includes in whole or in part the human CD40L (SEQ ID NO: 3820), or a mutant thereof. In one embodiment, the SRE includes amino acids 535-860 of PDE5. In some embodiments, the SRE may include one or more mutations compared to the parent protein. The SRE may include but is not limited to SEQ ID NO: 294, 296, 298, 300, 302, 306, 308, 313, 315, 317, 318, 319, 320, 321, 322, 323, 324, 325, 326, 327, 328, 329, 330, 331, 332, 333, 335, 336, 337, 338, 339, 340, 341, 342, 343, 344, 345, 346, 347, 348, 349, 350, 351, 352, 353, 354, 355, 356, 357, 358, 359, 360, 361, 362, 363, 364, 365, 366, 367, 368, 369, 370, 371, 372, 375, 378, 381, 384, 387, 389, 391, 394, 397, 400, 403, 406, 409, 412, 415, 417, 420, 422, 424, 426, 428, 430, 432, 434, 436, 438, 440, 442, 444, 446, 448, 450, 452, 454, 456, 458, 460, 462, 464, 466, 468, 470, 472, 474, 476, 478, 480, 482, 484, 486, 488, 490, 492, 494, 496, 498, 500, 502, 504, 506, 508, 510, 512, 514, 516, 518, 520, 522, 524, 526, 528, 530, 532, 534, 536, 538, 540, 542, 544, 546, 548, 550, 552, 554, 556, 558, 560, 563, 565, 567, 569, 571, 573, 575, 577, 579, 581, 583, 585, 587, 589, 591, 593, 595, 597, 599, 601, 603, 605, 607, 609, 611, 613, 615, 617, 619, 621, 623, 625, 627, 629, 631, 6406, 6408, 6410, 6412, 6414, 6416, 6418, 6420, 6422, 6424, 6426, 6428, 6430, 6432, 6434, 6436, 6438, 6440, 6442, 6444, 6446, 6448, 6450, 6452, 6454, 6456, 6458, 6460, 6462, 6464, 6466, 6468, 6470, 6472, 6474, 6476, 6478, 6480, 6482, 6484, 6486, 6488, 6490, 6492, 6494, 6496, 6498, 6500, 6502, 6504, 6506, 6508, 6510, 6512, 6514, 6516, 6518, 6520, 6522, 6524, 6526, 6528, or 6530.

[0121] In one embodiment, the SRE includes the mutation R732L and SRE may include the amino acid sequence of SEQ ID NO: 308.

[0122] The SRE described herein may be responsive to or interact with at least one stimulus. In one aspect, the stimulus may be a small molecule such as but not limited to Vardenafil, Tadalafil or Sildenafil. In one aspect, the small molecule is Vardenafil.

[0123] In some aspects, the effector module may include a linker. Such a linker may operably link the SRE to the first payload. In some embodiments, the linker may be a Glycine and Serine containing linker, or a linker known in the art, for example, in any one or more of the following publications, WO 2018/161000; WO 2018/231759; WO 2019/241315; WO 2018/160993; WO 2018/237323; and WO 2018/161038. In one embodiment, the linker comprises the amino acid sequence of SEQ ID NO: 6532.

[0124] In one embodiment, the effector module may be SEQ ID NO: 6534.

[0125] Also provided herein are polynucleotides encoding the compositions described herein as well as vectors encoding the polynucleotides. The present disclosure also provides pharmaceutical compositions that include the compositions described herein and a pharmaceutically acceptable excipient as well as immune cells expressing the compositions described herein.

[0126] Also provided herein is a method of reducing tumor burden in a subject. The methods may include the steps of administering to the subject a therapeutically effective amount of immune cells. The immune cells may include or express a composition comprising a stimulus response element (SRE) operably linked to a first payload. The first payload may include in whole or in part the human CD40L (SEQ ID NO: 3820) or a mutant thereof. The immune cell may also express a pharmaceutical composition that includes the compositions described herein. The methods also involve administering to the subject, a therapeutically effective amount of a stimulus. In one embodiment, the stimulus is a ligand. The ligand may modulate the expression of the first payload to reduce the tumor burden. In some embodiments, the ligand is Vardenafil, Tadalafil, Sildenafil, Shield-1, or Trimethoprim.

[0127] The present disclosure also provides methods for activating dendritic cells in a subject. The methods may include the steps of administering to the subject a therapeutically effective amount of immune cells. The immune cells may include or express a composition comprising a stimulus response element (SRE) operably linked to a first payload. In one embodiment, the immune cell is a T cell. The first payload may include, in whole or in part, human CD40L (SEQ ID NO: 3820) or a mutant thereof. The immune cell may also express a pharmaceutical composition that includes the compositions described herein. The methods also involve administering to the subject a therapeutically effective amount of a stimulus. In one embodiment, the stimulus is a ligand. The methods further may include measuring the dendritic cell activation marker IL12 in the subject in response to the ligand to determine dendritic cell activation. In one embodiment, the dendritic cell may be a myeloid dendritic cell, a plasmacytoid dendritic cell, a CD14+ dendritic cell, a Langerhans cell, or a microglia. In one aspect, the dendritic cell is a myeloid dendritic cell.

[0128] Compositions described herein may further include a CAR. The CAR may include (a) an extracellular target moiety; (b) a transmembrane domain; (c) an intracellular signaling domain; and (d) optionally, one or more co-stimulatory domains. The extracellular target moiety of the CAR may be an scFv. In one embodiment, the scFv may be a CD19 scFv. In some embodiments, the co-stimulatory domain may be present.

[0129] 10. Stimuli of Tunable Protein Expression Systems

[0130] A tunable protein expression system of the present disclosure can be responsive to a stimulus.

[0131] In some embodiments, a stimulus is a ligand. Ligands may be nucleic acid-based, protein-based, lipid based, organic, inorganic or any combination of the foregoing. In some embodiments, ligands may be synthetic molecules. In some embodiments, ligands may be small molecule therapeutic compounds. In some embodiments, ligands may be small molecule drugs previously approved by a regulatory agency, such as the FDA.

[0132] As described in the present disclosure, a tunable protein expression system can exhibit ligand-dependent activity. A ligand can bind to a DRD and stabilize an appended or operably linked protein of interest. Ligands that are known to bind candidate DRDs can be tested for their effect on the activity of a tunable protein expression system.

[0133] In some embodiments, a ligand is cell permeable. In some embodiments, a ligand may be designed to be lipophilic to improve cell permeability.

[0134] In some embodiments, a ligand is a small molecule. A small molecule ligand may be clinically approved to be safe and have appropriate pharmaceutical kinetics and distribution.

[0135] In some embodiments, the ligand may be complexed or bound to one or more other molecules such as, but not limited to, another ligand, a protein, peptide, nucleic acid, lipid, lipid derivative, sterol, steroid, metabolite, metabolite derivative or small molecule. In some embodiments, the ligand stimulus is complexed or bound to one or more different kinds and/or numbers of other molecules. In some embodiments, the ligand stimulus is a multimer of the same kind of ligand. In some embodiments, the ligand stimulus multimer comprises 2, 3, 4, 5, 6, or more monomers.

[0136] 11. DHFR Ligands

[0137] In some embodiments, a ligand of the present disclosure binds to dihydrofolate reductase. In some embodiments, the ligand binds to and inhibits dihydrofolate reductase function and is herein referred to as a dihydrofolate inhibitor.

[0138] In some embodiments, the ligand may be a selective inhibitor of human DHFR. Ligands of the disclosure may also be selective inhibitors of dihydrofolate reductases of bacteria and parasitic organisms such as Pneumocystis spp., Toxoplasma spp., Trypanosoma spp., Mycobacterium spp., and Streptococcus spp. Ligands specific to other DHFR may be modified to improve binding to human dihydrofolate reductase.

[0139] Examples of dihydrofolate inhibitors include, but are not limited to, Trimethoprim (TMP), Methotrexate (MTX), Pralatrexate, Piritrexim, Pyrimethamine, Talotrexin, Chloroguanide, Pentamidine, Trimetrexate, aminopterin, Cl 898 trihydrochloride, Pemetrexed Disodium, Raltitrexed, Sulfaguanidine, Folotyn, Iclaprim and Diaveridine.

[0140] In some embodiments, ligands of the present disclosure may include dihydrofolic acid or any of its derivatives that may bind to human DHFR. In some embodiments, the ligands of the present disclosure may be 2,4, diaminohetrocyclic compounds. In some embodiments, the 4-oxo group in dihydrofolate may be modified to generate DHFR inhibitors. In one example, the 4-oxo group may be replaced by 4-amino group. Various diamino heterocycles, including pteridines, quinazolines, pyridopyrimidines, pyrimidines, and triazines, may also be used as scaffolds to develop DHFR inhibitors and may be used according to the present disclosure.

[0141] In some embodiments, ligands include TMP-derived ligands containing portions of the ligand known to mediate binding to DHFR. Ligands may also be modified to reduce off-target binding to other folate metabolism enzymes and increase specific binding to DHFR.

[0142] 12. ER Ligands

[0143] In some embodiments, a ligand of the present disclosure binds to ER. Ligands may be agonists or antagonists. In some embodiments, the ligand binds to and inhibits ER function and is herein referred to as an ER inhibitor. In some embodiments, the ligand may be a selective inhibitor of human ER. Ligands of the disclosure may also be selective inhibitors of ER of other species. Ligands specific to other ER may be modified to improve binding to human ER.

[0144] Ligands may be ER agonists such as but not limited to endogenous estrogen 17b-estradiol (E2) and the synthetic nonsteroidal estrogen diethylstilbestrol (DES). In some embodiments. The ligands may be ER antagonists, such as ICI-164,384, RU486, tamoxifen, 4-hydroxytamoxifen (4-OHT), fulvestrant, oremifene, lasofoxifene, clomifene, femarelle and ormeloxifene and raloxifene (RAL).

[0145] In some embodiments, the stimulus of the current disclosure may be ER antagonists such as, but not limited to, Bazedoxifene and/or Raloxifene.

[0146] In some embodiments, ligands include Bazedoxifene-derived ligands containing portions of the ligand known to mediate binding to ER. Ligands may also be modified to reduce off-target binding to other folate metabolism enzymes and increase specific binding to ER derived DRDs.

[0147] 13. Phosphodiesterase Ligands

[0148] In some embodiments, ligands of the present disclosure bind to phosphodiesterases. In some embodiments, the ligands bind to and inhibit phosphodiesterase function and are herein referred to as phosphodiesterase inhibitors.

[0149] In some embodiments, the ligand is a small molecule that binds to phosphodiesterase 5. In one embodiment, the small molecule is an hPDE5 inhibitor. Examples of hPDE5 inhibitors include, but are not limited to, Sildenafil, Vardenafil, Tadalafil, Avanafil, Lodenafil, Mirodenafil, Udenafil, Benzamidenafil, Dasantafil, Beminafil, SLx-2101, LAS 34179, UK-343,664, UK-357903, UK-371800, and BMS-341400.

[0150] In some embodiments, ligands include sildenafil-derived ligands containing portions of the ligand known to mediate binding to hPDE5. Ligands may also be modified to reduce off-target binding to phosphodiesterases and increase specific binding to hPDE5.

[0151] In some embodiments, the stimulus may be a ligand that binds to more than one phosphodiesterase. In one embodiment, the stimulus is a pan-phosphodiesterase inhibitor that may bind to two or more hPDEs such as Aminophyline, Paraxanthine, Pentoxifylline, Theobromine, Dipyridamole, Theophyline, Zaprinast, Icariin, CDP-840, Etazolate and Glaucine.

[0152] 14. FKBP Ligands

[0153] In some embodiments, ligands of the present disclosure bind to FKBP, including human FKBP. In some embodiments, the ligand is SLF or Shield-1.

[0154] 15. Stabilization and Destabilization Ratio

[0155] In some embodiments, the present disclosure provides methods for modulating protein, expression, function or level by measuring the stabilization ratio and destabilization ratio. As used herein, the stabilization ratio may be defined as the ratio of expression, function or level of a protein of interest in response to the stimulus to the expression, function or level of the protein of interest in the absence of the stimulus specific to the SRE. In some aspects, the stabilization ratio is at least 1, such as by at least 1-10, 1-20, 1-30, 1-40, 1-50, 1-60, 1-70, 1-80, 1-90, 1-100, 20-30, 20-40, 20-50, 20-60, 20-70, 20-80, 20-90, 20-95, 20-100, 30-40, 30-50, 30-60, 30-70, 30-80, 30-90, 30-95, 30-100, 40-50, 40-60, 40-70, 40-80, 40-90, 40-95, 40-100, 50-60, 50-70, 50-80, 50-90, 50-95, 50-100, 60-70, 60-80, 60-90, 60-95, 60-100, 70-80, 70-90, 70-95, 70-100, 80-90, 80-95, 80-100, 90-95, 90-100 or 95-100. As used herein, the destabilization ratio may be defined as the ratio of expression, function or level of a protein of interest in the absence of the stimulus specific to the effector module to the expression, function or level of the protein of interest, that is expressed constitutively and in the absence of the stimulus specific to the SRE. As used herein “constitutively” refers to the expression, function or level of a protein of interest that is not linked to an SRE, and is therefore expressed both in the presence and absence of the stimulus. In some aspects, the destabilization ratio is at least 0, such as by at least 0.1, 0.2, 0.3, 0.4, 0.5, 0.6, 0.7, 0.8, 0.9, or at least, 0-0.1, 0-0.2, 0-0.3, 0-0.4, 0-0.5, 0-0.6, 0-0.7, 0-0.8, 0-0.9, 0.1-0.2, 0.1-0.3, 0.1-0.4, 0.1-0.5, 0.1-0.6, 0.1-0.7, 0.1-0.8, 0.1-0.9, 0.2-0.3, 0.2-0.4, 0.2-0.5, 0.2-0.6, 0.2-0.7, 0.2-0.8, 0.2-0.9, 0.3-0.4, 0.3-0.5, 0.3-0.6, 0.3-0.7, 0.3-0.8, 0.3-0.9, 0.4-0.5, 0.4-0.6, 0.4-0.7, 0.4-0.8, 0.4-0.9, 0.5-0.6, 0.5-0.7, 0.5-0.8, 0.5-0.9, 0.6-0.7, 0.6-0.8, 0.6-0.9, 0.7-0.8, 0.7-0.9 or 0.8-0.9.

[0156] In some embodiments, the SRE of the effector module may stabilize the payload of interest by a stabilization ratio of 1 or more, wherein the stabilization ratio may comprise the ratio of expression, function or level of the payload of interest in the presence of the stimulus to the expression, function or level of the payload of interest in the absence of the stimulus.

[0157] In some embodiments, the SRE may destabilize the immunotherapeutic agent by a destabilization ratio between 0, and 0.09, wherein the destabilization ratio may comprise the ratio of expression, function or level of the payload of interest in the absence of the stimulus specific to the SRE to the expression, function or level of the payload of interest that is expressed constitutively, and in the absence of the stimulus specific to the SRE.

[0158] 16. Additional Effector Module Features

[0159] The effector module of the present disclosure may further comprise additional components that may be operably linked to either the DRD or the payload or both. In some embodiments, the additional components may include a signal sequence which regulates the distribution of the payload of interest, a cleavage and/or processing feature which facilitate cleavage of the payload from the effector module construct, a targeting and/or penetrating signal which can regulate the cellular localization of the effector module, a tag, and/or one or more linker sequences which link different components of the effector module, regulatory elements, polyadenylation sequences, transmembrane domains, intra tail domains, hinges, tags, cleavage site, leader sequences. Examples of such additional effector module components are described in WO 2018/161000; WO 2018/231759; WO 2019/241315; WO 2018/160993; WO 2018/237323; and WO 2018/161038. In one embodiment, the transmembrane domain region of a first payload may be replaced with a transmembrane domain, variant or fragment thereof, from a second parent protein.

[0160] 17. Payloads

[0161] As used herein a “payload” or “protein of interest” (used interchangeably herein) is any polypeptide, protein or portion thereof that is linked, appended, or operably linked to a DRD of the present disclosure.

[0162] Payloads may include any polypeptide or any protein or fragment thereof. A payload may be a wild-type sequence, a fragment of a wild-type sequence and/or comprise one or more mutations. A payload may be a natural protein from an organism genome, or variants, mutants, and derivatives thereof. The natural protein may be from, for example, a mammalian organism, a bacterium, and a virus. A payload may be a protein or polypeptide encoded by a recombinant nucleic acid molecule, a fusion or chimeric polypeptide, or a polypeptide that functions as part of a protein complex.

[0163] In one example, a payload may be a polypeptide encoded by a nucleic acid sequence from a human genome.

[0164] In some embodiments, a payload may be a variant sequence of a parent polypeptide. In some aspects, the variant sequence may have the same or a similar activity as the reference sequence. Alternatively, the variant may have an altered activity (e.g., increased or decreased) relative to a reference sequence. Generally, variants of a particular polypeptide of the disclosure will have at least about 40%, 45%, 50%, 55%, 60%, 65%, 70%, 75%, 80%, 85%, 90%, 91%, 92%, 93%, 94%, 95%, 96%, 97%, 98%, 99% but less than 100% sequence identity to that particular reference polypeptide as determined by sequence alignment programs known to those skilled in the art.

[0165] 18. Therapeutic Agents as Payloads

[0166] In some embodiments, payloads of the present disclosure may be therapeutic agents. For example, a payload may be a cancer therapeutic agent, a therapeutic agent for an autoimmune disease, an immunotherapeutic agent, an anti-inflammatory agent, an anti-pathogen agent or a gene therapy agent. In some aspects, the immunotherapeutic agent may be an antibody and fragments and variants thereof, a TCR receptor, a chimeric antigen receptor (CAR), a chimeric switch receptor, an antagonist of a co-inhibitory molecule, an agonist of a co-stimulatory molecule, a cytokine, a cytokine receptor, a chemokine, a chemokine receptor, a metabolic factor, a coagulation factor, an enzyme, a homing receptor and a safety switch.

[0167] In some embodiments, payloads of the present disclosure may be immunotherapeutic agents that induce immune responses in an organism. The immunotherapeutic agent may be, but is not limited to, an antibody and fragments and variants thereof, a chimeric antigen receptor (CAR), a chimeric switch receptor, a cytokine, chemokine, a cytokine receptor, a chemokine receptor, a cytokine-cytokine receptor fusion polypeptide, or any agent that induces an immune response, and may include any agent that alters the activity, function or response of an immune cell. In one embodiment, the immunotherapeutic agent induces an anti-cancer immune response in a cell, or in a subject.

[0168] 19. Cytokines, Chemokines and Other Soluble Factors as Payloads

[0169] In some embodiments, payloads of the present disclosure may be cytokines, chemokines, growth factors, and soluble proteins produced by immune cells, cancer cells and other cell types, which act as chemical communicators between cells and tissues within the body. These proteins mediate a wide range of physiological functions, from effects on cell growth, differentiation, migration and survival, to a number of effector activities. For example, activated T cells produce a variety of cytokines for cytotoxic function to eliminate tumor cells.

[0170] In some embodiments, payloads of the present disclosure may be cytokines, and fragments, variants, analogs and derivatives thereof, including but not limited to interleukins, tumor necrosis factors (TNFs), interferons (IFNs), TGF beta and chemokines. In some embodiments, payloads of the present invention may be cytokines that stimulate immune responses. In other embodiments, payloads of the invention may be antagonists of cytokines that negatively impact anti-cancer immune responses.

[0171] For example, the transmembrane of the first payload may be replaced with any of the transmembrane domain, variants or fragments thereof.

[0172] In some embodiments, the payload may be a fusion protein comprising any of the immunotherapeutic agents described and ubiquitin. Within the fusion protein, the ubiquitin may be positioned at the N terminus and the immunotherapeutic agent may be positioned at the C terminus. In one aspect, the immunotherapeutic agent may itself be a fusion protein and the ubiquitin may be located in between the proteins that are fused. The payloads may include a single ubiquitin protein or a chain of ubiquitin proteins. The ubiquitin protein may be linked to the immunotherapeutic agent through a single amino acid.

[0173] 20. Immunotherapeutic Agents

[0174] In some embodiments, payloads of the present disclosure may be immunotherapeutic agents that induce immune responses in an organism. The immunotherapeutic agent may be, but is not limited to, an antibody and fragments and variants thereof, a chimeric antigen receptor (CAR), a chimeric switch receptor, a cytokine, chemokine, a cytokine receptor, a chemokine receptor, a cytokine-cytokine receptor fusion polypeptide, or any agent that induces an immune response. In one embodiment, the immunotherapeutic agent induces an anti-cancer immune response in a cell, or in a subject

[0175] 21. CD40L

[0176] In various embodiments, payloads of the present disclosure include an immunotherapeutic agent. In various embodiments, the immunotherapeutic agent is a CD40 ligand (CD40L) also known as CD154 or TNFRF5, or a mutant comprising one or more amino acid substitutions, deletions or additions to the wild-type sequence of human CD40L. CD40L belongs to the TNF super family and is primarily expressed on T cells. CD40L binds to CD40 expressed on a multitude of immune cells, and initiates a cascade of cellular responses depending on the cell type. CD40L may also bind to α5β1 integrin and αIIbβ3 integrins. CD40L is a type II membrane polypeptide having a cytoplasmic domain at its N-terminus, a transmembrane region and then an extracellular domain at its C-terminus. In some embodiments, the CD40L of the present disclosure may be engineered to bind to only one of its binding partners, e.g. CD40. In some aspects, the CD40L described herein may be capable of binding to all of its cognate binding partners.

[0177] Unless otherwise indicated the full length CD40L is designated herein as “CD40L.” The nucleotide and amino acid sequence of CD40L from mouse and human is well known in the art and can be found, for example, in U.S. Pat. No. 5,962,406 (Armitage et al.). Also included within the meaning of CD40 ligand are variations in the sequence including conservative amino acid changes and the like which do not alter the ability of the ligand to elicit an immune response to a mucin.

[0178] CD40L may bind to CD40 expressed in but not limited to Antigen Presenting Cells (APCs), B cells, monocytes, macrophages, platelets, neutrophils, dendritic cells, endothelial cells, and αSMC (smooth muscle cells). Binding of CD40L to CD40 expressed on dendritic cells may promote dendritic cell (DC) licensing. DCs may be converted to a functional state by an antigen-specific T helper cell in order to activate cytotoxic CD8+ T cells, a process referred to as DC licensing. CD40 engagement on DCs results in DC stimulation as evidenced by the surface expression of costimulatory and MHC molecules; proinflammatory cytokine production (e.g. IL12 and TNF) as well as epitope spreading.

[0179] In some embodiments, CD40L regulated by the tunable protein expression systems described herein may be utilized for the therapy of solid, immunogenic tumors. CD40L may improve the efficacy of solid tumor targeted T cells in immunogenic tumors by activating adaptive and innate immune responses in situ. Regulatable CD40L based biocircuit systems described herein may be desirable since the expression of the endogenous CD40L in T cells is transient. Further, the tumor microenvironment is rich in sheddases that may cleave the endogenous CD40L expressed by T cells. Exogenously expressed constitutive CD40L expression may result in liver toxicity and excessive B cell proliferation resulting in lymphomas (Schmitz et al (2006) Hepatology 44(2):430-9, Vonderheide et al (2007) J Clin Oncol. 1; 25(7):876-83, Sacco et al (2000) Cancer Gene Ther.; 7(10):1299-306); the contents of each of which are incorporated by reference in their entirety). Constitutive (unregulated) expression may lead to CRS, thromboembolic syndromes, autoimmune reactions, AICD due to hyper-immune stimulation and tumor angiogenesis, thereby creating a need for the biocircuits of the disclosure.

[0180] In some embodiments, the immunotherapeutic agent may be a multimer of CD40L molecules such as but not limited to a dimer, a trimer, a tetramer, a pentamer, a hexamer, a septamer, or a heptamer. In one embodiment, the CD40L may form a trimer. Multimerization of CD40L may enhance the signaling via the CD40L/CD40 axis. Binding of trimeric CD40L to CD40 may also initiate CD40 clustering and TRAF activation ultimately leading to NF-κB activation.

[0181] CD40L described herein may be resistant to proteinases and sheddases such as those found in the tumor microenvironment e.g. ADAM10, or ADAM17. The heightened activity of ADAM17 in the tumor microenvironment has been associated with diminished signaling via the CD40/CD40L axis (see Lowe and Corvaia (2016), Int J Cancer Clin Res, 3:058; the contents of which are incorporated by reference in their entirety).

[0182] In some aspects, the CD40L may be co-expressed with a chimeric antigen receptor. CD40L expressed on CART cells may increase the function of CART cells and bystander effector cells via activation of CD40+ immune cells such as but not limited to dendritic cells, macrophages, myeloid cells, B cells, platelets, endothelial cells, epithelial cells, and fibroblasts in the tumor microenvironment as well as the tumor cells themselves. In one embodiment, the payload may be bicistronic construct comprising CD40L and CD19CAR with CD28 and CD3Zeta co-stimulatory domains (see Curran et al. (2015) Mol Ther. 23: 4; 769-778; the contents of which are incorporated by reference in their entirety).

[0183] In some embodiments, cells of the present disclosure may also be engineered to express chimeric antigens receptors described herein in conjunction with CD40L. CD40L may be expressed constitutively or may be use as a payload in the effector modules of the present disclosure. CD40L is involved in dendritic cell antigen presentation; production of IL12, and the generation of CD8+ T-cell immunity. Any of the methods described by Curren et al. to enhance antitumor efficacy of CARs using CD40L may be useful in the present disclosure (Curren et al. Mol Ther. 2015 April; 23(4): 769-778; the contents of which are incorporated by reference in their entirety). In one embodiment, agonistic CD40 antibodies may be useful in the present disclosure. CD40 monoclonal antibodies have shown clinical activity in the absence of disabling toxicity.

[0184] The combination of the T regulatory cells, myeloid derived suppressor cells (MDSCs) and the extensive stromal networks within the tumor microenvironment (TME) can dampen the antitumor immune response by preventing T-cell infiltration and/or activation by current immunotherapies (see Ma et al. A CD40 agonist and PD-1 antagonist antibody reprogram the microenvironment of non-immunogenic tumors to allow T cell-mediated anticancer activity. Cancer Immunol Res Jan. 14, 2019; doi: 10.1158/2326-606.CIR-18-0061; the contents of which are herein incorporated by reference in their entireties). Current CAR T therapies are not effective as the therapeutics have immunosuppression, tumor antigen escape, insufficient CAR T expansion and healthy tissue toxicity.

[0185] The present disclosure addresses these issues with the utilization of an effector module with CD40L as an immunotherapeutic agent, fused directly or indirectly to an SRE comprising a DRD described herein. The CD40L may not be the only immunotherapeutic agent in the effector module. The effector module may also include a CAR construct. The combination of the CD40L and CAR as the immunotherapeutic agent and an SRE may cause any of the following alone or in combination, (1) repolarization of the CD40+ macrophages in the tumor microenvironment to a proinflammatory state, (2) activation of CD40+ dendritic cells to promote epitope spreading which can decrease tumor antigen escape (e.g., decrease the loss of CAR targeted antigens), (3) reverse signaling and cytokine production to enhance the antigen-dependent T cell expansion, and (4) regulatable protein production from the SRE which lowers toxicity of the therapeutic to healthy tissue. As a non-limiting example, an effector module including an SRE fused to a CD40L and CAR immunotherapeutic agent may be used to overcome the loss of CAR targeted antigens (e.g., antigen escape) by causing dendritic cells to recruit tumor infiltration lymphocytes (TILs) which results in the expansion of the group of anti-tumor specific T cells. As a non-limiting example, an effector module including an SRE fused to a CD40L and CAR immunotherapeutic agent may be used to reduce the constraint of the tumor microenvironment (TME) of solid tumors by repolarizing tumor associated macrophages (TAMs) from a suppressive to an inflammatory phenotype. As a non-limiting example, an effector module including an SRE fused to a CD40L and CAR immunotherapeutic agent may be used to increase CAR T cell expansion by causing antigen-dependent T cell expansion.

[0186] In some embodiments, the effector module comprises at least one immunotherapeutic agent. In one embodiment, the immunotherapeutic agent is CD40L. In one embodiment, the effector module comprises two or more immunotherapeutic agents which may be the same type such as two antibodies, or different types such as a CD40L and a CAR construct.

[0187] Provided herein are compositions for inducing an immune response in a cell or a subject. The compositions may include an effector module. The effector module may include a stimulus response element (SRE) operably linked to a first payload. The first payload may include in whole or in part the human CD40L (SEQ ID NO: 3820). In one embodiment, the first payload is the whole CD40L (SEQ ID NO: 3820).

[0188] In one aspect, the first payload may be a region of CD40L (SEQ ID NO: 3820). In one aspect, the region of CD40L may include amino acids 113 to 269 of SEQ ID NO: 3820 (SEQ ID NO: 3822). In one embodiment, the region of CD40L may include amino acids 12-261 of SEQ ID NO: 3820 (SEQ ID NO: 3824). In one embodiment, the region of CD40L may include amino acids 14-261 of SEQ ID NO: 3820 with a deletion in amino acids 110-116 of SEQ ID NO: 3820 (SEQ ID NO: 3826).

[0189] The SRE of the effector module may be derived from the whole or a portion of at least one parent protein, said parent protein selected from the group consisting of ER, ecDHFR, FKBP, PDE5, and hDHFR.

[0190] In one embodiment, the SRE may include one or more mutations as compared to the parent protein.

[0191] In one embodiment, the SRE may be derived from ER and the SRE may include but is not limited to the amino acid sequences listed in Table 6.

[0192] In one embodiment, the SRE may be derived from ecDHFR and the SRE may include but is not limited to the amino acid sequences listed in Table 3.

[0193] In one embodiment, the SRE may be derived from FKBP and the SRE may include but is not limited to the amino acid sequences listed in Table 4.

[0194] In one embodiment, the SRE may be derived from PDE5 and the SRE may include but is not limited to the amino acid sequences listed in Table 5.

[0195] In some aspects, the SRE may be responsive to or interacts with at least one stimulus. In one aspect, the effector module may include a second payload. In one embodiment, the second payload may be an immunotherapeutic agent. In some embodiments, the immunotherapeutic agent may be a Chimeric Antigen Receptor (CAR). The CAR described herein may include (a) an extracellular target moiety; (b) a transmembrane domain; (c) an intracellular signaling domain; and (d) optionally, one or more co-stimulatory domains.

[0196] The extracellular target moiety of the CAR may be an scFv. In some aspects, the extracellular target moiety may be an scFv. In one embodiment, the scFv may be a CD19 scFv. In some embodiments, the CAR includes a transmembrane domain. In some embodiments, the CAR includes an intracellular domain. In some embodiments, the CAR includes a co-stimulatory domain.

[0197] Also provided herein is a polynucleotide encoding the compositions of described herein a vector expressing the polynucleotide, as well as a pharmaceutical composition which include the compositions described herein and a pharmaceutically acceptable excipient.

[0198] The present disclosure also provides an immune cell for various methods of treatment disclosed herein, for example, for the treatment of cancer and adoptive cell transfer which expresses the pharmaceutical compositions. The immune cell may be, for example, a T cell (e.g CD8+ T cell, a CD4+ T cell), a natural killer (NK) cell, a NKT cell, a cytotoxic T lymphocyte (CTL), a tumor infiltrating lymphocyte (TIL), a memory T cell, a regulatory T (Treg) cell, a cytokine-induced killer (CIK) cell, a dendritic cell, a human embryonic stem cell, a mesenchymal stem cell, a hematopoietic stem cell, or a mixture thereof. In one embodiment, the immune cell is a dendritic cell. In one embodiment the immune cell is a CD8+ T cell. In one aspect, the immune cell is a CD4+ T cell.

[0199] Also provided herein are methods of inducing an immune response in a subject. Such methods may include administering to the subject, an effective amount of the immune cell described herein. The immune cell, wherein the immune cell expresses an effector module comprising a stimulus response element (SRE) operably linked to a first payload. The first payload may include in whole or in part, the human CD40L. The SREs expressed by the immune cell may be responsive to or interact with at least one stimulus. The method may further involve exposing the subject to the stimulus, causing the CD40L expression to be modulated. The modulation of CD40L expression induces the immune response. In some aspects, the method may further comprise administering to the subject, an effective amount of CD40 positive cells. In some aspects, the CD40 positive cell may be a dendritic cell, a macrophage, a myeloid cell, a B cell, a platelet, an endothelial cell, an epithelial cell, and a fibroblast.

[0200] The compositions described herein may be used for inducing an immune response. Such compositions may include (a) a first immune cell capable of expressing an effector module that includes CD40L (SEQ ID NO: 3820), or a mutant CD40L as its first payload; as well as a second immune cell expressing CD40L. The first immune cell and the second immune cell may be independently selected from a T cell (e.g CD8+ T cell, a CD4+ T cell), a natural killer (NK) cell, a NKT cell, a cytotoxic T lymphocyte (CTL), a tumor infiltrating lymphocyte (TIL), a memory T cell, a regulatory T (Treg) cell, a cytokine-induced killer (CIK) cell, a dendritic cell, a human embryonic stem cell, a mesenchymal stem cell, a hematopoietic stem cell, dendritic cell, a macrophage, a myeloid cell, a B cell, a platelet, an endothelial cell, an epithelial cell, and a fibroblast.

[0201] The present disclosure also provides methods for activating dendritic cells in a subject. The methods may include the steps of administering to the subject a therapeutically effective amount of immune cells. The immune cells may include or express a composition comprising a stimulus response element (SRE) operably linked to a first payload. In one embodiment, the immune cell is a T cell. The first payload may include, in whole or in part, human CD40L (SEQ ID NO: 3820), or a CD40L mutant as described herein. The immune cell may also express a pharmaceutical composition that includes the compositions described herein. The methods also involve administering to the subject a therapeutically effective amount of a stimulus. In one embodiment, the stimulus is a ligand. The methods further may include measuring the dendritic cell activation marker IL12 in the subject in response to the ligand to determine dendritic cell activation. In one embodiment, the dendritic cell may be a myeloid dendritic cell, a plasmacytoid dendritic cell, a CD14+ dendritic cell, a Langerhans cell, or a microglia. In one aspect, the dendritic cell is a myeloid dendritic cell.

[0202] In one embodiment, the CD40L or mutant thereof, immunotherapeutic agent may be derived from UniProt ID: P29965 (also referred to herein as the “WT”). The payloads of the present disclosure may be a region or portion of CD40L, with or without a mutation in the amino acid or nucleotide sequence encoding such mutant. Non limiting examples of regions of CD40L include but are not limited to amino acids 113-269 of UniProt ID: P2996, wherein the cytoplasmic domain, the transmembrane domain and a portion of the extracellular domain have been removed from UniProt ID: P2996 leaving a portion of the extracellular domain and the receptor binding domain intact. In one embodiment, the payload may be amino acids 14-261 of UniProt ID: P2996, which excludes the cytoplasmic tail of CD40L, thereby may potentially reduce internalization. In one aspect, the payload may be amino acids 14-261 of UniProt ID: P2996 with a deletion in amino acids S110-G116, which renders the CD40L resistant to cleavage by proteolytic enzymes.

[0203] In some embodiments, the mutations may be engineered within CD40L payload such that it does not to bind to or bind with reduced affinity to CD40L endogenously expressed by cells described herein. CD40L is a type II transmembrane protein that forms a trimer on the cell surface. In some embodiments, trimerization occurs through the interaction of amino acid residues 47-261 of SEQ ID NO: 3820. In some embodiments, residues within 47-261 of SEQ ID NO: 3820 may be mutated in the CD40L payload to prevent trimerization (herein referred to as “trimerization mutants.” In some embodiments the residues within 116-261 of SEQ ID NO: 3820 may be mutated. In some aspects, mutations may allow selective trimerization such that a CD40L trimerization mutant may be able to bind to another CD40L trimerization mutant protein but not to a CD40L protein lacking the mutations. Trimerization mutations sites may be sites within the CD40L protein that are involved in the trimerization as determined by the crystal structure of the CD40L trimer. Positions within CD40L that may be mutated include but are not limited to amino acids at position 125, 170, 172, 224, 226 and/or 227 of SEQ ID NO: 3820. In some embodiments, the mutations to CD40L payload to prevent its trimerization with the endogenous CD40L may include but are not limited to Y170G, Y172G, H224G, G226F, G226H, G226W, and/or G227F.

[0204] Sheddases e.g. ADAM10/17 present in the tumor microenvironment can cleave CD40L thereby preventing the successful activation of CD40 by CD40L. Analysis of the sequence of CD40L reveals an ADAM10/17 proteolytic cleavage site. In some embodiments, a deletion of amino acids 1-13 of CD40L may be engineered to reduce internalization. A deletion of amino acids 110-116 of CD40L may also be designed to remove the ADAM10/17 sites. Deletion or mutation of the methionine residue at amino acid position 113 of CD40L may also be utilized to reduce cleave by ADAM10/17 enzymes. In one embodiment, a region or portion of the human CD40L protein may be replaced by the murine CD40L protein sequence to generate a CD40L protein that is resistant to cleavage by ADAM10/17. Any of the CD40L sequences aimed at reducing its shedding as described in US Patent Publication US20180085451A1 and/or U.S. Pat. No. 7,495,090B2 may be used in the effector modules and biocircuits described herein (the contents of each of which are incorporated by reference in their entirety). CD40L may be tethered to the membrane using any of the transmembrane domains. In one embodiment, CD40L may be tethered to the membrane using CD8 derived domains such as but not limited to CD8 transmembrane domain, CD8 hinge domain and/or CD8 cytoplasmic tail.

[0205] In some embodiments the effector modules described herein may include one or more cleavage sites between DD and CD40L. Inclusion of cleavage sites may uncouple the proteolytic turnover of the DD from the payload, thereby altering the levels of expression of the payload independent of the DD. In some embodiments, the addition of the cleavage site my increase expression of the payload. In other aspects, addition of cleavage site may reduce the expression of the payload.

[0206] In some embodiments, the CD40L payload and the SREs described herein may linked.

[0207] CD40L construct components and CD40L constructs are provided in Table 7 and Table 8 respectively. In Table 7 and Table 8, CD40L “WT” refers to Uniprot ID: P29965, hPDE5 “WT” refers to Uniprot ID: 076074 and ER “WT” refers to Uniprot ID: P03372.2.

TABLE 7
CD40L construct components

| | | | NA |
|---|---|---|---|
| | | AA | Se- |
| | | SEQ | quence |
| | | ID | or SEQ |
| Description | AA sequence | NO: | ID NO: |
| Linker (MH) | MH | — | ATGCAT |
| Flexible | GS | — | GGATCC, |
| G/S rich | | | GGATCT |
| linker; | | | GGATCA |
| BamHI Site | | | |
| Linker (SG) | SG | — | TCAGGG |
| Linker (EF) | EF | — | GAATTC |
| Linker | GSSG | 3814 | 3816 |
| (GSSG) | | | |
| Linker | GGSGGGSGGGSG | 6532 | 6533; |
| (GGSGGG | | | 6594- |
| SGGGSG) | | — | 6597 |
| Linker (H) | H | — | CAT |
| Flexible | GS | | GGTTCC, |
| G/S rich | | | GGATCCG |
| linker; | | | GTTCA, |
| BamH1 Site | | | GGATCTG |
| | | | GATCA, |
| | | | GGTAGT |
| Linker (GSG) | GSG | — | GGATC |
| (BamHI-Gly) | | | CGGA, |
| | | | GGATC |
| | | | CGGT, |
| | | | GGATC |
| | | | TGGT; |
| IL2 Signal | MYRMQLLSCIALSLALV | 1230 | 1234; |
| sequence | TNS | | 3817; |
| | | | 3818 |
| CD8α leader | MALPVTALLLPLALLLHA | 870 | 871 |
| | ARP | | |
| ecDHFR | ISLIAALAVDYVIGMENAM | 255 | 263 |
| (aa 2-159 of | PWNLPADLAWFKRNTLNKP | | |
| WT, R12Y, | RVIMGHTWESIGRPLP | | |
| Y100I) | GRKNIILSSQPGTDDRVTWV | | |
| | KSVDEAIAACGDVPEIMVIG | | |
| | GGRVIEQFLPKAQKLYLTHI | | |
| | DAEVEGDTHFPDYEPDDWES | | |
| | VFSEFHDADAQNSHSYCFEI | | |
| | LERR | | |
| FKBP | GVQVETISPGDGRTFPKRGQ | 277 | 3819 |
| (2-108 | TCVVHYTGMLEDGKKVDSSR | | |
| of WT, | DRNKPFKFMLGKQEVIRGWE | | |
| F37V, | EGVAQMSVGQRAKLTISPDY | | |
| L107P) | AYGATGHPGIIPPHATLVFD | | |
| | VELLKPE | | |
| hPDE5 | EETRELQSLAAAVVPSAQTL | 308 | 309-312 |
| (aa 535-860 | KITDFSFSDFELSDLETALC | | |
| of | TIRMFTDLNLVQNFQMKHEV | | |
| WT, R732L) | LCRWILSVKKNYRKNVAYHN | | |
| | WRHAFNTAQCMFAALKAGKI | | |
| | QNKLTDLEILALLIAALSHD | | |
| | LDHRGVNNSYIQRSEHPLAQ | | |
| | LYCHSIMEHHHFDQCLMILN | | |
| | SPGNQILSGLSIEEYKTTLK | | |
| | IIKQAILATDLALYIKRLGE | | |
| | FFELIRKNQFNLEDPHQKEL | | |
| | FLAMLMTACDLSAITKPWPI | | |
| | QQRIAELVATEFFDQGDRER | | |
| | KELNIEPTDLMNREKKNKIP | | |
| | SMQVGFIDAICLQLYEALTH | | |
| | VSEDCFPLLDGCRKNRQKWQ | | |
| | ALAEQQ | | |
| hPDE5 | EETRELOSLAAAVVPSAQTL | 560 | 561-562 |
| (aa 535-860 | KITDFSFSDFELSDLETALC | | |
| of | TIRMFTDLNLVQNFQMKHEV | | |
| WT, R732L, | LCRWILSVKKNYRKNVAYHN | | |
| F736A) | WRHAFNTAQCMFAALKAGKI | | |
| | QNKLTDLEILALLIAALSHD | | |
| | LDHRGVNNSYIQRSEHPLAQ | | |
| | LYCHSIMEHHHFDQCLMILN | | |
| | SPGNQILSGLSIEEYKTTLK | | |
| | IIKQAILATDLALYIKRLGE | | |
| | FAELIRKNQFNLEDPHQKEL | | |
| | FLAMLMTACDLSAITKPWPI | | |
| | QQRIAELVATEFFDQGDRER | | |
| | KELNIEPTDLMNREKKNKIP | | |
| | SMQVGFIDAICLQLYEALTH | | |
| | VSEDCFPLLDGCRKNRQKWQ | | |
| | ALAEQQ | | |
| PDE5 | EETRELQSLAAAVVPSAQTL | 563 | 564 |
| (aa 535-860 | KITDFSFSDFELSDLETALC | | |
| of | TIRMFTDLNLVQNFQMKHEV | | |
| WT, H653A, | LCRWILSVKKNYRKNVAYHN | | |
| R732L) | WRHAFNTAQCMFAALKAGKI | | |
| | QNKLTDLEILALLIAALSAD | | |
| | LDHRGVNNSYIQRSEHPLAQ | | |
| | LYCHSIMEHHHFDQCLMILN | | |
| | SPGNQILSGLSIEEYKTTLK | | |
| | IIKQAILATDLALYIKRLGE | | |
| | FFELIRKNQFNLEDPHQKEL | | |
| | FLAMLMTACDLSAITKPWPI | | |
| | QQRIAELVATEFFDQGDRER | | |
| | KELNIEPTDLMNREKKNKIP | | |
| | SMQVGFIDAICLQLYEALTH | | |
| | VSEDCFPLLDGCRKNRQKWQ | | |
| | ALAEQQ | | |
| ER | SLALSLTADQMVSALLDAEP | 633 | 636 |
| (aa | PILYSEYDPTRPFSEASMMG | | |
| 305-549 of | LLTNLADRELVHMINWAKRV | | |
| WT, | PGFVDLALHDQVHLLECAWM | | |
| T371A, | EILMIGLVWRSMEHPGKLLF | | |
| L384M, | APNLLLDRNQGKCVEGGVEI | | |
| M421G, | FDMLLATSSRFRMMNLQGEE | | |
| N519S, | FVCLKSULLNSGVYTFLSST | | |
| G521R, | LKSLEEKDHIHRVLDKITDT | | |
| Y537S) | LIHLMAKAGLTLQQQHQRLA | | |
| | QLLLILSHIRHMSSKRMEHL | | |
| | YSMKCKNVVPLSDLLLEMLD | | |
| | AHRL | | |
| ER | SLALSLTADQMVSALLDAEP | 648 | 649 |
| (aa 305-549 | PILYSEYDPTRPFSEASMMG | | |
| of | LLTNLADRELVHMINWAKRV | | |
| WT, | PGFVDLTLHDQVHLLECAWM | | |
| L384M, | EILMIGLVWRSMEHPGKLLF | | |
| N413D, | APNLLLDRDQGKCVEGGVEI | | |
| M421G, | FDMLLATSSRFRMMNLQGEE | | |
| G521R, | FVCLKSULLNSGVYTFLSST | | |
| Y537S) | LKSLEEKDHIHRVLDKITDT | | |
| | LIHLMAKAGLTLQQQHQRLA | | |
| | QLLLILSHIRHMSNKRMEHL | | |
| | YSMKCKNVVPLSDLLLEMLD | | |
| | AHRL | | |
| hDHFR | MVGSLNCIVAVSQNMGIGKN | 6548 | 6549 |
| (Q36E, | GDLPWPPLRNEFRYFERMTT | | |
| QI03H, | TSSVEGKQNLVIMGKKTWFS | | |
| Y122I) | IPEKNRPLKGRINLVLSREL | | |
| | KEPPQGAHFLSRSLDDALKL | | |
| | TEHPELANKVDMVWIVGGSS | | |
| | VIKEAMNHPGHLKLF | | |
| | VTRIMQDFESDTFFPEIDLE | | |
| | KYKLLPEYPGVLSDVQEEKG | | |
| | IKYKFEVYEKND | | |
| hDHFR (aa | VGSLNCIVAVSQNMGIGKNG | 145 | 146-148 |
| 2-187 of | DLPWPPLRNEFRYFQRMTTT | | |
| WT, Y122I) | SSVEGKQNLVIMGKKTWFSI | | |
| | PEKNRPLKGRINLVLSRELK | | |
| | EPPQGAHFLSRSLDDALKLT | | |
| | EQPELANKVDMVWIVGGSSV | | |
| | IKEAMNHPGHLKLFVTRIMQ | | |
| | DFESDTFFPEIDLEKYKLLP | | |
| | EYPGVLSDVQEEKGIKYKFE | | |
| | VYEKND | | |
| hDHFR | VGSLNCIVAVSQNMGIGKNG | 6552 | 6553 |
| (aa 2-187 | DLPWPPLRNEFRYFQRMTTT | | |
| of | SSVEGKQNLVIMGRKTWFSI | | |
| WT, K55R, | PEKKRPLKGRINLVLSRELK | | |
| N65K, | EPPQGAHFLSRSLDDALKLT | | |
| Y1221) | EQPELANKVDMVWIVGGSSV | | |
| | IKEAMNHPGHLKLFVTRIMQ | | |
| | DFESDTFFPEIDLEKYKLLP | | |
| | EYPGVLSDVQEEKGIKYKFE | | |
| | VYEKND | | |
| CD40L | MIETYNQTSPRSAATGLPIS | 3820 | 3821 |
| (UniProt | MKIFMYLLTVFLITQMIGSA | | |
| ID: | LFAVYLHRRLDKIEDERNLH | | |
| P29965) | EDFVFMKTIQRCNTGERSLS | | |
| | LLNCEEIKSQFEGFVKDIML | | |
| | NKEETKKENSFEMQKGDQNP | | |
| | QIAAHVISEASSKTTSVLQW | | |
| | AEKGYYTMSNNLVTLENGKQ | | |
| | LTVKRQGLYYIYAQVTFCSN | | |
| | REASSQAPFIASLCLKSPGR | | |
| | FERILLRAANTHSSAKPCGQ | | |
| | QSIHLGGVFELQPGASVFVN | | |
| | VTDPSQVSHGTGFTSFGLLK | | |
| | L | | |
| sCD40L | MQKGDQNPQIAAHVISEASS | 3822 | 3823 |
| (113-269 | KTTSVLQWAEKGYYTMSNNL | | |
| Of WT) | VTLENGKQLTVKRQGLYYIY | | |
| | AQVTFCSNREASSQAPFIAS | | |
| | LCLKSPGRFERILLRAANTH | | |
| | SSAKPCGQQSIHLGGVFELQ | | |
| | PGASVFVNVTDPSQVSHGTG | | |
| | FTSFGLLKL | | |
| CD40L | ATGLPISMKIFMYLLTVFLI | 3824 | 3825 |
| (aa 14-261 | TQMIGSALFAVYLHRRLDKI | | |
| Of WT) | EDERNLHEDFVFMKTIQRCN | | |
| | TGERSLSLLNCEEIKSQFEG | | |
| | FVKD | | |
| | IMLNKEETKKENSFEMQKGD | | |
| | QNPQIAAHVISEASSKTTSV | | |
| | LQWAEKGYYTMSNNLVTLEN | | |
| | GKQLTVKRQGLYYIYAQVTF | | |
| | CSNREASSQAPFIASLCLKS | | |
| | PGRFERILLRAANTHSSAKP | | |
| | CGQQSIHLGGVFELQPGASV | | |
| | VFNVTDPSQVSHGTGFTSFG | | |
| | LLKL | | |
| CD40L | MIETYNQTSPRSAATGLPIS | 3826 | 3827 |
| (aa 1-261 | MKIFMYLLTVFLITQMIGSA | | |
| of | LFAVYLHRRLDKIEDERNLH | | |
| WT, (S110- | EDFVFMKTIQRCNTGERSLS | | |
| 0116) del) | LLNCEEIKSQFEGFVKDIML | | |
| | NKEETKKENDQNPQIAAHVI | | |
| | SEASSKTTSVLQWAEKGYYT | | |
| | MSNNLVTLENGKQLTVKRQG | | |
| | LYYIYAQVTFCSNREASSQA | | |
| | PFIASLCLKSPGRFERILLR | | |
| | AANTHSSAKPCGQQSIHLGG | | |
| | VFELQPGASVFVNVTDPSQV | | |
| | SHGTGFTSFGLLKL | | |
| CD40L | MIETYNQTSPRSAATGLPIS | 6598 | 6599 |
| (H224G, | MKIFMYLLTVFLITQMIGSA | | |
| G226F) | LFAVYLHRRLDKIEDERNLH | | |
| | EDFVFMKTIQRCNTGERSLS | | |
| | LLNCEEIKSQFEGFVKDIML | | |
| | NKEETKKENSFEMQKGDQNP | | |
| | QIAAHVISEASSKTTSVLQW | | |
| | AEKGYYTMSNNLVTLENGKQ | | |
| | LTVKRQGLYYIYAQVTFCSN | | |
| | REASSQAPFIASLCLKSPGR | | |
| | FERILLRAANTHSSAKPCGQ | | |
| | QSIGLFGVFELQPGASVFVN | | |
| | VTDPSQVSHGTGFTSFGLLK | | |
| | L | | |
| CD40L | MIETYNQTSPRSAATGLPIS | 6600 | 6601 |
| (H224G, | MKIFMYLLTVFLITQMIGSA | | |
| G226H) | LFAVYLHRRLDKIEDERNLH | | |
| | EDFVFMKTIQRCNTGERSLS | | |
| | LLNCEEIKSQFEGFVKDIML | | |
| | NKEETKKENSFEMQKGDQNP | | |
| | QIAAHVISEASSKTTSVLQW | | |
| | AEKGYYTMSNNLVTLENGKQ | | |
| | LTVKRQGLYYIYAQVTFCSN | | |
| | REASSQAPFIASLCLKSPGR | | |
| | FERILLRAANTHSSAKPCGQ | | |
| | Q | | |
| | SIGLHGVFELQPGASVFVNV | | |
| | TDPSQVSHGTGFTSFGLLKL | | |
| CD40L | MIETYNQTSPRSAATGLPIS | 6602 | 6603 |
| (Y172G, | MKIFMYLLTVFLITQMIGSA | | |
| G226F) | LFAVYLHRRLDKIEDERNLH | | |
| | EDFVFMKTIQRCNTGERSLS | | |
| | LLNCEEIKSQFEGFVKDIML | | |
| | NKEETKKENSFEMQKGDQNP | | |
| | QIAAHVISEASSKTTSVLQW | | |
| | AEKGYYTMSNNLVTLENGKQ | | |
| | LTVKRQGLYYIGAQVTFCSN | | |
| | REASSQAPFIASLCLKSPGR | | |
| | FERILLRAANTHSSAKPCGQ | | |
| | QSIHLFGVFELQPGASVFVN | | |
| | VTDPSQVSHGTGFTSFGLLK | | |
| | L | | |
| CD40L | MIETYNQTSPRSAATGLPIS | 6604 | 6605 |
| (Y170G, | MKIFMYLLTVFLITQMIGSA | | |
| H224G, | LFAVYLHRRLDKIEDERNLH | | |
| G226W) | EDFVFMKTIQRCNTGERSLS | | |
| | LLNCEEIKSQFEGFVKDIML | | |
| | NKEETKKENSFEMQKGDQNP | | |
| | QIAAHVISEASSKTTSVLQW | | |
| | AEKGYYTMSNNLVTLENGKQ | | |
| | LTVKRQGLYGIYAQVTFCSN | | |
| | REASSQAPFIASLCLKSPGR | | |
| | FERILLRAANTHSSAKPCGQ | | |
| | QSIGLWGVFELQPGASVFVN | | |
| | VTDPSQVSHGTGFTSFGLLK | | |
| | L | | |
| CD40L | MIETYNQTSPRSAATGLPIS | 6606 | 6607 |
| (H125G, | MKIFMYLLTVFLITQMIGSA | | |
| G227F) | LFAVYLHRRLDKIEDERNLH | | |
| | EDFVFMKTIQRCNTGERSLS | | |
| | LLNCEEIKSQFEGFVKDIML | | |
| | NKEETKKENSFEMQKGDQNP | | |
| | QIAAGVISEASSKTTSVLQW | | |
| | AEKGYYTMSNNLVTLENGKQ | | |
| | LTVKRQGLYYIYAQVTFCSN | | |
| | REASSQAPFIASLCLKSPGR | | |
| | FERILLRAANTHSSAKPCGQ | | |
| | QSIHLGFVFELQPGASVFVN | | |
| | VTDPSQVSHGTGFTSFGLLK | | |
| | L | | |
| CD40L | MIETYNQTSPRSAATGLPIS | 6674 | 6675 |
| (S110G, | MKIFMYLLTVFLITQMIGSA | | |
| F111G, | LFAVYLHRRLDKIEDERNLH | | |
| E112S, | EDFVFMKTIQRCNTGERSLS | | |
| M113G, | LLNC | | |
| Q1I4G, | EEIKSQFEGFVKDIMLNKEE | | |
| K115S) | TKKENGGSGGSGDQNPQIAA | | |
| | HVISEASSKTTSVLQWAEKG | | |
| | YYTMSNNLVTLENGKQLTVK | | |
| | RQGLYYIYAQVTFCSNREAS | | |
| | SQAPFIASLCLKSPGRFERI | | |
| | LLRAANTHSSAKPCGQQSIH | | |
| | LGGVFELQPGASVFVNVTDP | | |
| | SQVSHGTGFTSFGLLKL | | |
| CD19 scFv | DIQMTQTTSSLSASLGDRVT | 4049 | 4055 |
| | ISCRASQDISKYLNWYQQKP | | |
| | DGTVKLLIYHTSRLHSGVPS | | |
| | RFSGSGSGTDYSLTISNLEQ | | |
| | EDIATYFCQQGNTLPYTFGG | | |
| | GTKLEITGGGGSGGGGSGGG | | |
| | VKGSELQESGPGLVAPSQSL | | |
| | SVTCTVSGVSLPDYGVSWIR | | |
| | RQPPKGLEWLGVIWGSETTY | | |
| | ALYNSKSRLTIIKDNSKSQV | | |
| | MFLKNSLQTDDTAIYYCAKH | | |
| | YYYGGSYAMDYWGQGTSVTV | | |
| | SS | | |
| CD8a | TTTPAPRPPTPAPTIASQPL | 4866 | 4868 |
| Hinge and | SLRPEACRPAAGGAVHTRGL | | |
| Transmembrane | DFACDIYIWAPLAGTCGVLL | | |
| Domain | LSLVITLYC | | |
| CD28 co- | KRGRKKLLYIFKQPFMRPVQ | 5103 | 5110 |
| stimulatory | TTQEEDGCSCRFPEEEEGGC | | |
| domain; | EL | | |
| 4-1BB | | | |
| intracellular | | | |
| domain | | | |
| CD3 zeta | RVKFSRSADAPAYKQGQNQL | 4990 | 4996 |
| intracellular | YNELNLGRREEYDVLDKRRG | | |
| domain | RDPEMGGKPRRKNPQEGLYN | | |
| | ELQKDKMAEAYSEIGMKGER | | |
| | RRGKGHDGLYQGLSTATKDT | | |
| | YDALHMQALPPR | | |
| P2A cleavage | ATNFSLLKQAGDVEENPGP | 1637 | 1638 |
| site | | | |
| Spacer 7 | — | — | 6536 |
| Spacer 6 | — | — | 6537 |
| IRES | — | — | 6538 |
| CD8 | NHRNRR | 6608 | 6609 |
| Cytoplasmic | | | |
| tail | | | |

TABLE 8
CD40L constructs

| | | AA | NA |
|---|---|---|---|
| | | SEQ | SEQ |
| Construct Name | | ID | ID |
| (Description) | AA sequence | NO: | NO: |
| OT-001661 (MH | MHMIETYNQTSPRSAATGLP | 3828 | 3829 |
| Linker; | ISMKIFMYLLTVFLITQMIG | | |
| CD40L; stop) | SALFAVYLHRRLDKIEDERN | | |
| | LHEDFVFMKTIQRCNTGERS | | |
| | LSLLNCEEIKSQFEGFVKDI | | |
| | MLNKEETKKENSFEMQKGDQ | | |
| | NPQIAAHVISEASSKTTSVL | | |
| | QWAEKGYYTMSNNLVTLENG | | |
| | KQLTVKRQGLYYIYAQVTFC | | |
| | SNREASSQAPFIASLCLKSP | | |
| | GRFERILLRAANTHSSAKPC | | |
| | GQQSIHLGGVFELQPGASVF | | |
| | VNVTDPSQVSHGTGFTSFGL | | |
| | LKL* | | |
| OT-001685 | MGVQVETISPGDGRTFPKRG | 3830 | 3831 |
| (Met; | QTCVVHYTGMLEDGKKVDSS | | |
| FKBP | RDRNKPFKFMLGKQEVIRGW | | |
| (M1del, F37V, | EEGVAQMSVGQRAKLTISPD | | |
| L107P); | YAYGATGHPGIIPPHATLVF | | |
| Flexible G/S | DVELLKPEGSMHMIETYNQT | | |
| rich linker; | SPRSAATGLPISMKIFMYLL | | |
| MH Linker; | TVFLITQMIGSALFAVYLHR | | |
| CD40L; stop) | RLDKIEDERNLHEDFVFMKT | | |
| | IQRCNTGERSLSLLNCEEIK | | |
| | SQFEGFVKDIMLNKEETKKE | | |
| | NSFEMQKGDQNPQIAAHVIS | | |
| | EASSKTTSVLQWAEKGYYTM | | |
| | SNNLVTLENGKQLTVKRQGL | | |
| | YYIYAQVTFCSNREASSQAP | | |
| | FIASLCLKSPGRFERILLRA | | |
| | ANTHSSAKPCGQQSIHLGGV | | |
| | FELQPGASVFVNVTDPSQVS | | |
| | HGTGFTSFGLLKL* | | |
| OT-001662 (Met; | MSGISLIAALAVDYVIGMEN | 3832 | 3833 |
| Linker (SG); | AMPWNLPADLAWFKRNTLNK | | |
| ecDHFR (M1del, | PVIMGRHTWESIGRPLPGRK | | |
| RI2Y, Y100I); | NIILSSQPGTDDRVTWVKSV | | |
| Histidine | DEAIAACGDVPEIMVIGGGR | | |
| residue; | VIEQFLPKAQKLYLTHIDAE | | |
| CD40L; stop) | VEGDTHFPDYEPDDWESVFS | | |
| | EFHDADAQNSHSYCFEILER | | |
| | RHMIETYNQTSPRSAATGLP | | |
| | ISMKIFMYLLTVFLITQMIG | | |
| | SALFAVYLHRRLDKIEDERN | | |
| | LHEDFVFMKTIQRCNTGERS | | |
| | LSLLNCEEIKSQFEGFVKDI | | |
| | MLNKEETKKENSFEMQKGDQ | | |
| | NPQIAAHVISEASSKTTSVL | | |
| | QWAEKGYYTMSNNLVTLENG | | |
| | KQLTVKRQGLYYIYAQVTFC | | |
| | SNREASSQAPFIASLCLKSP | | |
| | GRFERILLRAANTHSSAK | | |
| | PCGQQSIHLGGVFELQPGAS | | |
| | VFVNVTDPSQVSHGTGFTSF | | |
| | GLLKL* | | |
| OT-001666 | MSLALSLTADQMVSALLDAE | 3834 | 3835 |
| (Met; ER | PPILYSEYDPTRPFSEASMM | | |
| (305-549 | GLLTNLADRELVHMINWAKR | | |
| of WT, | VPGFVDLTLHDQVHLLECAW | | |
| L384M, N413D, | MEILMIGLVWRSMEHPGKLL | | |
| M42IG, G521R, | FAPNLLLDRDQGKCVEGGVE | | |
| Y537S); | IFDMLLATSSRFRMMNLQGE | | |
| Histidine; | EFVCLKSIILLNSGVYTFLS | | |
| CD40L; stop) | STLKSLEEKDHIHRVLDKIT | | |
| | DTLIHLMAKAGLTLQQQHQR | | |
| | LAQLLLILSHIRHMSNKRME | | |
| | HLYSMKCKNVVPLSDLLLEM | | |
| | LDAHRLHMIETYNQTSPRSA | | |
| | ATGLPISMKIFMYLLTVFLI | | |
| | TQMIGSALFAVYLHRRLDKI | | |
| | EDERNLHEDFVFMKTIQRCN | | |
| | TGERSLSLLNCEEIKSQFEG | | |
| | FVKDIMLNKEETKKENSFEM | | |
| | QKGDQNPQIAAHVISEASSK | | |
| | TTSVLQWAEKGYYTMSNNLV | | |
| | TLENGKQLTVKRQGLYYIYA | | |
| | QVTFCSNREASSQAPFIASL | | |
| | CLKSPGRFERILLRAANTHS | | |
| | SAKPCGQQSIHLGGVFELQP | | |
| | GASVFVNVTDPSQVSHGTGF | | |
| | TSFGLLKL* | | |
| OT-001667 | MSLALSLTADQMVSALLDAE | 3836 | 3837 |
| (Met; ER | PPILYSEYDPTRPFSEASMM | | |
| (aa 305-549 | GLLTNLADRELVHMINWAKR | | |
| of WT, | VPGFVDLALHDQVHLLECAW | | |
| T371A, L384M, | MEILMIGLVWRSMEHPGKLL | | |
| M421G, N519S, | FAPNLLLDRNQGKCVEGGVE | | |
| G52IR, Y537S); | IFDMLLATSSRFRMMNLQGE | | |
| Histidine; | EFVCLKSIILLNSGVYTFLS | | |
| CD40L; | STLKSLEEKDHIHRVLDKIT | | |
| stop) | DTLIHLMAKAGLTLQQQHQR | | |
| | LAQLLLILSHIRHMSSKRME | | |
| | HLYSMKCKNVVPLSDLLLEM | | |
| | LDAHRLHMIETYNQTSPRSA | | |
| | ATGLPISMKIFMYLLTVFLI | | |
| | TQMIGSALFAVYLHRRLDKI | | |
| | EDERNLHEDFVFMKTIQRCN | | |
| | TGERSLSLLNCEEIKSQFEG | | |
| | FVKDIMLNKEETKKENSFEM | | |
| | QKGDQNPQIAAHVISEASSK | | |
| | TTSVLQWAEKGYYTMSNNLV | | |
| | TLENGKQLTVKRQGLYYIYA | | |
| | QVTFCSNREASSQAPFIASL | | |
| | CLKSPGRFERILLRAANTHS | | |
| | SAKPCGQQSIHLGGVFELQP | | |
| | GASVFVNVTDPSQVSHGTGF | | |
| | TSFGLLKL* | | |
| OT-001672 (IL2 | MYRMQLLSCIALSLALVTNS | 3838 | 3839 |
| signal | GSMHMQKGDQNPQIAAHVI | | |
| sequence; | SEASSKTTSVLQWAE | | |
| Flexible | KGYYTMSNNLVTLENGKQLT | | |
| G/S rich | VKRQGLYYIYAQVTFCSNRE | | |
| linker; | ASSQAPFIASLCLKSPGRFE | | |
| MH Linker; | RILLRAANTHSSAKPCGQQS | | |
| CD40L | IHLGGVFELQPGASVFVNVT | | |
| (aa 113-269 | DPSQVSHGTGFTSFGLLKL* | | |
| of WT); | | | |
| stop) | | | |
| OT-001686 (IL2 | MYRMQLLSCIALSLALVTNS | 3840 | 3841 |
| signal | EFGVQVETISPGDGRTFPKR | | |
| sequence; | GQTCVVHYTGMLEDGKKVDS | | |
| Linker | SRDRNKPFKFMLGKQEVIRG | | |
| (EF); FKBP | WEEGVAQMSVGQRAKLTISP | | |
| (M1del, F37V, | DYAYGATGHPGIIPPHATLV | | |
| L107P); | FDVELLKPEGSMHMQKGDQN | | |
| Flexible G/S | PQIAAHVISEASSKTTSVLQ | | |
| rich linker; | WAEKGYYTMSNNLVTLENGK | | |
| MH Linker; | QLTVKRQGLYYIYAQVTFCS | | |
| CD40L (aa | NREASSQAPFIASLCLKSPG | | |
| 113-269 | RFERILLRAANTHSSAKPCG | | |
| of WT); | QQSIHLGGVFELQPGASVFV | | |
| stop) | NVTDPSQVSHGTGFTSFGLL | | |
| | KL* | | |
| OT-001673 | MYRMQLLSCIALSLALVTNS | 3842 | 3843 |
| (IL2 | GSSGISLIAALAVDYVIGME | | |
| signal | NAMPWNLPADLAWFKRNTLN | | |
| sequence; | KPVIMGRHTWESIGRPLPGR | | |
| Linker | KNIILSSQPGTDDRVTWVKS | | |
| (GSSG); | VDEAIAACGDVPEIMVIGGG | | |
| ccDHFR (Mldel, | RVIEQFLPKAQKLYLTHIDA | | |
| R12Y, | EVEGDTHFPDYEPDDWESVF | | |
| Y100I); | SEFHDADAQNSHSYCFEILE | | |
| Flexible | RRGSMHMQKGDQNPQIAAHV | | |
| G/S rich | ISEASSKTTSVLQWAEKGYY | | |
| linker; | TMSNNLVTLENGKQLTVKRQ | | |
| MH Linker; | GLYYIYAQVTFCSNREASSQ | | |
| CD40L | APFIASLCLKSPGRFERILL | | |
| (aa 113-269 | RAANTHSSAKPCGQQSIHLG | | |
| of WT); | GVFELQPGASVFVNVTDPSQ | | |
| stop) | VSHGTGFTSFGLLKL* | | |
| OT-001674 | MYRMQLLSCIALSLALVTNS | 3844 | 3845 |
| (IL2 | GSEETRELQSLAAAVVPSAQ | | |
| signal | TLKITDFSFSDFELSDLETA | | |
| sequence; | LCTIRMFTDLNLVQNFQMKH | | |
| Flexible | EVLCRWILSVKKNYRKNVAY | | |
| G/S rich | HNWRHAFNTAQCMFAALKAG | | |
| linker; | KIQNKLTDLEILALLIAALS | | |
| hPDE5(aa. | ADLDHRGVNNSYIQRSEHPL | | |
| 535 to 860 | AQLYCHSIMEHHHFDQCLMI | | |
| of WT. | LNSPGNQILSGLSIEEYKTT | | |
| H653A, | LKIIKQAILATDLALYIKRL | | |
| R732L); | GEFFELIRKNQFNLEDPHQK | | |
| Flexible | ELFLAMLMTACDLSAITKPW | | |
| G/S rich | PIQQRIAELVATEFFDQGDR | | |
| linker; | ERKELNIEPTDLMNREKKNK | | |
| MH Linker; | IPSMQVGFIDAICLQLYEAL | | |
| CD40L | THVSEDCFPLLDGCRKNRQK | | |
| (aa 113-269 | WQAL | | |
| of WT); stop) | AEQQGSMHMQKGDQNPQIAA | | |
| | HVISEASSKTTSVLQWAEKG | | |
| | YYTMSNNLVTLENGKQLTVK | | |
| | RQGLYYIYAQVTFCSNREAS | | |
| | SQAPFIASLCLKSPGRFERI | | |
| | LLRAANTHSSAKPCGQQSIH | | |
| | LGGVFELQPGASVFVNVTDP | | |
| | SQVSHGTGFTSFGLLKL* | | |
| OT-001675 (IL2 | MYRMQLLSCIALSLALVTNS | 3846 | 3847 |
| signal | GSEETRELQSLAAAVVPSAQ | | |
| sequence; | TLKITDFSFSDFELSDLETA | | |
| Flexible | LCTIRMFTDLNLVQNFQMKH | | |
| G/S rich | EVLCRWILSVKKNYRKNVAY | | |
| linker; | HNWRHAFNTAQCMFAALKAG | | |
| hPDE5 (aa | KIQNKLTDLEILALLIAALS | | |
| 535-860 | HDLDHRGVNNSYIQRSEHPL | | |
| of WT, | AQLYCHSIMEHHHFDQCLMI | | |
| R732L, | LNSPGNQILSGLSIEEYKTT | | |
| F736A); | LKIIKQAILATDLALYIKRL | | |
| Flexible | GEFAELIRKNQFNLEDPHQK | | |
| G/S rich | ELFLAMLMTACDLSAITKPW | | |
| linker; | PIQQRIAELVATEFFDQGDR | | |
| MH Linker; | ERKELNIEPTDLMNREKKNK | | |
| CD40L | IPSMQVGFIDAICLQLYEAL | | |
| (aa 113-269 | THVSEDCFPLLDGCRKNRQK | | |
| of WT); stop) | WQALAEQQGSMHMQKGDQNP | | |
| | QIAAHVISEASSKTTSVLQW | | |
| | AEKGYYTMSNNLVTLENGKQ | | |
| | LTVKRQGLYYIYAQVTFCSN | | |
| | REASSQAPFIASLCLKSPGR | | |
| | FERILLRAANTHSSAKPCGQ | | |
| | QSIHLGGVFELQPGASVFVN | | |
| | VTDPSQVSHGTGFTSFGLLK | | |
| | L* | | |
| OT-001676 | MYRMQLLSCIALSLALVTNS | 3848 | 3849 |
| (IL2 | GSEETRELQSLAAAVVPSAQ | | |
| signal | TLKITDFSFSDFELSDLETA | | |
| sequence; | LCTIRMFTDLNLVQNFQMKH | | |
| Flexible | EVLCRWILSVKKNYRKNVAY | | |
| G/S rich | HNWRHAFNTAQCMFAALKAG | | |
| linker; | KIQNKLTDLEILALLIAALS | | |
| hPDE5 (aa | HDLDHRGVNNSYIQRSEHPL | | |
| 535-860 of WT, | AQLYCHSIMEHHHFDQCLMI | | |
| R732L); | LNSPGNQILSGLSIEEYKTT | | |
| Flexible | LKIIKQAILATDLALYIKRL | | |
| G/S | GEFFELIRKNQFNLEDPHQK | | |
| rich linker; | ELFLAMLMTACDLSAITKPW | | |
| MH Linker; | PIQQRIAELVATEFFDQGDR | | |
| CD40L (aa | ERKELNIEPTDLMNREKKNK | | |
| 113-269 of WT); | IPSMQVGFIDAICLQLYEA | | |
| stop) | LTHVSEDCFPLLD | | |
| | GCRKNRQKWQALAEQQGSMH | | |
| | MQKGDQNPQIAAHVISEASS | | |
| | KTTSVLQWAEKGYYTMSNNL | | |
| | VTLENGKQLTVKRQGLYYIY | | |
| | AQVTFCSNREASSQAPFIAS | | |
| | LCLKSPGRFERILLR | | |
| | AANTHSSAKPCGQQSIHLGG | | |
| | VFELQPGASVFVNVTDPSQV | | |
| | SHGTGFTSFGLLKL* | | |
| OT-001677 | MYRMQLLSCIALSLALVTNS | 3850 | 3851 |
| (IL2 | GSSLALSLTADQMVSALLDA | | |
| signal | EPPILYSEYDPTRPFSEASM | | |
| sequence; | MGLLTNLADRELVHMINWAK | | |
| Flexible | RVPGFVDLTLHDQVHLLECA | | |
| G/S rich | WMEILMIGLVWRSMEHPGKL | | |
| linker; | LFAPNLLLDRDQGKCVEGGV | | |
| ER (305-549 | EIFDMLLATSSRFRMMNLQG | | |
| of WT, | EEFVCLKSIILLNSGVYTFL | | |
| L384M, | SSTLKSLEEKDHIHRVLDKI | | |
| N413D, | TDTLIHLMAKAGLTLQQQHQ | | |
| M421G, | RLAQLLLILSHIRHMSNKRM | | |
| G52IR, | EHLYSMKCKNVVPLSDLLLE | | |
| Y537S); | MLDAHRLGSMHMQKGDQNPQ | | |
| Flexible | IAAHVISEASSKTTSVLQWA | | |
| G/S rich | EKGYYTMSNNLVTLENGKQL | | |
| linker; | TVKRQGLYYIYAQVTFCSNR | | |
| MH Linker; | EASSQAPFIASLCLKSPGRF | | |
| CD40L | ERILLRAANTHSSAKPCGQQ | | |
| (aa 113-269 | SIHLGGVFELQPGASVFVNV | | |
| of WT); | TDPSQVSHGTGFTSFGLLKL | | |
| stop)) | * | | |
| OT-001684 (IL2 | MYRMQLLSCIALSLALVTNS | 3852 | 3853 |
| signal | GSSLALSLTADQMVSALLDA | | |
| sequence; | EPPILYSEYDPTRPFSEASM | | |
| Flexible | MGLLTNLADRELVHMINWAK | | |
| G/S rich | RVPGFVDLALHDQVHLLECA | | |
| linker; ER | WMEILMIGLVWRSMEHPGKL | | |
| (aa 305-549 | LFAPNLLLDRNQGKCVEGGV | | |
| Of WT, T371A, | EIFDMLLATSSRFRMMNLQG | | |
| L384M, M421G, | EEFVCLKSULLNSGVYTFLS | | |
| N519S, G521R, | STLKSLEEKDHIHRVLDKIT | | |
| Y537S); | DTLIHLMAKAGLTLQQQHQR | | |
| Flexible G/S | LAQLLLILSHIRHMSSKRME | | |
| rich linker; | HLYSMKCKNVVPLSDLLLEM | | |
| MH Linker; | LDAHRLGSMHMQKGDQNPQI | | |
| CD40L (aa | AAHVISEASSKTTSVLQWAE | | |
| 113-269 | KGYYTMSNNLVTLENGKQLT | | |
| of WT); | VKRQGLYYIYAQVTFCSNRE | | |
| stop) | ASSQAPFIASLCLKSPGRFE | | |
| | RILLRAANTHSSAKPCGQQS | | |
| | IHLGGVFELQPGASVFVNVT | | |
| | DPSQVSHGTGFTSFGLLKL* | | |
| OT-001669 | MHATGLPISMKIFMYLLTVF | 3854 | 3855 |
| (Linker | LITQMIGSALFAVYLHRRLD | | |
| (MH); CD40L (aa | KIEDERNLHEDFVFMKTIQR | | |
| 14-261 of WT); | CNTGERSLSLLNCEEIKSQF | | |
| stop) | EGFVKDIMLNKEETKKENSF | | |
| | EMQKGDQNPQIAAHVISEAS | | |
| | SKTTSVLQWAEKGYYTMS | | |
| | NNLVTLENGKQLTVKRQGLY | | |
| | YIYAQVTFCSNREASSQAPF | | |
| | IASLCLKSPGRFERILLRAA | | |
| | NTHSSAKPCGQQSIHLGGVF | | |
| | ELQPGASVFVNVTDPSQVSH | | |
| | GTGFTSFGLLKL* | | |
| OT-001668 | MHMIETYNQTSPRSAATGLP | 3856 | 3857 |
| (Linker | ISMKIFMYLLTVFLITQMIG | | |
| (MH); CD40L | SALFAVYLHRRLDKIEDERN | | |
| (aa 1-261 of | LHEDFVFMKTIQRCNTGERS | | |
| WT, (S110- | LSLLNCEEIKSQFEGFVKDI | | |
| G116) del); | MLNKEETKKENDQNPQIAAH | | |
| stop) | VISEASSKTTSVLQWAEKGY | | |
| | YTMSNNLVTLENGKQLTVKR | | |
| | QGLYYIYAQVTFCSNREASS | | |
| | QAPFIASLCLKSPGRFERIL | | |
| | LRAANTHSSAKPCGQQSIHL | | |
| | GGVFELQPGASVFVNVTDPS | | |
| | QVSHGTGFTSFGLLKL* | | |
| OT-001663 | MEETRELQSLAAAVVPSAQT | 6402 | 6403 |
| (Met; | LKITDFSFSDFELSDLETAL | | |
| hPDE5 | CTIRMFTDLNLVQNFQMKHE | | |
| (aa 535-860 | VLCRWILSVKKNYRKNVAYH | | |
| of WT, H653A, | NWRHAFNTAQCMFAALKAGK | | |
| R732L); | IQNKLTDLEILALLIAALSA | | |
| MH Linker; | DLDHRGVNNSYIQRSEHPLA | | |
| CD40L; stop) | QLYCHSIMEHHHFDQCLMIL | | |
| | NSPGNQILSGLSIEEYKTTL | | |
| | KIIKQAILATDLALYIKRLG | | |
| | EFFELIRKNQFNLEDPHQKE | | |
| | LFLAMLMTACDLSAITKPWP | | |
| | IQQRIAELVATEFFDQGDRE | | |
| | RKELNIEPTDLMNREKKNKI | | |
| | PSMQVGFIDAICLQLYEALT | | |
| | HVSEDCFPLLDGCRKNRQKW | | |
| | QALAEQQMHMIETYNQTSPR | | |
| | SAATGLPISMKIFMYLLTVF | | |
| | LITQMIGSALFAVYLHRRLD | | |
| | KIEDERNLHEDFVFMKTIQR | | |
| | CNTGERSLSLLNCEEIKSQF | | |
| | EGFVKDIMLNKEETKKENSF | | |
| | EMQKGDQNPQIAAHVISEAS | | |
| | SKTTSVLQWAEKGYYTMSNN | | |
| | LVTLENGKQLTVKRQGLYYI | | |
| | YAQVTFCSNREASSQAPFIA | | |
| | SLCLRSPGRFERILLRAANT | | |
| | HSSARPCGQQSIHLGGVFEL | | |
| | QPGASVFVNVTDPSQVSHGT | | |
| | GFTSFGLLKL* | | |
| OT-001664 | MEETRELQSLAAAVVPSAQT | 6404 | 6405 |
| (Met; | LKITDFSFSDFELSDLETAL | | |
| hPDE5 | CTIRMFTDLNLVQNFQMKHE | | |
| (aa 535-860 | VLCRWILSVKKNYRKNVAYH | | |
| of WT, | NWRHAFNTAQCMFAALKAGK | | |
| R732L, | IQNKLTDLEILALLIAALSH | | |
| F736A); | DLDHRGVNNSYIQRSEHPLA | | |
| MH Linker; | QLYCHSIMEHHHFDQCLMIL | | |
| CD40L; stop) | NSPGNQILSGL | | |
| | SIEEYKTTLKIIKQAILATD | | |
| | LALYIKRLGEFAELIRKNQF | | |
| | NLEDPHQKELFLAMLMTACD | | |
| | LSAITKPWPIQQRIAELVAT | | |
| | EFFDQGDRERKELNIEPTDL | | |
| | MNREKKNKIPSMQVGFIDAI | | |
| | CLQLYEALTHVSEDCFPLLD | | |
| | GCRKNRQKWQALAEQQMHMI | | |
| | ETYNQTSPRSAATGLPISMK | | |
| | IFMYLLTVTLITQMIGSALF | | |
| | AVYLHRRLDKIEDERNLHED | | |
| | FVFMKTIQRCNTGERSLSLL | | |
| | NCEEIKSQFEGFVKDIMLNK | | |
| | EETKKENSFEMQKGDQNPQI | | |
| | AAHVISEASSKTTSVLQWAE | | |
| | KGYYTMSNNLVTLENGKQLT | | |
| | VKRQGLYYIYAQVTFCSNRE | | |
| | ASSQAPFIASLCLKSPGRFE | | |
| | RILLRAANTHSSAKPCGQQS | | |
| | IHLGGVFELQPGASVFVNVT | | |
| | DPSQVSHGTGFTSFGLLKL* | | |
| OT-001892 (Met; | MEETRELQSLAAAVVPSAQT | 6534 | 6535 |
| hPDE5 AA | LKITDFSFSDFELSDLETAL | | |
| 535-860 | CTIRMFTDLNLVQNFQMKHE | | |
| of WT (R732L); | VLCRWILSVKKNYRKNVAYH | | |
| Linker | NWRHAFNTAQCMFAALKAGK | | |
| (GGSGGG | IQNKLTDLEILALLIAALSH | | |
| SGGGSG); | DLDHRGVNNSYIQRSEHPLA | | |
| CD40L; stop) | QLYCHSIMEHHHFDQCLMIL | | |
| | NSPGNQILSGLSIEEYKTTL | | |
| | KIIKQAILATDLALYIKRLG | | |
| | EFFELIRKNQFNLEDPHQKE | | |
| | LFLAMLMTACDLSAITKPWT | | |
| | IQQRIAELVATEFFDQGDRE | | |
| | RKELNIEPTDLMNREKKNKI | | |
| | PSMQVGFIDAICLQLYEALT | | |
| | HVSEDCFPLLDGCRKNRQKW | | |
| | QALAEQQGGSGGGSGGGSGM | | |
| | IETYNQTSPRSAATGLPISM | | |
| | KIFMYLLTVFLITQMIGSAL | | |
| | FAVYLHRRLDKIEDERNLHE | | |
| | DFVFMKTIQRCNTGERSLSL | | |
| | LNCEEIKSQFEGFVKDIMLN | | |
| | KEETKKENSFEMQKGDQNPQ | | |
| | IAAHVISEASSKTTSVLQWA | | |
| | EKGYYTMSNNLVTLENGKQL | | |
| | TVKRQGLYYIYAQVTFCSNR | | |
| | EASSQAPFIASLCLKSPGRF | | |
| | ERILLRAANTHSSAKPCGQQ | | |
| | SIHLGGVFELQPGASVFVNV | | |
| | TDPSQVSHGTGFTSFGLLKL | | |
| | * | | |
| OT-001605 | MALPVTALLLPLALLLHAAR | 6539 | 6540 |
| (CD8a | PDIQMTQTTSSLSASLGDRV | | |
| leader; | TISCRASQDISKYLNWTQQK | | |
| CD19 scFv; | PDGWKLLIYHTSRLHSGVPS | | |
| CD8a Hinge | RFSGSGSGTDYSLTISNLEQ | | |
| and | EDIATYFCQQGNTLPYTFGG | | |
| Transmembrane | GTKLEITGGGGSGGGGSG | | |
| Domain; | GGGSEVKLQESGPGLVAPSQ | | |
| CD28 co- | SLSVTCTVSGVSLPDYGVSW | | |
| stimulatory | IRQPPRKGLEWLGVIWGSET | | |
| domain/4-1BB | TYYNSALKSRLTIIKDNSKS | | |
| intracellular | QVFLKMNSLQTDDTAIYYCA | | |
| domain; | KHYYYGGSYAMDYWGQGTSV | | |
| CD3 zea | TVSSTTTPAPRPPTPAPTIA | | |
| intracellular | SQPLSLRPEACRPAAGGAVH | | |
| domain; | TRGLDFACDIYIWAPLAGTC | | |
| Linker | GVLLLSLVITLYCKRGRKKL | | |
| (GS); P2A | LYIFKQPFMRPVQTTQEEDG | | |
| cleavage site; | CSCRFPEEEEGGCELRVKFS | | |
| Linker | RSADAPAYKQGQNQLYNELN | | |
| (GS); | LGRREEYDVLDKRRGRDPEM | | |
| Linker (MH); | GGKPRRKNPQEGLYNELQKD | | |
| CD40L; stop) | KMAEAYSEIGMKGERRRGKG | | |
| | HDGLYQGLSTATKDTYDALH | | |
| | MQALPPRGSATNFSLLKQAG | | |
| | DVEENPGPGSMHMIETYNQT | | |
| | SPRSAATGLPISMKIFMYLL | | |
| | TVFLITQMIGSALFAVYLHR | | |
| | RLDKIEDERNLHEDFVFMKT | | |
| | IQRCNTGERSLSLLNCEEIK | | |
| | SQFEGFVKDIMLNKEETKKE | | |
| | NSFEMQKGDQNPQIAAHVIS | | |
| | EASSKTTSVLQWAEKGYYTM | | |
| | SNNLVTLENGKQLTVKRQGL | | |
| | YYIYAQVTFCSNREASSQAP | | |
| | FIASLCLKSPGRFERILLRA | | |
| | ANTHSSAKPCGQQSIHLGGV | | |
| | FELQPGASVFVNVTDPSQVS | | |
| | HGTGFTSFGLLKL* | | |
| OT-001607 | — | — | 6541 |
| (Full | | | |
| Construct | | | |
| (CD8a | | | |
| leader; | | | |
| CD19 scFv; | | | |
| CD8a Hinge | | | |
| and | | | |
| Transmembrane | | | |
| Domain; | | | |
| CD28 co- | | | |
| stimulatory | | | |
| domain/4-1BB | | | |
| intracellular | | | |
| domain; | | | |
| CD3 zeta | | | |
| intracellular | | | |
| domain; | | | |
| stop; | | | |
| Spacer; IRES; | | | |
| Met; | | | |
| Linker (GS); | | | |
| His; | | | |
| CD40L; stop) | | | |
| OT-001607 | MALPVTALLLPLALLLHAAR | 6542 | 6543 |
| (Encoded | PDIQMTQTTSSLSASLGDRV | | |
| protein 1 | TISCRASQDISKYLNWYQQK | | |
| (CD8α | PDGTVKLLl | | |
| Leader; | YHTSRLHSGVPSRFSGSGSG | | |
| CD19 scFv; | TDYSLTISNLEQEDIATYFC | | |
| CD8a | QQGNTLPYTFGGGTKLEITG | | |
| Hinge and | GGGSGGGGSGGGGSEVKLQE | | |
| Transmembrane | SGPGLVAPSQSLSVTCTVSG | | |
| Domain; | VSLPDYGVSWIRQPPRKGLE | | |
| CD28 co- | WLGVIWGSETTYYNSALKSR | | |
| stimulatory | LTIIKDNSKSQVFLKMNSLQ | | |
| domain/4-1BB | TDDTAIYYCAKHYYYGGSYA | | |
| intracellular | MDYWGQGTSVTVSSTTTPAP | | |
| domain; | RPPTPAPTIASQPLSLRPEA | | |
| CD3 zeta | CRPAAGGAVHTRGLDFACDI | | |
| intracellular | YIWAPLAGTCGVLLLSLVIT | | |
| domain)) | LYCKRGRKKLLYIFKQPFMR | | |
| | PVQTTQEEDGCSCRFPEEEE | | |
| | GGCELRVKFSRSADAPAYKQ | | |
| | GQNQLYNELNLGRREEYDVL | | |
| | DKRRGRDPEMGGKPRRKNPQ | | |
| | EGLYNELQKDKMAEAYSEIG | | |
| | MKGERRRGKGHDGLYQGLST | | |
| | ATKDTYDALHMQALPPR | | |
| OT-001607 | MIETYNQTSPRSAATGLPIS | 6544 | 6545 |
| (Encoded | MKIFMYLLTVFLITQMIGSA | | |
| protein 2 | LFAVYLHRRLDKIEDERNLH | | |
| (CD40L; | EDFVFMKTIQRCNTGERSLS | | |
| stop)) | LLNCEEIKSQFEGFVKDIML | | |
| | NKEETKKENSFEMQKGDQNP | | |
| | QIAAHVISEASSKTTSVLQW | | |
| | AEKGYYTMSNNLVTLENGKQ | | |
| | LTVKRQGLYYIYAQVTFCSN | | |
| | REASSQAPFIASLCLKSPGR | | |
| | FERILLRAANTHSSAKPCGQ | | |
| | QSIHLGGVFELQPGASVFVN | | |
| | VTDPSQVSHGTGFTSFGLLK | | |
| | L* | | |
| OT-001966 | MSLALSLTADQMVSALLDAE | 6546 | 6547 |
| (Met; ER | PPILYSEYDPTRPFSEASMM | | |
| (aa 305-549 | GLLTNLADRELVHMINWAKR | | |
| of WT, | VPGFVDLTLHDQVHLLECAW | | |
| L384M, N413D, | MEILMIGLVWRSMEHPGKLL | | |
| M421G, | FAPNLLLDRDQGKCVEGGVE | | |
| G521R, | IFDMLLATSSRFRMMNLQGE | | |
| Y537S); | EFVCLKSIILLNSGVYTFLS | | |
| Linker | STLKSLEEKDHIHRVLDKIT | | |
| (GGSGGGS | DTLIHLMAKAGLTLQQQHQR | | |
| GGGSG); | LAQLLLILSHIRHMSNKRME | | |
| CD40L; stop) | HLYSMKCKNVVPLSDLLLEM | | |
| | LDAHRLGGSGGGSGGGSGMI | | |
| | ETYNQTSPRSAATGLPISMK | | |
| | IFMYLLTVFLITQMIGSALF | | |
| | AVYLHRRLDKIEDERNLHED | | |
| | FVFMKTIQRCNTGERSLSLL | | |
| | NCEEIKSQFEGFVKDIMLNK | | |
| | EETKKENSFEMQKGDQNPQI | | |
| | AAHVISEASSKTTSVLQWAE | | |
| | KGYYTMSNNLVTLENGKQLT | | |
| | VKRQGLYYIYAQVTFCSNRE | | |
| | ASSQAPFIASLCLKSPGRFE | | |
| | RILLRAANTHSSAKPCGQ | | |
| | QSIHLGGVFELQPGASVFVN | | |
| | VTDPSQVSHGTGFTSFGLLK | | |
| | L* | | |
| OT-001962 | MVGSLNCIVAVSQNMGIGKN | 6550 | 6551 |
| (hDHFR | GDLPWPPLRNEFRYFERMTT | | |
| (Q36E,Q103H, | TSSVEGKQNLVIMGKKTWFS | | |
| Y1221); | IPEKNRPLKGRINLVLSREL | | |
| Linker (H); | KEPPQGAHFLSRSLDDALKL | | |
| CD40L; stop) | TEHPELANKVDMVWIVGGSS | | |
| | VIKEAMNHPGHLKLFVTRIM | | |
| | QDFESDTFFPEIDLEKYKLL | | |
| | PEYPGVLSDVQEEKGIKYKF | | |
| | EVYEKNDHMIETYNQTSPRS | | |
| | AATGLPISMKIFMYLLTVFL | | |
| | ITQMIGSALFAVYLHRRLDK | | |
| | IEDERNLHEDFVFMKTIQRC | | |
| | NTGERSLSLLNCEEIKSQFE | | |
| | GFVKDIMLNKEETKKENSFE | | |
| | MQKGDQNPQIAAHVISEASS | | |
| | KTTSVLQWAEKGYYTMSNNL | | |
| | VTLENGKQLTVKRQGLYYIY | | |
| | AQVTFCSNREASSQAPFIAS | | |
| | LCLKSPGRFERILLRAANTH | | |
| | SSAKPCGQQSIHLGGVFELQ | | |
| | PGASVFVNVTDPSQVSHGTG | | |
| | FTSFGLLKL* | | |
| OT-002078 | MGGSGGGSGGGSGMIETYNQ | 6610 | 6611 |
| (Met; | TSPRSAATGLPISMKIFMYL | | |
| Linker | LTVFLITQMIGSALFAVYLH | | |
| ((GGSG)3); | RRLDKIEDERNLHEDFVFMK | | |
| CD40L (H224G, | TIQRCNTGERSLSLLNCEEI | | |
| G226F); stop) | KSQFEGFVKDIMLNKEETKK | | |
| | ENSFEMQKGDQNPQIAAHVI | | |
| | SEASSKTTSVLQWAEKGYYT | | |
| | MSNNLVTLENGKQLTVKRQG | | |
| | LYYIYAQVTFCSNREASSQA | | |
| | PFIASLCLKSPGRFERILLR | | |
| | AANTHSSAKPCGQQSIGLFG | | |
| | VFELQPGASVFVNVTDPSQV | | |
| | SHGTGFTSFGLLKL* | | |
| OT-002079 | MGGSGGGSGGGSGMIETYNQ | 6612 | 6613 |
| (Met; | TSPRSAATGLPISMKIFMYL | | |
| Linker | LTVFLITQMIGSALFAVYLH | | |
| ((GGSG)3); | RRLDKIEDERNLHEDFVFMK | | |
| CD40L (H224G, | TIQRCNTGERSLSLLNCEEI | | |
| G226H); | KSQFEGFVKDIMLNKEETKK | | |
| stop) | ENSFEMQKGDQNPQIAAHVI | | |
| | SEASSKTTSVLQWAEKGYYT | | |
| | MSNNLVTLENGKQLTVKRQG | | |
| | LYYIYAQVTFCSNREASSQA | | |
| | PFIASLCLKSPGRFERILLR | | |
| | AANTHSSAKPCGQQSIGLHG | | |
| | VFELQPGASVFVNVTDPSQV | | |
| | SHGTGFTSFGLLKL* | | |
| OT-002080 | MGGSGGGSGGGSGMIETYNQ | 6614 | 6615 |
| (Met; | TSPRSAATGLPISMKIFMYL | | |
| Linker | LTVFLITQMIGSALFAVYLH | | |
| ((GGSG)3); | RRLDKIEDERNLHEDFVFMK | | |
| CD40L | TIQRCNTGERSLSLLNCEEI | | |
| (Y172G, | KSQF | | |
| G226F); | EGFVKDIMLNKEETKKENSF | | |
| stop) | EMQKGDQNPQIAAHVISEAS | | |
| | SKTTSVLQWAEKGYYTMSNN | | |
| | LVTLENGKQLTVKRQGLYYI | | |
| | GAQVTFCSNREASSQAPFIA | | |
| | SLCLKSPGRFERILLRAANT | | |
| | HSSAKPCGQQSIHLFGVFEL | | |
| | QPGASVFVNVTDPSQVSHGT | | |
| | GFTSFGLLKL* | | |
| OT-002082 | MGGSGGGSGGGSGMIETYNQ | 6618 | 6619 |
| (Met; | TSPRSAATGLPISMKIFMYL | | |
| Linker | LTVFLITQMIGSALFAVYLH | | |
| ((GGSG)3); | RRLDKIEDERNLHEDFVFMK | | |
| CD40L | TIQRCNTGERSLSLLNCEEI | | |
| (H125G, | KSQFEGFVKDIMLNKEETKK | | |
| G227F); | ENSFEMQKGDQNPQIAAGVI | | |
| stop) | SEASSKTTSVLQWAEKGYYT | | |
| | MSNNLVTLENGKQLTVKRQG | | |
| | LYYIYAQVTFCSNREASSQA | | |
| | PFIASLCLKSPGRFERILL | | |
| | RAANTHSSAKPCGQQSIHLG | | |
| | FVFELQPGASVFVNVTDPSQ | | |
| | VSHGTGFTSFGLLKL* | | |
| OT-001967 | MSLALSLTADQMVSALLDAE | 6620 | 6621 |
| (Met; ER | PPILYSEYDPTRPFSEASMM | | |
| (aa 305-549 | GLLTNLADRELVHMINWAKR | | |
| of WT, | VPGFVDLTLHDQVHLLECAW | | |
| L384M, | MEILMIGLVWRSMEHPGKLL | | |
| N413D, | FAPNLLLDRDQGKCVEGGVE | | |
| M421G, | IFDMLLATSSRFRMMNLQGE | | |
| G521R, | EFVCLKSIILLNSGVYTFLS | | |
| Y537S); | STLKSLEEKDHIHRVLDKIT | | |
| linker (GS); | DTLIHLMAKAGLTLQQQHQR | | |
| CD40L; stop) | LAQLLLILSHIRHMSNKRME | | |
| | HLYSMKCKNVVPLSDLLLEM | | |
| | LDAHRLGSMIETYNQTSPRS | | |
| | AATGLPISMKIFMYLLTVFL | | |
| | ITQMIGSALFAVYLHRRLDK | | |
| | IEDERNLHEDFVFMKTIQRC | | |
| | NTGERSLSLLNCEEIKSQFE | | |
| | GFVKDIMLNKEETKKENSFE | | |
| | MQKGDQNPQIAAHVISEASS | | |
| | KTTSVLQWAEKGYYTMSNNL | | |
| | VTLENGKQLTVKRQGLYYIY | | |
| | AQVTFCSNREASSQAPFIAS | | |
| | LCLKSPGRFERILLRAANTH | | |
| | SSAKPCGQQSIHLGGVFELQ | | |
| | PGASVFVNVTDPSQVSHGTG | | |
| | FTSFGLLKL* | | |
| OT-001965 | MSLALSLTADQMVSALLDAE | 6622 | 6623 |
| (Met; ER | PPILYSEYDPTRPFSEASMM | | |
| (aa 305-549 | GLLTNLADRELVHMINWAKR | | |
| of WT, | VPGFVDLTLHDQVHLLECAW | | |
| L384M, | MEILMIGLVWRSMEHPGKLL | | |
| N413D, | FAPNLLLDRDQGKCVEGGVE | | |
| M421G, | IFDMLLATSSRFRMMNLQGE | | |
| G521R, | EFVCLKSIILLNSGVYTFLS | | |
| Y537S); | STLKSLEEKDHIHRVLDKIT | | |
| linker | DTLIHLMAKAGLTLQQQHQR | | |
| (GSG); | LAQLLLILSHIRHMSNKRME | | |
| CD40L; stop) | HLYSMKCKNVVPLSDLLLEM | | |
| | LDAHRLGSGMIETYNQTSPR | | |
| | SAATGLPISMKIFMYLLTVF | | |
| | LITQMIGSALFAVYLHRRLD | | |
| | KIEDERNLHEDFVFMKTIQR | | |
| | CNTGERSLSLLNCEEIKSQF | | |
| | EGFVKDIMLNKEETKKENSF | | |
| | EMQKGDQNPQIAAHVISEAS | | |
| | SKTTSVLQWAEKGYYTMSNN | | |
| | LVTLENGKQLTVKRQGLYYI | | |
| | YAQVTFCSNREASSQAPFIA | | |
| | SLCLKSPGRFERILLRAANT | | |
| | HSSAKPCGQQSIHLGGVFEL | | |
| | QPGASVFVNVTDPSQVSHGT | | |
| | GFTSFGLLKL* | | |
| OT-001961 | MVGSLNCIVAVSQNMGIGKN | 6624 | 6625 |
| (Met; | GDLPWPPLRNEFRYFQRMTT | | |
| hDHFR | TSSVEGKQNLVIMGKKTWFS | | |
| (2-187 of | IPEKNRPLKGRINLVLSREL | | |
| WT, Y1221); | KEPPQGAHFLSRSLDDALKL | | |
| Linker | TEQPELANKVDMVWIVGGSS | | |
| (H); CD40L; | VIKEAMNHPGHLKLFVTRIM | | |
| stop) | QDFESDTFFPEIDLEKYKLL | | |
| | PEYPGVLSDVQEEKGIKYKF | | |
| | EVYEKNDHMIETYNQTSPRS | | |
| | AATGLPISMKIFMYLLTVFL | | |
| | ITQMIGSALFAVYLHRRLDK | | |
| | IEDERNLHEDFVFMKTIQRC | | |
| | NTGERSLSLLNCEEIKSQFE | | |
| | GFVKDIMLNKEETKKENSFE | | |
| | MQKGDQNPQIAAHVISEASS | | |
| | KTTSVLQWAEKGYYTMSNNL | | |
| | VTLENGKQLTVKRQGLYYIY | | |
| | AQVTFCSNREASSQAPFIAS | | |
| | LCLKSPGRFERILLRAANTH | | |
| | SSAKPCGQQSIHLGGVFELQ | | |
| | PGASVFVNVTDPSQVSHGTG | | |
| | FTSFGLLKL* | | |
| OT-001963 | MVGSLNCIVAVSQNMGIGKN | 6626 | 6627 |
| (Met; | GDLPWPPLRNEFRYFQRMTT | | |
| hDHFR | TSSVEGKQNLVIMGRKTWFS | | |
| (2-187 of | IPEKKRPLKGRINLVLSREL | | |
| WT, | KEPPQGAHFLSRSLDDALKL | | |
| K55R, N65K, | TEQPELANKVDMVWIVGGSS | | |
| Y122I); | VIKEAMNHPGHLKLFVTRIM | | |
| Linker (H); | QDFESDTFFPEIDLEKYKLL | | |
| CD40L; | PEYPGVLSDVQEEKGIKYKF | | |
| stop) | EVYEKNDHMIETYNQTSPRS | | |
| | AATGLPISMKIFMYLLTVFL | | |
| | ITQMIGSALFAVYLHRRLDK | | |
| | IEDERNLHEDFVFMKTIQRC | | |
| | NTGERSLSLLNCEEIKSQFE | | |
| | GFVKDIMLNKEETKKENSFE | | |
| | MQKGDQNPQIAAHVISEASS | | |
| | KTTSVLQWAEKGYYTMSNNL | | |
| | VTLENGKQLTVKRQGLYYIY | | |
| | AQVTFCSNREASSQAPFIAS | | |
| | LCLKSPGRFERILLRAANTH | | |
| | SSAKPCGQQSIHLGGVFELQ | | |
| | PGASVFVNVTDPSQVSHGTG | | |
| | FTSFGLLKL* | | |
| OT-001671 | MSGISLIAALAVDYVIGMEN | 6628 | 6629 |
| (Met; | AMPWNLPADLAWFKRNTLNK | | |
| Linker (SG); | PVIMGRHTWESIGRPLPGRK | | |
| ecDHFR | NIILSSQPGTDDRVTWVKSV | | |
| (aa 2-159 of | DEAIAACGDVPEIMVIGGGR | | |
| WT, R12Y, | VIEQFLPKAQKLYLTHIDAE | | |
| Y100I); | VEGDTHFPDYEPDDWESVFS | | |
| Linker (H); | EFHDADAQNSHSYCFEILER | | |
| CD40L | RHMIETYNQTSPRSAATGLP | | |
| (aa 1-261 of | ISMKIFMYLLTVFLITQMIG | | |
| WT, | SALFAVYLHRRLDKIEDERN | | |
| (S110-G116) | LHEDFVFMKTIQRCNTGERS | | |
| del); | LSLLNCEEIKSQFEGFVKDI | | |
| stop) | MLNKEETKKENDQNPQIAAH | | |
| | VISEASSKTTSVLQWAEKGY | | |
| | YTMSNNLVTLENGKQLTVKR | | |
| | QGLYYIYAQVTFCSNREASS | | |
| | QAPFIASLCLKSPGRFERIL | | |
| | LRAANTHSSAKPCGQQSIHL | | |
| | GGVFELQPGASVFVNVTDPS | | |
| | QVSHGTGFTSFGLLKL* | | |
| OT-002106 | MSLALSLTADQMVSALLDAE | 6630 | 6631 |
| (Met; ER | PPILYSEYDPTRPFSEASMM | | |
| (aa 305-549 | GLLTNLADRELVHMINWAKR | | |
| of WT, | VPGFVDLTLHDQVHLLECAW | | |
| L384M, | MEILMIGLVWRSMEHPGKLL | | |
| N413D, | FAPNLLLDRDQGKCVEGGVE | | |
| M421G, | IFDMLLATSSRFRMMNLQGE | | |
| G521R, | EFVCLKSIILLNSGVYTFLS | | |
| Y537S); | STLKSLEEKDHIHRVLDKIT | | |
| CD8 | DTLIHLMAKAGLTLQQQHQR | | |
| cytoplasmic | LAQLLLILSHIRHMSNKRME | | |
| tail; | HLYSMKCKNVVPLSDLLLEM | | |
| Linker; (GS); | LDAHRLNHRNRRGSMIETYN | | |
| CD40L; stop | QTSPRSAATGLPISMKIFMY | | |
| | LLTVFLITQMIGSALFAVYL | | |
| | HRRLDKIEDERNLHEDFVFM | | |
| | KTIQRCNTGERSLSLLNCEE | | |
| | IKSQFEGFVKDIMLNKEETK | | |
| | KENSFEMQKGDQNPQIAAHV | | |
| | ISEASSKTTSVLQWAEKGYY | | |
| | TMSNNLVTLENGKQLTVKRQ | | |
| | GLYYIYAQVTFCSNREASSQ | | |
| | APFIASLCLKSPGRFERILL | | |
| | RAANTHSSAKPCGQQSIHLG | | |
| | GVFELQPGASVFVNVTDPSQ | | |
| | VSHGTGFTSFGLLKL* | | |
| OT-002107 | MNHRNRRGSSLALSLTADQM | 6632 | 6633 |
| (Met; | VSALLDAEPPILYSEYDPTR | | |
| CD8 | PFSEASMMGLLTNLADRELV | | |
| cytoplasmic | HMINWAKRVPGFVDLTLHDQ | | |
| tail); | VHLLECAWMEILMIGLVWRS | | |
| Linker; | MEHPGKLLFAPNLLLDRDQG | | |
| (GS); | KCVEGGVEIFDMLLATSSRF | | |
| ER | RMMNLQGEEFVCLKSIILLN | | |
| (aa 305-549 | SGVYTFLSSTLKSLEEKDHI | | |
| of | HRVLDKITDTLIHLMAKAGL | | |
| WT, L384M, | TLQQQHQRLAQLLLILSHIR | | |
| N413D, | HMSNKRMEHLYSMKCKNVVP | | |
| M421G, | LSDLLLEMLDAHRLGGSGGG | | |
| G521R, | SGGGSGMIETYNQTSPRSAA | | |
| Y537S); | TGLPISMKIFMYLLTVFLIT | | |
| Linker | QMIGSALFAVYLHRRLDKIE | | |
| ((GGSG)3); | DERNLHEDFVFMKTIQRCNT | | |
| CD40L; | GERSLSLLNCEEIKSQFEGF | | |
| stop) | VKDIMLNKEETKKENSFEMQ | | |
| | KGDQNPQIAAHVISEASSKT | | |
| | TSVLQWAEKGYYTMSNNLVT | | |
| | LENGKQLTVKRQGLYYIYAQ | | |
| | VTFCSNREASSQAPFIASLC | | |
| | LKSPGRFERILLRAANTHSS | | |
| | AKPCGQQSIHLGGVFELQPG | | |
| | ASVFVNVTDPSQVSHGTGFT | | |
| | SFGLLKL* | | |
| OT-002021 | MSGISLIAALAVDRVIGMEN | 6634 | 6635 |
| (Met; | AMPWNLPADLAWFKRNTLNK | | |
| Linker (SG); | PVIMGRHTWESIGRPLPGRK | | |
| ecDHFR | NIILSSQPGTDDRVTWVKSV | | |
| (a 2-159 of | DEAIAACGDVPEIMVIGGGR | | |
| WT, Y100A); | VAEQFLPKAQKLYLTHIDAE | | |
| Linker | VEGDTHFPDYEPDDWESVFS | | |
| (H); CD40L; | EFHDADAQNSHSYCFEILER | | |
| stop) | RHMIETYNQTSPRSAATGLP | | |
| | ISMKIFMYLLTVFLITQMIG | | |
| | SALFAVYLHRRLDKIEDERN | | |
| | LHEDFVFMKTIQRCNTGERS | | |
| | LSLLNCEEIKSQFEGFVKDI | | |
| | MLNKEETKKENSFEMQKGDQ | | |
| | NPQIAAHVISEASSKTTSVL | | |
| | QWAEKGYYTMSNNLVTLENG | | |
| | KQLTVKRQGLYYIYAQVTFC | | |
| | SNREASSQAPFIASLCLKSP | | |
| | GRFERILLRAANTHSSAKPC | | |
| | GQQSIHLGGVFELQPGASVF | | |
| | VNVTDPSQVSHGTGFTSFGL | | |
| | LKL* | | |
| OT-002022 | MSGISLIAALAVDRVIGMEN | 6636 | 6637 |
| (Met; | AMPWNLPADLAWFKRNTLNK | | |
| Linker (SG); | PVIMGRHTWESIGRPLPGRK | | |
| ecDHFR | NIILSSQPGTDDRVTWVKSV | | |
| (a 2-159 of | DEAIAACGDVPEIMVIGGGR | | |
| WT, Y100C); | VCEQFLPKAQKLYLTHIDAE | | |
| Linker | VEGDTHFPDYEPDDWESVFS | | |
| (H); CD40L; | EFHDADAQNSHSYCFEILER | | |
| stop) | RHMIETYNQTSPRSAATGLP | | |
| | ISMKIFMYLLTVFLITQMIG | | |
| | SALFAVYLHRRLDKIEDERN | | |
| | LHEDFVFMKTIQRCNTGERS | | |
| | LSLLNCEEIKSQFEGFVKDI | | |
| | MLNKEETKKENSFEMQKGDQ | | |
| | NPQIAAHVISEASSKTTSVL | | |
| | QWAEKGYYTMSNNLVTLENG | | |
| | KQLTVKRQGLYYIYAQVTFC | | |
| | SNREASSQAPFIASLCLKSP | | |
| | GRFERILLRAANTHSSAKPC | | |
| | GQQSIHLGGVFELQPGASVF | | |
| | VNVTDPSQVSHGTGFTSFGL | | |
| | LKL* | | |
| OT-002023 | MSGISLIAALAVDRVIGMEN | 6638 | 6639 |
| (Met; | AMPWNLPADLAWFKRNTLNK | | |
| Linker (SG); | PVIMGRHTWESIGRPLPGRK | | |
| ecDHFR | NIILSSQPGTDDRVTWVKSV | | |
| (a 2-159 of | DEAIAACGDVPEIMVIGGGR | | |
| WT, Y100D); | VDEQFLPKAQKLYLTHIDAE | | |
| Linker | VEGDTHFPDYEPDDWESVFS | | |
| (H); CD40L; | EFHDADAQNSHSYCFEILER | | |
| stop) | RHMIETYNQTSPRSAATGLP | | |
| | ISMKIFMYLLTVFLITQMIG | | |
| | SALFAVYLHRRLDKIEDERN | | |
| | LHEDFVFMKTIQRCNTGERS | | |
| | LSLLNCEEIKSQFEGFVKDI | | |
| | MLNKEETKKENSFEMQKGDQ | | |
| | NPQIAAHVISEASSKTTSVL | | |
| | QWAEKGYYTMSNNLVTLENG | | |
| | KQLTVKRQGLYYIYAQVTFC | | |
| | SNREASSQAPFIASLCLKSP | | |
| | GRFERILLRAANTHSSAKPC | | |
| | GQQSIHLGGVFELQPGASVF | | |
| | VNVTDPSQVSHGTGFTSFGL | | |
| | LKL* | | |
| OT-002024 | MSGISLIAALAVDRVIGMEN | 6640 | 6641 |
| (Met; | AMPWNLPADLAWFKRNTLNK | | |
| Linker (SG); | PVIMGRHTWESIGRPLPGRK | | |
| ecDHFR | NIILSSQPGTDDRVTWVKSV | | |
| (a 2-159 of | DEAIAACGDVPEIMVIGGGR | | |
| WT, Y100E); | VEEQFLPKAQKLYLTHIDAE | | |
| Linker | VEGDTHFPDYEPDDWESVFS | | |
| (H); CD40L; | EFHDADAQNSHSYCFEILER | | |
| stop) | RHMIETYNQTSPRSAATGLP | | |
| | ISMKIFMYLLTVFLITQMIG | | |
| | SALFAVYLHRRLDKIEDERN | | |
| | LHEDFVFMKTIQRCNTGERS | | |
| | LSLLNCEEIKSQFEGFVKDI | | |
| | MLNKEETKKENSFEMQKGDQ | | |
| | NPQIAAHVISEASSKTTSVL | | |
| | QWAEKGYYTMSNNLVTLENG | | |
| | KQLTVKRQGLYYIYAQVTFC | | |
| | SNREASSQAPFIASLCLKSP | | |
| | GRFERILLRAANTHSSAKPC | | |
| | GQQSIHLGGVFELQPGASVF | | |
| | VNVTDPSQVSHGTGFTSFGL | | |
| | LKL* | | |
| OT-002025 | MSGISLIAALAVDRVIGMEN | 6642 | 6643 |
| (Met; | AMPWNLPADLAWFKRNTLNK | | |
| Linker (SG); | PVIMGRHTWESIGRPLPGRK | | |
| ecDHFR | NIILSSQPGTDDRVTWVKSV | | |
| (a 2-159 of | DEAIAACGDVPEIMVIGGGR | | |
| WT, Y100F); | VFEQFLPKAQKLYLTHIDAE | | |
| Linker | VEGDTHFPDYEPDDWESVFS | | |
| (H); CD40L; | EFHDADAQNSHSYCFEILER | | |
| stop) | RHMIETYNQTSPRSAATGLP | | |
| | ISMKIFMYLLTVFLITQMIG | | |
| | SALFAVYLHRRLDKIEDERN | | |
| | LHEDFVFMKTIQRCNTGERS | | |
| | LSLLNCEEIKSQFEGFVKDI | | |
| | MLNKEETKKENSFEMQKGDQ | | |
| | NPQIAAHVISEASSKTTSVL | | |
| | QWAEKGYYTMSNNLVTLENG | | |
| | KQLTVKRQGLYYIYAQVTFC | | |
| | SNREASSQAPFIASLCLKSP | | |
| | GRFERILLRAANTHSSAKPC | | |
| | GQQSIHLGGVFELQPGASVF | | |
| | VNVTDPSQVSHGTGFTSFGL | | |
| | LKL* | | |
| OT-002026 | MSGISLIAALAVDRVIGMEN | 6644 | 6645 |
| (Met; | AMPWNLPADLAWFKRNTLNK | | |
| Linker (SG); | PVIMGRHTWESIGRPLPGRK | | |
| ecDHFR | NIILSSQPGTDDRVTWVKSV | | |
| (a 2-159 of | DEAIAACGDVPEIMVIGGGR | | |
| WT, Y100G); | VGEQFLPKAQKLYLTHIDAE | | |
| Linker | VEGDTHFPDYEPDDWESVFS | | |
| (H); CD40L; | EFHDADAQNSHSYCFEILER | | |
| stop) | RHMIETYNQTSPRSAATGLP | | |
| | ISMKIFMYLLTVFLITQMIG | | |
| | SALFAVYLHRRLDKIEDERN | | |
| | LHEDFVFMKTIQRCNTGERS | | |
| | LSLLNCEEIKSQFEGFVKDI | | |
| | MLNKEETKKENSFEMQKGDQ | | |
| | NPQIAAHVISEASSKTTSVL | | |
| | QWAEKGYYTMSNNLVTLENG | | |
| | KQLTVKRQGLYYIYAQVTFC | | |
| | SNREASSQAPFIASLCLKSP | | |
| | GRFERILLRAANTHSSAKPC | | |
| | GQQSIHLGGVFELQPGASVF | | |
| | VNVTDPSQVSHGTGFTSFGL | | |
| | LKL* | | |
| OT-002027 | MSGISLIAALAVDRVIGMEN | 6646 | 6647 |
| (Met; | AMPWNLPADLAWFKRNTLNK | | |
| Linker (SG); | PVIMGRHTWESIGRPLPGRK | | |
| ecDHFR | NIILSSQPGTDDRVTWVKSV | | |
| (a 2-159 of | DEAIAACGDVPEIMVIGGGR | | |
| WT, Y100H); | VHEQFLPKAQKLYLTHIDAE | | |
| Linker | VEGDTHFPDYEPDDWESVFS | | |
| (H); CD40L; | EFHDADAQNSHSYCFEILER | | |
| stop) | RHMIETYNQTSPRSAATGLP | | |
| | ISMKIFMYLLTVFLITQMIG | | |
| | SALFAVYLHRRLDKIEDERN | | |
| | LHEDFVFMKTIQRCNTGERS | | |
| | LSLLNCEEIKSQFEGFVKDI | | |
| | MLNKEETKKENSFEMQKGDQ | | |
| | NPQIAAHVISEASSKTTSVL | | |
| | QWAEKGYYTMSNNLVTLENG | | |
| | KQLTVKRQGLYYIYAQVTFC | | |
| | SNREASSQAPFIASLCLKSP | | |
| | GRFERILLRAANTHSSAKPC | | |
| | GQQSIHLGGVFELQPGASVF | | |
| | VNVTDPSQVSHGTGFTSFGL | | |
| | LKL* | | |
| OT-002028 | MSGISLIAALAVDRVIGMEN | 6648 | 6649 |
| (Met; | AMPWNLPADLAWFKRNTLNK | | |
| Linker (SG); | PVIMGRHTWESIGRPLPGRK | | |
| ecDHFR | NIILSSQPGTDDRVTWVKSV | | |
| (a 2-159 of | DEAIAACGDVPEIMVIGGGR | | |
| WT, Y1001); | VIEQFLPKAQKLYLTHIDAE | | |
| Linker | VEGDTHFPDYEPDDWESVFS | | |
| (H); CD40L; | EFHDADAQNSHSYCFEILER | | |
| stop) | RHMIETYNQTSPRSAATGLP | | |
| | ISMKIFMYLLTVFLITQMIG | | |
| | SALFAVYLHRRLDKIEDERN | | |
| | LHEDFVFMKTIQRCNTGERS | | |
| | LSLLNCEEIKSQFEGFVKDI | | |
| | MLNKEETKKENSFEMQKGDQ | | |
| | NPQIAAHVISEASSKTTSVL | | |
| | QWAEKGYYTMSNNLVTLENG | | |
| | KQLTVKRQGLYYIYAQVTFC | | |
| | SNREASSQAPFIASLCLKSP | | |
| | GRFERILLRAANTHSSAKPC | | |
| | GQQSIHLGGVFELQPGASVF | | |
| | VNVTDPSQVSHGTGFTSFGL | | |
| | LKL* | | |
| OT-002029 | MSGISLIAALAVDRVIGMEN | 6650 | 6651 |
| (Met; | AMPWNLPADLAWFKRNTLNK | | |
| Linker (SG); | PVIMGRHTWESIGRPLPGRK | | |
| ecDHFR | NIILSSQPGTDDRVTWVKSV | | |
| (a 2-159 of | DEAIAACGDVPEIMVIGGGR | | |
| WT, Y100K); | VKEQFLPKAQKLYLTHIDAE | | |
| Linker | VEGDTHFPDYEPDDWESVFS | | |
| (H); CD40L; | EFHDADAQNSHSYCFEILER | | |
| stop) | RHMIETYNQTSPRSAATGLP | | |
| | ISMKIFMYLLTVFLITQMIG | | |
| | SALFAVYLHRRLDKIEDERN | | |
| | LHEDFVFMKTIQRCNTGERS | | |
| | LSLLNCEEIKSQFEGFVKDI | | |
| | MLNKEETKKENSFEMQKGDQ | | |
| | NPQIAAHVISEASSKTTSVL | | |
| | QWAEKGYYTMSNNLVTLENG | | |
| | KQLTVKRQGLYYIYAQVTFC | | |
| | SNREASSQAPFLASLCLKSP | | |
| | GRFERILLRAANTHSSAKPC | | |
| | GQQSIHLGGVFELQPGASVF | | |
| | VNVTDPSQVSHGTGFTSFGL | | |
| | LKL* | | |
| OT-002030 | MSGISLIAALAVDRVIGMEN | 6652 | 6653 |
| (Met; | AMPWNLPADLAWFKRNTLNK | | |
| Linker (SG); | PVIMGRHTWESIGRPLPGRK | | |
| ecDHFR | NIILSSQPGTDDRVTWVKSV | | |
| (a 2-159 of | DEAIAACGDVPEIMVIGGGR | | |
| WT, Y100L); | VLEQFLPKAQKLYLTHIDAE | | |
| Linker | VEGDTHFPDYEPDDWESVFS | | |
| (H); CD40L; | EFHDADAQNSHSYCFEILER | | |
| stop) | RHMIETYNQTSPRSAATGLP | | |
| | ISMKIFMYLLTVFLITQMIG | | |
| | SALFAVYLHRRLDKIEDERN | | |
| | LHEDFVFMKTIQRCNTGERS | | |
| | LSLLNCEEIKSQFEGFVKDI | | |
| | MLNKEETKKENSFEMQKGDQ | | |
| | NPQIAAHVISEASSKTTSVL | | |
| | QWAEKGYYTMSNNLVTLENG | | |
| | KQLTVKRQGLYYIYAQVTFC | | |
| | SNREASSQAPFIASLCLKSP | | |
| | GRFERILLRAANTHSSAKPC | | |
| | GQQSIHLGGVFELQPGASVF | | |
| | VNVTDPSQVSHGTGFTSFGL | | |
| | LKL* | | |
| OT-002031 | MSGISLIAALAVDRVIGMEN | 6654 | 6655 |
| (Met; | AMPWNLPADLAWFKRNTLNK | | |
| Linker (SG); | PVIMGRHTWESIGRPLPGRK | | |
| ecDHFR | NIILSSQPGTDDRVTWVKSV | | |
| (a 2-159 of | DEAIAACGDVPEIMVIGGGR | | |
| WT, Y100M); | VMEQFLPKAQKLYLTHIDAE | | |
| Linker | VEGDTHFPDYEPDDWESVFS | | |
| (H); CD40L; | EFHDADAQNSHSYCFEILER | | |
| stop) | RHMIETYNQTSPRSAATGLP | | |
| | ISMKIFMYLLTVFLITQMIG | | |
| | SALFAVYLHRRLDKIEDERN | | |
| | LHEDFVFMKTIQRCNTGERS | | |
| | LSLLNCEEIKSQFEGFVKDI | | |
| | MLNKEETKKENSFEMQKGDQ | | |
| | NPQIAAHVISEASSKTTSVL | | |
| | QWAEKGYYTMSNNLVTLENG | | |
| | KQLTVKRQGLYYIYAQVTFC | | |
| | SNREASSQAPFIASLCLKSP | | |
| | GRFERILLRAANTHSSAKPC | | |
| | GQQSIHLGGVFELQPGASVF | | |
| | VNVTDPSQVSHGTGFTSFGL | | |
| | LKL* | | |
| OT-002032 | MSGISLIAALAVDRVIGMEN | 6656 | 6657 |
| (Met; | AMPWNLPADLAWFKRNTLNK | | |
| Linker (SG); | PVIMGRHTWESIGRPLPGRK | | |
| ecDHFR | NIILSSQPGTDDRVTWVKSV | | |
| (a 2-159 of | DEAIAACGDVPEIMVIGGGR | | |
| WT, Y100N); | VNEQFLPKAQKLYLTHIDAE | | |
| Linker | VEGDTHFPDYEPDDWESVFS | | |
| (H); CD40L; | EFHDADAQNSHSYCFEILER | | |
| stop) | RHMIETYNQTSPRSAATGLP | | |
| | ISMKIFMYLLTVFLITQMIG | | |
| | SALFAVYLHRRLDKIEDERN | | |
| | LHEDFVFMKTIQRCNTGERS | | |
| | LSLLNCEEIKSQFEGFVKDI | | |
| | MLNKEETKKENSFEMQKGDQ | | |
| | NPQIAAHVISEASSKTTSVL | | |
| | QWAEKGYYTMSNNLVTLENG | | |
| | KQLTVKRQGLYYIYAQVTFC | | |
| | SNREASSQAPFIASLCLKSP | | |
| | GRFERILLRAANTHSSAKPC | | |
| | GQQSIHLGGVFELQPGASVF | | |
| | VNVTDPSQVSHGTGFTSFGL | | |
| | LKL* | | |
| OT-002033 | MSGISLIAALAVDRVIGMEN | 6658 | 6659 |
| (Met; | AMPWNLPADLAWFKRNTLNK | | |
| Linker (SG); | PVIMGRHTWESIGRPLPGRK | | |
| ecDHFR | NIILSSQPGTDDRVTWVKSV | | |
| (a 2-159 of | DEAIAACGDVPEIMVIGGGR | | |
| WT, Y100P); | VPEQFLPKAQKLYLTHIDAE | | |
| Linker | VEGDTHFPDYEPDDWESVFS | | |
| (H); CD40L; | EFHDADAQNSHSYCFEILER | | |
| stop) | RHMIETYNQTSPRSAATGLP | | |
| | ISMKIFMYLLTVFLITQMIG | | |
| | SALFAVYLHRRLDKIEDERN | | |
| | LHEDFVFMKTIQRCNTGERS | | |
| | LSLLNCEEIKSQFEGFVKDI | | |
| | MLNKEETKKENSFEMQKGDQ | | |
| | NPQIAAHVISEASSKTTSVL | | |
| | QWAEKGYYTMSNNLVTLENG | | |
| | KQLTVKRQGLYYIYAQVTFC | | |
| | SNREASSQAPFIASLCLKSP | | |
| | GRFERILLRAANTHSSAKPC | | |
| | GQQSIHLGGVFELQPGASVF | | |
| | VNVTDPSQVSHGTGFTSFGL | | |
| | LKL* | | |
| OT-002034 | MSGISLIAALAVDRVIGMEN | 6660 | 6661 |
| (Met; | AMPWNLPADLAWFKRNTLNK | | |
| Linker (SG); | PVIMGRHTWESIGRPLPGRK | | |
| ecDHFR | NIILSSQPGTDDRVTWVKSV | | |
| (a 2-159 of | DEAIAACGDVPEIMVIGGGR | | |
| WT, Y100Q); | VQEQFLPKAQKLYLTHIDAE | | |
| Linker | VEGDTHFPDYEPDDWESVFS | | |
| (H); CD40L; | EFHDADAQNSHSYCFEILER | | |
| stop) | RHMIETYNQTSPRSAATGLP | | |
| | ISMKIFMYLLTVFLITQMIG | | |
| | SALFAVYLHRRLDKIEDERN | | |
| | LHEDFVFMKTIQRCNTGERS | | |
| | LSLLNCEEIKSQFEGFVKDI | | |
| | MLNKEETKKENSFEMQKGDQ | | |
| | NPQIAAHVISEASSKTTSVL | | |
| | QWAEKGYYTMSNNLVTLENG | | |
| | KQLTVKRQGLYYIYAQVTFC | | |
| | SNREASSQAPFIASLCLKSP | | |
| | GRFERILLRAANTHSSAKPC | | |
| | GQQSIHLGGVFELQPGASVF | | |
| | VNVTDPSQVSHGTGFTSFGL | | |
| | LKL* | | |
| OT-002035 | MSGISLIAALAVDRVIGMEN | 6662 | 6663 |
| (Met; | AMPWNLPADLAWFKRNTLNK | | |
| Linker (SG); | PVIMGRHTWESIGRPLPGRK | | |
| ecDHFR | NIILSSQPGTDDRVTWVKSV | | |
| (a 2-159 of | DEAIAACGDVPEIMVIGGGR | | |
| WT, Y100R); | VREQFLPKAQKLYLTHIDAE | | |
| Linker | VEGDTHFPDYEPDDWESVFS | | |
| (H); CD40L; | EFHDADAQNSHSYCFEILER | | |
| stop) | RHMIETYNQTSPRSAATGLP | | |
| | ISMKIFMYLLTVFLITQMIG | | |
| | SALFAVYLHRRLDKIEDERN | | |
| | LHEDFVFMKTIQRCNTGERS | | |
| | LSLLNCEEIKSQFEGFVKDI | | |
| | MLNKEETKKENSFEMQKGDQ | | |
| | NPQIAAHVISEASSKTTSVL | | |
| | QWAEKGYYTMSNNLVTLENG | | |
| | KQLTVKRQGLYYIYAQVTFC | | |
| | SNREASSQAPFIASLCLKSP | | |
| | GRFERILLRAANTHSSAKPC | | |
| | GQQSIHLGGVFELQPGASVF | | |
| | VNVTDPSQVSHGTGFTSFGL | | |
| | LKL* | | |
| OT-002036 | MSGISLIAALAVDRVIGMEN | 6664 | 6665 |
| (Met; | AMPWNLPADLAWFKRNTLNK | | |
| Linker (SG); | PVIMGRHTWESIGRPLPGRK | | |
| ecDHFR | NIILSSQPGTDDRVTWVKSV | | |
| (a 2-159 of | DEAIAACGDVPEIMVIGGGR | | |
| WT, Y100S); | VGEQFLPKAQKLYLTHIDAE | | |
| Linker | VEGDTHFPDYEPDDWESVFS | | |
| (H); CD40L; | EFHDADAQNSHSYCFEILER | | |
| stop) | RHMIETYNQTSPRSAATGLP | | |
| | ISMKIFMYLLTVFLITQMIG | | |
| | SALFAVYLHRRLDKIEDERN | | |
| | LHEDFVFMKTIQRCNTGERS | | |
| | LSLLNCEEIKSQFEGFVKDI | | |
| | MLNKEETKKENSFEMQKGDQ | | |
| | NPQIAAHVISEASSKTTSVL | | |
| | QWAEKGYYTMSNNLVTLENG | | |
| | KQLTVKRQGLYYIYAQVTFC | | |
| | SNREASSQAPFIASLCLKSP | | |
| | GRFERILLRAANTHSSAKPC | | |
| | GQQSIHLGGVFELQPGASVF | | |
| | VNVTDPSQVSHGTGFTSFGL | | |
| | LKL* | | |
| OT-002037 | MSGISLIAALAVDRVIGMEN | 6666 | 6667 |
| (Met; | AMPWNLPADLAWFKRNTLNK | | |
| Linker (SG); | PVIMGRHTWESIGRPLPGRK | | |
| ecDHFR | NIILSSQPGTDDRVTWVKSV | | |
| (a 2-159 of | DEAIAACGDVPEIMVIGGGR | | |
| WT, Y100T); | VTEQFLPKAQKLYLTHIDAE | | |
| Linker | VEGDTHFPDYEPDDWESVFS | | |
| (H); CD40L; | EFHDADAQNSHSYCFEILER | | |
| stop) | RHMIETYNQTSPRSAATGLP | | |
| | ISMKIFMYLLTVFLITQMIG | | |
| | SALFAVYLHRRLDKIEDERN | | |
| | LHEDFVFMKTIQRCNTGERS | | |
| | LSLLNCEEIKSQFEGFVKDI | | |
| | MLNKEETKKENSFEMQKGDQ | | |
| | NPQIAAHVISEASSKTTSVL | | |
| | QWAEKGYYTMSNNLVTLENG | | |
| | KQLTVKRQGLYYIYAQVTFC | | |
| | SNREASSQAPFIASLCLKSP | | |
| | GRFERILLRAANTHSSAKPC | | |
| | GQQSIHLGGVFELQPGASVF | | |
| | VNVTDPSQVSHGTGFTSFGL | | |
| | LKL* | | |
| OT-002038 | MSGISLIAALAVDRVIGMEN | 6668 | 6669 |
| (Met; | AMPWNLPADLAWFKRNTLNK | | |
| Linker (SG); | PVIMGRHTWESIGRPLPGRK | | |
| ecDHFR | NIILSSQPGTDDRVTWVKSV | | |
| (a 2-159 of | DEAIAACGDVPEIMVIGGGR | | |
| WT, Y100V); | VVEQFLPKAQKLYLTHIDAE | | |
| Linker | VEGDTHFPDYEPDDWESVFS | | |
| (H); CD40L; | EFHDADAQNSHSYCFEILER | | |
| stop) | RHMIETYNQTSPRSAATGLP | | |
| | ISMKIFMYLLTVFLITQMIG | | |
| | SALFAVYLHRRLDKIEDERN | | |
| | LHEDFVFMKTIQRCNTGERS | | |
| | LSLLNCEEIKSQFEGFVKDI | | |
| | MLNKEETKKENSFEMQKGDQ | | |
| | NPQIAAHVISEASSKTTSVL | | |
| | QWAEKGYYTMSNNLVTLENG | | |
| | KQLTVKRQGLYYIYAQVTFC | | |
| | SNREASSQAPFIASLCLKSP | | |
| | GRFERILLRAANTHSSAKPC | | |
| | GQQSIHLGGVFELQPGASVF | | |
| | VNVTDPSQVSHGTGFTSFGL | | |
| | LKL* | | |
| OT-002039 | MSGISLIAALAVDRVIGMEN | 6670 | 6671 |
| (Met; | AMPWNLPADLAWFKRNTLNK | | |
| Linker (SG); | PVIMGRHTWESIGRPLPGRK | | |
| ecDHFR | NIILSSQPGTDDRVTWVKSV | | |
| (a 2-159 of | DEAIAACGDVPEIMVIGGGR | | |
| WT, Y100W); | VWEQFLPKAQKLYLTHIDAE | | |
| Linker | VEGDTHFPDYEPDDWESVFS | | |
| (H); CD40L; | EFHDADAQNSHSYCFEILER | | |
| stop) | RHMIETYNQTSPRSAATGLP | | |
| | ISMKIFMYLLTVFLITQMIG | | |
| | SALFAVYLHRRLDKIEDERN | | |
| | LHEDFVFMKTIQRCNTGERS | | |
| | LSLLNCEEIKSQFEGFVKDI | | |
| | MLNKEETKKENSFEMQKGDQ | | |
| | NPQIAAHVISEASSKTTSVL | | |
| | QWAEKGYYTMSNNLVTLENG | | |
| | KQLTVKRQGLYYIYAQVTFC | | |
| | SNREASSQAPFIASLCLKSP | | |
| | GRFERILLRAANTHSSAKPC | | |
| | GQQSIHLGGVFELQPGASVF | | |
| | VNVTDPSQVSHGTGFTSFGL | | |
| | LKL* | | |
| OT-002040 | MSGISLIAALAVDRVIGMEN | 6672 | 6673 |
| (Met; | AMPWNLPADLAWFKRNTLNK | | |
| Linker (SG); | PVIMGRHTWESIGRPLPGRK | | |
| ecDHFR | NIILSSQPGTDDRVTWVKSV | | |
| (a 2-159 of | DEAIAACGDVPEIMVIGGGR | | |
| WT); | VYEQFLPKAQKLYLTHIDAE | | |
| Linker (H); | VEGDTHFPDYEPDDWESVFS | | |
| CD40L; stop) | EFHDADAQNSHSYCFEILER | | |
| | RHMIETYNQTSPRSAATGLP | | |
| | ISMKIFMYLLTVFLITQMIG | | |
| | SALFAVYLHRRLDKIEDERN | | |
| | LHEDFVFMKTIQRCNTGERS | | |
| | LSLLNCEEIKSQFEGFVKDI | | |
| | MLNKEETKKENSFEMQKGDQ | | |
| | NPQIAAHVISEASSKTTSVL | | |
| | QWAEKGYYTMSNNLVTLENG | | |
| | KQLTVKRQGLYYIYAQVTFC | | |
| | SNREASSQAPFIASLCLKSP | | |
| | GRFERILLRAANTHSSAKPC | | |
| | GQQSIHLGGVFELQPGASVF | | |
| | VNVTDPSQVSHGTGFTSFGL | | |
| | LKL* | | |

### B. Pharmaceutical Compositions and Formulations

[0208] The present teachings further comprise pharmaceutical compositions comprising one or more of the tunable protein expression systems, nucleic acids, polynucleotides, modified cells or payloads of the present disclosure, and optionally at least one pharmaceutically acceptable excipient or inert ingredient.

[0209] As used herein the term “pharmaceutical composition” refers to a preparation of one or more of the tunable protein expression systems, nucleic acids, polynucleotides, payloads or components described herein, or pharmaceutically acceptable salts thereof, optionally with other chemical components such as physiologically suitable carriers and excipients.

[0210] The term “excipient” or “inactive ingredient” refers to an inert or inactive substance added to a pharmaceutical composition to further facilitate administration of a compound.

[0211] In some embodiments, compositions are administered to humans, human patients or subjects. For the purposes of the present disclosure, the phrase “active ingredient” generally refers to any one or more tunable protein expression system components to be delivered as described herein.

[0212] Although the descriptions of pharmaceutical compositions provided herein are principally directed to pharmaceutical compositions which are suitable for administration to humans, it will be understood by the skilled artisan that such compositions are generally suitable for administration to any other animal, e.g., to non-human animals, e.g. non-human mammals. Subjects to which administration of the pharmaceutical compositions is contemplated include, but are not limited to, non-human mammals, including agricultural animals such as cattle, horses, chickens and pigs, domestic animals such as cats, dogs, or research animals such as mice, rats, rabbits, dogs and non-human primates.

[0213] A pharmaceutical composition in accordance with the disclosure may be prepared, packaged, and/or sold in bulk, as a single unit dose, and/or as a plurality of single unit doses. As used herein, a “unit dose” is discrete amount of the pharmaceutical composition comprising a predetermined amount of the active ingredient. The amount of the active ingredient is generally equal to the dosage of the active ingredient which would be administered to a subject and/or a convenient fraction of such a dosage such as, for example, one-half or one-third of such a dosage.

[0214] Relative amounts of the active ingredient, the pharmaceutically acceptable excipient or inert ingredient, and/or any additional ingredients in a pharmaceutical composition in accordance with the disclosure will vary, depending upon the identity, size, and/or condition of the subject treated and further depending upon the route by which the composition is to be administered. By way of example, the composition may comprise between 0.1% and 100%, e.g., between 0.5 and 50%, between 1-30%, between 5-80%, at least 80% (w/w) active ingredient.

[0215] Efficacy of treatment or amelioration of disease can be assessed, for example by measuring disease progression, disease remission, symptom severity, reduction in pain, quality of life, dose of a medication required to sustain a treatment effect, level of a disease marker or any other measurable parameter appropriate for a given disease being treated or targeted for prevention. A healthcare practitioner skilled in the art may monitor efficacy of treatment or prevention by measuring any one of such parameters, or any combination of parameters. In connection with the administration of compositions of the present disclosure, “effective against” for example a cancer, indicates that administration in a clinically appropriate manner results in a beneficial effect for at least a statistically significant fraction of patients, such as an improvement of symptoms, a cure, a reduction in disease load, reduction in tumor mass or cell numbers, extension of life, improvement in quality of life, or other effect generally recognized as positive by medical doctors familiar with treating the particular type of cancer.

[0216] A treatment or preventive effect is evident when there is a statistically significant improvement in one or more parameters of disease status, or by a failure to worsen or to develop symptoms where they would otherwise be anticipated. As an example, a favorable change of at least 10% in a measurable parameter of disease, and preferably at least 20%, 30%, 40%, 50% or more can be indicative of effective treatment. Efficacy for a given composition or formulation of the present disclosure can also be judged using an experimental animal model for the given disease as known in the art. When using an experimental animal model, efficacy of treatment is evidenced when a statistically significant change is observed.

[0217] 1. Formulations

[0218] The compositions for example, polypeptides, proteins, polynucleotide and vector compositions of the present disclosure may be formulated in any manner suitable for delivery. The formulation may be, but is not limited to, nanoparticles, poly (lactic-co-glycolic acid) (PLGA) microspheres, lipidoids, lipoplex, liposome, polymers, carbohydrates (including simple sugars), cationic lipids and combinations thereof.

[0219] In one embodiment, the polynucleotide and vector formulation is a nanoparticle which may comprise at least one lipid. The lipid may be selected from, but is not limited to, DLin-DMA, DLin-K-DMA, 98N12-5, C12-200, DLin-MC3-DMA, DLin-KC2-DMA, DODMA, PLGA, PEG, PEG-DMG and PEGylated lipids. In another aspect, the lipid may be a cationic lipid such as, but not limited to, DLin-DMA, DLin-D-DMA, DLin-MC3-DMA, DLin-KC2-DMA and DODMA.

[0220] For polynucleotides of the disclosure, the formulation may be selected from any of those taught, for example, in International Application PCT/US2012/069610.

[0221] 2. Inactive Ingredients

[0222] In some embodiments, pharmaceutical or other formulations may comprise at least one excipient which is an inactive ingredient. As used herein, the term “inactive ingredient” refers to one or more inactive agents included in formulations. In some embodiments, all, none or some of the inactive ingredients which may be used in the formulations of the present disclosure may be approved by the US Food and Drug Administration (FDA). Suitable inactive ingredients for formulations of the present disclosure can be found in Applicant's PCT International Publication Nos. WO2018/161000; WO2018/231759; WO2019/241315; and WO2018/237323.

[0223] 3. Dosing, Delivery and Administration

[0224] The compositions of the disclosure may be delivered to a cell or a subject through one or more routes and modalities. The viral vectors containing one or more tunable protein expression systems, nucleic acids, polynucleotides, payloads, and other components described herein may be used to deliver them to a cell and/or a subject. Other modalities may also be used such as mRNAs, plasmids, and as recombinant proteins.

[0225] 4. Naked Delivery

[0226] Pharmaceutical compositions, tunable protein expression systems, nucleic acids, polynucleotides, or payloads of the present disclosure may be delivered to cells, tissues, organs and/or organisms in naked form. As used herein in, the term “naked” refers to pharmaceutical compositions, tunable protein expression systems, nucleic acids, polynucleotides, or payloads delivered free from agents or modifications which promote transfection or permeability. The naked pharmaceutical compositions, tunable protein expression systems, nucleic acids, polynucleotides, or payloads may be delivered to the cells, tissues, organs and/or organisms using routes of administration known in the art and described herein. In some embodiments, naked delivery may include formulation in a simple buffer such as saline or PBS.

[0227] 5. Formulated Delivery

[0228] In some embodiments, pharmaceutical compositions, tunable protein expression systems, nucleic acids, polynucleotides, or payloads of the present disclosure may be formulated, using methods described herein. Formulations may comprise pharmaceutical compositions, tunable protein expression systems, nucleic acids, polynucleotides, or payloads which may be modified and/or unmodified. Formulations may further include, but are not limited to, cell penetration agents, pharmaceutically acceptable carriers, delivery agents, bioerodible or biocompatible polymers, solvents, and/or sustained-release delivery depots. Formulations of the present disclosure may be delivered to cells using routes of administration known in the art and described herein.

[0229] Pharmaceutical compositions, tunable protein expression systems, nucleic acids, polynucleotides, or payloads may also be formulated for direct delivery to organs or tissues in any of several ways in the art including, but not limited to, direct soaking or bathing, via a catheter, by gels, powder, ointments, creams, gels, lotions, and/or drops, by using substrates such as fabric or biodegradable materials coated or impregnated with compositions, and the like.

[0230] 6. Delivery to Cells

[0231] In another aspect of the disclosure, polynucleotides encoding a tunable protein expression system, DRD, or payload of interest and compositions of the disclosure and vectors comprising said polynucleotides may be introduced into cells such as immune effector cells.

[0232] In one aspect of the disclosure, polynucleotides encoding a tunable protein expression system, DRD, or payload of interest and compositions of the disclosure, may be packaged into plasmids, viral vectors or integrated into viral genomes allowing transient or stable expression of the polynucleotides. Preferable viral vectors are retroviral vectors including lentiviral vectors and gamma retroviral vectors. In order to construct a retroviral vector, a polynucleotide molecule encoding a tunable protein expression system, DRD, or payload of interest is inserted into the viral genome in the place of certain viral sequences to produce a virus that is replication-defective. The recombinant viral vector is then introduced into a packaging cell line containing the gag, pol, and env genes, but without the LTR and packaging components. The recombinant retroviral particles are secreted into the culture media, then collected, optionally concentrated, and used for gene transfer. Lentiviral vectors are especially preferred as they are capable of infecting both dividing and non-dividing cells.

[0233] Vectors may also be transferred to cells by non-viral methods by physical methods such as needles, electroporation, sonoporation, hydroporation; chemical carriers such as inorganic particles (e.g. calcium phosphate, silica, gold) and/or chemical methods. In some embodiments, synthetic or natural biodegradable agents may be used for delivery such as cationic lipids, lipid nano emulsions, nanoparticles, peptide based vectors, or polymer based vectors. In some embodiments, vectors may be transferred to cells by temporary membrane disruption, for example, by high speed cell deformation.

[0234] In some embodiments, the polypeptides of the disclosure may be delivered to the cell directly. In one embodiment, the polypeptides of the disclosure may be delivered using synthetic peptides comprising an endosomal leakage domain (ELD) fused to a cell penetration domain (CLD). The polypeptides of the disclosure are co introduced into the cell with the ELD-CLD-synthetic peptide. ELDs facilitate the escape of proteins that are trapped in the endosome, into the cytosol. Such domains are derived proteins of microbial and viral origin and have been described in the art. CPDs allow the transport of proteins across the plasma membrane and have also been described in the art. The ELD-CLD fusion proteins synergistically increase the transduction efficiency when compared to the co-transduction with either domain alone. In some embodiments, a histidine rich domain may optionally be added to the shuttle construct as an additional method of allowing the escape of the cargo from the endosome into the cytosol. The shuttle may also include a cysteine residue at the N or C terminus to generate multimers of the fusion peptide. Multimers of the ELD-CLD fusion peptides generated by the addition of cysteine residue to the terminus of the peptide show even greater transduction efficiency when compared to the single fusion peptide constructs. The polypeptides of the disclosure may also be appended to appropriate localization signals to direct the cargo to the appropriate sub-cellular location e.g. nucleus. In some embodiments any of the ELDs, CLDs or the fusion ELD-CLD synthetic peptides taught in the International Patent Publication, WO2016161516 and WO2017175072 may be useful in the present disclosure (the contents of each of which are herein incorporated by reference in their entirety).

[0235] 7. Delivery Modalities and/or Vectors

[0236] The tunable protein expression systems, DRDs, or payloads of interest of the present disclosure may be delivered using one or more modalities. The present disclosure also provides vectors that package polynucleotides of the disclosure encoding tunable protein expression systems, DRDs, or payload constructs, and combinations thereof. Vectors of the present disclosure may also be used to deliver the packaged polynucleotides to a cell, a local tissue site or a subject. These vectors may be of any kind, including DNA vectors, RNA vectors, plasmids, viral vectors and particles. Viral vector technology is well known and described in Sambrook et al. (2001, Molecular Cloning: A Laboratory Manual, Cold Spring Harbor Laboratory, New York). Viruses, which are useful as vectors include, but are not limited to an adenovirus, adeno-associated virus (AAV), alphavirus, flavivirus, herpes virus, measles virus, rhabdovirus, retrovirus, lentivirus, Newcastle disease virus (NDV), poxvirus, and picornavirus. In some embodiments, the virus is selected from a lentivirus vector, a gamma retrovirus vector, adeno-associated virus (AAV) vector, adenovirus vector, and a herpes virus vector.

[0237] In general, vectors contain an origin of replication functional in at least one organism, a promoter sequence and convenient restriction endonuclease site, and one or more selectable markers e.g. a drug resistance gene.

[0238] In some embodiments, the recombinant expression vector may comprise regulatory sequences, such as transcription and translation initiation and termination codons, which are specific to the type of host cell into which the vector is to be introduced.

[0239] In some embodiments, the vector of the disclosure may comprise one or more payloads taught herein, wherein the two or more payloads may be included in one ligand response. In this case, the two or more payloads are tuned by the same ligand or responsive agent simultaneously.

[0240] 8. Lentiviral Vehicles/Particles

[0241] In some embodiments, lentiviral vehicles/particles may be used as delivery modalities. Lentiviruses are subgroup of the Retroviridae family of viruses, named because reverse transcription of viral RNA genomes to DNA is required before integration into the host genome. As such, the most important features of lentiviral vehicles/particles are the integration of their genetic material into the genome of a target/host cell. Some examples of lentivirus include the Human Immunodeficiency Viruses: HIV-1 and HIV-2, the Simian Immunodeficiency Virus (SIV), feline immunodeficiency virus (FIV), bovine immunodeficiency virus (BIV), Jembrana Disease Virus (JDV), equine infectious anemia virus (EIAV), equine infectious anemia virus, visna-maedi and caprine arthritis encephalitis virus (CAEV).

[0242] Typically, lentiviral particles making up the gene delivery vehicle are replication defective on their own (also referred to as “self-inactivating”). Lentiviruses are able to infect both dividing and non-dividing cells by virtue of the entry mechanism through the intact host nuclear envelope. Recombinant lentiviral vehicles/particles have been generated by multiply attenuating the HIV virulence genes, for example, the genes Env, Vif, Vpr, Vpu, Nef and Tat are deleted making the vector biologically safe. Correspondingly, lentiviral vehicles, for example, derived from HIV-1/HIV-2 can mediate the efficient delivery, integration and long-term expression of transgenes into non-dividing cells. As used herein, the term “recombinant” refers to a vector or other nucleic acid containing both lentiviral sequences and non-lentiviral retroviral sequences.

[0243] Lentiviral particles may be generated by co-expressing the virus packaging elements and the vector genome itself in a producer cell such as human HEK293T cells. These elements are usually provided in three or four separate plasmids. The producer cells are co-transfected with plasmids that encode lentiviral components including the core (i.e. structural proteins) and enzymatic components of the virus, and the envelope protein(s) (referred to as the packaging systems), and a plasmid that encodes the genome including a foreign transgene, to be transferred to the target cell, the vehicle itself (also referred to as the transfer vector). In general, the plasmids or vectors are included in a producer cell line. The plasmids/vectors are introduced via transfection, transduction or infection into the producer cell line. Methods for transfection, transduction or infection are well known by those of skill in the art. As non-limiting example, the packaging and transfer constructs can be introduced into producer cell lines by calcium phosphate transfection, lipofection or electroporation, generally together with a dominant selectable marker, such as neo, DHFR, Gln synthetase or ADA, followed by selection in the presence of the appropriate drug and isolation of clones.

[0244] The producer cell produces recombinant viral particles that contain the foreign gene, for example, the tunable protein expression system, DRD, and payload of the present disclosure. The recombinant viral particles are recovered from the culture media and titrated by standard methods used by those of skill in the art. The recombinant lentiviral vehicles can be used to infect target cells.

[0245] Cells that can be used to produce high-titer lentiviral particles may include, but are not limited to, HEK293T cells, 293G cells, STAR cells (Relander et al., Mol. Ther., 2005, 11: 452-459), FreeStyle™ 293 Expression System (ThermoFisher, Waltham, Mass.), and other HEK293T-based producer cell lines (e.g., Stewart et al., Hum Gene Ther. 2011, 22(3):357-369; Lee et al., Biotechnol Bioeng, 2012, 10996): 1551-1560; Throm et al., Blood. 2009, 113(21): 5104-5110; the contents of each of which are incorporated herein by reference in their entirety).

[0246] In some aspects, the envelope proteins may be heterologous envelope proteins from other viruses, such as the G protein of vesicular stomatitis virus (VSV G) or baculoviral gp64 envelope proteins. The VSV-G glycoprotein may especially be chosen among species classified in the vesiculovirus genus: Carajas virus (CJSV), Chandipura virus (CHPV), Cocal virus (COCV), Isfahan virus (ISFV), Maraba virus (MARAV), Piry virus (PIRYV), Vesicular stomatitis Alagoas virus (VSAV), Vesicular stomatitis Indiana virus (VSIV) and Vesicular stomatitis New Jersey virus (VSNJV) and/or stains provisionally classified in the vesiculovirus genus as Grass carp rhabdovirus, BeAn 157575 virus (BeAn 157575), Boteke virus (BTKV), Calchaqui virus (CQIV), Eel virus American (EVA), Gray Lodge virus (GLOV), Jurona virus (JURY), Klamath virus (KLAV), Kwatta virus (KWAV), La Joya virus (LJV), Malpais Spring virus (MSPV), Mount Elgon bat virus (MEBV), Perinet virus (PERV), Pike fry rhabdovirus (PFRV), Porton virus (PORV), Radi virus (RADIV), Spring viremia of carp virus (SVCV), Tupaia virus (TUPV), Ulcerative disease rhabdovirus (UDRV) and Yug Bogdanovac virus (YBV). The gp64 or other baculoviral env protein can be derived from Autographa californica nucleopolyhedrovirus (AcMNPV), Anagrapha falcifera nuclear polyhedrosis virus, Bombyx mori nuclear polyhedrosis virus, Choristoneura fumiferana nucleopolyhedrovirus, Orgyia pseudotsugata single capsid nuclear polyhedrosis virus, Epiphyas postvittana nucleopolyhedrovirus, Hyphantria cunea nucleopolyhedrovirus, Galleria mellonella nuclear polyhedrosis virus, Dhori virus, Thogoto virus, Antheraea pemyi nucleopolyhedrovirus or Batken virus.

[0247] Other elements provided in lentiviral particles may comprise retroviral LTR (long-terminal repeat) at either 5′ or 3′ terminus, a retroviral export element, optionally a lentiviral reverse response element (RRE), a promoter or active portion thereof, and a locus control region (LCR) or active portion thereof.

[0248] Methods for generating recombinant lentiviral particles are discussed in the art, for example, U.S. Pat. Nos. 8,846,385; 7,745,179; 7,629,153; 7,575,924; 7,179,903; and 6, 808, 905.

[0249] Lentivirus vectors used may be selected from, but are not limited to pLVX, pLenti, pLenti6, pLJM1, FUGW, pWPXL, pWPI, pLenti CMV puro DEST, pLJM1-EGFP, pULTRA, pInducer20, pHIV-EGFP, pCW57.1, pTRPE, pELPS, pRRL, and pLionII.

[0250] 9. Adeno-Associated Viral Particles

[0251] Delivery of polynucleotides of any of the tunable protein expression systems, DRDs, or payload constructs of the present disclosure may be achieved using recombinant adeno-associated viral (rAAV) vectors. Such vectors or viral particles may be designed to utilize any of the known serotype capsids or combinations of serotype capsids.

[0252] AAV vectors include not only single stranded vectors but self-complementary AAV vectors (scAAVs). scAAV vectors contain DNA which anneals together to form double stranded vector genome. By skipping second strand synthesis, scAAVs allow for rapid expression in the cell.

[0253] The rAAV vectors may be manufactured by standard methods in the art such as by triple transfection, in sf9 insect cells or in suspension cell cultures of human cells such as HEK293 cells.

[0254] The tunable protein expression systems, DRDs, or payload constructs may be encoded in one or more viral genomes to be packaged in the AAV capsids taught herein.

[0255] Such vector or viral genomes may also include, in addition to at least one or two ITRs (inverted terminal repeats), certain regulatory elements necessary for expression from the vector or viral genome. Such regulatory elements are well known in the art and include for example promoters, introns, spacers, stuffer sequences, and the like.

[0256] The tunable protein expression systems, DRDs, or payload constructs of the disclosure may be administered in one or more or separate AAV particles.

[0257] In some embodiments, the tunable protein expression systems may be administered in one or more AAV particles. In some embodiments, more than one tunable protein expression system, DRD or payload may be encoded in a viral genome.

[0258] 10. Retroviral Vehicles/Particles (γ-Retroviral Vectors)

[0259] In some embodiments, retroviral vehicles/particles may be used to deliver the tunable protein expression systems, DRDs, or payload constructs of the present disclosure. Retroviral vectors (RVs) allow the permanent integration of a transgene in target cells. In addition to lentiviral vectors based on complex HIV-1/2, retroviral vectors based on simple gamma-retroviruses have been widely used to deliver therapeutic genes and demonstrated clinically as one of the most efficient and powerful gene delivery systems capable of transducing a broad range of cell types. Example species of Gamma retroviruses include the murine leukemia viruses (MLVs) and the feline leukemia viruses (FeLV).

[0260] In some embodiments, gamma-retroviral vectors derived from a mammalian gamma-retrovirus such as murine leukemia viruses (MLVs), are recombinant. The MLV families of gamma retroviruses include the ecotropic, amphotropic, xenotropic and polytropic subfamilies. Ecotropic viruses are able to infect only murine cells using mCAT-1 receptor. Examples of ecotropic viruses are Moloney MLV and AKV. Amphotropic viruses infect murine, human and other species through the Pit-2 receptor. One example of an amphotropic virus is the 4070A virus. Xenotropic and polytropic viruses utilize the same (Xprl) receptor, but differ in their species tropism. Xenotropic viruses such as NZB-9-1 infect human and other species but not murine species, whereas polytropic viruses such as focus-forming viruses (MCF) infect murine, human and other species.

[0261] Gamma-retroviral vectors may be produced in packaging cells by co-transfecting the cells with several plasmids including one encoding the retroviral structural and enzymatic (gag-pol) polyprotein, one encoding the envelope (env) protein, and one encoding the vector mRNA comprising polynucleotide encoding the compositions of the present disclosure that is to be packaged in newly formed viral particles.

[0262] In some aspects, the recombinant gamma-retroviral vectors are pseudotyped with envelope proteins from other viruses. Envelope glycoproteins are incorporated in the outer lipid layer of the viral particles which can increase/alter the cell tropism.

[0263] In some embodiments, the recombinant gamma-retroviral vectors are self-inactivating (SIN) gammaretroviral vectors. The vectors are replication incompetent. SIN vectors may harbor a deletion within the 3′ U3 region initially comprising enhancer/promoter activity. Furthermore, the 5′ U3 region may be replaced with strong promoters (needed in the packaging cell line) derived from Cytomegalovirus or RSV, or an internal promotor of choice, and/or an enhancer element. The choice of the internal promotors may be made according to specific requirements of gene expression needed for a particular purpose of the disclosure.

[0264] In some embodiments, polynucleotides encoding the tunable protein expression systems, DRDs, or payload constructs are inserted within the recombinant viral genome. The other components of the viral mRNA of a recombinant gamma-retroviral vector may be modified by insertion or removal of naturally occurring sequences (e.g., insertion of an IRES, insertion of a heterologous polynucleotide encoding a polypeptide or inhibitory nucleic acid of interest, shuffling of a more effective promoter from a different retrovirus or virus in place of the wild-type promoter and the like). In some examples, the recombinant gamma-retroviral vectors may comprise modified packaging signal, and/or primer binding site (PBS), and/or 5′-enhancer/promoter elements in the U3-region of the 5′-long terminal repeat (LTR), and/or 3′-SIN elements modified in the U3-region of the 3′-LTR. These modifications may increase the titers and the ability of infection.

[0265] 11. Oncolytic Viral Vector

[0266] In some embodiments, polynucleotides of present disclosure may be packaged into oncolytic viruses. As used herein, the term “oncolytic virus” refers to a virus that preferentially infects and kills cancer cells such as vaccine viruses. An oncolytic virus can occur naturally or can be a genetically modified virus such as oncolytic adenovirus, and oncolytic herpes virus.

[0267] In some embodiments, oncolytic vaccine viruses may include viral particles of a thymidine kinase (TK)-deficient, granulocyte macrophage (GM)-colony stimulating factor (CSF)-expressing, replication-competent vaccinia virus vector sufficient to induce oncolysis of cells in the tumor; See e.g., U.S. Pat. No. 9,226,977.

[0268] 12. Messenger RNA (mRNA)

[0269] In some embodiments, the tunable protein expression systems, DRD, or payloads of the disclosure may be designed as a messenger RNA (mRNA). As used herein, the term “messenger RNA” (mRNA) refers to any polynucleotide which encodes a polypeptide of interest and which is capable of being translated to produce the encoded polypeptide of interest in vitro, in vivo, in situ or ex vivo. Such mRNA molecules may have the structural components or features of any of those taught in International Application number PCT/US2013/030062.

[0270] In some embodiments, the effector modules may be designed as self-amplifying RNA. “Self-amplifying RNA” as used herein refers to RNA molecules that can replicate in the host resulting in the increase in the amount of the RNA and the protein encoded by the RNA. Such self-amplifying RNA may have structural features or components of any of those taught in International Patent Application Publication No. WO2011005799.

[0271] 13. Dosing

[0272] The present disclosure provides methods comprising administering any one or more or component or composition of a tunable protein expression system to a subject in need thereof. These may be administered to a subject using any amount and any route of administration effective for preventing or treating or imaging a disease, disorder, and/or condition (e.g., a disease, disorder, and/or condition relating to cancer or an autoimmune disease). The exact amount required will vary from subject to subject, depending on the species, age, and general condition of the subject, the severity of the disease, the particular composition, its mode of administration, its mode of activity, and the like.

[0273] Compositions in accordance with the disclosure are typically formulated in dosage unit form for ease of administration and uniformity of dosage. It will be understood, however, that the total daily usage of the compositions of the present disclosure may be decided by the attending physician within the scope of sound medical judgment. The specific therapeutically effective, prophylactically effective, or appropriate imaging dose level for any particular patient will depend upon a variety of factors including the disorder being treated and the severity of the disorder; the activity of the specific compound employed; the specific composition employed; the age, body weight, general health, sex and diet of the patient; the time of administration, route of administration, and rate of excretion of the specific compound employed; the duration of the treatment; drugs used in combination or coincidental with the specific compound employed; and like factors well known in the medical arts.

[0274] In some embodiments, compositions of the disclosure may be used for cancer immunotherapy in varying doses to avoid T cell exhaustion, prevent cytokine release syndrome and minimize toxicity associated with immunotherapy. For example, low doses of the compositions of the present disclosure may be used to initially treat patients with high tumor burden, while patients with low tumor burden may be treated with high and repeated doses of the compositions of the disclosure to ensure recognition of a minimal tumor antigen load. In another instance, the compositions of the present disclosure may be delivered in a pulsatile fashion to reduce tonic T cell signaling and enhance persistence in vivo. In some aspects, toxicity may be minimized by initially using low doses of the compositions of the disclosure, prior to administering high doses. Dosing may be modified if serum markers such as ferritin, serum C-reactive protein, IL6, IFN-γ, and TNF-α are elevated.

[0275] In some embodiments, the neurotoxicity may be associated with CAR or TIL therapy. Such neurotoxicity may be associated CD19-CARs. Toxicity may be due to excessive T cell infiltration into the brain. In some embodiments, neurotoxicity may be alleviated by preventing the passage of T cells through the blood brain barrier. This can be achieved by the targeted gene deletion of the endogenous alpha-4 integrin inhibitors such as tysabri/natalizumab may also be useful in the present disclosure.

[0276] Also provided herein are methods of administering ligands or DRD ligands in accordance with the disclosure to a subject in need thereof. The ligand may be administered to a subject or to cells, using any amount and any route of administration effective for tuning the tunable protein expression system, DRD, or payloads of the disclosure. The exact amount required will vary from subject to subject, depending on the species, age, and general condition of the subject, the severity of the disease, the particular composition, its mode of administration, its mode of activity, and the like. The subject may be a human, a mammal, or an animal. Compositions in accordance with the disclosure are typically formulated in unit dosage form for ease of administration and uniformity of dosage. It will be understood, however, that the total daily usage of the compositions of the present disclosure may be decided by the attending physician within the scope of sound medical judgment. In certain embodiments, the ligands in accordance with the present disclosure may be administered at dosage levels sufficient to deliver from about 0.0001 mg/kg to about 100 mg/kg, from about 0.001 mg/kg to about 0.05 mg/kg, from about 0.005 mg/kg to about 0.05 mg/kg, from about 0.001 mg/kg to about 0.005 mg/kg, from about 0.05 mg/kg to about 0.5 mg/kg, from about 0.01 mg/kg to about 50 mg/kg, from about 0.1 mg/kg to about 40 mg/kg, from about 0.5 mg/kg to about 30 mg/kg, from about 0.01 mg/kg to about 10 mg/kg, from about 0.1 mg/kg to about 10 mg/kg, or from about 1 mg/kg to about 25 mg/kg, from about 10 mg/kg to about 100 mg/kg, from about 50 mg/kg to about 500 mg/kg, from about 100 mg/kg to about 1000 mg/kg, of subject body weight per day, one or more times a day, to obtain the desired effect. In some embodiments, the dosage levels may be 1 mg/kg, 5 mg/kg, 10 mg/kg, 20 mg/kg, 30 mg/kg, 40 mg/kg, 50 mg/kg, 60 mg/kg, 70 mg/kg, 80 mg/kg, 90 mg/kg, 100 mg/kg, 100 mg/kg, 110 mg/kg, 120 mg/kg, 130 mg/kg, 140 mg/kg, 150 mg/kg, 160 mg/kg, 170 mg/kg, 180 mg/kg, 190 mg/kg or mg/kg of subject body weight per day, or more times a day, to obtain the desired effect.

[0277] The present disclosure provides methods for delivering to a cell or tissue any of the ligands described herein, comprising contacting the cell or tissue with said ligand and can be accomplished in vitro, ex vivo, or in vivo. In certain embodiments, the ligands in accordance with the present disclosure may be administered to cells at dosage levels sufficient to deliver from about 1 nM to about 10 nM, from about 5 nM to about 50 nM, from about 10 nM to about 100 nM, from about 50 nM to about 500 nM, from about 100 nM to about 1000 nM, from about 1 μM to about 10 μM from about 5 μM to about 50 μM from about 10 μM to about 100 μM from about 25 μM to about 250 μM from about 50 μM to about 500 μM. In some embodiments, the ligand may be administered to cells at doses selected from but not limited to 0.00064 μM, 0.0032 μM, 0.016 μM, 0.08 μM, 0.4 μM, 1 μM 2 μM, 10 μM, 50 μM, 75, μM, 100 μM, 150 μM, 175 μM, 200 μM, 250 μM.

[0278] The desired dosage of the ligands of the present disclosure may be delivered only once, three times a day, two times a day, once a day, every other day, every third day, every week, every two weeks, every three weeks, or every four weeks. In certain embodiments, the desired dosage may be delivered using multiple administrations (e.g., two, three, four, five, six, seven, eight, nine, ten, eleven, twelve, thirteen, fourteen, or more administrations). When multiple administrations are employed, split dosing regimens such as those described herein may be used. As used herein, a “split dose” is the division of “single unit dose” or total daily dose into two or more doses, e.g., two or more administrations of the “single unit dose”. As used herein, a “single unit dose” is a dose of any therapeutic administered in one dose/at one time/single route/single point of contact, i.e., single administration event. The desired dosage of the ligand of the present disclosure may be administered as a “pulse dose” or as a “continuous flow”. As used herein, a “pulse dose” is a series of single unit doses of any therapeutic administered with a set frequency over a period of time. As used herein, a “continuous flow” is a dose of therapeutic administered continuously for a period of time in a single route/single point of contact, i.e., continuous administration event. A total daily dose, an amount given or prescribed in 24-hour period, may be administered by any of these methods, or as a combination of these methods, or by any other methods suitable for a pharmaceutical administration.

[0279] 14. Administration

[0280] In some embodiments, the compositions for cancer immunotherapy or treatment of autoimmune disease may be administered to cells ex vivo and subsequently administered to the subject. Immune cells can be isolated and expanded ex vivo using a variety of methods known in the art. For example, methods of isolating cytotoxic T cells are described in U.S. Pat. Nos. 6,805,861 and 6,531,451. Isolation of NK cells is described in U.S. Pat. No. 7,435,596.

[0281] In some embodiments, depending upon the nature of the cells, the cells may be introduced into a host organism e.g. a mammal, in a wide variety of ways including by injection, transfusion, infusion, local instillation or implantation. In some aspects, the cells of the disclosure may be introduced at the site of the tumor. The number of cells that are employed will depend upon a number of circumstances, the purpose for the introduction, the lifetime of the cells, the protocol to be used, for example, the number of administrations, the ability of the cells to multiply, or the like. The cells may be in a physiologically-acceptable medium.

[0282] In some embodiments, the cells of the disclosure may be administered in multiple doses to subjects having a disease or condition. The administrations generally effect an improvement in one or more symptoms of cancer or a clinical condition and/or treat or prevent cancer or clinical condition or symptom thereof.

[0283] 15. Routes of Delivery

[0284] The pharmaceutical compositions, tunable protein expression systems, nucleic acids, polynucleotides, payloads, vectors and cells of the present disclosure may be administered by any route to achieve a therapeutically effective outcome. These include, but are not limited to enteral (into the intestine), gastroenteral, epidural (into the dura matter), oral (by way of the mouth), transdermal, peridural, intracerebral (into the cerebrum), intracerebroventricular (into the cerebral ventricles), epicutaneous (application onto the skin), intradermal, (into the skin itself), subcutaneous (under the skin), nasal administration (through the nose), intravenous (into a vein), intravenous bolus, intravenous drip, intraarterial (into an artery), intramuscular (into a muscle), intracardiac (into the heart), intraosseous infusion (into the bone marrow), intrathecal (into the spinal canal), intraperitoneal, (infusion or injection into the peritoneum), intravesical infusion, intravitreal, (through the eye), intracavernous injection (into a pathologic cavity) intracavitary (into the base of the penis), intravaginal administration, intrauterine, extra-amniotic administration, transdermal (diffusion through the intact skin for systemic distribution), transmucosal (diffusion through a mucous membrane), transvaginal, insufflation (snorting), sublingual, sublabial, enema, eye drops (onto the conjunctiva), in ear drops, auricular (in or by way of the ear), buccal (directed toward the cheek), conjunctival, cutaneous, dental (to a tooth or teeth), electro-osmosis, endocervical, endosinusial, endotracheal, extracorporeal, hemodialysis, infiltration, interstitial, intra-abdominal, intra-amniotic, intra-articular, intrabiliary, intrabronchial, intrabursal, intracartilaginous (within a cartilage), intracaudal (within the cauda equine), intracisternal (within the cisterna magna cerebellomedularis), intracorneal (within the cornea), dental intracornal, intracoronary (within the coronary arteries), intracorporus cavernosum (within the dilatable spaces of the corporus cavernosa of the penis), intradiscal (within a disc), intraductal (within a duct of a gland), intraduodenal (within the duodenum), intradural (within or beneath the dura), intraepidermal (to the epidermis), intraesophageal (to the esophagus), intragastric (within the stomach), intragingival (within the gingivae), intraileal (within the distal portion of the small intestine), intralesional (within or introduced directly to a localized lesion), intraluminal (within a lumen of a tube), intralymphatic (within the lymph), intramedullary (within the marrow cavity of a bone), intrameningeal (within the meninges), intramyocardial (within the myocardium), intraocular (within the eye), intraovarian (within the ovary), intrapericardial (within the pericardium), intrapleural (within the pleura), intraprostatic (within the prostate gland), intrapulmonary (within the lungs or its bronchi), intrasinal (within the nasal or periorbital sinuses), intraspinal (within the vertebral column), intrasynovial (within the synovial cavity of a joint), intratendinous (within a tendon), intratesticular (within the testicle), intrathecal (within the cerebrospinal fluid at any level of the cerebrospinal axis), intrathoracic (within the thorax), intratubular (within the tubules of an organ), intratumor (within a tumor), intratympanic (within the aurus media), intravascular (within a vessel or vessels), intraventricular (within a ventricle), iontophoresis (by means of electric current where ions of soluble salts migrate into the tissues of the body), irrigation (to bathe or flush open wounds or body cavities), laryngeal (directly upon the larynx), nasogastric (through the nose and into the stomach), occlusive dressing technique (topical route administration which is then covered by a dressing which occludes the area), ophthalmic (to the external eye), oropharyngeal (directly to the mouth and pharynx), parenteral, percutaneous, periarticular, peridural, perineural, periodontal, rectal, respiratory (within the respiratory tract by inhaling orally or nasally for local or systemic effect), retrobulbar (behind the pons or behind the eyeball), intramyocardial (entering the myocardium), soft tissue, subarachnoid, subconjunctival, submucosal, topical, transplacental (through or across the placenta), transtracheal (through the wall of the trachea), transtympanic (across or through the tympanic cavity), ureteral (to the ureter), urethral (to the urethra), vaginal, caudal block, diagnostic, nerve block, biliary perfusion, cardiac perfusion, photopheresis or spinal.

[0285] 16. Parenteral and Injectable Administration

[0286] In some embodiments, pharmaceutical compositions, tunable protein expression systems, nucleic acids, polynucleotides, payloads, vectors and cells of the present disclosure may be administered parenterally. Liquid dosage forms for oral and parenteral administration include, but are not limited to, pharmaceutically acceptable emulsions, microemulsions, solutions, suspensions, syrups, and/or elixirs. In addition to active ingredients, liquid dosage forms may comprise inert diluents commonly used in the art such as, for example, water or other solvents, solubilizing agents and emulsifiers such as ethyl alcohol, isopropyl alcohol, ethyl carbonate, ethyl acetate, benzyl alcohol, benzyl benzoate, propylene glycol, 1,3-butylene glycol, dimethylformamide, oils (in particular, cottonseed, groundnut, corn, germ, olive, castor, and sesame oils), glycerol, tetrahydrofurfuryl alcohol, polyethylene glycols and fatty acid esters of sorbitan, and mixtures thereof. Besides inert diluents, oral compositions can include adjuvants such as wetting agents, emulsifying and suspending agents, sweetening, flavoring, and/or perfuming agents. In certain embodiments for parenteral administration, compositions are mixed with solubilizing agents such as CREMOPHOR®, alcohols, oils, modified oils, glycols, polysorbates, cyclodextrins, polymers, and/or combinations thereof. In other embodiments, surfactants are included such as hydroxypropylcellulose.

[0287] Injectable preparations, for example, sterile injectable aqueous or oleaginous suspensions may be formulated according to the known art using suitable dispersing agents, wetting agents, and/or suspending agents. Sterile injectable preparations may be sterile injectable solutions, suspensions, and/or emulsions in nontoxic parenterally acceptable diluents and/or solvents, for example, as a solution in 1,3-butanediol. Among the acceptable vehicles and solvents that may be employed are water, Ringer's solution, U.S.P., and isotonic sodium chloride solution. Sterile, fixed oils are conventionally employed as a solvent or suspending medium. For this purpose, any bland fixed oil can be employed including synthetic mono- or diglycerides. Fatty acids such as oleic acid can be used in the preparation of injectables.

[0288] Injectable formulations may be sterilized, for example, by filtration through a bacterial-retaining filter, and/or by incorporating sterilizing agents in the form of sterile solid compositions which can be dissolved or dispersed in sterile water or other sterile injectable medium prior to use.

[0289] 17. Detectable Agents and Labels

[0290] The tunable protein expression systems, nucleic acids, polynucleotides, payloads, vectors and cells of the present disclosure may be associated with or bound to one or more radioactive agents or detectable agents.

[0291] These agents include various organic small molecules, inorganic compounds, nanoparticles, enzymes or enzyme substrates, fluorescent materials, luminescent materials (e.g., luminol), bioluminescent materials (e.g., luciferase, luciferin, and aequorin), chemiluminescent materials, radioactive materials (e.g., 18F, 67Ga, 81mKr, 82Rb, 111In, 123I, 133Xe, 201T1, 125I, 35S, 14C, 3H, or 99mTc (e.g., as pertechnetate (technetate(VII), TcO4-)), and contrast agents (e.g., gold (e.g., gold nanoparticles), gadolinium (e.g., chelated Gd), iron oxides (e.g., superparamagnetic iron oxide (SPIO), monocrystalline iron oxide nanoparticles (MIONs), and ultra small superparamagnetic iron oxide (USPIO)), manganese chelates (e.g., Mn-DPDP), barium sulfate, iodinated contrast media (iohexol), microbubbles, or perfluorocarbons).

[0292] In some embodiments, the detectable agent may be a non-detectable precursor that becomes detectable upon activation (e.g., fluorogenic tetrazine-fluorophore constructs (e.g., tetrazine-BODIPY FL, tetrazine-Oregon Green 488, or tetrazine-BODIPY TMR-X) or enzyme activatable fluorogenic agents (e.g., PROSENSE® (VisEn Medical))). In vitro assays in which the enzyme labeled compositions can be used include, but are not limited to, enzyme linked immunosorbent assays (ELISAs), immunoprecipitation assays, immunofluorescence, enzyme immunoassays (EIA), radioimmunoassays (RIA), and Western blot analysis.

[0293] 18. Applications and Uses

[0294] The tunable protein expression systems, constructs, ligands, or compositions of the present disclosure may be utilized in a large variety of applications including, but not limited to, therapeutics, diagnosis and prognosis, bioengineering, bioprocessing, biomanufacturing, research agents, metabolomics, gene expression, enzyme replacement, etc.

[0295] The present disclosure provides methods comprising administering a composition, for example, a pharmaceutical composition comprising one or more components of a tunable protein expression system to a subject in need thereof.

[0296] While there may be several uses that do not involve a medical treatment, for example, to generate cell lines and reagents for scientific research, one use involves the administration of the compositions of the present disclosure to generate in vivo gene therapy or modified cells for adoptive cell therapy, for example, the treatment of cancer, autoimmune diseases and other diseases. In an illustrative method of medical treatment or prevention of a disease, condition or disorder in a subject in need thereof, can include the following steps: (a) providing a population of cells (either human, animal, primary or cell culture, including autologous, allogenic or syngeneic); (b) introducing at least one nucleic acid molecule into at least one cell in the population of cells, wherein the at least one nucleic acid molecule comprises: (i) a first polynucleotide comprising a first nucleic acid sequence that encodes a protein of interest that treats the disease; a second nucleic acid sequence that encodes a drug responsive domain (DRD), wherein the payload nucleic acid sequence is operably linked to the DRD nucleic acid sequence that encodes a protein of interest that treats the disease; (c) delivering the cell into the subject; and (d) administering a ligand to the subject that stabilizes the DRD sufficiently to enable expression of the protein of interest in the cell; wherein expression of the protein of interest is regulated by the presence of ligand in the subject, and the amount and/or duration of ligand administration is sufficient to produce a therapeutically effective amount of the protein of interest, to treat the disease.

[0297] In the above method, the protein of interest can be used to ameliorate, cure, prevent or reduce one or more symptoms of the disease, condition or disorder.

[0298] The compositions of the present disclosure may be administered to a subject using any amount and any route of administration effective for preventing or treating or imaging a disease, disorder, and/or condition (e.g., a disease, disorder, and/or condition relating to working memory deficits). The exact amount required will vary from subject to subject, depending on the species, age, and general condition of the subject, the severity of the disease, the particular composition, its mode of administration, its mode of activity, and the like.

[0299] Compositions in accordance with the disclosure are typically formulated in dosage unit form for ease of administration and uniformity of dosage. It will be understood, however, that the total daily usage of the compositions of the present disclosure may be decided by the attending physician within the scope of sound medical judgment. The specific therapeutically effective, prophylactically effective, or appropriate imaging dose level for any particular patient will depend upon a variety of factors including the disorder being treated and the severity of the disorder; the activity of the specific compound employed; the specific composition employed; the age, body weight, general health, sex and diet of the patient; the time of administration, route of administration, and rate of excretion of the specific compound employed; the duration of the treatment; drugs used in combination or coincidental with the specific compound employed; and like factors well known in the medical arts.

[0300] Also provided herein, are methods of administering one or more stabilizing ligands (as used herein, the ligand that stabilizes the DRD, may be called a stabilizing ligand or simply a ligand, with the understanding that the ligand is effective in stabilizing the DRD used in the tunable protein expression systems in accordance with the disclosure) to a subject in need thereof. The ligand may be administered to a subject or to cells, using any amount and any route of administration effective for tuning the amount of the protein of interest of the present disclosure in a cell transformed with the tunable protein expression system. The exact amount of stabilizing ligand required will vary from subject to subject, depending on the species, age, and general condition of the subject, the severity of the disease, the particular composition, its mode of administration, its mode of activity, and the like. The subject may be a human, a mammal, or an animal.

### C. Therapeutic Uses

[0301] 1. Cancer Immunotherapy

[0302] Cancer immunotherapy aims at the induction or restoration of the reactivity of the immune system towards cancer. Significant advances in immunotherapy research have led to the development of various strategies which may broadly be classified into active immunotherapy and passive immunotherapy. In general, these strategies may be utilized to directly kill cancer cells or to counter the immunosuppressive tumor microenvironment. Active immunotherapy aims at induction of an endogenous, long-lasting tumor-antigen specific immune response. The response can further be enhanced by non-specific stimulation of immune response modifiers such as cytokines. In contrast, passive immunotherapy includes approaches where effector immune molecules such as tumor-antigen specific cytotoxic T cells or antibodies are administered to the host. This approach is short lived and requires multiple applications.

[0303] Despite significant advances, the efficacy of current immunotherapy strategies is limited by associated toxicities. These are often related to the narrow therapeutic window associated with immunotherapy, which in part, emerges from the need to push therapy dose to the edge of potentially fatal toxicity to get a clinically meaningful treatment effect. Further, dose expands in vivo since adoptively transferred immune cells continue to proliferate within the patient, often unpredictably.

[0304] A major risk involved in immunotherapy is the on-target but off tumor side effects resulting from T-cell activation in response to normal tissue expression of the tumor associated antigen (TAA). Clinical trials utilizing T cells expressing T-cell receptor against specific TAA reported skin rash, colitis and hearing loss in response to immunotherapy.

[0305] Immunotherapy may also produce on target, on-tumor toxicities that emerge when tumor cells are killed in response to the immunotherapy. The adverse effects include tumor lysis syndrome, cytokine release syndrome and the related macrophage activation syndrome. Importantly, these adverse effects may occur during the destruction of tumors, and thus even a successful on-tumor immunotherapy might result in toxicity. Approaches to control immunotherapy via immunotherapeutic agent regulation are thus highly desirable since they have the potential to reduce toxicity and maximize efficacy.

[0306] The present disclosure provides systems, compositions, immunotherapeutic agents and methods for cancer immunotherapy. These compositions provide tunable regulation of gene expression and function in immunotherapy. In one aspect, the systems, compositions, immunotherapeutic agents and other components of the disclosure can be controlled by a separately added stabilizing ligand, which provides a significant flexibility to regulate cancer immunotherapy. Further, the systems, compositions and the methods of the present disclosure may also be combined with therapeutic agents such as chemotherapeutic agents, small molecules, gene therapy, and antibodies.

[0307] The tunable nature of the systems and compositions of the disclosure has the potential to improve the potency and duration of the efficacy of immunotherapies. Reversibly silencing the biological activity of adoptively transferred cells using compositions of the present disclosure allows maximizing the potential of cell therapy without irretrievably killing and terminating the therapy.

[0308] The present disclosure provides methods for fine tuning of immunotherapy after administration to patients. This in turn improves the safety and efficacy of immunotherapy and increases the subject population that may benefit from immunotherapy.

[0309] In some embodiments, immune cells of the disclosure may be T cells, NK cells, antigen presenting cells, for example, a dendritic cell or a tumor infiltrating tumor cell, wherein the immune cell is modified to express CD40L in addition to a second payload, for example, an antigen-specific T cell receptor (TCR), or an antigen specific chimeric antigen receptor (CAR) taught herein (known as CAR T cells). Accordingly, at least one polynucleotide encoding both CD40L and a CAR system (or a TCR), or a first polynucleotide encoding a CD40L payload operably linked to a DRD and a second polynucleotide encoding a different payload, for example, an antigen-specific T cell receptor (TCR), or an antigen specific chimeric antigen receptor (CAR) described herein may be linked to the same or different DRD as the DRD linked to the CD40L. In some embodiments, the tunable protein expression system of the present disclosure may comprise a first polynucleotide encoding a CD40L linked to a first DRD, and a second polynucleotide encoding a second payload, for example, an antigen-specific T cell receptor (TCR), or an antigen specific chimeric antigen receptor (CAR) operably linked to the first DRD or optionally a second, different DRD. The second payload may not be linked to a DRD and may be expressed in the transformed or transfected cell. In various embodiments, the first and second polynucleotide may be present in a single vector, or the two polynucleotides may each be separately present in two different vectors. In some embodiments, when CD40L and the second payload are encoded by the same polynucleotide, the second payload may be operably linked to a DRD or it may be expressed independently of the CD40L and not linked to any DRD, and may be separated from the CD40L and/or DRD by an IRES or some other transcription termination signal, such that the translation and expression of the second payload is independent of the translation and expression of the CD40L payload operably linked to a DRD. The one or more vectors may then be introduced into an immune cell, for example, a T cell, an NK cell, a dendritic cell or a tumor infiltrating tumor cell.

[0310] In related embodiments, the T cell expressing the CAR or TCR binds to a specific antigen via the extracellular targeting moiety of the CAR or TCR, thereby a signal via the intracellular signaling domain (s) is transmitted into the T cell, and as a result, the T cell is activated. The activated CAR T cell changes its behavior including release of a cytotoxic cytokine (e.g., a tumor necrosis factor, and lymphotoxin, etc.), improvement of a cell proliferation rate, change in a cell surface molecule, or the like. Such changes cause destruction of a target cell expressing the antigen recognized by the CAR or TCR. In addition, release of a cytokine or change in a cell surface molecule stimulates other immune cells, for example, a B cell, a dendritic cell, a NK cell, and a macrophage.

[0311] In related illustrative embodiments, the CAR introduced into a T cell may be a first-generation CAR including only the intracellular signaling domain from TCR CD3zeta, or a second-generation CAR including the intracellular signaling domain from TCR CD3zeta and a costimulatory signaling domain, or a third-generation CAR including the intracellular signaling domain from TCR CD3zeta and two or more costimulatory signaling domains, or a split CAR system, or an on/off switch CAR system. In one example, the expression of the CD40L, CAR or TCR is controlled by the stabilization of an operably linked DRD, which in the absence of a stabilizing ligand will result in the little to no accumulation of payload, i.e. CAR or TCR. In these examples, the two or more payloads may be linked to the same DRD or different DRDs, or one of the two payloads may be unregulated by a DRD.

[0312] The payload of interest is operably linked to a DRD, and therefore, without the stabilizing ligand, little to no protein of interest is produced. When stabilizing ligand is administered to the cell transformed with the tunable protein expression system, the DRD-linked payload is stabilized, permitting accumulation of the protein of interest in the cell. In some exemplary embodiments, the presence or absence of the DRD stabilizing ligand is used to tune the CAR or TCR expression in transduced T cells or NK cells. In various embodiments, the payload may be optionally linked to a signal sequence, a leader sequence, a cleavage site or some other peptide or polypeptide sequence or sequences that permits the protein of interest to be separated from the DRD in the cell after its accumulation.

[0313] In some embodiments, CAR T cells of the disclosure may be further modified to express another one, two, three or more immunotherapeutic agents. The immunotherapeutic agents may be another CAR or TCR specific to a different target molecule; a cytokine such as IL2, IL12, IL15 and IL18, or a cytokine receptor such as IL15Ra; a chimeric switch receptor that converts an inhibitory signal to a stimulatory signal; a homing receptor that guides adoptively transferred cells to a target site such as the tumor tissue; an agent that optimizes the metabolism of the immune cell; or a safety switch gene (e.g., a suicide gene) that kills activated T cells when a severe event is observed after adoptive cell transfer or when the transferred immune cells are no-longer needed. These molecules may be included in the same effector module or in separate effector modules.

[0314] In one embodiment, the CAR T cell (including TCR T cell) of the disclosure may be an “armed” CAR T cell which is transformed with one or more components of the tunable protein expression system comprising a CAR payload and either the same or a different polynucleotide sequence encoding a CD40L operably linked to the same or different DRD. The inducible or constitutively secreted active cytokines further arm CAR T cells to improve efficacy and persistence. In this context, such CAR T cell is also referred to as “armored CAR T cell”. The “armor” molecule may be selected based on the tumor microenvironment and other elements of the innate and adaptive immune systems. In some embodiments, the molecule may be a stimulatory factor such as IL2, IL12, IL15, IL18, type I IFN, CD40L and 4-1BBL which have been shown to further enhance CAR T cell efficacy and persistence in the face of a hostile tumor microenvironment via different mechanisms.

[0315] In one embodiment, the tunable protein expression system, and components thereof that tune expression levels and activities of any described payloads or proteins of interest (used interchangeably) may be used for immunotherapy. As non-limiting examples, an immunotherapeutic agent may be an antibody and fragments and variants thereof, a cancer specific T cell receptor (TCR) and variants thereof, an anti-tumor specific chimeric antigen receptor (CAR), a chimeric switch receptor, an inhibitor of a co-inhibitory receptor or ligand, an agonist of a co-stimulatory receptor and ligand, a cytokine, chemokine, a cytokine receptor, a chemokine receptor, a soluble growth factor, a metabolic factor, a suicide gene, a homing receptor, or any agent that induces an immune response in a cell and a subject.

[0316] In some embodiments, the composition for inducing or suppressing an immune response may comprise one or more components of a tunable protein expression system, or one or more polypeptides encoded by a tunable protein expression system. In some embodiments, the tunable protein expression system may comprise a first polynucleotide comprising a first nucleic acid sequence that encodes a payload; a second nucleic acid sequence that encodes a drug responsive domain (DRD).

[0317] In some embodiments, a tunable protein expression system, and compositions of the present disclosure relate to tunable protein expression (protein of interest or payload) function, including for example, anti-tumor immune responses of immunotherapeutic agents. In some embodiments, the immunotherapeutic agents may include cytokines, chemokines, antibodies, integrins, integral proteins, membrane proteins, extracellular proteins, for example, CD40L, that may be used to upregulate, or improve the function of one or more immune cell types, or down regulate the activity of one or more immune cell types. In various embodiments, the immunotherapeutic agents useful in the treatment of a disease, condition or disorder can include CD40L, alone or in combination with other cytokines, chemokines, antibodies, integrins, integral proteins, membrane proteins, extracellular proteins. In various embodiments, the tunable protein expression system provides a protein of interest or payload that includes CD40L that promotes or upregulates the longevity and activity of one or more immune cell types useful to treat a disease, condition or disorder or a symptom associate with any of these.

[0318] 2. Adoptive Cell Transfer (Adoptive Immunotherapy)

[0319] In some embodiments, cells which are genetically modified to encode and express at least one payload, for example, CD40L operably linked to a DRD, the regulated expression of which may be used for adoptive cell therapy (ACT). As used herein, adoptive cell transfer refers to the administration of immune cells (from autologous, allogenic or genetically modified hosts) with direct anticancer activity. ACT has shown promise in clinical application against malignant and infectious disease.

[0320] According to the present disclosure, the one or more components of a tunable protein expression system may be used in the development and implementation of cell therapies such as adoptive cell therapy. In some embodiments, one or more components of a tunable protein expression system, may be used in cell therapies to effect CAR therapies, in the manipulation or regulation of TILs, in allogeneic cell therapy, in combination T cell therapy with other treatment lines (e.g. radiation, cytokines), to encode engineered TCRs, or modified TCRs, or to enhance T cells other than TCRs (e.g. by introducing cytokine genes, genes for the checkpoint inhibitors PD1, CTLA4).

[0321] Provided herein are methods for use in adoptive cell therapy. The methods involve preconditioning a subject in need thereof; modulating immune cells with one or more components of a tunable protein expression system, and/or compositions of the present disclosure; administering to a subject engineered immune cells expressing compositions of the disclosure and the successful engraftment of engineered cells within the subject.

[0322] In some embodiments, regulatable protein expression systems and compositions of the present disclosure may be used to minimize preconditioning regimens associated with adoptive cell therapy. As used herein “preconditioning” refers to any therapeutic regimen administered to a subject to improve the outcome of adoptive cell therapy. Preconditioning strategies include but are not limited to total body irradiation and/or lymph depleting chemotherapy. Adoptive therapy clinical trials without preconditioning have failed to demonstrate any clinical benefit, indicating its importance in ACT. Yet, preconditioning is associated with significant toxicity and limits the subject cohort that is suitable for ACT. In some instances, immune cells for ACT may be engineered to express CD40 L alone or with a cytokine, such as IL-2, IL-6, IL12 and IL15 as payload using the tunable protein expression constructs described herein to permit selective expression of the protein of interest which may be tuned using a stabilizing ligand of the present disclosure to reduce the need for preconditioning.

[0323] In some embodiments, immune cells for ACT may be dendritic cells, T cells such as CD8+ T cells and CD4+ T cells, natural killer (NK) cells, NK T cells, Cytotoxic T lymphocytes (CTLs), tumor infiltrating lymphocytes (TILs), lymphokine activated killer (LAK) cells, memory T cells, regulatory T cells (Tregs), helper T cells, cytokine-induced killer (CIK) cells, and any combination thereof. In other embodiments, immune stimulatory cells for ACT may be generated from embryonic stem cell (ESC) and induced pluripotent stem cell (iPSC). In some embodiments, autologous or allogeneic immune cells are used for ACT.

[0324] In some embodiments, cells used for ACT may be antigen presenting cells, for example, dendritic cells and T cells engineered to express CD40L alone or in combination with CARs comprising an antigen-binding domain specific to an antigen on tumor cells of interest. In other embodiments, cells used for ACT may be NK cells engineered to express CD40L alone or in combination with cytokines or CARs which may be used for adoptive immunotherapy. In one example, a mixture of dendritic cells, T cells and/or NK cells may be used for ACT. The expression level of CD40L in antigen presenting cells, T cells and/or NK cells, according to the present disclosure, is tuned and controlled by a small molecule that binds to the DRD(s) operably linked to the payload, for example, CD40L, which enables selective expression of the CD40L in the transformed antigen presenting cells, T cells and NK cells either alone or coupled with other payloads, for example, CARs or cytokines, for example, IL-2, IL-6, IL12 and IL15 as payload.

[0325] In some embodiments, NK cells engineered to express one or more components of a tunable protein expression system may be used for ACT. NK cell activation induces perforin/granzyme-dependent apoptosis in target cells. NK cell activation also induces cytokine secretion such as IFN γ, TNF-α and GM-CSF. These cytokines enhance the phagocytic function of macrophages and their antimicrobial activity and augment the adaptive immune response via up-regulation of antigen presentation by antigen presenting cells such as dendritic cells (DCs).

[0326] Other examples of genetic modification may include the introduction of chimeric antigen receptors (CARs) and the down-regulation of inhibitory NK cell receptors such as NKG2A.

[0327] NK cells may also be genetically reprogrammed to circumvent NK cell inhibitory signals upon interaction with tumor cells. For example, using CRISPR, ZFN, or TALEN to genetically modify NK cells to silence their inhibitory receptors may enhance the anti-tumor capacity of NK cells.

[0328] Immune cells can be isolated and expanded ex vivo using a variety of methods known in the art. For example, methods of isolating and expanding cytotoxic T cells are described in U.S. Pat. Nos. 6,805,861 and 6,531,451; US Patent Publication No. US20160348072A1 and International Patent Publication No. WO2016168595A1; the contents of each of which are incorporated herein by reference in their entirety. Isolation and expansion of NK cells is described in US Patent Publication No. US20150152387A1, U.S. Pat. No. 7,435,596; and Oyer, J. L. (2016). Cytotherapy 18(5):653-63; the contents of each of which are incorporated by reference herein in its entirety. Specifically, human primary NK cells may be expanded in the presence of feeder cells e.g. a myeloid cell line that has been genetically modified to express membrane bound IL15, IL21, IL12 and 4-1BBL.

[0329] In some instances, sub populations of immune cells may be enriched for ACT. Methods for immune cell enrichment are taught in International Patent Publication No. WO2015039100A1. In another example, T cells positive for B and T lymphocyte attenuator marker BTLA) may be used to enrich for T cells that are anti-cancer reactive as described in U.S. Pat. No. 9,512,401 (the content of each of which are incorporated herein by reference in their entirety).

[0330] In some embodiments, immune cells for ACT may be depleted of select sub populations to enhance T cell expansion. For example, immune cells may be depleted of Foxp3+T lymphocytes to minimize the anti-tumor immune response using methods taught in US Patent Publication No. US 20160298081A1; the contents of which are incorporated by reference herein in their entirety.

[0331] In some embodiments, activation and expansion of T cells for ACT is achieved antigenic stimulation of a transiently expressed Chimeric Antigen Receptor (CAR) on the cell surface. Such activation methods are taught in International Patent NO. WO2017015427, the content of which are incorporated herein by reference in their entirety.

[0332] In some embodiments, immune cells may be activated by antigens associated with antigen presenting cells (APCs). In some embodiments, the APCs may be dendritic cells, macrophages or B cells that are antigen specific or nonspecific. The APCs may autologous or homologous in their organ. In some embodiments, the APCs may be artificial antigen presenting cells (aAPCs) such as cell based aAPCs or acellular aAPCs. Cell based aAPCs may be selected from either genetically modified allogeneic cells such as human erythroleukemia cells or xenogeneic cells such as murine fibroblasts and Drosophila cells. Alternatively, the APCs maybe be acellular wherein the antigens or costimulatory domains are presented on synthetic surfaces such as latex beads, polystyrene beads, lipid vesicles or exosomes.

[0333] In some embodiments, cells of the disclosure, specifically T cells may be expanded using artificial cell platforms. In one embodiment, the mature T cells may be generated using artificial thymic organoids (ATOS) described by Seet C S et al. 2017. Nat Methods 14, 521-530 (the contents of which are incorporated herein by reference in their entirety). ATOs are based on a stromal cell line expressing delta like canonical notch ligand (DLL1). In this method, stromal cells are aggregated with hematopoietic stem and progenitor cells by centrifugation and deployed on a cell culture insert at the air-fluid interface to generate organoid cultures. ATO-derived T cells exhibit naive phenotypes, a diverse T cell receptor (TCR) repertoire and TCR-dependent function.

[0334] In some embodiments, adoptive cell therapy is carried out by autologous transfer, wherein the cells are derived from a subject in need of a treatment and the cells, following isolation and processing are administered to the same subject. In other instances, ACT may involve allogenic transfer wherein the cells are isolated and/or prepared from a donor subject other than the recipient subject who ultimately receives cell therapy. The donor and recipient subject may be genetically identical, or similar or may express the same HLA class or subtype.

[0335] In some embodiments, the multiple immunotherapeutic agents introduced into the immune cells for ACT (e.g., dendritic cells, T cells and NK cells) may be controlled by the same or different tunable protein expression systems. In one example, each of the two payloads, for example, a CD40L payload and a CAR construct such as CD19 CAR payload are regulated by one or more DRDs on the same or different tunable protein expression systems. In some related embodiments, the payloads are linked to the same or different DRDs. In some embodiments, the CD40L is operably linked to a DRD, and the CAR construct such as CD19 CAR is positioned upstream or down stream from the CD40L and not linked to any DRD, or the CAR construct such as CD19 CAR is introduced into the cell encoded by a separate nucleotide sequence as the nucleotide sequence encoding the first payload, and the second payload may be linked to a DRD which is the same or different from the CD40L linked DRD or may be free of any linkage to any DRD. The payloads are transcribed, translated and expressed when the DRD(s) is/are stabilized with a stabilizing ligand specific for the DRD(s). The expression of CD40L and optionally a second payload, for example, IL12 and/or CD19 CAR may be tuned using one or more stabilizing ligands. In other embodiments, the multiple immunotherapeutic agents introduced into the immune cells for ACT (e.g., T cells and NK cells) may be controlled by different tunable protein expression systems. In one example, CD40L and a CAR construct such as CD19 CAR, each may be operably linked to different DRDs, and thereby can be tuned separately using different stimuli.

[0336] Following genetic modulation using one or more components of a tunable protein expression system and compositions of the disclosure, cells are administered to the subject in need thereof. Methods for administration of cells for adoptive cell therapy are known and may be used in connection with the provided methods and compositions.

[0337] In some embodiments, immune cells for ACT may be modified to express one or more immunotherapeutic agents (proteins of interest) which facilitate immune cells activation, infiltration, expansion, survival and anti-tumor functions. The immunotherapeutic agents may be a second CAR or TCR specific to a different target molecule; a cytokine or a cytokine receptor; a chimeric switch receptor that converts an inhibitory signal to a stimulatory signal; a homing receptor that guides adoptively transferred cells to a target site such as the tumor tissue; an agent that optimizes the metabolism of the immune cell; or a safety switch gene (e.g., a suicide gene) that kills activated T cells when a severe event is observed after adoptive cell transfer or when the transferred immune cells are no-longer needed.

[0338] In some embodiments, immune cells used for adoptive cell transfer can be genetically manipulated to improve their persistence, cytotoxicity, tumor targeting capacity, and ability to home to disease sites in vivo, with the overall aim of further improving upon their capacity to kill tumors in cancer patients. One example is to introduce one or more components of a tunable protein expression system of the disclosure encoding a cytokine, such as a gamma-cytokine (e.g. IL2 and IL15) into immune cells to promote immune cell proliferation and survival. Transduction of cytokine genes (e.g., gamma-cytokines IL2 and IL15) encoded by a tunable protein expression system into immune cells will enable the immune cells, e.g. NK cells to propagate without addition of exogenous cytokines such that the cytokine expressing NK cells have enhanced tumor cytotoxicity.

[0339] In some embodiments, one or more components of a tunable protein expression system may be utilized to prevent T cell exhaustion. As used herein, “T cell exhaustion” refers to the stepwise and progressive loss of T cell function caused by chronic T cell activation. T cell exhaustion is a major factor limiting the efficacy of antiviral and antitumor immunotherapies. Exhausted T cells have low proliferative and cytokine producing capabilities concurrent with high rates of apoptosis and high surface expression of multiple inhibitory receptors. T cell activation leading to exhaustion may occur either in the presence or absence of the antigen.

[0340] In some embodiments, the tunable protein expression system and their components may be utilized to prevent T cell exhaustion in the context of Chimeric Antigen Receptor-T cell therapy (CAR-T). In this context, exhaustion in some instances, may be caused by the oligomerization of the scFvs of the CAR on the cell surface which leads to continuous activation of the intracellular domains of the CAR. As a non-limiting example, CARs of the present disclosure may include scFvs that are unable to oligomerize. As another non-limiting example, CARs that are rapidly internalized and re-expressed following antigen exposure may also be selected to prevent chronic scFv oligomerization on cell surface. In one embodiment, the framework region of the scFvs may be modified to prevent constitutive CAR signaling (Long et al. 2014. Cancer Research. 74(19) S1; the contents of which are incorporated by reference in their entirety). One or more components of a tunable protein expression system of the present disclosure may also be used to regulate the surface expression of the CAR on the T cell surface to prevent chronic T cell activation. The CARs of the disclosure may also be engineered to minimize exhaustion. As a non-limiting example, the 41-BB signaling domain may be incorporated into CAR design to ameliorate T cell exhaustion. In some embodiments, any of the strategies disclosed by Long H A et al. may be utilized to prevent exhaustion (Long A H et al. (2015) Nature Medicine 21, 581-590; the contents of which are incorporated herein by reference in their entirety).

[0341] In some embodiments, the tunable nature of the tunable protein expression system of the present disclosure may be utilized to reverse human T cell exhaustion observed with tonic CAR signaling. Reversibly silencing the biological activity of adoptively transferred cells using compositions of the present disclosure may be used to reverse tonic signaling which, in turn, may reinvigorate the T cells. Reversal of exhaustion may be measured by the downregulation of multiple inhibitory receptors associated with exhaustion.

[0342] In some embodiments, T cell metabolic pathways may be modified to diminish the susceptibility of T cells to exhaustion. Metabolic pathways may include, but are not limited to glycolysis, urea cycle, citric acid cycle, beta oxidation, fatty acid biosynthesis, pentose phosphate pathway, nucleotide biosynthesis, and glycogen metabolic pathways. As a non-limiting example, payloads that reduce the rate of glycolysis may be utilized to restrict or prevent T cell exhaustion (Long et al. Journal for Immunotherapy of Cancer 2013, 1 (Suppl 1): P21; the contents of which are incorporated by reference in their entirety). In one embodiment, T cells of the present disclosure may be used in combination with inhibitors of glycolysis such as 2-deoxyglucose, and rapamycin.

[0343] In some embodiments, payloads or proteins of interest of the disclosure may be used in conjunction with antibodies or fragments that target T cell surface markers associated with T cell exhaustion. T-cell surface markers associated with T cell exhaustion that may be used include, but are not limited to, CTLA-1, PD-1, TGIT, LAG-3, 2B4, BTLA, TIM3, VISTA, and CD96. In some embodiments, one or more components of a tunable protein expression system may be utilized to prevent T cell exhaustion. As used herein, “T cell exhaustion” refers to the stepwise and progressive loss of T cell function caused by chronic T cell activation. T cell exhaustion is a major factor limiting the efficacy of antiviral and antitumor immunotherapies. Exhausted T cells have low proliferative and cytokine producing capabilities concurrent with high rates of apoptosis and high surface expression of multiple inhibitory receptors. T cell activation leading to exhaustion may occur either in the presence or absence of the antigen.

[0344] In some embodiments, one or more components of a tunable protein expression system, and their components may be utilized to prevent T cell exhaustion in the context of Chimeric Antigen Receptor-T cell therapy (CAR-T). In this context, exhaustion in some instances, may be caused by the oligomerization of the scFvs of the CAR on the cell surface which leads to continuous activation of the intracellular domains of the CAR. As a non-limiting example, CARs of the present disclosure may include scFvs that are unable to oligomerize. As another non-limiting example, CARs that are rapidly internalized and re-expressed following antigen exposure may also be selected to prevent chronic scFv oligomerization on cell surface. In one embodiment, the framework region of the scFvs may be modified to prevent constitutive CAR signaling (Long et al. 2014. Cancer Research. 74(19) S1; the contents of which are incorporated by reference in their entirety). One or more components of a tunable protein expression system of the present disclosure may be also used to regulate the surface expression of the CAR on the T cell surface to prevent chronic T cell activation. The CARs of the disclosure may also be engineered to minimize exhaustion. As a non-limiting example, the 41-BB signaling domain may be incorporated into CAR design to ameliorate T cell exhaustion.

[0345] In some embodiments, the compositions of the present disclosure may be utilized to alter TIL (tumor infiltrating lymphocyte) populations in a subject. In one embodiment, any of the payloads described herein may be utilized to change the ratio of CD4 positive cells to CD8 positive populations. In some embodiments, TILs may be sorted ex vivo and engineered to express any of the cytokines described herein. Payloads of the disclosure may be used to expand CD4 and/or CD8 populations of TILs to enhance TIL mediated immune response.

[0346] Parameters for improving CAR-T therapy outcome are described in Finney et al. JCI. 2019; 129(5):2123-2132 (the contents of which are herein incorporated by reference in their entirety). The levels of biomarker LAG3 (high)/TNF-α (low) in peripheral blood CD8+ T cells at the time of apheresis may also predict a subsequent dysfunctional response in subjects with high antigen load who do not achieve complete response that is durable for more than a few weeks. T cell-intrinsic features that are a consequence of the starting T cell repertoire and the effects of the manufacturing process converge with CD19 antigen-induced activation following adoptive transfer may also play a role in the outcome of CAR-T therapy. The starting T cell repertoire may in part be affected by the timing of the apheresis. In one embodiment, the apheresis may be performed prior to chemotherapy. Cumulative burden of CD19 expressing leukemic and normal B cells, as evaluated in the bone marrow prior to lymph depleting chemotherapy may be important for determining CAR-T therapy outcome. According to Finney et al., increase antigen burden improves CAR-T therapy outcome. To increase CD19 antigen burden in vivo, subjects may also be infused with expanded subject derived T cells genetically modified to express CD19 (also referred to as T-APCs).

[0347] 3. Cancer Vaccines

[0348] In some embodiments, tunable protein expression system constructs, payloads of interest (e.g., immunotherapeutic agents), vectors, cells and compositions of the present disclosure may be used in conjunction with cancer vaccines.

[0349] In some embodiments, cancer vaccine may comprise peptides and/or proteins derived from tumor associated antigen (TAA). Such strategies may be utilized to evoke an immune response in a subject, which in some instances may be a cytotoxic T lymphocyte (CTL) response. Peptides used for cancer vaccines may also modified to match the mutation profile of a subject. For example, EGFR derived peptides with mutations matched to the mutations found in the subject in need of therapy have been successfully used in patients with lung cancer.

[0350] In one embodiment, cancer vaccines of the present disclosure may include superagonist altered peptide ligands (APL) derived from TAAs. These are mutant peptide ligands deviate from the native peptide sequence by one or more amino acids, which activate specific CTL clones more effectively than native epitopes. These alterations may allow the peptide to bind better to the restricting Class I MHC molecule or interact more favorably with the TCR of a given tumor-specific CTL subset. APLs may be selected using methods known in the art.

[0351] In some embodiments, effector immune cells genetically modified to encode the components of the tunable protein expression system, and payloads of the disclosure may be combined with the biological adjuvants described herein. Dual regulation of CAR and cytokines and ligands to segregate the kinetic control of target-mediated activation from intrinsic cell T cell expansion. Such dual regulation also minimizes the need for pre-conditioning regimens in patients. As a non-limiting example, a DRD regulated payload, for example, a CD40L, in combination with a CAR e.g. CD19 CAR may be combined with cytokines e.g. IL12 to enhance the anti-tumor efficacy of the CAR. As another non-limiting example, dendritic cell-based vaccinations combined with recombinant human IL7 to improve outcome in high-risk pediatric sarcomas patients may be employed in the methods described herein.

[0352] In some embodiments, effector immune cells modified to express one or more antigen-specific TCRs or CARs may be combined with compositions of the disclosure comprising immunotherapeutic agents, for example, CD40L that convert the immunosuppressive tumor microenvironment.

[0353] In one aspect, effector immune cells modified to express CARs specific to different target molecules on the same cell may be combined. In another aspect, different immune cells modified to express the same CAR construct such as NK cells and T cells may be used in combination for a tumor treatment, for instance, a T cell modified to express a CD40L in combination with a CD19 CAR may be combined with a NK cell modified to express the same CD19 CAR to treat B cell malignancy.

[0354] In other embodiments, immune cells modified to express CARs may be combined with checkpoint blockade agents.

[0355] In some embodiments, effector immune cells genetically modified to express one or more components of the tunable protein expression system, for example a payload of the disclosure, may be combined with cancer vaccines and other immunotherapeutics and adjuvant treatments of the disclosure.

[0356] In some embodiments, methods of the disclosure may include combination of the compositions of the disclosure with other agents effective in the treatment of cancers, infection diseases and other immunodeficient disorders, such as anti-cancer agents. As used herein, the term “anti-cancer agent” refers to any agent which is capable of negatively affecting cancer in a subject, for example, by killing cancer cells, inducing apoptosis in cancer cells, reducing the growth rate of cancer cells, reducing the incidence or number of metastases, reducing tumor size, inhibiting tumor growth, reducing the blood supply to a tumor or cancer cells, promoting an immune response against cancer cells or a tumor, preventing or inhibiting the progression of cancer, or increasing the lifespan of a subject with cancer.

[0357] In some embodiments, anti-cancer agent or therapy may be a chemotherapeutic agent, or radiotherapy, immunotherapeutic agent, surgery, or any other therapeutic agent which, in combination with the present disclosure, improves the therapeutic efficacy of treatment.

[0358] In one embodiment, one or more components of a tunable protein expression system comprising a CD19 CAR may be used in combination with amino pyrimidine derivatives such as the Burkit's tyrosine receptor kinase (BTK) inhibitor.

[0359] In some embodiments, compositions of the present disclosure may be used in combination with immunotherapeutics other than the inventive therapy described herein, such as antibodies specific to some target molecules on the surface of a tumor cell.

[0360] Exemplary chemotherapies include, without limitation, Acivicin; Aclarubicin; Acodazole hydrochloride; Acronine; Adozelesin; Aldesleukin; Altretamine; Ambomycin; Ametantrone acetate; Amsacrine; Anastrozole; Anthramycin; Asparaginase; Asperrin, Sulindac, Curcumin, alkylating agents including: Nitrogen mustards such as mechlor-ethamine, cyclophosphamide, ifosfamide, melphalan and chlorambucil; nitrosoureas such as carmustine (BC U), lomustine (CCNU), and semustine (methyl-CC U); thylenimines/methylmelamine such as thriethylenemelamine (TEM), triethylene, thiophosphoramide (thiotepa), hexamethylmelamine (HMM, altretamine); alkyl sulfonates such as busulfan; triazines such as dacarbazine (DTIC); antimetabolites including folic acid analogs such as methotrexate and trimetrexate, pyrrolidine analogs such as 5-fluorouracil, fluorodeoxyuridine, gemcitabine, cytosine arabinoside (AraC, cytarabine), 5-azacytidine, 2,2′-difluorodeoxycytidine, purine analogs such as 6-mercaptopurine, 6-thioguanine, azathioprine, 2′-deoxycoformycin (pentostatin), erythrohydroxynonyladenine (EHNA), fludarabine phosphate, and 2-chlorodeoxyadenosine (cladribine, 2-CdA); natural products including antimitotic drugs such as paclitaxel, vinca alkaloids including vinblastine (VLB), vincristine, and vinorelbine, taxotere, estramustine, and estramustine phosphate; epipodophylotoxins such as etoposide and teniposide; antibiotics, such as actimomycin D, daunomycin (rubidomycin), doxorubicin, mitoxantrone, idarubicin, bleomycins, plicamycin (mithramycin), mitomycinC, and actinomycin; enzymes such as L-asparaginase, cytokines such as interferon (IFN)-gamma, tumor necrosis factor (TNF)-alpha, TNF-beta and GM-CSF, anti-angiogenic factors, such as angiostatin and endostatin, inhibitors of FGF or VEGF such as soluble forms of receptors for angiogenic factors, including soluble VGF/VEGF receptors, platinum coordination complexes such as cisplatin and carboplatin, anthracenediones such as mitoxantrone, substituted urea such as hydroxyurea, methylhydrazine derivatives including N-methylhydrazine (MIFf) and procarbazine, adrenocortical suppressants such as mitotane (o,ρ′-DDD) and aminoglutethimide; hormones and antagonists including adrenocorticosteroid antagonists such as prednisone and equivalents, dexamethasone and aminoglutethimide; progestin such as hydroxyprogesterone caproate, medroxyprogesterone acetate and megestrol acetate; estrogen such as diethylstilbestrol and ethinyl estradiol equivalents; antiestrogen such as tamoxifen; androgens including testosterone propionate and fluoxymesterone/equivalents; antiandrogens such as flutamide, gonadotropin-releasing hormone analogs and leuprolide; non-steroidal antiandrogens such as flutamide; kinase inhibitors, histone deacetylase inhibitors, methylation inhibitors, proteasome inhibitors, monoclonal antibodies, oxidants, anti-oxidants, telomerase inhibitors, BH3 mimetics, ubiquitin ligase inhibitors, stat inhibitors and receptor tyrosin kinase inhibitors such as imatinib mesylate (marketed as Gleevac or Glivac) and erlotinib (an EGF receptor inhibitor) now marketed as Tarveca; anti-virals such as oseltamivir phosphate, Amphotericin B, and palivizumab; Sdi 1 mimetics; Semustine; Senescence derived inhibitor 1; Sparfosic acid; Spicamycin D; Spiromustine; Splenopentin; Spongistatin 1; Squalamine; Stipiamide; Stromelysin inhibitors; Sulfinosine; Superactive vasoactive intestinal peptide antagonist; Velaresol; Veramine; Verdins; Verteporfin; Vinorelbine; Vinxaltine; Vitaxin; Vorozole; Zanoterone; Zeniplatin; Zilascorb; and Zinostatin stimalamer; PI3Kβ small-molecule inhibitor, GSK2636771; pan-PI3K inhibitor (BKM120); BRAF inhibitors. Vemurafenib (Zelboraf) and dabrafenib (Tafinlar); or any analog or derivative and variant of the foregoing.

[0361] Radiotherapeutic agents and factors include radiation and waves that induce DNA damage for example, γ-irradiation, X-rays, UV-irradiation, microwaves, electronic emissions, radioisotopes, and the like. Therapy may be achieved by irradiating the localized tumor site with the above described forms of radiations. It is most likely that all of these factors effect a broad range of damage DNA, on the precursors of DNA, the replication and repair of DNA, and the assembly and maintenance of chromosomes. Dosage ranges for X-rays range from daily doses of 50 to 200 roentgens for prolonged periods of time (3 to 4 weeks), to single doses of 2000 to 6000 roentgens. Dosage ranges for radioisotopes vary widely, and depend on the half-life of the isotope, the strength and type of radiation emitted, and the uptake by the neoplastic cells.

[0362] In some embodiments, the chemotherapeutic agent may be an immunomodulatory agent such as lenalidomide (LEN). Recent studies have demonstrated that lenalidomide can enhance antitumor functions of CAR modified T cells. Some examples of anti-tumor antibodies include tocilizumab, siltuximab.

[0363] Other agents may be used in combination with compositions of the disclosure may also include, but not limited to, agents that affect the upregulation of cell surface receptors and their ligands such as Fas/Fas ligand, DR4 or DR5/TRAIL and GAP junctions, cytostatic and differentiation agents, inhibitors of cell adhesion such as focal adhesion kinase (FAKs) inhibitors and Lovastatin, or agents that increase the sensitivity of the hyper proliferative cells to apoptotic inducers such as the antibody C225.

[0364] The combinations may include administering the compositions of the disclosure and other agents at the same time or separately. Alternatively, the present immunotherapy may precede or follow the other agent/therapy by intervals ranging from minutes, days, weeks to months.

[0365] 4. Diseases

[0366] Provided in the present disclosure is a method of reducing a tumor volume or burden in a subject in need, the method comprising introducing into the subject a composition of the disclosure.

[0367] The present disclosure also provides methods for treating a cancer in a subject, comprising administering to the subject an effective amount of effector immune cells genetically modified to comprise a tunable protein expression system of the present disclosure.

[0368] 5. Cancer

[0369] Various cancers may be treated with pharmaceutical compositions, tunable protein expression system components, and constructs including their DRDs and payloads of the present disclosure. As used herein, the term “cancer” refers to any of various malignant neoplasms characterized by the proliferation of anaplastic cells that tend to invade surrounding tissue and metastasize to new body sites and also refers to the pathological condition characterized by such malignant neoplastic growths. Cancers may be tumors or hematological malignancies, and include but are not limited to, all types of lymphomas/leukemias, carcinomas and sarcomas, such as those cancers or tumors found in the anus, bladder, bile duct, bone, brain, breast, cervix, colon/rectum, endometrium, esophagus, eye, gallbladder, head and neck, liver, kidney, larynx, lung, mediastinum (chest), mouth, ovaries, pancreas, penis, prostate, skin, small intestine, stomach, spinal marrow, tailbone, testicles, thyroid and uterus.

[0370] Types of carcinomas which may be treated with the compositions of the present disclosure include, but are not limited to, papilloma/carcinoma, choriocarcinoma, endodermal sinus tumor, teratoma, adenoma/adenocarcinoma, melanoma, fibroma, lipoma, leiomyoma, rhabdomyoma, mesothelioma, angioma, osteoma, chondroma, glioma, lymphoma/leukemia, squamous cell carcinoma, small cell carcinoma, large cell undifferentiated carcinomas, basal cell carcinoma and sinonasal undifferentiated carcinoma.

[0371] Types of sarcomas which may be treated with the compositions of the present disclosure include, but are not limited to, soft tissue sarcoma such as alveolar soft part sarcoma, angiosarcoma, dermatofibrosarcoma, desmoid tumor, desmoplastic small round cell tumor, extraskeletal chondrosarcoma, extraskeletal osteosarcoma, fibrosarcoma, hemangiopericytoma, hemangiosarcoma, Kaposi's sarcoma, leiomyosarcoma, liposarcoma, lymphangiosarcoma, lymphosarcoma, malignant fibrous histiocytoma, neurofibrosarcoma, rhabdomyosarcoma, synovial sarcoma, and Askin's tumor, Ewing's sarcoma (primitive neuroectodermal tumor), malignant hemangioendothelioma, malignant schwannoma, osteosarcoma, and chondrosarcoma.

[0372] 6. Infectious Diseases

[0373] In some embodiment, tunable protein expression system of the disclosure may be used for the treatment of infectious diseases. Tunable protein expression systems of the disclosure may be introduced in cells suitable for adoptive cell transfer such as macrophages, dendritic cells, natural killer cells, and or T cells. Infectious diseases treated by the tunable protein expression system of the disclosure may include diseases caused by viruses, bacteria, fungi, and/or parasites. IL15-IL15Ra payloads of the disclosure may be used to increase immune cell proliferation and/or persistence of the immune cells useful in treating infectious diseases.

[0374] “Infectious diseases” herein refer to diseases caused by any pathogen or agent that infects mammalian cells, preferably human cells and causes a disease condition. Examples thereof include bacteria, yeast, fungi, protozoans, mycoplasma, viruses, prions, and parasites. Examples include those involved in (a) viral diseases such as, for example, diseases resulting from infection by an adenovirus, a herpesvirus (e.g., HSV-I, HSV-II, CMV, or VZV), a poxvirus (e-g-, an orthopoxvirus such as variola or vaccinia, or molluscum contagiosum), a picornavirus (e.g., rhinovirus or enterovirus), an orthomyxovirus (e.g., influenza virus), a paramyxovirus (e.g., parainfluenza virus, mumps virus, measles virus, and respiratory syncytial virus (RSV)), a coronavirus (e.g., SARS), a papovavirus (e.g., papillomaviruses, such as those that cause genital warts, common warts, or plantar warts), a hepadnavirus (e.g., hepatitis B virus), a flavivirus (e.g., hepatitis C virus or Dengue virus), or a retrovirus (e.g., a lentivirus such as HIV); (b) bacterial diseases such as, for example, diseases resulting from infection by bacteria of, for example, the genus Escherichia, Enterobacter, Salmonella, Staphylococcus, Shigella, Listeria, Aerobacter, Helicobacter, Klebsiella, Proteus, Pseudomonas, Streptococcus, Chlamydia, Mycoplasma, Pneumococcus, Neisseria, Clostridium, Bacillus, Corynebacterium, Mycobacterium, Campylobacter, Vibrio, Serratia, Providencia, Chromobacterium, Brucella, Yersinia, Haemophilus, or Bordetella; (c) other infectious diseases, such chlamydia, fungal diseases including but not limited to candidiasis, aspergillosis, histoplasmosis, cryptococcal meningitis, parasitic diseases including but not limited to malaria, Pneumocystis carnii pneumonia, leishmaniasis, cryptosporidiosis, toxoplasmosis, and trypanosome infection and prions that cause human disease such as Creutzfeldt-Jakob Disease (CJD), variant Creutzfeldt-Jakob Disease (vCJD), Gerstmann-Straüssler-Scheinker syndrome, Fatal Familial Insomnia and kuru.

[0375] 7. Immuno-Oncology and Cell Therapies

[0376] Recent progress in the field of cancer immunology has allowed the development of several approaches to help the immune system keep the cancer at bay. Such immunotherapy approaches include the targeting of cancer antigens through monoclonal antibodies or through adoptive transfer of ex vivo engineered T cells (e.g., which contain chimeric antigen receptors or engineered T cell receptors).

[0377] In some embodiments, pharmaceutical compositions, tunable protein expression systems of the present disclosure may be used in the modulation or alteration or exploitation of the immune system to target one or more cancers. This approach may also be considered with other such biological approaches, e.g., immune response modifying therapies such as the administration of interferons, interleukins, colony-stimulating factors, other monoclonal antibodies, vaccines, gene therapy, and nonspecific immunomodulating agents are also envisioned as anti-cancer therapies to be combined with the pharmaceutical compositions, tunable protein expression systems, including their payloads of the present disclosure.

[0378] Cancer immunotherapy refers to a diverse set of therapeutic strategies designed to induce the patient's own immune system to fight the cancer. In some embodiments, pharmaceutical compositions, pharmaceutical compositions, tunable protein expression systems, including their payloads of the present disclosure are designed as immune-oncology therapeutics.

[0379] 8. Cell Therapies

[0380] There are several types of cellular immunotherapies, including tumor infiltrating lymphocyte (TIL) therapy, genetically engineered T cells bearing chimeric antigen receptors (CARs), and recombinant TCR technology.

[0381] According to the present disclosure, the tunable protein expression system may be used in the development and implementation of cell therapies such as adoptive cell therapy. The tunable protein expression systems, and their payloads may be used in cell therapies to effect TCR removal-TCR gene disruption, TCR engineering, to regulate epitope tagged receptors, in APC platforms for stimulating T cells, as a tool to enhance ex vivo APC stimulation, to improve methods of T cell expansion, in ex vivo stimulation with antigen, in TCR/CAR combinations, in the manipulation or regulation of TILs, in allogeneic cell therapy, in combination T cell therapy with other treatment lines (e.g. radiation, cytokines), to encode engineered TCRs, or modified TCRs, or to enhance T cells other than TCRs (e.g. by introducing cytokine genes, genes for the checkpoint inhibitors PD1, CTLA4).

[0382] In some embodiments, improved response rates are obtained in support of cell therapies.

[0383] Expansion and persistence of cell populations may be achieved through regulation or fine tuning of the payloads, e.g., the receptors or pathway components in T cells, NK cells or other immune-related cells. In some embodiments, tunable protein expression systems of the present disclosure are designed to spatially and/or temporally control the expression of proteins which enhance T-cell or NK cell responses. In some embodiments, tunable protein expression systems are designed to spatially and/or temporally control the expression of proteins which inhibit T-cell or NK cell response.

[0384] The immune system can be harnessed for the treatment of diseases beyond cancer. Tunable protein expression systems, their components may be utilized in immunotherapy for the treatment of diseases including, but not limited to, autoimmune diseases, allergies, graft versus host disease, and diseases and disorders that may result in immunodeficiency such as acquired immune deficiency syndrome (AIDS).

[0385] The present disclosure provides compositions for immunotherapy. Such compositions may include effector modules with CD40L as the payload. The compositions may further include a chimeric antigen receptor as an additional payload. The compositions may be expressed in immune cells suitable for adoptive cell therapy. Cells expressing the effector modules may be delivered to a subject directly. In some aspects, the cells expressing the effector modules may be co-administered with immune cells expressing CD40. CD40 expression in these cells may be ectopic or endogenous. CD40 expression may also be induced by co-culture with other immune cells expressing the effector modules of the invention disclosure. Some non-limiting examples of CD40 positive cell include cell such as dendritic cells, macrophages, myeloid cell, B cells, platelets, endothelial cells, epithelial cells, and fibroblasts.

[0386] In some embodiments, the payloads described herein may be used for dendritic cell activation. In some embodiments, the dendritic cell may be a myeloid dendritic cell, a plasmacytoid dendritic cell, a CD14+ dendritic cell, a Langerhans cell, or a microglia. In some embodiments, myeloid DCs (mDCs) express typical myeloid antigens CD11c, CD13, CD33 and CD11b, corresponding to mouse CD11c+“classical” or “conventional” DCs. In humans both monocytes and mDCs express CD11c, but DCs lack CD14 or CD16 and may be split into CD1c+ and CD141+ fractions. These two fractions share homology with mouse classical DCs expressing either CD11b (CD1c+ DCs) or CD8/CD103 (CD141+ DCs). In some embodiments, dendritic cells may be plasmacytoid dendritic cells (pDCs) plasmacytoid DCs (pDCs) typically lack myeloid antigens and may be distinguished by expression of CD123, CD303 and CD304. In one embodiment, the dendritic cells may be CD14+. Such cells are found in tissues and lymph nodes are a third subset of CD11c+ myeloid cells originally described as ‘interstitial DCs’. They are more monocyte-like or macrophage-like than CD1c+ and CD141+ mDCs and may arise from classical monocytes. Equivalent cells have recently been found in mice as a new monocyte-derived subset of CD11b classical DCs that expresses or ESAM. In one embodiment, the dendritic cells may be Langerhans cells or microglia. Langerhans cells (LCs) and microglia are two specialized self-renewing DC populations found in stratified squamous epithelium and parenchyma of the brain, respectively. The LCs may be capable of differentiating into migratory DCs whereas microglia are considered as a type of macrophage.

[0387] In some embodiments, payloads of the present disclosure may be a chimeric antigen receptor (CAR), which when transduced into immune cells (e.g., T cells and NK cells), can re-direct the immune cells against the target (e.g., a tumor cell) which expresses a molecule recognized by the extracellular target moiety of the CAR.

[0388] In some embodiments, pharmaceutical compositions comprising a tunable protein expression system, including their payloads or protein of interest may be used in the modulation or alteration or exploitation of the immune system to target one or more self-reactive immune components such as auto antibodies and self-reactive immune cells to attenuate autoimmune diseases.

[0389] In some embodiments, tunable protein expression systems may be utilized in immunotherapy-based treatments to attenuate or mitigate Graft vs. Host disease (GVHD). GVHD refers to a condition following stem cell or bone marrow transplant where in the allogeneic donor immune cells react against host tissue. In some embodiments, a tunable protein expression system may be designed to encode a cytokine or immunological agent designed to modulate Tregs for the treatment of GVHD.

[0390] In some embodiments, tunable protein expression systems may be significantly less immunogenic than other biocircuits or switches in the art due to the expression of human native proteins of interest.

[0391] Various autoimmune diseases and autoimmune-related diseases may be treated with pharmaceutical compositions comprising a tunable protein expression systems of the present disclosure. As used herein, the term “autoimmune disease” refers to a disease in which the body produces antibodies that attack its own tissues.

[0392] Various blood diseases may be treated with pharmaceutical compositions comprising one or more components of a tunable protein expression system of the present disclosure.

[0393] 9. Central Nervous System (CNS)

[0394] In some embodiments, pharmaceutical compositions comprising one or more components of a tunable protein expression system of the present disclosure may be used in the modulation or alteration or exploitation of proteins in the central nervous system including cerebrospinal (CSF) proteins.

[0395] 10. Stem Cell Applications

[0396] The tunable protein expression system of the present disclosure and/or their components may be utilized in the regulated reprogramming of cells, stem cell engraftment or other application where controlled or tunable expression of such reprogramming factors are useful.

[0397] The tunable protein expression system constructs of the present disclosure may be used in reprogramming cells including stem cells or induced stem cells. Induction of induced pluripotent stem cells (iPSC) was first achieved by Takahashi and Yamanaka (Cell, 2006. 126(4):663-76; herein incorporated by reference in its entirety) using viral vectors to express KLF4, c-MYC, OCT4 and SOX2 otherwise collectively known as KMOS.

[0398] Excisable lentiviral and transposon vectors, repeated application of transient plasmid, episomal and adenovirus vectors have also been used to try to derive iPSC.

[0399] DNA-free methods to generate human iPSC has also been derived using serial protein transduction with recombinant proteins incorporating cell-penetrating peptide moieties, and infectious transgene delivery using the Sendai virus.

[0400] The tunable protein expression system of the present disclosure may include a payload comprising any of the genes including, but not limited to, OCT such as OCT4, SOX such as SOX1, SOX2, SOX3, SOX15 and SOX18, NANOG, KLF such as KLF1, KLF2, KLF4 and KLF5, MYC such as c-MYC and n-MYC, REM2, TERT and LIN28 and variants thereof in support of reprogramming cells. Sequences of such reprogramming factors are taught in for example International Application PCT/US2013/074560, the contents of which are incorporated herein by reference in their entirety.

[0401] The tunable protein expression system of the present disclosure may include a payload comprising any of factors that contribute stem cell mobilization. In autologous stem cell therapy, sources of stem cells for transplantation may include the bone marrow, peripheral blood mononuclear cells and cord blood. Stem cells are stimulated out of these sources (e.g., the bone marrow) into the blood stream. So sufficient stem cells are available for collection for future reinfusion. One or a combination of cytokines strategies may be used to mobilize the stem cells including but not limited to G-CSF (filgrastim), GM-CSF, and chemotherapy preceding with cytokines (chemomobilization).

[0402] 11. Tools and Agents for Making Therapeutics

[0403] Provided in the present disclosure are tools and agents that may be used in generating therapeutics such as, but not limited to, immunotherapeutics for reducing a tumor volume or burden in a subject in need. A considerable number of variables are involved in producing a therapeutic agent, such as structure of the payload, type of cells, method of gene transfers, method and time of ex vivo expansion, pre-conditioning and the amount and type of tumor burden in the subject. Such parameters may be optimized using tools and agents described herein.

[0404] 12. Cell Lines

[0405] The present disclosure provides a mammalian cell that has been genetically modified with the compositions of the disclosure. Suitable mammalian cells include primary cells and immortalized cell lines. Suitable mammalian cell lines include but are not limited to Human embryonic kidney cell line 293, fibroblast cell line NIH 3T3, human colorectal carcinoma cell line HCT116, ovarian carcinoma cell line SKOV-3, immortalized T cell lines (e.g. Jurkat cells and SupT1 cells), lymphoma cell line Raji cells, NALM-6 cells, K562 cells, HeLa cells, PC12 cells, HL-60 cells, NK cell lines (e.g. NKL, NK92, NK962, and YTS), and the like. In some instances, the cell is not an immortalized cell line, but instead a cell obtained from an individual and is herein referred to as a primary cell. For example, the cell is a T lymphocyte obtained from an individual. Other examples include, but are not limited to cytotoxic cells, stem cells, peripheral blood mononuclear cells or progenitor cells obtained from an individual.

[0406] 13. Cellular Assays

[0407] In some embodiments, the effectiveness of the compositions of the disclosures as immunotherapeutic agents may be evaluated using cellular assays. Levels of expression and/or identity of the compositions of the disclosure may be determined according to any methods known in the art for identifying proteins and/or quantitating proteins levels. In some embodiments, such methods may include Western Blotting, flow cytometry, and immunoassays.

[0408] Provided herein are methods for functionally characterizing cells transformed or transduced with a tunable protein expression system construct of the present disclosure and compositions of the disclosure. In some embodiments, functional characterization is carried out in primary immune cells or immortalized immune cell lines and may be determined by expression of cell surface markers. Examples of cell surface markers for T cells include, but are not limited to, CD3, CD4, CD8, CD 14, CD20, CD11b, CD16, CD45 and HLA-DR, CD 69, CD28, CD44, IFNgamma. Markers for T cell exhaustion include PD1, TIM3, BTLA, CD160, 2B4, CD39, and LAG3. Examples of cell surface markers for antigen presenting cells include, but are not limited to, MHC class I, MHC Class II, CD40, CD45, B7-1, B7-2, IFN γ receptor and IL2 receptor, ICAM-1 and/or Fcγ receptor. Examples of cell surface markers for dendritic cells include, but are not limited to, MHC class I, MHC Class II, B7-2, CD18, CD29, CD31, CD43, CD44, CD45, CD54, CD58, CD83, CD86, CMRF-44, CMRF-56, DCIR and/or Dectin-1 and the like; while in some cases also having the absence of CD2, CD3, CD4, CD8, CD14, CD15, CD16, CD 19, CD20, CD56, and/or CD57. Examples of cell surface markers for NK cells include, but are not limited to, CCL3, CCL4, CCL5, CCR4, CXCR4, CXCR3, NKG2D, CD71, CD69, CCR5, Phospho JAK/STAT, phospho ERK, phospho p38/MAPK, phospho AKT, phospho STAT3, Granulysin, Granzyme B, Granzyme K, IL10, IL22, IFNg, LAP, Perforin, and TNFa.

[0409] In some embodiments, T cell metabolic pathways may be modified to diminish the susceptibility of T cells to exhaustion. Metabolic pathways may include, but are not limited to glycolysis, urea cycle, citric acid cycle, beta oxidation, fatty acid biosynthesis, pentose phosphate pathway, nucleotide biosynthesis, and glycogen metabolic pathways. As a non-limiting example, payloads that reduce the rate of glycolysis may be utilized to restrict or prevent T cell exhaustion. In one embodiment, T cells of the present disclosure may be used in combination with inhibitors of glycolysis such as 2-deoxyglucose, and rapamycin.

[0410] In some embodiments, tunable protein expression system constructs of the present disclosure, useful for immunotherapy may be placed under the transcriptional control of the T cell receptor alpha locus constant (TRAC) locus in the T cells. Eyquem et al. have shown that expression of the CAR from the TRAC locus prevents T cell exhaustion and the accelerated differentiation of T cells caused by excessive T cell activation.

[0411] In some embodiments, payloads of the disclosure may include, antibodies or fragments that target T cell surface markers associated with T cell exhaustion. T-cell surface markers associated with T cell exhaustion that may be used as payloads include, but are not limited to, CTLA-1, PD-1, TGIT, LAG-3, 2B4, BTLA, TIM3, VISTA, and CD96.

[0412] In one embodiment, the payload of the disclosure may be a CD276 CAR (with CD28, 4-IBB, and CD3 zeta intracellular domains), that does not show an upregulation of the markers associated with early T cell exhaustion.

[0413] 14. Cells

[0414] In accordance with the present disclosure, cells genetically modified to express at least one protein of interest or payload under the regulation of the encoded DRD ligand of the disclosure are provided. Cells of the disclosure may include, without limitation, immune cells, stem cells and tumor cells. In some embodiments, immune cells are effector immune cells, including, but not limiting to, T cells such as CD8+ T cells and CD4+ T cells (e.g., Th1, Th2, Th17, Foxp3+ cells), memory T cells such as T memory stem cells, central T memory cells, and effector memory T cells, terminally differentiated effector T cells, natural killer (NK) cells, NK T cells, tumor infiltrating lymphocytes (TILs), cytotoxic T lymphocytes (CTLs), regulatory T cells (Tregs), and dendritic cells (DCs, for example, a myeloid dendritic cell, a plasmacytoid dendritic cell, a CD14+ dendritic cell, a Langerhans cell, or a microglia), other immune cells that can elicit an effector function, or the mixture thereof. T cells may be Tαβ cells and Tγδ cells. In some embodiments, stem cells may be from human embryonic stem cells, mesenchymal stem cells, and neural stem cells. In some embodiments, T cells may be depleted endogenous T cell receptors.

[0415] In some embodiments, cells of the disclosure may be autologous, allogeneic, syngeneic, or xenogeneic in relation to a particular individual subject.

[0416] In some embodiments, cells of the disclosure may be mammalian cells, particularly human cells. Cells of the disclosure may be primary cells or immortalized cell lines.

[0417] Engineered immune cells can be accomplished by method comprising introducing into a cell a nucleic acid molecule comprising: a first nucleic acid sequence that encodes at least one payload operably linked to second nucleic acid sequence that encodes a drug responsive domain (DRD).

[0418] The vector may be a viral vector such as a lentiviral vector, a gamma-retroviral vector, a recombinant AAV, an adenoviral vector and an oncolytic viral vector. In other aspects, non-viral vectors for example, nanoparticles and liposomes may also be used. In some embodiments, immune cells of the disclosure are genetically modified to express at least one immunotherapeutic agent of the disclosure which is tunable using a stabilizing ligand. In some examples, two, three or more immunotherapeutic agents constructed in the same tunable protein expression system constructs are introduced into a cell. In other examples, two, three, or more tunable protein expression system constructs may be introduced into a cell.

[0419] In some embodiments, immune cells of the disclosure may be T cells and/or NK cells modified to express a CD40L and optionally, in combination with an antigen-specific T cell receptor (TCR), or an antigen specific chimeric antigen receptor (CAR) taught herein.

[0420] 15. Polynucleotides

[0421] Tunable protein expression system components including effector modules, their SREs and payloads, may be nucleic acid-based. The term “nucleic acid,” in its broadest sense, includes any compound and/or substance that comprise a polymer of nucleotides, e.g., linked nucleosides. These polymers are often referred to as polynucleotides. Exemplary nucleic acids or polynucleotides of the disclosure include, but are not limited to, ribonucleic acids (RNAs), deoxyribonucleic acids (DNAs), threose nucleic acids (TNAs), glycol nucleic acids (GNAs), peptide nucleic acids (PNAs), locked nucleic acids (LNAs, including LNA having a β-D-ribo configuration, α-LNA having an α-L-ribo configuration (a diastereomer of LNA), 2′-amino-LNA having a 2′-amino functionalization, and 2′-amino-α-LNA having a 2′-amino functionalization) or hybrids thereof.

[0422] In some embodiments, the nucleic acid molecule is a messenger RNA (mRNA). As used herein, the term “messenger RNA” (mRNA) refers to any polynucleotide which encodes a polypeptide of interest and which is capable of being translated to produce the encoded polypeptide of interest in vitro, in vivo, in situ or ex vivo. Polynucleotides of the disclosure may be mRNA or any nucleic acid molecule and may or may not be chemically modified.

[0423] Traditionally, the basic components of an mRNA molecule include at least a coding region, a 5′UTR, a 3′UTR, a 5′ cap and a poly-A tail. Building on this wild type modular structure, the present disclosure expands the scope of functionality of traditional mRNA molecules by providing payload constructs which maintain a modular organization, but which comprise one or more structural and/or chemical modifications or alterations which impart useful properties to the polynucleotide, for example tunability of function. As used herein, a “structural” feature or modification is one in which two or more linked nucleosides are inserted, deleted, duplicated, inverted or randomized in a polynucleotide without significant chemical modification to the nucleosides themselves. Because chemical bonds will necessarily be broken and reformed to effect a structural modification, structural modifications are of a chemical nature and hence are chemical modifications. However, structural modifications will result in a different sequence of nucleotides. For example, the polynucleotide “ATCG” may be chemically modified to “AT-5meC-G”. The same polynucleotide may be structurally modified from “ATCG” to “ATCCCG”. Here, the dinucleotide “CC” has been inserted, resulting in a structural modification to the polynucleotide.

[0424] In some embodiments, polynucleotides of the present disclosure may harbor 5′UTR sequences which play a role in translation initiation. 5′UTR sequences may include features such as Kozak sequences which are commonly known to be involved in the process by which the ribosome initiates translation of genes, Kozak sequences have the consensus XCCR(A/G) CCAUG, where R is a purine (adenine or guanine) three bases upstream of the start codon (AUG) and X is any nucleotide. In one embodiment, the Kozak sequence is ACCGCC. By engineering the features that are typically found in abundantly expressed genes of target cells or tissues, the stability and protein production of the polynucleotides of the disclosure can be enhanced.

[0425] Further provided are polynucleotides, which may contain an internal ribosome entry site (IRES) which play an important role in initiating protein synthesis in the absence of 5′ cap structure in the polynucleotide. An IRES may act as the sole ribosome binding site, or may serve as one of the multiple binding sites. Polynucleotides of the disclosure containing more than one functional ribosome binding site may encode several peptides or polypeptides that are translated independently by the ribosomes giving rise to bicistronic and/or multicistronic nucleic acid molecules.

[0426] In one embodiment, polynucleotides of the present disclosure may encode variant polypeptides which have a certain identity with a reference polypeptide sequence. As used herein, a “reference polypeptide sequence” refers to a starting polypeptide sequence. Reference sequences may be wild type sequences or any sequence to which reference is made in the design of another sequence.

[0427] The term “identity” as known in the art, refers to a relationship between two or more sequences, as determined by comparing the sequences. In the art, identity also means the degree of sequence relatedness between sequences, as determined by the number of matches between strings of two or more residues (amino acid or nucleic acid). Identity measures the percent of identical matches between two or more sequences with gap alignments (if any) addressed by a particular mathematical model or computer program (i.e., “algorithms”). Identity of related sequences can be readily calculated by known methods. Such methods include, but are not limited to, those described in Computational Molecular Biology, Lesk, A. M., ed., Oxford University Press, New York, 1988; Biocomputing: Informatics and Genome Projects, Smith, D. W., ed., Academic Press, New York, 1993; Computer Analysis of Sequence Data, Part 1, Griffin, A. M., and Griffin, H. G., eds., Humana Press, New Jersey, 1994; Sequence Analysis in Molecular Biology, von Heinje, G., Academic Press, 1987; Sequence Analysis Primer, Gribskov, M. and Devereux, J., eds., M. Stockton Press, New York, 1991; and Carillo et al., SIAM J. Applied Math. 48, 1073 (1988).

[0428] In some embodiments, the variant sequence may have the same or a similar activity as the reference sequence. Alternatively, the variant may have an altered activity (e.g., increased or decreased) relative to a reference sequence. Generally, variants of a particular polynucleotide or polypeptide of the disclosure will have at least about 40%, 45%, 50%, 55%, 60%, 65%, 70%, 75%, 80%, 85%, 90%, 91%, 92%, 93%, 94%, 95%, 96%, 97%, 98%, 99% but less than 100% sequence identity to that particular reference polynucleotide or polypeptide as determined by sequence alignment programs and parameters described herein and known to those skilled in the art. Such tools for alignment include those of the BLAST suite (Stephen F. Altschul, Thomas L. Madden, Alejandro A. Schïffer, Jinghui Zhang, Zheng Zhang, Webb Miller, and David J. Lipman (1997), “Gapped BLAST and PSI-BLAST: a new generation of protein database search programs”, Nucleic Acids Res. 25:3389-3402.)

[0429] 16. Codon Selection

[0430] In some embodiments, one or more codons of the polynucleotides of the present disclosure may be replaced with other codons encoding the native amino acid sequence to tune the expression of the SREs, through a process referred to as codon selection. Since mRNA codon, and tRNA anticodon pools tend to vary among organisms, cell types, sub cellular locations and over time, the codon selection described herein is a spatiotemporal (ST) codon selection.

[0431] In some embodiments of the disclosure, certain polynucleotide features may be codon optimized. Codon optimization refers to a process of modifying a nucleic acid sequence for enhanced expression in the host cell by replacing at least 1, 2, 3, 4, 5, 10, 15, 20, 25, 50 or more codons of the native sequence with codons that are most frequently used in the genes of that host cell while maintaining the native amino acid sequence. Codon usage may be measured using the Codon Adaptation Index (CAI) which measures the deviation of a coding polynucleotide sequence from a reference gene set. Codon usage tables are available at the Codon Usage Database (http://www.kazusa.or.jp/codon/) and the CAI can be calculated by EMBOSS CAI program (http://emboss.sourceforge.net/). Codon optimization methods are known in the art and may be useful in efforts to achieve one or more of several goals.

[0432] The stop codon of the polynucleotides of the present disclosure may be modified to include sequences and motifs to alter the expression levels of the SREs, payloads and effector modules of the present disclosure. Such sequences may be incorporated to induce stop codon read through, wherein the stop codon may specify amino acids e.g. selenocysteine or pyrrolysine. In other instances, stop codons may be skipped altogether to resume translation through an alternate open reading frame. Stop codon read through may be utilized to tune the expression of components of the effector modules at a specific ratio (e.g. as dictated by the stop codon context). Examples of preferred stop codon motifs include UGAN, UAAN, and UAGN, where N is either C or U.

[0433] Suppression of termination occurs during translation of many viral mRNAs as a means of generating a second protein with extended carboxy terminus. In retroviruses, gag and pol genes are encoded by a single mRNA and separated by an amber termination codon UAG. Translational suppression of the amber codon allows synthesis of the gag pol precursor. Translation suppression is mediated by suppressor tRNAs that can recognize termination codons and insert a specific amino acid. In some embodiments, effector modules described herein may incorporate amber termination codons. Such codons may be used in lieu of or in addition to IRES and p2A sequences in bicistronic constructs. Stop codon read through may be combined with P2A to obtain low level expression of downstream gene (e.g. IL12). In some embodiments, the amber stop codons may be combined with tRNA expression or amino-acyl tRNA synthetase for further control. In one aspect, the payload may be a regulated tRNA synthetase.

[0434] 17. Subject Site

[0435] In some embodiments, the stimulus is a subject site. The subject site may a location in the subject such as, but not limited to, the blood, plasma, an organ selected from liver, kidney, brain, heart, lung, bone, and bone marrow.

[0436] 18. Promoters

[0437] In some embodiments, compositions of the disclosure comprise a promoter.

[0438] As used herein a promoter is defined as a DNA sequence recognized by transcription machinery of the cell, required to initiate specific transcription of the polynucleotide sequence of the present disclosure. Vectors can comprise native or non-native promoters operably linked to the polynucleotides of the disclosure. The promoters selected may be strong, weak, constitutive, inducible, tissue specific, development stage-specific, and/or organism specific. One example of a suitable promoter is the immediate early cytomegalovirus (CMV) promoter such as, but not limited to SEQ ID NO: 6384-6386. This promoter sequence is a strong constitutive promoter sequence capable of driving high levels of expression of polynucleotide sequence that is operatively linked to it. Another example of a promoter is Elongation Growth Factor-1 Alpha (EF-1 alpha) such as, but not limited to, SEQ ID NO: 6387-6391. Other constitutive promoters may also be used, including, but not limited to simian virus 40 (SV40), mouse mammary tumor virus (MMTV), human immunodeficiency virus (HIV), long terminal repeat (LTR), promoter, an avian leukemia virus promoter, an Epstein-Barr virus immediate early promoter, a Rous sarcoma virus promoter as well as human gene promoters including, but not limited to the phosphoglycerate kinase (PGK) promoter (non-limiting examples include SEQ ID NO: 6392-6399), actin promoter, the myosin promoter, the hemoglobin promoter, the Ubiquitin C (Ubc) promoter, the human U6 small nuclear protein promoter and the creatine kinase promoter. In some instances, inducible promoters such as but not limited to metallothionine promoter, glucocorticoid promoter, a progesterone promoter, and a tetracycline promoter may be used.

[0439] In some embodiments, the optimal promoter may be selected based on its ability to achieve minimal expression of the SREs and payloads of the disclosure in the absence of the ligand and detectable expression in the presence of the ligand.

[0440] Additional promoter elements e.g. enhancers may be used to regulate the frequency of transcriptional initiation. Such regions may be located 10-100 base pairs upstream or downstream of the start site. In some instances, two or more promoter elements may be used to cooperatively or independently activate transcription.

[0441] 19. Other Regulatory Features

[0442] In some embodiments, compositions of the disclosure may include optional proteasome adaptors. As used herein, the term “proteasome adaptor” refers to any nucleotide/amino acid sequence that targets the appended payload for degradation. In some aspects, the adaptors target the payload for degradation directly thereby circumventing the need for ubiquitination reactions. Proteasome adaptors may be used in conjunction with drug responsive domains to reduce the basal expression of the payload. Exemplary proteasome adaptors include the UbL domain of Rad23 or hHR23b, HPV E7 which binds to both the target protein Rb and the S4 subunit of the proteasome with high affinity, which allows direct proteasome targeting, bypassing the ubiquitination machinery; the protein gankyrin which binds to Rb and the proteasome subunit S6.

### Definitions

[0443] Unless otherwise defined, all terms of art, notations and other scientific terms or terminology used herein are intended to have the meanings commonly understood by those of skill in the art to which this invention pertains. In some cases, terms with commonly understood meanings are defined herein for clarity and/or for ready reference and understanding, and the inclusion of such definitions herein should not necessarily be construed to mean a substantial difference over what is generally understood in the art. Commonly understood definitions of molecular biology terms and/or methods and/or protocols can be found in Rieger et al., Glossary of Genetics: Classical and Molecular, 5th edition, Springer-Verlag: New York, 1991; Lewin, Genes V, Oxford University Press: New York, 1994; Sambrook et al., Molecular Cloning, A Laboratory Manual (3d ed. 2001) and Ausubel et al., Current Protocols in Molecular Biology (1994), Sambrook and Russel (2006) Condensed Protocols from Molecular Cloning: A Laboratory Manual, Cold Spring Harbor Laboratory Press, ISBN-10: 0879697717; Ausubel et al. (2002) Short Protocols in Molecular Biology, 5th ed., Current Protocols, ISBN-10: 0471250929.

[0444] As appropriate, procedures involving the use of commercially available kits and/or reagents are generally carried out in accordance with manufacturer's guidance and/or protocols and/or parameters unless otherwise noted.

[0445] “Affinity” refers to the strength of binding: increased binding affinity being correlated with a lower Kd.

[0446] Adoptive cell therapy (ACT): The terms “Adoptive cell therapy” or “Adoptive cell transfer”, as used herein, refer to a cell therapy involving in the transfer of cells into a patient, wherein cells may have originated from the patient, or from another individual, and are engineered (altered) before being transferred back into the patient. The therapeutic cells may be derived from the immune system, such as effector immune cells: CD4+ T cell; CD8+ T cell, Natural Killer cell (NK cell); and B cells and tumor infiltrating lymphocytes (TILs) derived from the resected tumors. Most commonly transferred cells are autologous anti-tumor T cells after ex vivo expansion or manipulation. For example, autologous peripheral blood lymphocytes can be genetically engineered to recognize specific tumor antigens by expressing T-cell receptors (TCR) or chimeric antigen receptor (CAR).

[0447] Agent: As used herein, the term “agent” refers to a biological, pharmaceutical, or chemical compound. Non-limiting examples include simple or complex organic or inorganic molecule, a peptide, a protein, an oligonucleotide, an antibody, an antibody derivative, antibody fragment, a receptor, and soluble factor.

[0448] Agonist: the term “agonist” as used herein, refers to a compound that, in combination with a receptor, can produce a cellular response. An agonist may be a ligand that directly binds to the receptor. Alternatively, an agonist may combine with a receptor indirectly by, for example, (a) forming a complex with another molecule that directly binds to the receptor, or (b) otherwise resulting in the modification of another compound so that the other compound directly binds to the receptor. An agonist may be referred to as an agonist of a particular receptor or family of receptors, e.g., agonist of a co-stimulatory receptor.

[0449] Antagonist: the term “antagonist” as used herein refers to any agent that inhibits or reduces the biological activity of the target(s) it binds.

[0450] Approximately: As used herein, the term “approximately” or “about,” as applied to one or more values of interest, refers to a value that is similar to a stated reference value. In certain embodiments, the term “approximately” or “about” refers to a range of values that fall within 25, 20, 19, 18, 17, 16, 15, 14, 13, 12, 11, 10, 9, 8, 7, 6, 5, 4, 3, 2, 1, or less in either direction (greater than or less than) of the stated reference value unless otherwise stated or otherwise evident from the context (except where such number would exceed 100 of a possible value).

[0451] Associated with: As used herein, the terms “associated with,” “conjugated,” “linked,” “attached,” and “tethered,” when used with respect to two or more moieties, mean that the moieties are physically associated or connected with one another, either directly or via one or more additional moieties that serve as linking agents, to form a structure that is sufficiently stable so that the moieties remain physically associated under the conditions in which the structure is used, e.g., physiological conditions. An “association” need not be strictly through direct covalent chemical bonding. It may also suggest ionic or hydrogen bonding or a hybridization-based connectivity sufficiently stable such that the “associated” entities remain physically associated.

[0452] Autologous: the term “autologous” as used herein is meant to refer to any material derived from the same individual to which it is later to be re-introduced into the individual.

[0453] “Binding” refers to a sequence-specific, non-covalent interaction between macromolecules (e.g., between a protein and a nucleic acid). Not all components of a binding interaction need be sequence-specific (e.g., contacts with phosphate residues in a DNA backbone), as long as the interaction as a whole is sequence-specific. Such interactions are generally characterized by a dissociation constant (Kd) of 10-6 M-1 or lower.

[0454] A “binding protein” is a protein that is able to bind to another molecule. A binding protein can bind to, for example, a DNA molecule (a DNA-binding protein), an RNA molecule (an RNA-binding protein) and/or a protein molecule (a protein-binding protein). In the case of a protein-binding protein, it can bind to itself (to form homodimers, homotrimers, etc.) and/or it can bind to one or more molecules of a different protein or proteins. A binding protein can have more than one type of binding activity. For example, zinc finger proteins have DNA-binding, RNA-binding and protein-binding activity.

[0455] “Cleavage” refers to the breakage of the covalent backbone of a DNA molecule. Cleavage can be initiated by a variety of methods including, but not limited to, enzymatic or chemical hydrolysis of a phosphodiester bond. Both single-stranded cleavage and double-stranded cleavage are possible, and double-stranded cleavage can occur as a result of two distinct single-stranded cleavage events. DNA cleavage can result in the production of either blunt ends or staggered ends. In certain embodiments, fusion polypeptides are used for targeted double-stranded DNA cleavage.

[0456] A coding sequence is “under the control” of transcriptional and translational control sequences in a cell when RNA polymerase transcribes the coding sequence into mRNA, which is then trans-RNA spliced (if the coding sequence contains introns) and translated into the protein encoded by the coding sequence.

[0457] A “construct” is generally understood as any recombinant nucleic acid molecule such as a plasmid, cosmid, virus, autonomously replicating nucleic acid molecule, phage, or linear or circular single-stranded or double-stranded DNA or RNA nucleic acid molecule, derived from any source, capable of genomic integration or autonomous replication, comprising a nucleic acid molecule where one or more nucleic acid molecule has been operably linked. Constructs may can include but are not limited to additional regulatory nucleic acid molecules from, e.g., the 3′-untranslated region (3′ UTR). Constructs can include but are not limited to the 5′ untranslated regions (5′ UTR) of an mRNA nucleic acid molecule which can play an important role in translation initiation and can also be a genetic component in an expression construct. These additional upstream and downstream regulatory nucleic acid molecules may be derived from a source that is native or heterologous with respect to the other elements present on the promoter construct.

[0458] Cytokines: the term “cytokines”, as used herein, refers to a family of small soluble factors with pleiotropic functions that are produced by many cell types that can influence and regulate the function of the immune system.

[0459] Delivery: the term “delivery” as used herein refers to the act or manner of delivering a compound, substance, entity, moiety, cargo or payload. A “delivery agent” refers to any agent which facilitates, at least in part, the in vivo delivery of one or more substances (including, but not limited to a compound and/or composition of the present disclosure) to a cell, subject or other biological system cells.

[0460] As used herein, the phrase “derived from” as it relates to DRDs or payloads means that the DRD or payload originates at least in part from the stated parent molecule or sequence. For example, a DRD may be derived from an epitope or region of a naturally occurring protein and is modified in any of the ways taught herein to optimize DRD function.

[0461] Destabilized: As used herein, the term “destable,” “destabilize,” “destabilizing region” or “destabilizing domain” means a region or molecule that is less stable than a starting, reference, wild-type or native form of the same region or molecule.

[0462] A DNA “coding sequence” or “coding region” refers to a double-stranded DNA sequence that encodes a polypeptide and can be transcribed and translated into a polypeptide in a cell, ex vivo, in vitro or in vivo when placed under the control of suitable regulatory sequences. “Suitable regulatory sequences” refers to nucleotide sequences located upstream (5′ non-coding sequences), within, or downstream (3′ non-coding sequences) of a coding sequence, and which influence the transcription, RNA processing or stability, or translation of the associated coding sequence. Regulatory sequences may include promoters, translation leader sequences, introns, polyadenylation recognition sequences, RNA processing sites, effector binding sites and stem-loop structures. The boundaries of the coding sequence are determined by a start codon at the 5′ (amino) terminus and a translation stop codon at the 3′ (carboxyl) terminus. A coding sequence can include, but is not limited to, prokaryotic sequences, cDNA from mRNA, genomic DNA sequences, and even synthetic DNA sequences. If the coding sequence is intended for expression in a eukaryotic cell, a polyadenylation signal and transcription termination sequence will usually be located 3′ to the coding sequence.

[0463] The term “downstream” refers to a nucleotide sequence that is located 3′ to a reference nucleotide sequence. In particular, downstream nucleotide sequences generally relate to sequences that follow the starting point of transcription. For example, the translation initiation codon of a gene is located downstream of the start site of transcription.

[0464] The term “upstream” refers to a nucleotide sequence that is located 5′ to a reference nucleotide sequence. In particular, upstream nucleotide sequences generally relate to sequences that are located on the 5′ side of a coding sequence or starting point of transcription. For example, most promoters are located upstream of the start site of transcription.

[0465] Engineered: As used herein, embodiments of the disclosure are “engineered” when they are designed to have a feature or property, whether structural or chemical, that varies from a starting point, wild type or native molecule.

[0466] An “exogenous” molecule is a molecule that is not normally present in a cell but can be introduced into a cell by one or more genetic, biochemical or other methods. “Normal presence in the cell” is determined with respect to the particular developmental stage and environmental conditions of the cell. Thus, for example, a molecule that is present only during embryonic development of muscle is an exogenous molecule with respect to an adult muscle cell. Similarly, a molecule induced by heat shock is an exogenous molecule with respect to a non-heat-shocked cell. An exogenous molecule can comprise, for example, a functioning version of a malfunctioning endogenous molecule or a malfunctioning version of a normally functioning endogenous molecule.

[0467] An exogenous molecule can be, among other things, a small molecule, such as is generated by a combinatorial chemistry process, or a macromolecule such as a protein, nucleic acid, carbohydrate, lipid, glycoprotein, lipoprotein, polysaccharide, any modified derivative of the above molecules, or any complex comprising one or more of the above molecules. Nucleic acids include DNA and RNA, can be single- or double-stranded; can be linear, branched or circular; and can be of any length. Nucleic acids include those capable of forming duplexes, as well as triplex-forming nucleic acids. See, for example, U.S. Pat. Nos. 5,176,996 and 5,422,251. Proteins include, but are not limited to, DNA-binding proteins, transcription factors, chromatin remodeling factors, methylated DNA binding proteins, polymerases, methylates, demethylases, acetylases, deacetylases, kinases, phosphatases, integrases, recombinases, ligases, topoisomerases, gyrases and helicases.

[0468] An exogenous molecule can be the same type of molecule as an endogenous molecule, e.g., an exogenous protein or nucleic acid. For example, an exogenous nucleic acid can comprise an infecting viral genome, a plasmid or episome introduced into a cell, or a chromosome that is not normally present in the cell. Methods for the introduction of exogenous molecules into cells are known to those of skill in the art and include, but are not limited to, lipid-mediated transfer (i.e., liposomes, including neutral and cationic lipids), electroporation, direct injection, cell fusion, particle bombardment, calcium phosphate co-precipitation, DEAE-dextran-mediated transfer and viral vector-mediated transfer. An exogeneous molecule can also be the same type of molecule as an endogenous molecule but derived from a different species than the cell is derived from. For example, a human nucleic acid sequence may be introduced into a cell line originally derived from a mouse or hamster.

[0469] By contrast, an “endogenous” molecule is one that is normally present in a particular cell at a particular developmental stage under particular environmental conditions. For example, an endogenous nucleic acid can comprise a chromosome, the genome of a mitochondrion, or other organelle, or a naturally occurring episomal nucleic acid. Additional endogenous molecules can include proteins, for example, transcription factors and enzymes.

[0470] An “episome” is a replicating nucleic acid, nucleoprotein complex or other structure comprising a nucleic acid that is not part of the chromosomal karyotype of a cell. Examples of episomes include plasmids and certain viral genomes.

[0471] “Eukaryotic” cells include, but are not limited to, fungal cells (such as yeast), plant cells, animal cells, mammalian cells and human cells (e.g., T-cells).

[0472] As used herein, “expression” of a nucleic acid sequence refers to one or more of the following events: (1) production of an RNA template from a DNA sequence (e.g., by transcription); (2) processing of an RNA transcript (e.g., by splicing, editing, 5′ cap formation, and/or 3′ end processing); (3) translation of an RNA into a polypeptide or protein; (4) folding of a polypeptide or protein; and (5) post-translational modification of a polypeptide or protein.

[0473] Expression vector, expression construct, plasmid, or recombinant DNA construct is generally understood to refer to a nucleic acid that has been generated via human intervention, including by recombinant means or direct chemical synthesis, with a series of specified nucleic acid elements that permit transcription or translation of a particular nucleic acid.cndot.in, for example, a host cell. The expression vector can be part of a plasmid, virus, or nucleic acid fragment. Typically, the expression vector can include a nucleic acid to be transcribed operably linked to a promoter.

[0474] The term “fragment,” as applied to polynucleotide sequences, refers to a nucleotide sequence of reduced length relative to the reference nucleic acid and comprising, over the common portion, a nucleotide sequence identical to the reference nucleic acid. Such a nucleic acid fragment according to the invention may be, where appropriate, included in a larger polynucleotide of which it is a constituent. Such fragments comprise, or alternatively consist of, oligonucleotides ranging in length from at least 6, 8, 9, 10, 12, 15, 18, 20, 21, 22, 23, 24, 25, 30, 39, 40, 42, 45, 48, 50, 51, 54, 57, 60, 63, 66, 70, 75, 78, 80, 90, 100, 105, 120, 135, 150, 200, 300, 500, 720, 900, 1000, 1500, 2000, 3000, 4000, 5000, or more consecutive nucleotides of a nucleic acid according to the invention.

[0475] A “functional fragment” of a protein, polypeptide or nucleic acid is a protein, polypeptide or nucleic acid whose sequence is not identical to the full-length protein, polypeptide or nucleic acid, yet retains the same function as the full-length protein, polypeptide or nucleic acid. A functional fragment can possess more, fewer, or the same number of residues as the corresponding native molecule, and/or can contain one or more amino acid or nucleotide substitutions. Methods for determining the function of a nucleic acid (e.g., coding function, ability to hybridize to another nucleic acid) are well known in the art. Similarly, methods for determining protein function are well known. For example, the DNA-binding function of a polypeptide can be determined, for example, by filter-binding, electrophoretic mobility-shift, or immunoprecipitation assays. DNA cleavage can be assayed by gel electrophoresis. See Ausubel et al., supra. The ability of a protein to interact with another protein can be determined, for example, by co-immunoprecipitation, two-hybrid assays or complementation, both genetic and biochemical. See, for example, Fields et al. (1989) Nature 340:245-246; U.S. Pat. No. 5,585,245 and PCT WO 98/44350.

[0476] As used herein, a “functional” biological molecule is a biological entity with a structure and in a form in which it exhibits a property and/or activity by which it is characterized.

[0477] A “fusion” molecule is a molecule in which two or more subunit molecules are linked, preferably covalently. The subunit molecules can be the same chemical type of molecule or can be different chemical types of molecules. Examples of the first type of fusion molecule include, but are not limited to, fusion proteins, for example, a fusion between a DNA-binding domain (e.g., ZFP, TALE and/or meganuclease DNA-binding domains) and a nuclease (cleavage) domain (e.g., endonuclease, meganuclease, etc. and fusion nucleic acids (for example, a nucleic acid encoding the fusion protein described supra). Examples of the second type of fusion molecule include, but are not limited to, a fusion between a triplex-forming nucleic acid and a polypeptide, and a fusion between a minor groove binder and a nucleic acid.

[0478] Expression of a fusion protein in a cell can result from delivery of the fusion protein to the cell or by delivery of a polynucleotide encoding the fusion protein to a cell, wherein the polynucleotide is transcribed, and the transcript is translated, to generate the fusion protein. Trans-splicing, polypeptide cleavage and polypeptide ligation can also be involved in expression of a protein in a cell. Methods for polynucleotide and polypeptide delivery to cells are presented elsewhere in this disclosure.

[0479] A “gene” refers to a polynucleotide comprising nucleotides that encode a functional molecule including functional molecules produced by transcription only (e.g., a bioactive RNA species) or by transcription and translation (e.g., a polypeptide). The term “gene” encompasses cDNA and genomic DNA nucleic acids. “Gene” also refers to a nucleic acid fragment that expresses a specific RNA, protein or polypeptide, including regulatory sequences preceding (5′ non-coding sequences) and following (3′ non-coding sequences) the coding sequence. “Native gene” refers to a gene as found in nature with its own regulatory sequences. “Chimeric gene” refers to any gene that is not a native gene, comprising regulatory and/or coding sequences that are not found together in nature. Accordingly, a chimeric gene may comprise regulatory sequences and coding sequences that are derived from different sources, or regulatory sequences and coding sequences derived from the same source but arranged in a manner different than that found in nature. A chimeric gene may comprise coding sequences derived from different sources and/or regulatory sequences derived from different sources. “Endogenous gene” refers to a native gene in its natural location in the genome of an organism. A “foreign” gene or “heterologous” gene refers to a gene not normally found in the host organism, but that is introduced into the host organism by gene transfer. Foreign genes can comprise native genes inserted into a non-native organism, or chimeric genes. A “transgene” is a gene that has been introduced into the genome by a transformation procedure. For example, the interleukin-12 (IL-12) gene encodes the IL-12 protein. IL-12 is a heterodimer of a 35-kD subunit (p35) and a 40-kD subunit (p40) linked through a disulfide linkage to make fully functional IL-12p70. The IL-12 gene encodes both the p35 and p40 subunits.

[0480] The transcribed polynucleotide can have a sequence encoding a polypeptide, such as a functional protein, which can be translated into the encoded polypeptide when placed under the control of an appropriate regulatory region. A gene may comprise several operably linked fragments, such as a promoter, a 5′ leader sequence, a coding sequence and a 3′ nontranslated sequence, such as a polyadenylation site, as well as all DNA regions which regulate the production of the gene product, whether or not such regulatory sequences are adjacent to coding and/or transcribed sequences. Accordingly, a gene includes, but is not necessarily limited to, promoter sequences, terminators, translational regulatory sequences such as ribosome binding sites and internal ribosome entry sites, enhancers, silencers, insulators, boundary elements, replication origins, matrix attachment sites and locus control regions.

[0481] “Gene expression” refers to the conversion of the information, contained in a gene, into a gene product. A gene product can be the direct transcriptional product of a gene (e.g., mRNA, tRNA, rRNA, antisense RNA, ribozyme, structural RNA or any other type of RNA) or a protein produced by translation of an mRNA. Gene products also include RNAs which are modified, by processes such as capping, polyadenylation, methylation, and editing, and proteins modified by, for example, methylation, acetylation, phosphorylation, ubiquitination, ADP-ribosylation, myristilation, and glycosylation.

[0482] A chimeric or recombinant gene is a gene not normally found in nature, such as a gene in which, for example, the promoter is not associated in nature with part or all of the transcribed DNA region. “Expression of a gene” refers to the process wherein a gene is transcribed into an RNA and/or translated into a functional protein.

[0483] “Gene delivery” or “gene transfer” refers to methods for introduction of recombinant or foreign DNA into host cells. The transferred DNA can remain non-integrated or preferably integrates into the genome of the host cell. Gene delivery can take place for example by transduction, using viral vectors, or by transformation of cells, using known methods, such as electroporation, cell bombardment.

[0484] The term “genome” includes chromosomal as well as mitochondrial, chloroplast and viral DNA or RNA.

[0485] The term “head-to-head” is used herein to describe the orientation of two polynucleotide sequences in relation to each other. Two polynucleotides are positioned in a head-to-head orientation when the 5′ end of the coding strand of one polynucleotide is adjacent to the 5′ end of the coding strand of the other polynucleotide, whereby the direction of transcription of each polynucleotide proceeds away from the 5′ end of the other polynucleotide. The term “head-to-head” may be abbreviated (5′)-to-(5′).

[0486] The term “tail-to-tail” is used herein to describe the orientation of two polynucleotide sequences in relation to each other. Two polynucleotides are positioned in a tail-to-tail orientation when the 3′ end of the coding strand of one polynucleotide is adjacent to the 3′ end of the coding strand of the other polynucleotide, whereby the direction of transcription of each polynucleotide proceeds toward the other polynucleotide. The term “tail-to-tail” may be abbreviated (3′)-to-(3′).

[0487] The term “head-to-tail” is used herein to describe the orientation of two polynucleotide sequences in relation to each other. Two polynucleotides are positioned in a head-to-tail orientation when the 5′ end of the coding strand of one polynucleotide is adjacent to the 3′ end of the coding strand of the other polynucleotide, whereby the direction of transcription of each polynucleotide proceeds in the same direction as that of the other polynucleotide. The term “head-to-tail” may be abbreviated (5′)-to-(3′).

[0488] The terms “heterologous DNA sequence”, “exogenous DNA segment” or “heterologous nucleic acid,” as used herein, each refer to a sequence that originates from a source foreign to the particular host cell or, if from the same source, is modified from its original form. Thus, a heterologous gene in a host cell includes a gene that is endogenous to the particular host cell but has been modified through, for example, the use of DNA shuffling. The terms also include non-naturally occurring multiple copies of a naturally occurring DNA sequence. Thus, the terms refer to a DNA segment that is foreign or heterologous to the cell, or homologous to the cell but in a position within the host cell nucleic acid in which the element is not ordinarily found. Exogenous DNA segments are expressed to yield exogenous polypeptides. A “homologous” DNA sequence is a DNA sequence that is naturally associated with a host cell into which it is introduced.

[0489] “Heterologous DNA” refers to DNA not naturally located in the cell, or in a chromosomal site of the cell. The heterologous DNA may include a gene foreign to the cell.

[0490] “Homologous recombination” refers to the insertion of a foreign DNA sequence into another DNA molecule, e.g., insertion of a vector in a chromosome. Preferably, the vector targets a specific chromosomal site for homologous recombination. For specific homologous recombination, the vector will contain sufficiently long regions of homology to sequences of the chromosome to allow complementary binding and incorporation of the vector into the chromosome. Longer regions of homology, and greater degrees of sequence similarity, may increase the efficiency of homologous recombination.

[0491] Immune cells: the term “an immune cell”, as used herein, refers to any cell of the immune system that originates from a hematopoietic stem cell in the bone marrow, which gives rise to two major lineages, a myeloid progenitor cell (which give rise to myeloid cells such as monocytes, macrophages, dendritic cells, megakaryocytes and granulocytes) and a lymphoid progenitor cell (which give rise to lymphoid cells such as T cells, B cells and natural killer (NK) cells). Exemplary immune system cells include a CD4+ T cell, a CD8+ T cell, a CD4− CD8− double negative T cell, a T γδ cell, a Tαβ cell, a regulatory T cell, a natural killer cell, and a dendritic cell. Macrophages and dendritic cells may be referred to as “antigen presenting cells” or “APCs,” which are specialized cells that can activate T cells when a major histocompatibility complex (MHC) receptor on the surface of the APC complexed with a peptide interacts with a TCR on the surface of a T cell.

[0492] Immunotherapy: the term “immunotherapy” as used herein, refers to a type of treatment of a disease by the induction or restoration of the reactivity of the immune system towards the disease.

[0493] Immunotherapeutic agent: the term “immunotherapeutic agent” as used herein, refers to the treatment of disease by the induction or restoration of the reactivity of the immune system towards the disease with a biological, pharmaceutical, or chemical compound.

[0494] The term “isolated” for the purposes of the invention designates a biological material (cell, nucleic acid or protein) that has been removed from its original environment (the environment in which it is naturally present). For example, a polynucleotide present in the natural state in a plant or an animal is not isolated, however the same polynucleotide separated from the adjacent nucleic acids in which it is naturally present is considered “isolated.”

[0495] “Modulation” of gene expression refers to a change in the activity of a gene. Modulation of expression can include, but is not limited to, gene activation and gene repression. Genome editing (e.g., cleavage, alteration, inactivation, random mutation) can be used to modulate expression. Gene inactivation refers to any reduction in gene expression as compared to a cell that does not include a ZFP, TALE or CRISPR/Cas system as described herein. Thus, gene inactivation may be partial or complete.

[0496] Modified: As used herein, the term “modified” refers to a changed state or structure of a molecule or entity as compared with a parent or reference molecule or entity. Molecules may be modified in many ways including chemically, structurally, and functionally. In some embodiments, compounds and/or compositions of the present disclosure are modified by the introduction of non-natural amino acids.

[0497] Mutation: As used herein, the term “mutation” refers to a change and/or alteration. In some embodiments, mutations may be changes and/or alterations to proteins (including peptides and polypeptides) and/or nucleic acids (including polynucleic acids). In some embodiments, mutations comprise changes and/or alterations to a protein and/or nucleic acid sequence. Such changes and/or alterations may comprise the addition, substitution and or deletion of one or more amino acids (in the case of proteins and/or peptides) and/or nucleotides (in the case of nucleic acids and or polynucleic acids e.g., polynucleotides). In some embodiments, wherein mutations comprise the addition and/or substitution of amino acids and/or nucleotides, such additions and/or substitutions may comprise one or more amino acid and/or nucleotide residues and may include modified amino acids and/or nucleotides. The resulting construct, molecule or sequence of a mutation, change or alteration may be referred to herein as a mutant.

[0498] “Nucleic acid,” “nucleic acid molecule,” “oligonucleotide,” “nucleotide,” and “polynucleotide” are used interchangeably and refer to the phosphate ester polymeric form of ribonucleosides (adenosine, guanosine, uridine or cytidine; “RNA molecules”) or deoxyribonucleosides (deoxyadenosine, deoxyguanosine, deoxythymidine, or deoxycytidine; “DNA molecules”), or any phosphoester analogs thereof, such as phosphorothioates and thioesters, in either single stranded form, or a double-stranded helix. Double stranded DNA-DNA, DNA-RNA and RNA-RNA helices are possible. The term nucleic acid molecule, and in particular DNA or RNA molecule, refers only to the primary and secondary structure of the molecule, and does not limit it to any particular tertiary forms. Thus, this term includes double-stranded DNA found, inter alia, in linear or circular DNA molecules (e.g., restriction fragments), plasmids, supercoiled DNA and chromosomes. In discussing the structure of particular double-stranded DNA molecules, sequences may be described herein according to the normal convention of giving only the sequence in the 5′ to 3′ direction along the non-transcribed strand of DNA (i.e., the strand having a sequence homologous to the mRNA). A “recombinant DNA molecule” is a DNA molecule that has undergone a molecular biological manipulation. DNA includes, but is not limited to, cDNA, genomic DNA, plasmid DNA, synthetic DNA, and semi-synthetic DNA.

[0499] As used herein, an “isolated nucleic acid fragment” refers to a polymer of RNA or DNA that is single- or double-stranded, optionally containing synthetic, non-natural or altered nucleotide bases. An isolated nucleic acid fragment in the form of a polymer of DNA may be comprised of one or more segments of cDNA, genomic DNA or synthetic DNA.

[0500] The exogenous nucleic acid sequence can comprise, for example, one or more genes or cDNA molecules, or any type of coding or noncoding sequence, as well as one or more control elements (e.g., promoters). In addition, the exogenous nucleic acid sequence may produce one or more RNA molecules (e.g., small hairpin RNAs (shRNAs), inhibitory RNAs (RNAis), microRNAs (miRNAs), etc.).

[0501] Operably linked: As used herein, the phrase “operably linked” refers to a functional connection between two or more molecules, constructs, transcripts, entities, moieties or the like.

[0502] “Operably-linked” or “functionally linked” as it refers to nucleic acid sequences and polynucleotides refers to the association of nucleic acid sequences on a single nucleic acid fragment so that the function of one is affected by the other, while the nucleic acid sequences need not necessarily be adjacent or contiguous to each other, but may have intervening sequences between them. For example, a regulatory DNA sequence is said to be “operably linked to” or “associated with” a DNA sequence that codes for an RNA or a polypeptide if the two sequences are situated such that the regulatory DNA sequence affects expression of the coding DNA sequence (i.e., that the coding sequence or functional RNA is under the transcriptional control of the promoter). Coding sequences can be operably linked to regulatory sequences in sense or antisense orientation. A transcriptional regulatory sequence is generally operably linked in cis with a coding sequence, but need not be directly adjacent to it. For example, an enhancer is a transcriptional regulatory sequence that is operably linked to a coding sequence, even though they are not contiguous, or, a promoter is operably linked to a gene of interest if the promoter regulates or mediates transcription of the gene of interest in a cell.

[0503] Typically, it refers to the functional relationship of a transcriptional regulatory sequence to a transcribed sequence. For example, an EF-1 promoter or enhancer sequence, is operably linked to a coding sequence if it stimulates or modulates the transcription of the coding sequence in an appropriate host cell or other expression system. Generally, promoter transcriptional regulatory sequences that are operably linked to a transcribed sequence are physically contiguous to the transcribed sequence, i.e., they are cis-acting. However, some transcriptional regulatory sequences, such as enhancers, need not be physically contiguous or located in close proximity to the coding sequences whose transcription they enhance. A polylinker provides a convenient location for inserting coding sequences so the genes are operably linked to the AP-1 promoter. Polylinkers are polynucleotide sequences that comprise a series of three or more closely spaced restriction endonuclease recognition sequences.

[0504] In an association between two or more polypeptides or domains thereof to create a fusion polypeptide, the term “operably linked” means that the state or function of one polypeptide in the fusion protein is affected by the other polypeptide in the fusion protein. For example, with respect to a fusion protein comprising a DRD and a payload, the DRD and the payload are operably linked if stabilization of the DRD with a ligand results in stabilization of the payload, while destabilization of the DRD in the absence of a ligand results in destabilization of the payload. While the term operably linked may certainly include embodiments in which the DRD is adjacent or directly fused with a payload, other embodiments such as when a DRD is separated from the payload by other nucleotide sequences or peptide or polypeptide sequences is also “operably” linked to a payload, if stabilization of the DRD with a ligand results in stabilization of the payload, while destabilization of the DRD in the absence of a ligand results in destabilization of the payload.

[0505] “Open reading frame” is abbreviated ORF and refers to a length of nucleic acid sequence, either DNA, cDNA or RNA, that comprises a translation start signal or initiation codon, such as an ATG or AUG, and a termination codon and can be potentially translated into a polypeptide sequence.

[0506] The terms “polypeptide,” “peptide” and “protein” are used interchangeably to refer to a polymer of amino acid residues. The term also applies to amino acid polymers in which one or more amino acids are chemical analogues or modified derivatives of a corresponding naturally occurring amino acid.

[0507] The term “plasmid” refers to an extra-chromosomal element often carrying a gene that is not part of the central metabolism of the cell, and usually in the form of circular double-stranded DNA molecules. Such elements may be autonomously replicating sequences, genome integrating sequences, phage or nucleotide sequences, linear, circular, or supercoiled, of a single- or double-stranded DNA or RNA, derived from any source, in which a number of nucleotide sequences have been joined or recombined into a unique construction which is capable of introducing a promoter fragment and DNA sequence for a selected gene product along with appropriate 3′ untranslated sequence into a cell. Starting plasmids disclosed herein are either commercially available, publicly available on an unrestricted basis, or can be constructed from available plasmids by routine application of well-known published procedures. Many plasmids and other cloning and expression vectors that can be used in accordance with the present invention are well known and readily available to those of skill in the art. Moreover, those of skill readily may construct any number of other plasmids suitable for use in the invention. The properties, construction and use of such plasmids, as well as other vectors, in the present invention will be readily apparent to those of skill from the present disclosure.

[0508] The term “polypeptide” is used interchangeably herein with the terms “polypeptides” and “protein(s)”, and refers to a polymer of amino acid residues, e.g., as typically found in proteins in nature. A “mature protein” is a protein which is full-length and which, optionally, includes glycosylation or other modifications typical for the protein in a given cell membrane.

[0509] “Promoter” and “promoter sequence” are used interchangeably and refer to a DNA sequence capable of controlling the expression of a coding sequence or functional RNA. In general, a coding sequence is located 3′ to a promoter sequence. Promoters may be derived in their entirety from a native gene or be composed of different elements derived from different promoters found in nature, or even comprise synthetic DNA segments. It is understood by those skilled in the art that different promoters may direct the expression of a gene in different tissues or cell types, or at different stages of development, or in response to different environmental or physiological conditions. A promoter can include necessary nucleic acid sequences near the start site of transcription, such as, in the case of a polymerase II type promoter, a TATA element. A promoter can optionally include distal enhancer or repressor elements, which can be located as much as several thousand base pairs from the start site of transcription.

[0510] Promoters that cause a gene to be expressed in most cell types at most times are commonly referred to as “constitutive promoters.” Promoters that cause a gene to be expressed in a specific cell type are commonly referred to as “cell-specific promoters” or “tissue-specific promoters.” Promoters that cause a gene to be expressed at a specific stage of development or cell differentiation are commonly referred to as “developmentally-specific promoters” or “cell differentiation-specific promoters.” Promoters that are induced and cause a gene to be expressed following exposure or treatment of the cell with an agent, biological molecule, chemical, ligand, light, or the like that induces the promoter are commonly referred to as “inducible promoters” or “regulatable promoters.” It is further recognized that since in most cases the exact boundaries of regulatory sequences have not been completely defined, DNA fragments of different lengths may have identical promoter activity. The promoter sequence is typically bounded at its 3′ terminus by the transcription initiation site and extends upstream (5′ direction) to include the minimum number of bases or elements necessary to initiate transcription at levels detectable above background. Within the promoter sequence is found a transcription initiation site (conveniently defined for example, by mapping with nuclease S1), as well as protein binding domains (consensus sequences) responsible for the binding of RNA polymerase.

[0511] The promoter region of a gene includes the transcription regulatory elements that typically lie 5′ to a structural gene. If a gene is to be activated, proteins known as transcription factors attach to the promoter region of the gene. This assembly resembles an “on switch” by enabling an enzyme to transcribe a second genetic segment from DNA into RNA. In most cases the resulting RNA molecule serves as a template for synthesis of a specific protein; sometimes RNA itself is the final product. The promoter region may be a normal cellular promoter or an oncopromoter.

[0512] The term “purified,” as applied to biological materials does not require the material to be present in a form exhibiting absolute purity, exclusive of the presence of other compounds. It is rather a relative definition.

[0513] Payload or payload of interest (POI): the terms “payload” and “payload of interest (POI)”, as used herein, are used interchangeable. A payload of interest (POI) refers to any protein or compound whose function is to be altered. In the context of the present disclosure, the POI is a component in the immune system, including both innate and adaptive immune systems. Payloads of interest may be a protein, a fusion construct encoding a fusion protein, or non-coding gene, or variant and fragment thereof. Payload of interest or payload, may, when amino acid based, may be referred to as a protein of interest.

[0514] As used herein, the term “polypeptide variant” refers to molecules which differ in their amino acid sequence from a native or reference sequence. The amino acid sequence variants may possess substitutions, deletions, and/or insertions at certain positions within the amino acid sequence, as compared to a native or reference sequence. Ordinarily, variants will possess at least about 50% identity (homology) to a native or reference sequence, and preferably, they will be at least about 80%, more preferably at least about 90% identical (homologous) to a native or reference sequence.

[0515] In some embodiments “variant mimics” are provided. As used herein, the term “variant mimic” refers to a variant which contains one or more amino acids which would mimic an activated sequence. For example, glutamate may serve as a mimic for phospho-threonine and/or phospho-serine. Alternatively, variant mimics may result in deactivation or in an inactivated product containing the mimic, e.g., phenylalanine may act as an inactivating substitution for tyrosine; or alanine may act as an inactivating substitution for serine. The amino acid sequences of the pharmaceutical compositions, biocircuits, biocircuit components, effector modules including their SREs or payloads of the disclosure may comprise naturally occurring amino acids and as such may be considered to be proteins, peptides, polypeptides, or fragments thereof. Alternatively, the pharmaceutical compositions, biocircuits, biocircuit components, effector modules including their SREs or payloads may comprise both naturally and non-naturally occurring amino acids.

[0516] As used herein, the term “amino acid sequence variant” refers to molecules with some differences in their amino acid sequences as compared to a native or starting sequence. The amino acid sequence variants may possess substitutions, deletions, and/or insertions at certain positions within the amino acid sequence. As used herein, the terms “native” or “starting” when referring to sequences are relative terms referring to an original molecule against which a comparison may be made. Native or starting sequences should not be confused with wild type sequences. Native sequences or molecules may represent the wild-type (that sequence found in nature) but do not have to be identical to the wild-type sequence.

[0517] Ordinarily, variants will possess at least about 70% homology to a native sequence, and preferably, they will be at least about 80%, more preferably at least about 90% homologous to a native sequence.

[0518] As used herein, the term “homology” as it applies to amino acid sequences is defined as the percentage of residues in the candidate amino acid sequence that are identical with the residues in the amino acid sequence of a second sequence after aligning the sequences and introducing gaps, if necessary, to achieve the maximum percent homology. Methods and computer programs for the alignment are well known in the art. It is understood that homology depends on a calculation of percent identity but may differ in value due to gaps and penalties introduced in the calculation.

[0519] As used herein, the term “homolog” as it applies to amino acid sequences is meant the corresponding sequence of other species having substantial identity to a second sequence of a second species.

[0520] As used herein, the term “analog” is meant to include polypeptide variants which differ by one or more amino acid alterations, e.g., substitutions, additions or deletions of amino acid residues that still maintain the properties of the parent polypeptide.

[0521] As used herein, the term “derivative” is used synonymously with the term “variant” and refers to a molecule that has been modified or changed in any way relative to a reference molecule or starting molecule.

[0522] Pharmaceutically acceptable excipients: the term “pharmaceutically acceptable excipient,” as used herein, refers to any ingredient other than active agents (e.g., as described herein) present in pharmaceutical compositions and having the properties of being substantially nontoxic and non-inflammatory in subjects. In some embodiments, pharmaceutically acceptable excipients are vehicles capable of suspending and/or dissolving active agents. Excipients may include, for example: antiadherents, antioxidants, binders, coatings, compression aids, disintegrants, dyes (colors), emollients, emulsifiers, fillers (diluents), film formers or coatings, flavors, fragrances, glidants (flow enhancers), lubricants, preservatives, printing inks, sorbents, suspending or dispersing agents, sweeteners, and waters of hydration. Exemplary excipients include, but are not limited to: butylated hydroxytoluene (BHT), calcium carbonate, calcium phosphate (dibasic), calcium stearate, croscarmellose, crosslinked polyvinyl pyrrolidone, citric acid, crospovidone, cysteine, ethylcellulose, gelatin, hydroxypropyl cellulose, hydroxypropyl methylcellulose, lactose, magnesium stearate, maltitol, mannitol, methionine, methylcellulose, methyl paraben, microcrystalline cellulose, polyethylene glycol, polyvinyl pyrrolidone, povidone, pregelatinized starch, propyl paraben, retinyl palmitate, shellac, silicon dioxide, sodium carboxymethyl cellulose, sodium citrate, sodium starch glycolate, sorbitol, starch (corn), stearic acid, sucrose, talc, titanium dioxide, vitamin A, vitamin E, vitamin C, and xylitol.

[0523] Pharmaceutically acceptable salts: Pharmaceutically acceptable salts of the compounds described herein are forms of the disclosed compounds wherein the acid or base moiety is in its salt form (e.g., as generated by reacting a free base group with a suitable organic acid). Examples of pharmaceutically acceptable salts include, but are not limited to, mineral or organic acid salts of basic residues such as amines; alkali or organic salts of acidic residues such as carboxylic acids; and the like. Representative acid addition salts include acetate, adipate, alginate, ascorbate, aspartate, benzenesulfonate, benzoate, bisulfate, borate, butyrate, camphorate, camphorsulfonate, citrate, cyclopentanepropionate, digluconate, dodecylsulfate, ethanesulfonate, fumarate, glucoheptonate, glycerophosphate, hemisulfate, heptonate, hexanoate, hydrobromide, hydrochloride, hydroiodide, 2-hydroxy-ethanesulfonate, lactobionate, lactate, laurate, lauryl sulfate, malate, maleate, malonate, methanesulfonate, 2-naphthalenesulfonate, nicotinate, nitrate, oleate, oxalate, palmitate, pamoate, pectinate, persulfate, 3-phenylpropionate, phosphate, picrate, pivalate, propionate, stearate, succinate, sulfate, tartrate, thiocyanate, toluenesulfonate, undecanoate, valerate salts, and the like. Representative alkali or alkaline earth metal salts include sodium, lithium, potassium, calcium, magnesium, and the like, as well as nontoxic ammonium, quaternary ammonium, and amine cations, including, but not limited to ammonium, tetramethylammonium, tetraethylammonium, methylamine, dimethylamine, trimethylamine, triethylamine, ethylamine, and the like. Pharmaceutically acceptable salts include the conventional non-toxic salts, for example, from non-toxic inorganic or organic acids. In some embodiments, a pharmaceutically acceptable salt is prepared from a parent compound which contains a basic or acidic moiety by conventional chemical methods. Generally, such salts can be prepared by reacting the free acid or base forms of these compounds with a stoichiometric amount of the appropriate base or acid in water or in an organic solvent, or in a mixture of the two; generally, nonaqueous media like ether, ethyl acetate, ethanol, isopropanol, or acetonitrile are preferred. Lists of suitable salts are found in Remington's Pharmaceutical Sciences, 17th ed., Mack Publishing Company, Easton, Pa., 1985, p. 1418, Pharmaceutical Salts: Properties, Selection, and Use, P. H. Stahl and C. G. Wermuth (eds.), Wiley-VCH, 2008, and Berge et al., Journal of Pharmaceutical Science, 66, 1-19 (1977), each of which is incorporated herein by reference in its entirety. Pharmaceutically acceptable solvate: The term “pharmaceutically acceptable solvate,” as used herein, refers to a crystalline form of a compound wherein molecules of a suitable solvent are incorporated in the crystal lattice. For example, solvates may be prepared by crystallization, recrystallization, or precipitation from a solution that includes organic solvents, water, or a mixture thereof. Examples of suitable solvents are ethanol, water (for example, mono-, di-, and tri-hydrates), N-methylpyrrolidinone (NMP), dimethyl sulfoxide (DMSO), N, N′-dimethylformamide (DMF), N, N′-dimethylacetamide (DMAC), 1,3-dimethyl-2-imidazolidinone (DMEU), 1,3-dimethyl-3,4,5,6-tetrahydro-2-(1H)-pyrimidinone (DMPU), acetonitrile (ACN), propylene glycol, ethyl acetate, benzyl alcohol, 2-pyrrolidone, benzyl benzoate, and the like. When water is the solvent, the solvate is referred to as a “hydrate.” In some embodiments, the solvent incorporated into a solvate is of a type or at a level that is physiologically tolerable to an organism to which the solvate is administered (e.g., in a unit dosage form of a pharmaceutical composition).

[0524] The term “recombinant” has the usual meaning in the art, and refers to a polynucleotide synthesized or otherwise manipulated in vitro (e.g., “recombinant polynucleotide”), to methods of using recombinant polynucleotides to produce gene products in cells or other biological systems, or to a polypeptide (“recombinant protein”) encoded by a recombinant polynucleotide. When used with reference to a cell, the term indicates that the cell replicates a heterologous nucleic acid, or expresses a peptide or protein encoded by a heterologous nucleic acid. Recombinant cells can contain genes that are not found within the native (non-recombinant) form of the cell. Recombinant cells can also contain genes found in the native form of the cell wherein the genes are modified and re-introduced into the cell by artificial means. The term also encompasses cells that contain a nucleic acid endogenous to the cell that has been modified without removing the nucleic acid from the cell; such modifications include those obtained by gene replacement, site-specific mutation, and related techniques.

[0525] A “recombinant expression cassette” or simply an “expression cassette” is a nucleic acid construct, generated recombinantly or synthetically, that has control elements that are capable of affecting expression of a structural gene that is operably linked to the control elements in hosts compatible with such sequences. Expression cassettes include at least promoters and optionally, transcription termination signals. Typically, the recombinant expression cassette includes at least a nucleic acid to be transcribed and a promoter. Additional factors necessary or helpful in effecting expression can also be used as described herein. For example, transcription termination signals, enhancers, and other nucleic acid sequences that influence gene expression, can also be included in an expression cassette.

[0526] “Recombination” refers to a process of exchange of genetic information between two polynucleotides, including but not limited to, donor capture by non-homologous end joining (NHEJ) and homologous recombination. For the purposes of this disclosure, “homologous recombination (HR)” refers to the specialized form of such exchange that takes place, for example, during repair of double-strand breaks in cells via homology-directed repair mechanisms. This process requires nucleotide sequence homology, uses a “donor” molecule to template repair of a “target” molecule (i.e, the one that experienced the double-strand break), and is variously known as “non-crossover gene conversion” or “short tract gene conversion,” because it leads to the transfer of genetic information from the donor to the target. Without wishing to be bound by any particular theory, such transfer can involve mismatch correction of heteroduplex DNA that forms between the broken target and the donor, and/or “synthesis-dependent strand annealing,” in which the donor is used to resynthesize genetic information that will become part of the target, and/or related processes. Such specialized HR often results in an alteration of the sequence of the target molecule such that part or all of the sequence of the donor polynucleotide is incorporated into the target polynucleotide. In any of the methods described herein, additional pairs of gene editing nucleases can be used for additional double-stranded cleavage of additional target sites within the cell.

[0527] A “region of interest” is any region of cellular chromatin, such as, for example, a gene or a non-coding sequence within or adjacent to a gene, in which it is desirable to bind an exogenous molecule. Binding can be for the purposes of targeted DNA cleavage and/or targeted recombination. A region of interest can be present in a chromosome, an episome, an organellar genome (e.g., mitochondrial, chloroplast), or an infecting viral genome, for example. A region of interest can be within the coding region of a gene, within transcribed non-coding regions such as, for example, leader sequences, trailer sequences or introns, or within non-transcribed regions, either upstream or downstream of the coding region. A region of interest can be as small as a single nucleotide pair or up to 2,000 nucleotide pairs in length, or any integral value of nucleotide pairs.

[0528] The term “reporter gene” refers to a nucleic acid encoding an identifying factor that is able to be identified based upon the reporter gene's effect, wherein the effect is used to track the inheritance of a nucleic acid of interest, to identify a cell or organism that has inherited the nucleic acid of interest, and/or to measure gene expression induction or transcription. Examples of reporter genes known and used in the art include: luciferase (Luc), green fluorescent protein (GFP), chloramphenicol acetyltransferase (CAT), beta.-galactosidase (LacZ), .beta.-glucuronidase (Gus), and the like. Selectable marker genes may also be considered reporter genes.

[0529] The term “response element” refers to one or more cis-acting DNA elements which confer responsiveness on a promoter mediated through interaction with the DNA-binding domains of a transcription factor. This DNA element may be either palindromic (perfect or imperfect) in its sequence or composed of sequence motifs or half sites separated by a variable number of nucleotides. The half sites can be similar or identical and arranged as either direct or inverted repeats or as a single half site or multimers of adjacent half sites in tandem. The response element may comprise a minimal promoter isolated from different organisms depending upon the nature of the cell or organism into which the response element is incorporated. The DNA binding domain of the transcription factor binds, in the presence or absence of a ligand, to the DNA sequence of a response element to initiate or suppress transcription of downstream gene(s) under the regulation of this response element.

[0530] The term “sequence” refers to a nucleotide sequence of any length, which can be DNA or RNA; can be linear, circular or branched and can be either single-stranded or double stranded.

[0531] The term “selectable marker” refers to an identifying factor, usually an antibiotic or chemical resistance gene, that is able to be selected for based upon the marker gene's effect, i.e., resistance to an antibiotic, resistance to a herbicide, colorimetric markers, enzymes, fluorescent markers, and the like, wherein the effect is used to track the inheritance of a nucleic acid of interest and/or to identify a cell or organism that has inherited the nucleic acid of interest. Examples of selectable marker genes known and used in the art include: genes providing resistance to ampicillin, streptomycin, gentamycin, kanamycin, hygromycin, bialaphos herbicide, sulfonamide, and the like; and genes that are used as phenotypic markers, i.e., anthocyanin regulatory genes, isopentanyl transferase gene, and the like.

[0532] Stable: As used herein “stable” refers to a compound or entity that is sufficiently robust to survive isolation to a useful degree of purity from a reaction mixture, and preferably capable of formulation into an efficacious therapeutic agent.

[0533] As used herein, the term “stabilize”, “stabilized,” “stabilized region” means to make or become stable. In some embodiments, stability is measured relative to an absolute value. In some embodiments, stability is measured relative to a secondary status or state or to a reference compound or entity.

[0534] As used herein, the term “standard CAR” refers to the standard design of a chimeric antigen receptor. The components of a CAR fusion protein including the extracellular scFv fragment, transmembrane domain and one or more intracellular domains are linearly constructed as a single fusion protein.

[0535] The terms “subject” and “patient” are used interchangeably and refer to mammals such as human patients and non-human primates, as well as experimental animals such as rabbits, dogs, cats, rats, mice, and other animals. Accordingly, the term “subject” or “patient” as used herein means any patient or subject (e.g. mammalian) to which the cells or stem cells of the invention can be administered.

[0536] A T cell is an immune cell that produces T cell receptors (TCRs). T cells can be naïve (not exposed to antigen; increased expression of CD62L, CCR7, CD28, CD3, CD127, and CD45RA, and decreased expression of CD45RO as compared to TCM), memory T cells (TM) (antigen-experienced and long-lived), and effector cells (antigen-experienced, cytotoxic). TM can be further divided into subsets of central memory T cells (TCM, increased expression of CD62L, CCR7, CD28, CD127, CD45RO, and CD95, and decreased expression of CD54RA as compared to naïve T cell and effector memory T cells (TEM, decreased expression of CD62L, CCR7, CD28, CD45RA, and increased expression of CD127 as compared to naïve T cells or TCM). Effector T cells (TE) refers to antigen-experienced CD8+ cytotoxic T lymphocytes that have decreased expression of CD62L, CCR7, CD28, and are positive for granzyme and perforin as compared to TCM. Other exemplary T cells include regulatory T cells, such as CD4+CD25+(Foxp3+) regulatory T cells and Treg17 cells, as well as Tr1, Th3, CD8+CD28−, and Qa-1 restricted T cells.

[0537] T cell receptor: T cell receptor (TCR) refers to an immunoglobulin superfamily member having a variable antigen binding domain, a constant domain, a transmembrane region, and a short cytoplasmic tail, which is capable of specifically binding to an antigen peptide bound to a MEW receptor. A TCR can be found on the surface of a cell or in soluble form and generally is comprised of a heterodimer having α and β chains (also known as TCRα and TCRβ, respectively), or γ and δ chains (also known as TCRγ and TCRδ, respectively). The extracellular portion of TCR chains (e.g., α-chain, β-chain) contains two immunoglobulin domains, a variable domain (e.g., α-chain variable domain or Vα, β-chain variable domain or Vβ) at the N terminus, and one constant domain (e.g., α-chain constant domain or Cα and β-chain constant domain or Cβ) adjacent to the cell membrane. Similar to immunoglobulin, the variable domains contain complementary determining regions (CDRs) separated by framework regions (FRs). A TCR is usually associated with the CD3 complex to form a TCR complex. As used herein, the term “TCR complex” refers to a complex formed by the association of CD3 with TCR. For example, a TCR complex can be composed of a CD3γ chain, a CD3δ chain, two CD3ε chains, a homodimer of CD3ζ chains, a TCRα chain, and a TCRβ chain. Alternatively, a TCR complex can be composed of a CD3γ chain, a CD3δ chain, two CD3ε chains, a homodimer of CD3ζ chains, a TCRγ chain, and a TCR chain. A “component of a TCR complex,” as used herein, refers to a TCR chain (i.e., TCRα, TCRβ, TCRγ or TCRδ), a CD3 chain (i.e., CD3γ, CD3δ, CD3ε or CD3ζ), or a complex formed by two or more TCR chains or CD3 chains (e.g., a complex of TCRα and TCRβ, a complex of TCRγ and TCRδ, a complex of CD3ε and CD3δ, a complex of CD3γ and CD3ε, or a sub-TCR complex of TCRα, TCRβ, CD3γ, CD3δ, and two CD3ε chains.

[0538] Therapeutically effective amount: As used herein, the term “therapeutically effective amount” means an amount of an agent to be delivered (e.g., nucleic acid, drug, therapeutic agent, diagnostic agent, prophylactic agent, etc.) that is sufficient, when administered to a subject suffering from or susceptible to an infection, disease, disorder, and/or condition, to treat, improve symptoms of, diagnose, prevent, and/or delay the onset of the infection, disease, disorder, and/or condition. In some embodiments, a therapeutically effective amount is provided in a single dose. In some embodiments, a therapeutically effective amount is administered in a dosage regimen comprising a plurality of doses. Those skilled in the art will appreciate that in some embodiments, a unit dosage form may be considered to comprise a therapeutically effective amount of a particular agent or entity if it comprises an amount that is effective when administered as part of such a dosage regimen.

[0539] Treatment or treating: As used herein, the terms “treatment” or “treating” denote an approach for obtaining a beneficial or desired result including and preferably a beneficial or desired clinical result. Such beneficial or desired clinical results include, but are not limited to, one or more of the following: reducing the proliferation of (or destroying) cancerous cells or other diseased, reducing metastasis of cancerous cells found in cancers, shrinking the size of the tumor, decreasing symptoms resulting from the disease, increasing the quality of life of those suffering from the disease, decreasing the dose of other medications required to treat the disease, delaying the progression of the disease, and/or prolonging survival of individuals.

[0540] Tune: As used herein, the term “tune” means to adjust, balance or adapt one thing in response to a stimulus or toward a particular outcome. In one non-limiting example, the DRDs of the present disclosure adjust, balance or adapt the function or structure of compositions to which they are appended, attached or associated with in response to particular stimuli and/or environments.

[0541] A “TALE DNA binding domain” or “TALE” is a polypeptide comprising one or more TALE repeat domains/units. The repeat domains are involved in binding of the TALE to its cognate target DNA sequence. A single “repeat unit” (also referred to as a “repeat”) is typically 33-35 amino acids in length and exhibits at least some sequence homology with other TALE repeat sequences within a naturally occurring TALE protein.

[0542] A “target site” or “target sequence” is a nucleic acid sequence that defines a portion of a nucleic acid to which a binding molecule will bind, provided sufficient conditions for binding exist. An “intended” target site is one that the DNA-binding molecule is designed and/or selected to bind to.

[0543] Transcription refers to the process involving the interaction of an RNA polymerase with a gene, which directs the expression as RNA of the structural information present in the coding sequences of the gene. The process includes, but is not limited to the following steps: (1) transcription initiation, (2) transcript elongation, (3) transcript splicing, (4) transcript capping, (5) transcript termination, (6) transcript polyadenylation, (7) nuclear export of the transcript, (8) transcript editing, and (9) stabilizing the transcript.

[0544] A transcription regulatory element or sequence include, but is not limited to, a promoter sequence (e.g., the TATA box), an enhancer element, a signal sequence, or an array of transcription factor binding sites. It controls or regulates transcription of a gene operably linked to it.

[0545] A “transcribable nucleic acid molecule” as used herein refers to any nucleic acid molecule capable of being transcribed into an RNA molecule. Methods are known for introducing constructs into a cell in such a manner that the transcribable nucleic acid molecule is transcribed into a functional mRNA molecule that is translated and therefore expressed as a protein product. Constructs may also be constructed to be capable of expressing antisense RNA molecules, in order to inhibit translation of a specific RNA molecule of interest.

[0546] The “transcription start site” or “initiation site” is the position surrounding the first nucleotide that is part of the transcribed sequence, which is also defined as position+1. With respect to this site all other sequences of the gene and its controlling regions can be numbered. Downstream sequences (i.e., further protein encoding sequences in the 3′ direction) can be denominated positive, while upstream sequences (mostly of the controlling regions in the 5′ direction) are denominated negative.

[0547] “Transgene” refers to a gene that has been introduced into a host cell. The transgene may comprise sequences that are native to the cell, sequences that do not occur naturally in the cell, or combinations thereof. A transgene may contain sequences coding for one or more proteins that may be operably linked to appropriate regulatory sequences for expression of the coding sequences in the cell.

[0548] “Transduction” refers to the delivery of a nucleic acid molecule into a recipient host cell, such as by a gene delivery vector, such as a lentiviral vector, or a rAAV. For example, transduction of a target cell by a rAAV virion leads to transfer of the rAAV vector contained in that virion into the transduced cell. “Host cell” or “target cell” refers to the cell into which the nucleic acid delivery takes place.

[0549] The term “transformation” refers to the transfer of a nucleic acid fragment into the genome of a host cell, resulting in genetically stable inheritance. Host cells containing the transformed nucleic acid fragments are referred to as “transgenic” cells, and organisms comprising transgenic cells are referred to as “transgenic organisms”.

[0550] “Transformed,” “transgenic,” and “recombinant” refer to a host cell or organism such as a bacterium, cyanobacterium, animal or a plant into which a heterologous nucleic acid molecule has been introduced. The nucleic acid molecule can be stably integrated into the genome as generally known in the art and disclosed (Sambrook 1989; Innis 1995; Gelfand 1995; Innis & Gelfand 1999). Known methods of PCR include, but are not limited to, methods using paired primers, nested primers, single specific primers, degenerate primers, gene-specific primers, vector-specific primers, partially mismatched primers, and the like. The term “untransformed” refers to normal cells that have not been through the transformation process.

[0551] The term “transfection” refers to the uptake of exogenous or heterologous RNA or DNA by a cell. A cell has been “transfected” by exogenous or heterologous RNA or DNA when such RNA or DNA has been introduced inside the cell. A cell has been “transformed” by exogenous or heterologous RNA or DNA when the transfected RNA or DNA effects a phenotypic change. The transforming RNA or DNA can be integrated (covalently linked) into chromosomal DNA making up the genome of the cell.

[0552] “Transformation” refers to the transfer of a nucleic acid fragment into the genome of a host organism, resulting in genetically stable inheritance. Host organisms containing the transformed nucleic acid fragments are referred to as “transgenic” or “recombinant” or “transformed” organisms.

[0553] “Transcriptional and translational control sequences” refer to DNA regulatory sequences, such as promoters, enhancers, terminators, and the like, that provide for the expression of a coding sequence in a host cell. In eukaryotic cells, polyadenylation signals are control sequences.

[0554] A “variant” of a molecule such as a modulator of AP-1 is meant to refer to a molecule substantially similar in structure and biological activity to either the entire molecule, or to a fragment thereof. Thus, provided that two molecules possess a similar activity, they are considered variants as that term is used herein even if the composition or secondary, tertiary, or quaternary structure of one of the molecules is not identical to that found in the other, or if the sequence of amino acid residues is not identical.

[0555] A “vector” refers to any vehicle for the cloning of and/or transfer of a nucleic acid into a host cell. A vector may be a replicon to which another DNA segment may be attached so as to bring about the replication of the attached segment. A “replicon” refers to any genetic element (e.g., plasmid, phage, cosmid, chromosome, virus) that functions as an autonomous unit of DNA replication in vivo, i.e., capable of replication under its own control. The term “vector” includes both viral and nonviral vehicles for introducing the nucleic acid into a cell in vitro, ex vivo or in vivo. A large number of vectors known in the art may be used to manipulate nucleic acids, incorporate response elements and promoters into genes, etc. Possible vectors include, for example, plasmids or modified viruses including, for example bacteriophages such as lambda derivatives, or plasmids such as pBR322 or pUC plasmid derivatives, or the Bluescript vector. For example, the insertion of the DNA fragments corresponding to response elements and promoters into a suitable vector can be accomplished by ligating the appropriate DNA fragments into a chosen vector that has complementary cohesive termini. Alternatively, the ends of the DNA molecules may be enzymatically modified, or any site may be produced by ligating nucleotide sequences (linkers) into the DNA termini. Such vectors may be engineered to contain selectable marker genes that provide for the selection of cells that have incorporated the marker into the cellular genome. Such markers allow identification and/or selection of host cells that incorporate and express the proteins encoded by the marker. Common vectors include plasmids, viral genomes, and (primarily in yeast and bacteria) “artificial chromosomes.” “Expression vectors” are vectors that comprise elements that provide for or facilitate transcription of nucleic acids that are cloned into the vectors. Such elements can include, e.g., promoters and/or enhancers operably coupled to a nucleic acid of interest.

[0556] A “cloning vector” refers to a “replicon,” which is a unit length of a nucleic acid, preferably DNA, that replicates sequentially and which comprises an origin of replication, such as a plasmid, phage or cosmid, to which another nucleic acid segment may be attached so as to bring about the replication of the attached segment. Cloning vectors may be capable of replication in one cell type and expression in another (“shuttle vector”). Cloning vectors may comprise one or more sequences that can be used for selection of cells comprising the vector and/or one or more multiple cloning sites for insertion of sequences of interest.

[0557] The term “expression vector” refers to a vector, plasmid or vehicle designed to enable the expression of an inserted nucleic acid sequence. The cloned gene, i.e., the inserted nucleic acid sequence, is usually placed under the control of control elements such as a promoter, a minimal promoter, an enhancer, or the like. Initiation control regions or promoters, which are useful to drive expression of a nucleic acid in the desired host cell are numerous and familiar to those skilled in the art. Virtually any promoter capable of driving expression of these genes can be used in an expression vector, including but not limited to, viral promoters, bacterial promoters, animal promoters, mammalian promoters, synthetic promoters, constitutive promoters, tissue specific promoters, pathogenesis or disease related promoters, developmental specific promoters, inducible promoters, light regulated promoters; CYC1, HIS3, GAL1, GAL4, GAL10, ADH1, PGK, PHO5, GAPDH, ADC1, TRP1, URA3, LEU2, ENO, TP1, alkaline phosphatase promoters (useful for expression in Saccharomyces); AOX1 promoter (useful for expression in Pichia); beta-lactamase, lac, ara, tet, trp, 1PL, 1PR, T7, tac, and trc promoters (useful for expression in Escherichia coli); light regulated-, seed specific-, pollen specific-, ovary specific-, cauliflower mosaic virus 35S, CMV 35S minimal, cassava vein mosaic virus (CsVMV), chlorophyll a/b binding protein, ribulose 1,5-bisphosphate carboxylase, shoot-specific, root specific, chitinase, stress inducible, rice tungro bacilliform virus, plant super-promoter, potato leucine aminopeptidase, nitrate reductase, mannopine synthase, nopaline synthase, ubiquitin, zein protein, and anthocyanin promoters (useful for expression in plant cells); animal and mammalian promoters known in the art including, but are not limited to, the SV40 early (SV40e) promoter region, the promoter contained in the 3′ long terminal repeat (LTR) of Rous sarcoma virus (RSV), the promoters of the E1A or major late promoter (MLP) genes of adenoviruses (Ad), the cytomegalovirus (CMV) early promoter, the herpes simplex virus (HSV) thymidine kinase (TK) promoter, a baculovirus 1E1 promoter, an elongation factor 1 alpha (EF1) promoter, a phosphoglycerate kinase (PGK) promoter, a ubiquitin (Ubc) promoter, an albumin promoter, the regulatory sequences of the mouse metallothionein-L promoter and transcriptional control regions, the ubiquitous promoters (HPRT, vimentin, .alpha.-actin, tubulin and the like), the promoters of the intermediate filaments (desmin, neurofilaments, keratin, GFAP, and the like), the promoters of therapeutic genes (of the MDR, CFTR or factor VIII type, and the like), pathogenesis or disease related-promoters, and promoters that exhibit tissue specificity and have been utilized in transgenic animals, such as the elastase I gene control region which is active in pancreatic acinar cells; insulin gene control region active in pancreatic beta cells, immunoglobulin gene control region active in lymphoid cells, mouse mammary tumor virus control region active in testicular, breast, lymphoid and mast cells; albumin gene, Apo AI and Apo AII control regions active in liver, alpha-fetoprotein gene control region active in liver, alpha 1-antitrypsin gene control region active in the liver, beta-globin gene control region active in myeloid cells, myelin basic protein gene control region active in oligodendrocyte cells in the brain, myosin light chain-2 gene control region active in skeletal muscle, and gonadotropic releasing hormone gene control region active in the hypothalamus, pyruvate kinase promoter, villin promoter, promoter of the fatty acid binding intestinal protein, promoter of the smooth muscle cell .alpha.-actin, and the like. In addition, these expression sequences may be modified by addition of enhancer or regulatory sequences and the like.

[0558] Vectors may be introduced into the desired host cells, by methods known in the art, e.g., transfection, electroporation, microinjection, transduction, cell fusion, DEAF dextran, calcium phosphate precipitation, lipofection (lysosome fusion), use of a gene gun, or a DNA vector transporter (see, e.g., Wu et al., J. Biol. Chem. 267:963 (1992); Wu et al., J. Biol. Chem. 263:14621 (1988); and Hartmut et al., Canadian Patent Application No. 2,012,311).

[0559] Viral vectors, and particularly lentiviral and retroviral vectors, have been used in a wide variety of gene delivery applications in cells, as well as living animal subjects. Viral vectors that can be used include, but are not limited to, retrovirus, adeno-associated virus, pox, baculovirus, vaccinia, herpes simplex, Epstein-Barr, adenovirus, geminivirus, and caulimovirus vectors. Non-viral vectors include plasmids, liposomes, electrically charged lipids (cytofectins), DNA-protein complexes, and biopolymers. In addition to a nucleic acid, a vector may also comprise one or more regulatory regions, and/or selectable markers useful in selecting, measuring, and monitoring nucleic acid transfer results (transfer to which tissues, duration of expression, etc.).

[0560] Several methods known in the art may be used to propagate a polynucleotide according to the invention. Once a suitable host system and growth conditions are established, recombinant expression vectors can be propagated and prepared in quantity. As described herein, the expression vectors which can be used include, but are not limited to, the following vectors or their derivatives: human or animal viruses such as lentiviruses, vaccinia virus or AAV, or adenovirus; insect viruses such as baculovirus; yeast vectors; bacteriophage vectors (e.g., lambda), and plasmid and cosmid DNA vectors, to name but a few. A vector of the invention may also be administered to a subject by any route of administration, including, but not limited to, intramuscular administration.

[0561] A polynucleotide according to the disclosure can also be introduced in vivo by lipofection. There has been increasing use of liposomes for encapsulation and transfection of nucleic acids in vitro. Synthetic cationic lipids designed to limit the difficulties and dangers encountered with liposome-mediated transfection can be used to prepare liposomes for in vivo transfection of a gene encoding a marker. The use of cationic lipids may promote encapsulation of negatively charged nucleic acids, and also promote fusion with negatively charged cell membranes. Particularly useful lipid compounds and compositions for transfer of nucleic acids are described in WO 95/18863, WO 96/17823 and U.S. Pat. No. 5,459,127. The use of lipofection to introduce exogenous genes into the specific organs in vivo has certain practical advantages. Molecular targeting of liposomes to specific cells represents one area of benefit. It is clear that directing transfection to particular cell types would be particularly preferred in a tissue with cellular heterogeneity, such as pancreas, liver, kidney, and the brain. Lipids may be chemically coupled to other molecules for the purpose of targeting. Targeted peptides, e.g., hormones or neurotransmitters, and proteins such as antibodies, or non-peptide molecules could be coupled to liposomes chemically.

[0562] Other molecules are also useful for facilitating transfection of a nucleic acid in vivo, such as a cationic oligopeptide (e.g., WO 95/21931), peptides derived from DNA binding proteins (e.g., WO 96/25508), or a cationic polymer (e.g., WO 95/21931).

[0563] It is also possible to introduce a vector in vivo as a naked DNA plasmid (see U.S. Pat. Nos. 5,693,622, 5,589,466 and 5,580,859). Receptor-mediated DNA delivery approaches can also be used.

[0564] In addition, the recombinant vector comprising a polynucleotide according to the invention may include one or more origins for replication in the cellular hosts in which their amplification or their expression is sought, markers or selectable markers.

[0565] “Substitutional variants” when referring to proteins are those that have at least one amino acid residue in a native or starting sequence removed and a different amino acid inserted in its place at the same position. The substitutions may be single, where only one amino acid in the molecule has been substituted, or they may be multiple, where two or more amino acids have been substituted in the same molecule.

[0566] As used herein, the term “conservative amino acid substitution” refers to the substitution of an amino acid that is normally present in the sequence with a different amino acid of similar size, charge, or polarity. Examples of conservative substitutions include the substitution of a non-polar (hydrophobic) residue such as isoleucine, valine and leucine for another non-polar residue. Likewise, examples of conservative substitutions include the substitution of one polar (hydrophilic) residue for another such as between arginine and lysine, between glutamine and asparagine, and between glycine and serine. Additionally, the substitution of a basic residue such as lysine, arginine or histidine for another, or the substitution of one acidic residue such as aspartic acid or glutamic acid for another acidic residue are additional examples of conservative substitutions. Examples of non-conservative substitutions include the substitution of a non-polar (hydrophobic) amino acid residue such as isoleucine, valine, leucine, alanine, methionine for a polar (hydrophilic) residue such as cysteine, glutamine, glutamic acid or lysine and/or a polar residue for a non-polar residue.

[0567] As used herein, the term “insertional variants” when referring to proteins are those with one or more amino acids inserted immediately adjacent to an amino acid at a particular position in a native or starting sequence. As used herein, the term “immediately adjacent” refers to an adjacent amino acid that is connected to either the alpha-carboxy or alpha-amino functional group of a starting or reference amino acid.

[0568] As used herein, the term “deletional variants” when referring to proteins, are those with one or more amino acids in the native or starting amino acid sequence removed. Ordinarily, deletional variants will have one or more amino acids deleted in a particular region of the molecule.

[0569] As used herein, the term “derivatives,” as referred to herein includes variants of a native or starting protein comprising one or more modifications with organic proteinaceous or non-proteinaceous derivatizing agents, and post-translational modifications. Covalent modifications are traditionally introduced by reacting targeted amino acid residues of the protein with an organic derivatizing agent that is capable of reacting with selected side-chains or terminal residues, or by harnessing mechanisms of post-translational modifications that function in selected recombinant host cells. The resultant covalent derivatives are useful in programs directed at identifying residues important for biological activity, for immunoassays, or for the preparation of anti-protein antibodies for immunoaffinity purification of the recombinant glycoprotein. Such modifications are within the ordinary skill in the art and are performed without undue experimentation.

[0570] Features of the proteins of the present disclosure include surface manifestations, local conformational shape, folds, loops, half-loops, domains, half-domains, sites, termini or any combination thereof. As used herein, the term “features” when referring to proteins are defined as distinct amino acid sequence-based components of a molecule.

[0571] As used herein, the term “surface manifestation” when referring to proteins refers to a polypeptide based component of a protein appearing on an outermost surface.

[0572] As used herein, the term “local conformational shape” when referring to proteins refers to a polypeptide based structural manifestation of a protein which is located within a definable space of the protein.

[0573] As used herein, the term “fold,” when referring to proteins, refers to the resultant conformation of an amino acid sequence upon energy minimization. A fold may occur at the secondary or tertiary level of the folding process. Examples of secondary level folds include beta sheets and alpha helices. Examples of tertiary folds include domains and regions formed due to aggregation or separation of energetic forces. Regions formed in this way include hydrophobic and hydrophilic pockets, and the like.

[0574] As used herein, the term “turn” as it relates to protein conformation, refers to a bend which alters the direction of the backbone of a peptide or polypeptide and may involve one, two, three or more amino acid residues.

[0575] As used herein, the term “loop,” when referring to proteins, refers to a structural feature of a peptide or polypeptide which reverses the direction of the backbone of a peptide or polypeptide and comprises four or more amino acid residues. Oliva et al. have identified at least 5 classes of protein loops (Oliva, B. et al., An automated classification of the structure of protein loops. J Mol Biol. 1997. 266(4):814-30.)

[0576] As used herein, the term “half-loop,” when referring to proteins, refers to a portion of an identified loop having at least half the number of amino acid resides as the loop from which it is derived. It is understood that loops may not always contain an even number of amino acid residues. Therefore, in those cases where a loop contains or is identified to comprise an odd number of amino acids, a half-loop of the odd-numbered loop will comprise the whole number portion or next whole number portion of the loop (number of amino acids of the loop/2+/−0.5 amino acids). For example, a loop identified as a 7 amino acid loop could produce half-loops of 3 amino acids or 4 amino acids (7/2=3.5+/−0.5 being 3 or 4).

[0577] As used herein, the term “domain,” when referring to proteins, refers to a motif of a polypeptide having one or more identifiable structural or functional characteristics or properties (e.g., binding capacity, serving as a site for protein-protein interactions.)

[0578] As used herein, the term “half-domain,” when referring to proteins, refers to a portion of an identified domain having at least half the number of amino acid resides as the domain from which it is derived. It is understood that domains may not always contain an even number of amino acid residues. Therefore, in those cases where a domain contains or is identified to comprise an odd number of amino acids, a half-domain of the odd-numbered domain will comprise the whole number portion or next whole number portion of the domain (number of amino acids of the domain/2+/−0.5 amino acids). For example, a domain identified as a 7 amino acid domain could produce half-domains of 3 amino acids or 4 amino acids (7/2=3.5+/−0.5 being 3 or 4). It is also understood that sub-domains may be identified within domains or half-domains, these subdomains possessing less than all of the structural or functional properties identified in the domains or half domains from which they were derived. It is also understood that the amino acids that comprise any of the domain types herein need not be contiguous along the backbone of the polypeptide (i.e., nonadjacent amino acids may fold structurally to produce a domain, half-domain or subdomain).

[0579] As used herein, the terms “site,” as it pertains to amino acid based embodiments is used synonymously with “amino acid residue” and “amino acid side chain”. A site represents a position within a peptide or polypeptide that may be modified, manipulated, altered, derivatized or varied within the polypeptide based molecules of the present disclosure.

[0580] As used herein, the terms “termini” or “terminus,” when referring to proteins refers to an extremity of a peptide or polypeptide. Such extremity is not limited only to the first or final site of the peptide or polypeptide but may include additional amino acids in the terminal regions. The polypeptide based molecules of the present disclosure may be characterized as having both an N-terminus (terminated by an amino acid with a free amino group (NH2)) and a C-terminus (terminated by an amino acid with a free carboxyl group (COOH)). “Wild-type” refers to a virus or organism found in nature without any known mutation.

[0581] Zinc finger and TALE DNA binding domains can be “engineered” to bind to a predetermined nucleotide sequence, for example via engineering (altering one or more amino acids) of the recognition helix region of a naturally occurring zinc finger or TALE protein. Therefore, engineered DNA binding proteins (zinc fingers or TALEs) are proteins that are non-naturally occurring. Non-limiting examples of methods for engineering DNA-binding proteins are design and selection. A designed DNA binding protein is a protein not occurring in nature whose design/composition results principally from rational criteria. Rational criteria for design include application of substitution rules and computerized algorithms for processing information in a database storing information of existing ZFP and/or TALE designs and binding data. See, for example, U.S. Pat. Nos. 8,586,526; 6,140,081; 6,453,242; 6,534,261 and 8,586,526; see also WO 98/53058; WO 98/53059; WO 98/53060; WO 02/016536 and WO 03/016496.

[0582] The terms “cassette,” “expression cassette” and “gene expression cassette” refer to a segment of DNA that can be inserted into a nucleic acid or polynucleotide at specific restriction sites or by homologous recombination. The segment of DNA comprises a polynucleotide that encodes a polypeptide of interest, and the cassette and restriction sites are designed to ensure insertion of the cassette in the proper reading frame for transcription and translation. “Transformation cassette” refers to a specific vector comprising a polynucleotide that encodes a polypeptide of interest and having elements in addition to the polynucleotide that facilitate transformation of a particular host cell. Cassettes, expression cassettes, gene expression cassettes and transformation cassettes of the invention may also comprise elements that allow for enhanced expression of a polynucleotide encoding a polypeptide of interest in a host cell. These elements may include, but are not limited to: a promoter, a minimal promoter, an enhancer, a response element, a terminator sequence, a polyadenylation sequence, and the like.

[0583] As an example of disease-specific promoters, useful promoters for treating cancer include the promoters of oncogenes, including promoters for treating anemia. Examples of classes of oncogenes include, but are not limited to, growth factors, growth factor receptors, protein kinases, programmed cell death regulators and transcription factors.

[0584] Examples of promoter sequences and other regulatory elements (e.g., enhancers) that are known in the art and are useful as therapeutic switch promoters in the present invention are disclosed in U.S. Pat. No. 9,402,919, Ser. No. 14/001,943, filed on Mar. 2, 2012.

[0585] It is also noted that the term “comprising” is intended to be open and permits but does not require the inclusion of additional elements or steps. When the term “comprising” is used herein, the term “consisting of” is thus also encompassed and disclosed.

[0586] Where ranges are given, endpoints are included. Furthermore, it is to be understood that unless otherwise indicated or otherwise evident from the context and understanding of one of ordinary skill in the art, values that are expressed as ranges can assume any specific value or subrange within the stated ranges in different embodiments of the disclosure, to the tenth of the unit of the lower limit of the range, unless the context clearly dictates otherwise.

[0587] In addition, it is to be understood that any particular embodiment of the present disclosure that falls within the prior art may be explicitly excluded from any one or more of the claims. Since such embodiments are deemed to be known to one of ordinary skill in the art, they may be excluded even if the exclusion is not set forth explicitly herein. Any particular embodiment of the compositions of the disclosure (e.g., any antibiotic, therapeutic or active ingredient; any method of production; any method of use; etc.) can be excluded from any one or more claims, for any reason, whether or not related to the existence of prior art.

[0588] It is to be understood that the words which have been used are words of description rather than limitation, and that changes may be made within the purview of the appended claims without departing from the true scope and spirit of the disclosure in its broader aspects.

[0589] While the present disclosure has been described at some length and with some particularity with respect to the several described embodiments, it is not intended that it should be limited to any such particulars or embodiments or any particular embodiment, but it is to be construed with references to the appended claims so as to provide the broadest possible interpretation of such claims in view of the prior art and, therefore, to effectively encompass the intended scope of the disclosure. The present disclosure is further illustrated by the following nonlimiting examples.

### EXAMPLES

### Example 1. Generation of Novel Ligand Responsive SREs or DDs by Mutagenesis Screening

[0590] Methods for making DRDs useful in the compositions and methods of the present disclosure are described and exemplified in the following published applications, WO 2018/161000; WO 2018/231759; WO 2019/241315; WO 2018/160993; WO 2018/237323; and WO 2018/161038, the disclosures of the aforementioned applications relating to the methods for identifying, screening and isolating the exemplified DRDs are incorporated herein by reference in their entireties.

### Example 2. In Vitro Regulation of Membrane Bound CD40L Transduced Jurkat Cells and Primary T Cells

[0591] 50,000 Jurkat cells were transduced with lentiviruses corresponding to the constructs. OT-001661, OT-001685, OT-001662, or OT-001666 and cultured for 48h. Cells were split and incubated with ligands for 24h before analysis by flow cytometry.

[0592] Jurkat cells were treated with one of the following: 1 μM Shield-1, 50 μM TMP, 1 μM Bazedoxifene (BZD) or vehicle control. Surface expression of CD40L was measured using FACS and the results are show in Table 9. All values were normalized to mode.

TABLE 9
Surface expression of CD40L

| | | | | Geometric |
|---|---|---|---|---|
| | | | CD40L | Mean of |
| | | | positive | CD40L |
| Construct | | | percent of | fluorescent |
| Name | DRD | Ligand | live cells | intensity |
| Untransduced | — | — | 0.78 | 22.9 |
| OT-001661 | — | — | 99.4 | 10075 |
| OT-001685 | FKBP (M1del, | Vehicle | 0.056 | 37.1 |
| | F37V, L107P) | (Ethanol 0.2%) | | |
| | | 1 μM Shield-1 | 97.2 | 1996 |
| OT-001662 | ecDHFR | Vehicle | 0.023 | 27.9 |
| | (M1del, R12Y, | (DMSO 0.5%) | | |
| | Y100I) | 50 μM TMP | 98.4 | 6068 |
| OT-001666 | ER (305-549 of | Vehicle | 0.024 | 21.5 |
| | WT, L384M, | (DMSO | | |
| | N413D, M421G, | 0.01%) | | |
| | G521R, Y537S) | 1 μM | 38.4 | 421 |
| | | Bazedoxifene. | | |

[0593] Very low baseline activity was observed with all constructs tested. In the presence of their corresponding ligand, the FKBP and ecDHFR DRD based constructs showed strong ligand dependent regulation. Modest ligand dependent regulation was observed with the ER DRD based construct. As expected, Jurkat cells transduced with the constitutively expressed construct OT-001661 showed CD40L expression at levels higher than untransduced cells.

[0594] Jurkat cells transduced with OT-001661, OT-001685, OT-001662, OT-001666, or OT-001667 were co-cultured with HEK-Blue™ CD40 cells (Invivogen, San Diego, Calif.). Cocultures were treated with ligands (1 μM Shield-1, 50 μM TMP, 1 μM Bazedoxifene (BZD) or vehicle control) for 24 hours and the secreted embryonic alkaline phosphatase (SEAP) reporter levels were measured in the media. The pg/mL levels of soluble CD40L in ligand treated samples is shown in Table 10. All vehicle treated samples had background SEAP activity. Recombinant soluble CD40L was used as the standard in the experiments.

TABLE 10
CD40L levels in the presence of ligand

| | Soluble CD40L |
|---|---|
| Construct Name | (pg/ml) |
| OT-001661 | 9341.40 |
| OT-001685 | 4833.64 |
| OT-001662 | 8657.75 |
| OT-001666 | 1824.7 |
| OT-001667 | 2565.91 |

[0595] The detection of soluble CD40L in the presence of ligand and its virtual absence in the vehicle controls suggests that all constructs are functional in Jurkat cells and are associated with detectable levels of CD40L.

[0596] Regulation of ecDHFR (R12Y, Y100I) DRD based construct OT-001662 and ER (N413D) DRD based construct OT-001666 were tested in CD8 positive T cells. For OT-001662, expressing cells, ligand was added 6 days after viral transduction at a dose of 50 μM TMP. OT-001666 expressing cells were treated with 0.5 μM Bazedoxifene or vehicle control, 5 days after transduction. Approximately 15-30k cells were analyzed per sample by FACS. All samples were compared to empty vector control as well as the constitutively expressed construct, OT-001661. Table 11 provides the mean fluorescence intensities (MFIs) obtained with each sample.

TABLE 11
CD40L MFIs

| Construct | Vehicle | +Ligand |
|---|---|---|
| Empty | 283 | — |
| Vector | | |
| OT-001662 | 29.0 | 283 |
| OT-001666 | 35.4 | 33.1 |

[0597] Very low baseline activity was observed with both the constructs tested. Expression of CD40L in the ecDHFR DRD based construct OT-001662, in the presence of ligand was higher than the ER DRD based construct, OT-001666.

[0598] Ligand dose response curve experiments were performed with increasing doses of ligand using OT-001662 and OT-001666 constructs in both CD4+ as well as CD8+ T cells.

[0599] The experiments were conducted using three different volumes of virus for transduction i.e. 0.5, 2 and 10 μL. The results are shown in Table 12 and Table 13.

TABLE 12
Dose response with OT-001662

| TMP | CD4+ | | | CD8+ | | |
|---|---|---|---|---|---|---|
| (nM) | 0.5 μL | 2 μL | 10 μL | 0.5 μL | 2 μL | 10 μL |
| 50000 | 68.9 | 76.8 | 78.8 | 25.2 | 51 | 59.4 |
| 5000 | 67 | 76.8 | 79.1 | 9.21 | 40.6 | 47.4 |
| 500 | 48.2 | 68.4 | 58.5 | 0.66 | 6.84 | 5.53 |
| 50 | 35.7 | 37.4 | 30.7 | 0.19 | 0.64 | 1.07 |
| 5 | 33.9 | 27.6 | 24.6 | 0.12 | 0.3 | 1.02 |
| 0.5 | 32 | 24.4 | 24.2 | 0.17 | 0.34 | 1.08 |
| 0.05 | 31.6 | 25.1 | 23.8 | 0.16 | 0.2 | 0.95 |

TABLE 13
Dose response with OT-001666

| BZD | CD4+ | | CD8+ | |
|---|---|---|---|---|
| (nM) | 2 μL | 10 μL | 2 μL | 10 μL |
| 500 | 71.8 | 76.5 | 60 | 68.5 |
| 50 | 36 | 34 | 3.32 | 17.7 |
| 5 | 11.1 | 6.42 | 0.71 | 0.23 |
| 0.5 | 9.25 | 4.86 | 0.52 | 0.2 |
| 0.05 | 8.57 | 4.16 | 0.69 | 0.5 |

[0600] The results in Table 12 and Table 13 show that dose responsive ligand mediated stabilization is evident in the CD4+ T cells at lower concentrations of ligand for both constructs. Additionally, higher levels of % CD40L positive cells at the higher doses were obtained with the CD4+ T cells. These results may be influenced by the expression of endogenous CD40L in CD4+ T cells. Comparatively, CD8+ T cells showed lower basal expression and lower levels of % CD40 positive cells at higher ligand doses. Since CD8+ cells do not express CD40L from their endogenous locus, they may likely exhibit lower basal expression levels.

[0601] OT-001663 and OT-001664 demonstrated ligand dependent stabilization at the protein level as measured via western blot.

### Example 3. In Vitro Regulation of Soluble CD40L Transduced Jurkat Cells and Primary T Cells

[0602] Soluble CD40L (sCD40L) constructs OT-001672, OT-001686, OT-001673, OT-001674, OT-001677, and OT-001684 were transiently transfected into HEK293T cells. Cells were treated with one of the following ligands 1 μM Shield-1, 50 μM TMP, 1 μM Bazedoxifene (BZD) or vehicle control.

[0603] The pg/mL levels of soluble CD40L were measured by ELISA (Table 14). Recombinant soluble CD40L was used as the standard in the experiments.

TABLE 14
Soluble CD40L levels

| | Soluble CD40L | | |
|---|---|---|---|
| | (μg/ml) | | Stabilization |
| Name | Vehicle | +Ligand | Ratio |
| OT-001686 | — | 53475 | — |
| OT-001672 | 9583.76 | 31686.1 | 3.3 |
| OT-001673 | 1 | 48196.8 | 48196.8 |
| OT-001674 | 215.96 | 1645.44 | 7.6 |
| OT-001684 | 3 | 3 | 1.0 |

[0604] As shown in Table 14, ligand dependent regulation of soluble CD40L levels was observed with OT-001686, OT-001673, and OT-001674. In an independent experiment with similar setup, OT-001677 showed a stabilization ratio of 7.2 with very low basal expression in the absence of ligand. HEK-Blue CD40 assay performed with the sCD40L constructs shows that all constructs are functional. Constructs OT-001672, OT-001686, and OT-001673 showed higher functionality than the other constructs tested. No detectable activity was observed with the cells treated with the corresponding vehicle controls.

### Example 4. Engineering CD40L to Reduce Shedding

[0605] Sheddases e.g. ADAM10/17 present in the tumor microenvironment can cleave CD40L thereby preventing the successful activation of CD40 by CD40L. Analysis of the sequence of CD40L reveals an ADAM10/17 proteolytic cleavage site. OT-001669 which has a deletion of amino acids 1-13 of CD40L was designed to reduce internalization and OT-001668 which has a deletion of amino acids 110-116 of CD40L was designed to remove the ADAM10/17 sites. Jurkat cells stably expressing the full length construct OT-001661, OT-001669, or OT-001668 were cultured for 6 hours with 1.25 μg/ml recombinant human (h) or mouse (m) CD40-Fc receptor or left untreated and tested using an ELISA assay (Table 15).

TABLE 15
CD40L levels in supernatant

| | | hCD40- | mCD40- |
|---|---|---|---|
| Construct | Untreated | Fc | Fc |
| OT-001661 | 1382.06 | 3599.72 | 2589.21 |
| OT-001669 | 2137.69 | 8444.30 | 4335.76 |
| OT-001668 | 10 | 10 | 10 |

[0606] As seen in Table 15, shedding was observed even in the absence of treatment with CD40-Fc indicating that there is some constitutive shedding. Human CD40-Fc appeared to enhance the shedding in OT-001669 expressing cells, however no shedding was observed with OT-001668, which lacks the ADAM10/17 site. Murine CD40-Fc also showed activity with human CD40L suggesting inter-species cross reactivity.

### Example 5. Functional Analysis of Regulated CD40L

[0607] In order to engage dendritic cells in an immune response, dendritic cells must be converted to a functional state by an antigen-specific CD4+ helper T cell. Activation of the dendritic cells may be followed by the activation of CD8+ T cells by the dendritic cells, a process referred to as dendritic cell licensing. Engagement of the CD40L expressed on the CD4+ cells with the CD40 on the dendritic cells can result in (i) dendritic cell stimulation-measured by expression of co-stimulatory and MHC molecules (ii) proinflammatory cytokine release (e.g. IL12, TNFα and INFγ) (iii) epitope spreading. To measure the effect of CD40L expression that is tuned by the biocircuits of the present disclosure, CD4+ T cells or Jurkat cells expressing any of the CD40L constructs described herein were co-cultured with dendritic cells.

[0608] Dendritic cell function in response to co-culture with T cells expressing CD40L was evaluated in the presence of ligand or corresponding vehicle control. Monocyte derived dendritic cells (mDC) (CD14+) were isolated from fresh blood and cultured for 5 days with IL-4 (7.5 ng/mL) and GM-CSF (20 ng/mL). The mDCs were frozen down after the 5 day culture. T cells were transduced with OT-001662 and expanded for 9 days before being frozen down. mDCs and T cells were thawed and co-cultured 1:10 DC: T cell ratio (i.e. 5×10⁴ DCs: 5×10⁵ T cells). mDC and T cells were co-cultured for 2 days before cells were collected for flow cytometry and supernatants were collected for cytokine analysis. For evaluation of regulated constructs, ligand (various doses of TMP) was added at the time initiating the co-culture and was kept in the co-culture for 2 days. Cytokines were analyzed by MSD after a single freeze thaw cycle. All cells were cultured in complete RPMI with 10% FBS during the course of the experiment. The percentage of cells in the mDC-T co-culture expressing CD40L and their MFI are shown in Table 16. SR indicates stabilization ratio.

TABLE 16
CD40L levels in T cells with mDC co-culture

| | | | | | | CD8+ | | | |
|---|---|---|---|---|---|---|---|---|---|
| | | CD4+ | | | | | | | SR |
| | | | SR | | SR | | SR | | (based |
| | | % | (based | CD40L | (based | % | (based | CD40L | on |
| Construct | Ligand | CD40L+ | on %) | MFI | on MFI | CD40L+ | on %) | MFI | MFI |
| Empty | DMSO | 11.5 | — | 125 | | 1.1 | | 62.5 | |
| Vector | TMP | 11.1 | — | 122 | | 1.02 | | 61.2 | |
| OT-001661 | DMSO | 68.1 | — | 579 | | 62.2 | | 495 | |
| | TMP | 68.3 | — | 580 | | 62.3 | | 499 | |
| OT-001662 | TMP | 84.1 | 22.67 | 1379 | 21.61 | 74.9 | 159.36 | 951 | 16.45 |
| | (10 μM) | | | | | | | | |
| | TMP | 78 | 21.02 | 691 | 10.83 | 57.8 | 122.98 | 419 | 7.25 |
| | (2 μM) | | | | | | | | |
| | TMP (0.5 | 3.34 | 0.90 | 61.1 | 0.96 | 0.57 | 1.21 | 54.5 | 0.94 |
| | μM) | | | | | | | | |
| | TMP (0.1 | 4.32 | 1.16 | 69.8 | 1.09 | 0.69 | 1.47 | 61.5 | 1.06 |
| | μM) | | | | | | | | |
| | DMSO | 3.71 | — | 63.8 | — | 0.47 | | 57.8 | |

[0609] Ligand dependent regulation of CD40L was evident in both the CD4 and the CD8+ cells, especially at higher doses of TMP in the cocultures comprising OT-001662 as evidenced by the stabilization ratios. Compared to CD8+ cells, higher MFIs were observed in CD4+ cells but only at higher doses of TMP. Regulated CD40L also induced changes in cytokine production the DC co-culture assay (See Table 17).

TABLE 17
Cytokine Production (pg/ml)

| Construct | Ligand | IFNg | IL12 | TNFa |
|---|---|---|---|---|
| Empty Vector | DMSO | 6647.38 | 0.4868 | 156.7256 |
| | TMP | 8043.85 | 0.6782 | 153.6723 |
| OT-001661 | DMSO | 12973 | 58.935 | 456.3242 |
| | TMP | 10939.9 | 86.229 | 440.0804 |
| OT-001662 | TMP (10 μM) | 13539.7 | 59.254 | 251.2844 |
| | TMP (2 μM) | 16375.2 | 19.372 | 248.7836 |
| | TMP (0.5 μM) | 3587.14 | — | 83.86263 |
| | TMP (0.1 μM) | 7432.13 | 0.0705 | 130.9627 |
| | DMSO | 3791.2 | 0.2535 | 82.2712 |

[0610] The levels of IFNγ obtained with 10 μM TMP in OT-001662 was comparable to the levels observed with the constitutive construct OT-001661, while the lower doses of TMP showed a dose responsive increase in IFNγ. TMP dose responsive increases in IL12 and TNFα were also observed.

### Example 6. PDE5 Regulated CD40L

[0611] Construct OT-001892 with GGSGGGSGGGSG linker was tested in HEK293T cells. 1 μg DNA corresponding to OT-001892 was transfected into 300,000 cells. 24 hours after transfection cells were treated with ligand (1 μM Vardenafil) or vehicle control for additional 24 hours. Surface expression of CD40L was analyzed by FACS. 30% of the OT-001892 transfected HEK293T cells treated with 1 μM Vardenafil were positive for CD40L whereas only 9% of the OT-001892 transfected HEK293T treated with vehicle control were positive for CD40L expression. Thus, ligand dependent increase in the percentage of CD40L positive cells was observed.

[0612] Construct OT-001892 expression was also measured in the context of transduced Jurkat and T cells. Jurkat cells were plated at 100,00 per dish and transduced with 10 μL of lentivirus corresponding to OT-001892. 24 hours after transfection cells were treated with ligand (1 μM Vardenafil) or vehicle control for additional 24 hours. Surface expression of CD40L was analyzed by FACS. 37.6% of the OT-001892 transduced Jurkat cells treated with 1 μM Vardenafil were positive for CD40L whereas only 2.7% of the OT-001892 transduced Jurkat cells treated with vehicle control were positive for CD40L expression. A median fluorescence intensity of 233 was observed in the 1 μM Vardenafil treated cells as compared to an MFI of −187 in the vehicle control treated group.

[0613] T cells were transduced with 10 μL of lentivirus corresponding to OT-001892. 4 days after transduction, cells were treated with increasing concentrations of ligand (Vardenafil) or vehicle control for 24 hours. Surface expression of CD40L in T cells as well as the CD4+ and CD8+ subsets was analyzed by FACS. The results are shown in Table 18. The stabilization ratio (SR) may be defined as the ratio of expression, CD40L in response to vardenafil to the expression of CD40L in the absence of vardenafil.

TABLE 18
CD40L levels in PDE5 regulated CD40L construct

| | All Cells | | CD4+ Cells | | CD8+ Cells | |
|---|---|---|---|---|---|---|
| Vardenafil | MFI | SR | MFI | SR | MFI | SR |
| DMSO | 209 | | 227 | | 144 | |
| 0.0001 μM | 274 | 1.31 | 313 | 1.38 | 166 | 1.15 |
| 0.001 μM | 260 | 1.24 | 291 | 1.28 | 166 | 1.15 |
| 0.01 μM | 265 | 1.27 | 304 | 1.34 | 162 | 1.13 |
| 0.1 μM | 311 | 1.49 | 359 | 1.58 | 171 | 1.19 |
| 1 μM | 405 | 1.94 | 482 | 2.12 | 186 | 1.29 |
| 10 μM | 747 | 3.57 | 930 | 4.10 | 340 | 2.36 |
| 100 μM | 1168 | 5.59 | 1367 | 6.02 | 620 | 4.31 |

[0614] As shown in Table 18, the higher stabilization ratios were obtained in the CD4+ population compared to the CD8+ cells indicating higher expression levels. A ligand dose dependent response was observed in all the cell populations measured and as little as 0.0001 μM vardenafil resulted in a Stabilization ratio greater than 1. Comparison of the MFIs obtained with the empty vector and DMSO treated OT-001892 transduced CD4+ cells showed that the CD40L expression is lower in the DMSO treated cells compared to empty vector expressing cells. The destabilization of the endogenous CD40L in DMSO treated cells may result in the observed reduction in CD40L expression in DMSO treated cells.

### Example 7. Efficacy of CD40L Co-Expression with CD19 CAR in Tumor Model

[0615] In Vitro Study

[0616] In order to determine if transduced T cells co-express CD19-CAR and CD40L, activated T cells were lentivirally transduced with empty vectors (EV), constitutive CD40L (OT-001661), CD19 CAR (OT-001407), and CD40L with CD19 CAR (0T-001605), grown for 2 days and then the CD40L and CD19 surface levels were measured where increased expression was seen for the CD19 CAR and CD40L and CD19 CAR constructs in T cells. The results for CD4+ and CD8+ cells and total cells are shown below.

TABLE 19
Percent of Cells co-expressing CD40L and CD19 CAR

| Construct | CD4+ | CD8+ | All Cells |
|---|---|---|---|
| Empty Vector | 0% | 0% | 0% |
| OT-001661 | 0% | 0% | 0% |
| OT-001407 | 19.9% | 1.2% | 15.7% |
| (0.1 uL) | | | |
| OT-001407 | 13.8% | 0.6% | 10.9% |
| (0.05 uL) | | | |
| OT-001605 | 20.9% | 10.9% | 18.9% |

[0617] In Vivo Study

[0618] Increased expression of CD40L on CD19 positive CART cells may increase the efficacy of CAR+ T cells in vivo. To test this, 8-week old mice were injected with Nalm6-luc (1 million per mouse). On day 6, Nalm6 tumor burden was measured and mice were grouped to ensure that all groups had similar tumor sizes. On day 7, T cells transduced with constructs were injected into mice and the groups shown in Table 20 were established. Body weight and Bioluminescence Intensity (BLI) were measured twice a week. Average BLI values are shown in Table 21. Blood and plasma were also collected for cytokine analysis, CD40L and IL12.

TABLE 20
Tumor study cohorts

| | | CAR + | |
|---|---|---|---|
| | No. | T cell | |
| | of | # | |
| Group | Mice | ×106 | Construct |
| 1 | 8 | — | Empty Vector |
| 2 | 8 | — | CD40L only (OT-001661) |
| 3 | 4 | 3 | CD19CAR only (OT-001407) |
| 4 | 8 | 1 | CD19CAR only (OT-001407) |
| 5 | 8 | 0.3 | CD19CAR only (OT-001407) |
| 6 | 5 | 3 | CD19CAR and CD40L (OT-001605) |
| 7 | | 1 | CD19CAR and CD40L (OT-001605) |
| 8 | 8 | 0.3 | CD19CAR and CD40L (OT-001605) |
| 10 | 8 | 1 | Control CD19CAR only (OT-001662) |

TABLE 21
Average BLI values

| Construct | | | | | | | | |
|---|---|---|---|---|---|---|---|---|
| (below)/Day | | | | | | | | |
| (Across) | 6 | 13 | 20 | 25 | 28 | 32 | 36 | 39 |
| Empty | 2.04E+06 | 1.97E+08 | 2.21E+09 | 5.35E+09 | 1.41E+10 | — | — | — |
| Vector | | | | | | | | |
| OT-001661 | 2.04E+06 | 2.69E+08 | 2.52E+09 | 5.99E+09 | 1.04E+10 | — | — | — |
| 3M CAR + | 2.02E+06 | 4.24E+06 | 7.47E+05 | 8.06E+05 | 8.39E+05 | 8.87E+05 | 1.35E+06 | 4.72E+06 |
| OT- | | | | | | | | |
| 001407(n = 4) | | | | | | | | |
| 1M CAR + | 2.02E+06 | 4.88E+07 | 3.99E+07 | 1.04E+08 | 3.15E+08 | 5.87E+09 | 3.33E+09 | 9.80E+09 |
| OT-001407 | | | | | | | | |
| (n = 5 of 8) | | | | | | | | |
| 0.3M CAR + | 2.01E+06 | 1.09E+08 | 5.34E+08 | 1.25E+09 | 1.34E+09 | 2.20E+09 | 7.92E+09 | 7.26E+09 |
| OT- | | | | | | | | |
| 001407(n = 4 | | | | | | | | |
| of 8) | | | | | | | | |
| 3M CAR + | 1.98E+06 | 3.09E+07 | 1.00E+06 | 7.54E+05 | 7.39E+05 | 8.05E+05 | 7.23E+05 | 6.97E+05 |
| OT-001605 | | | | | | | | |
| (n = 5) | | | | | | | | |
| 1M CAR + | 2.02E+06 | 2.82E+07 | 8.19E+05 | 8.93E+05 | 1.11E+06 | 1.07E+06 | 9.11E+05 | 7.12E+05 |
| OT-001605 | | | | | | | | |
| 0.3M CAR + | 2.03E+06 | 1.27E+08 | 2.44E+08 | 2.27E+07 | 5.81E+06 | 2.91E+06 | 2.52E+06 | 2.66E+06 |
| OT-001605 | | | | | | | | |
| 1M CAR + | 2.05E+06 | 6.32E+06 | 1.26E+06 | 3.46E+06 | 6.89E+06 | 6.14E+07 | 4.49E+08 | 3.53E+09 |
| OT-001607 | | | | | | | | |
| (IRES) | | | | | | | | |
| 1M CAR + | 2.06E+06 | 2.12E+08 | 1.23E+09 | 4.55E+09 | 8.13E+09 | 3.62E+09 | 8.85E+09 | 3.50E+09 |
| OT-001607: | | | | | | | | |
| Control | | | | | | | | |
| Batch (n = 2 | | | | | | | | |
| of 8) | | | | | | | | |

[0619] As shown in Table 21, BLI values decreased when CD19CAR-2A-CD40L T cells were injected into NALM6 mice indicating reduction in tumor burden. While CD19CAR only cells showed some reduction in BLI, it was not as significant as significant as the CD19CAR-2A-CD40L group.

[0620] Human cells were analyzed by FACS (hCD45+) from the blood 14 days after T-cell infusion, which equals 21 days after tumor implant. The results are shown in Table 22 where M indicates million.

TABLE 22
Percentage hCD45+ cells

| Construct | Individual values | | | | Average |
|---|---|---|---|---|---|
| Empty vector | 0.027 | 0.57 | 0.27 | 0.062 | 0.232 |
| OT-001661 | 0.00249 | 0.00331 | 0.00198 | 0 | 0.002 |
| OT-001407 (3M) | 0.1 | 1.06 | 0.72 | 1.65 | 0.883 |
| OT-001407 (1M) | 0.4 | 0.081 | 0.12 | 0.028 | 0.157 |
| OT-001407 (0.3M) | 0.012 | 0.019 | 0.00803 | 0.00702 | 0.012 |
| OT-001605 (3M) | 26.9 | 12.8 | 13.2 | 14.9 | 16.950 |
| OT-001605 (1M) | 37 | 5.29 | 27.8 | 4.23 | 18.580 |
| OT-001605 (0.3M) | 0.032 | 8.35 | 2.46 | 6.23 | 4.268 |
| OT-001607 (1M) | 0.45 | 0.86 | 0.67 | 0.46 | 0.610 |
| OT-001607 | 0.014 | 0.011 | 0.5 | 0.012 | 0.134 |
| (Control) (1M) | | | | | |

[0621] As shown in Table 22, OT-001605 (1M) showed the greatest expansion of T cells with all 3 cell number groups. These results show that CD40L expression increases CAR dependent T-cell expansion in vivo.

### Example 8. CD40L Kinetics in Jurkat Cells

[0622] Kinetics were tested using stably transduced Jurkat cells expressing OT-001662. To study the kinetics of turning on the expression of CD40L, cells were treated with TMP (5 or 50 μM) and fixed for FACS after: 0, 3, 6, 9, 24, 48 hours. At the end of the experiment all fixed were stained and analyzed via FACS in parallel. To study the kinetics of turning off expression, expression was first induced in Jurkat cells with 50 μM TMP. The cells were then washed to remove TMP and fixed after 0, 3, 6, 9, 24 hours, stained and analyzed via FACS in parallel. Table 23 and Table 24 shown the kinetics of turning expression on and off respectively.

TABLE 23
On kinetics

| | TMP | 5 μM | |
|---|---|---|---|
| Hours | (50 μM) | TMP | Vehicle |
| 0 | 743 | 743 | 740 |
| 3 | 890 | 886 | 765 |
| 6 | 1180 | 1096 | 783 |
| 9 | 1466 | 1392 | 772 |
| 24 | 3952 | 2435 | 778 |

Off kinetics

| | TMP | |
|---|---|---|
| Hours | (50 μM) | Vehicle |
| 0 | 3952 | 778 |
| 3 | 1631 | 829 |
| 6 | 1620 | 823 |
| 9 | 1037 | 823 |
| 24 | 1287 | 923 |

[0623] As shown in Table 23 and Table 24, surface expression gradually increases over 24 hours possibly due to the need for CD40L to trimerize for trafficking. However, the off kinetics appear fast indicating that half-life of surface CD40L is short. Alternatively, it also suggests that there may be active destabilization/degradation from the cell surface when ligand is removed.

### Example 9. CD40L Regulation in T Cells

[0624] T cells were transduced with OT-001662 and then treated with 10 μM TMP on day 4. CD40L expression was analyzed by FACS both in the CD4 and CD8 positive T cell populations. The results are shown in Table 25.

TABLE 25
CD40L MFI in vitro

| Construct | CD4+ | CD8+ |
|---|---|---|
| Empty Vector | 781 | 190 |
| OT-001661 | 24489 | 14352 |
| OT-001662 (Vehicle) | 348 | 182 |
| OT-001662 (TMP) | 10159 | 4893 |

[0625] Ligand dependent regulation was observed with TMP treatment with CD40L levels less than what was observed with the constitutive CD40L construct namely OT-001661.

[0626] Based on the in vitro data, regulatability of CD40L constructs in vivo was tested. 10-week old NSG female mice were injected with T cells transduced with one of the following constructs empty vector, OT-001661, and OT-001662 (day 0). On day 1, mice were pre-bled prior to dose with ligand. On day 2, mice were dosed every 4 hours with TMP at 500 mg/kg body weight of the mouse or vehicle control. Two hours after every dose, blood was collected from the mice to measure CD40L levels. On day 3, i.e. 24 hours after the first dose, mice were terminally bled for analysis. The CD40L levels are shown in Table 26. The values in bold represent the average values for each bleed.

TABLE 26
% CD40L positive cells in vivo

| Construct | | | | | |
|---|---|---|---|---|---|
| (below)/Hours | | | | | |
| (Across) | 0 | 2 | 6 | 10 | 24 |
| EV | 2.2 | 5.1 | | | 5.2 |
| | 3.0 | 2.3 | | | 1.5 |
| | 3.9 | 3.2 | | | 0.7 |
| | 3.7 | 0.0 | | | 1.6 |
| | 3.2 | 2.6 | | | 2.2 |
| OT-001661 | 80.9 | 85.6 | | | 53.5 |
| | 87.1 | 67.4 | | | 66.7 |
| | 84.4 | 33.3 | | | 61.0 |
| | 107.8 | 62.7 | | | 41.9 |
| | 90.1 | 62.3 | | | 55.8 |
| OT-001662 | 0.8 | 0.6 | 0.3 | 0.0 | 0.0 |
| Vehicle | 0.9 | 1.0 | 0.4 | 0.0 | 0.3 |
| | 0.1 | 0.0 | 0.5 | 0.0 | 1.4 |
| | 1.8 | 1.9 | 0.2 | 0.3 | 0.7 |
| | 0.9 | 0.9 | 0.3 | 0.1 | 0.6 |
| OT-001662 | 0.9 | 11.8 | 22.1 | 26.0 | 1.2 |
| TMP | 0.4 | 13.0 | 25.7 | 21.4 | 0.8 |
| | 0.9 | 9.6 | 13.8 | 0.0 | 18.9 |
| | 1.8 | 0.0 | 18.0 | 33.1 | 27.2 |
| | 1.0 | 8.6 | 19.9 | 20.1 | 12.0 |

[0627] Peak CD40L expression of 20% was observed at 10 hours post initial dose. It was also noted in all instances that regulated CD40L expression was lower than the constitutively expressed construct after ligand exposure.

### Example 10. Dendritic Cell Activation

[0628] To test if CD40L is functionally able to activate dendritic cells in vivo, sequential intraperitoneal (IP) or intravenous (IV) injections of allogeneic moDCs and CD40L+/−T-cells into NSG mice were performed. The various groups utilized in the study are provided in Table 27. Construct OT-001661 was utilized for these experiments and results are shown in Table 28.

TABLE 27
Study Groups

| | T | | | |
|---|---|---|---|---|
| | Cell | DC | | |
| | # | # | Injection | |
| Gr. | ×106 | ×106 | Material | Timing of injection |
| 1 | — | — | Naïve | — |
| 2 | 6.9 | — | CD40L alone | Same day (Day 0) |
| 3 | 6.9 | 1 | CD40L (IV) + | Same day (Day 0) |
| | | | DC (IV) | |
| 4 | 6.9 | 5 | CD40L (IV) + | Same day (Day 0) |
| | | | DC (IV) | |
| 5 | 11.9 | 1 | CD40L (IV) + | 5 × 106 T Cells (Day |
| | | | DC (IP) | 0); 5 × 106 T Cells |
| | | | | (Day 1) |
| 6 | 6.9 | 1 | CD40L (IP) + | Same day (Day 0) |
| | | | DC (IP) | |
| 7 | 6.9 | 1 | CD40L (IV) + | Same day (Day 0) |
| | | | GMCSF/IL4 | |
| | | | pretreated DC | |
| | | | (IV) | |
| 8 | 6.9 | 1 | CD40L (IP) + | Same day (Day 0) |
| | | | GMCSF/IL4 | |
| | | | pretreated DC | |
| | | | (IP) | |

TABLE 28
Plasma IL12 levels (pg/ml)

| Days | 16 | 24 | 40 |
|---|---|---|---|
| Naive | — | 0.04 | — |
| T cell EV (IP) + DC | 0.73 | — | — |
| (IP) | 1.97 | — | — |
| | 2.67 | — | — |
| | 1.13 | — | — |
| T cell CD40L (IP) + | 237.07 | 152.53 | 59.04 |
| DC (IP) | 45.57 | 30.23 | 8.53 |
| | 121.73 | 68.25 | 27.33 |
| | 308.61 | 336.05 | 142.68 |
| T cell CD40L (IP) + | 3.26 | 3.75 | 1.31 |
| DC-stim (IP) | | | |

[0629] Results in Table 28 show that CD40L expressing T-cells can stimulate moDCs in-vivo to secrete detectable levels of IL12 suggesting that CD40L expressing T cells are able to activate dendritic cells leading to IL12 secretion.

### Example 11. Regulation of CD40L in T Cells by Different Drug Responsive Domains

[0630] To test regulation, activated T cells were lentivirally transduced with CD40L regulated by different drug responsive domains, activated T cells were lentivirally transduced with ecDHFR regulated CD40L (OT-001662), ER regulated CD40L (OT-001966), PDE5 regulated CD40L (OT-001892) and a control of CD40L (OT-001661). Two days later, cells were treated with vehicle or 100 mM ligand for 24h as described in Table 29 after which they were analyzed for CD40L surface expression. The results for CD4+ and CD8+ cells and total cells are shown below. In the table, “TMP” is trimethoprim, “Baz” is Bazedoxifene, “Vard” is Vardenafil and “DMSO” is dimethyl sulfoxide.

TABLE 29
Percent of cells expressing CD40L

| | | CD4+ | | CD8+ | | All Cells | |
|---|---|---|---|---|---|---|---|
| | | CD40L | | CD40L | | CD40L | |
| Construct (DD) | Ligand | positive | MFI | positive | MFI | positive | MFI |
| OT-001661 | N/A | 98.7% | 24489 | 97.8% | 14352 | 98% | 20451 |
| (CD40L | | | | | | | |
| control) | | | | | | | |
| OT-001662 | DMSO | 8.8% | 152 | 91.8% | 2.1 | 7.6% | 140 |
| (ecDHFR) | | | | | | | |
| OT-001662 | 10 uM | 94.4% | 2608 | 74.9% | 1070 | 89.7% | 2122 |
| (ecDHFR) | TMP | | | | | | |
| OT-001962 | DMSO | 58.3% | 548 | 4.1% | 157 | 46.5% | 434 |
| (hDHFR) | | | | | | | |
| OT-001962 | 100 uM | 83.5% | 1468 | 32.1% | 455 | 71.6% | 1109 |
| (hDHFR) | TMP | | | | | | |
| OT-001966 | DMSO | 17% | 197 | 2.2% | 95.6 | 14% | 174 |
| (ER) | | | | | | | |
| OT-001966 | 1 uM | 62.8% | 543 | 42.3% | 339 | 58.1% | 490 |
| (ER) | Baz | | | | | | |
| OT-001892 | DMSO | 11.% | 172 | 3.1% | 121 | 9.7% | 160 |
| (PDE5) | | | | | | | |
| OT-001892 | 100 uM | 53.7% | 494 | 75.2% | 745 | 70.6% | 682 |
| (PDE5) | Vard | | | | | | |

[0631] Regulated expression with all drug responsive domains significantly enhanced CD40L expression beyond endogenous levels. ecDHFR drug responsive domains show levels close to constitutive expression with ligand doses that are near clinically relevant levels.

### Example 12. CD40L Multimerization Mutants

[0632] Mutations were engineered within CD40L payload to reduce the binding affinity of CD40L payload for the CD40L endogenously expressed by cells. Constructs OT-002078, OT-002079, OT-002080, OT-002081, OT-002082 were generated with the CD40L trimerization mutants. HEK293T cells were transiently transfected with the constructs and CD40L expression was measured by FACS. Percentage of HEK293T cells that were positive for cell surface expression of CD40L are provided in Table 30.

TABLE 30
Percent of cells expressing CD40L

| Construct | % CD40L positive |
|---|---|
| OT-002078 | 49.7 |
| OT-002079 | 64.7 |
| OT-002080 | 0.11 |
| OT-002081 | 8.84 |
| OT-002082 | 0.028 |
| OT-001661 | 43.3 |
| Untransfected | 0.073 |
| Unstained | 0.070 |

[0633] Constructs OT-002078 and OT-002079 showed greater than 50% expression on cell surface. Since surface expression of CD40L relies on trimerization, these data suggest that the trimerization mutant proteins are able to still interact with each other resulting in their surface expression.

### Example 13. ER Regulated CD40L Expression

[0634] T cells were transduced with OT-001662 or OT-001666. On day 4, cells were treated with increasing doses of TMP for T cells expressing OT-001662. Cells expressing OT-001666 were treated either with increasing concentrations of Bazedoxifene or Raloxifene. The data are shown in Table 30 as the percentage of CD40L positive T cells. As shown in Table 31 and Table 32, both TMP and Bazedoxifene induced dose dependent increase in % CD40L positive T cells. Raloxifene dependent expression of OT-001666 was observed only at the 1 μM dose.

TABLE 31
Percent of cells expressing CD40L

| TMP Dose (μM) | OT-001662 |
|---|---|
| 100 | 73.3 |
| 10 | 71 |
| 1 | 38.8 |
| 0.1 | 13.3 |
| 0.01 | 8.74 |

TABLE 32
Percent of cells expressing CD40L

| Dose (μM) | Bazidoxefene | Raloxifene |
|---|---|---|
| 1 | 13.5 | 7.1 |
| 0.1 | 7.67 | 5.18 |
| 0.01 | 5.42 | 5 |
| 0.001 | 5.17 | 5.01 |
| 0.0001 | 4.88 | 4.67 |

[0635] To explore the effect of linker length in the DD mediated regulation of CD40L, constructs with varying linker lengths were generated. OT-001966, OT-001965, OT-001967, OT-001666 constructs were generated and are presented here in decreasing linker length order. HEK293T cells were transiently transfected with these constructs and treated with 1 μM Bazedoxifene for 24 hours. Median fluorescence intensity, an indicator of surface expression of CD40L, was analyzed by flow cytometry. All constructs tested showed Bazedoxifene dependent regulation of CD40L expression indicating that all linkers tested allow for regulation. The longest linker-based construct OT-001966, resulted in the highest percentage of cells with high CD40L surface expression.

[0636] Jurkat cells were lentivirally transduced and 24 hours after transduction were treated with DMSO or 1 μM Bazedoxifene for another 24 hours and analyzed by flow cytometry for surface expression of CD40L. Table 33 shows the percentage of CD40L positive cells. In Table 33, SR indicates stabilization ratio.

TABLE 33
Percent of Jurkat cells expressing CD40L

| | | 1 μM | |
|---|---|---|---|
| Construct | DMSO | Bazedoxifene | SR |
| OT-001966 | 3 | 46 | 15.3 |
| OT-001965 | 3 | 27 | 9 |
| OT-001967 | 2 | 30 | 15 |
| OT-001666 | 10 | 30 | 3 |

[0637] As shown in Table 33, the longest linker-based construct OT-001966, resulted in the highest percentage of cells with high CD40L surface expression. This trend was also observed in the stabilization ratio calculations.

[0638] T cells were transduced with OT-001966, OT-001967, OT-001666. On day 4, cells were analyzed by flow cytometry. Similar to the experiments performed in HEK293T and Jurkat cells, longer linker enhanced surface expression with ER regulated CD40L constructs.

[0639] Dose response with Bazedoxifene in T cells were conducted for OT-001966, OT-001967, OT-001666. Expression of CD40L was measured at (a) day 4 after transduction, (b) after freezing and thawing the cells or (c) after freezing and thawing the cells followed by restimulation with CD3/CD28 beads. The CD40L MFI (median fluorescence intensity) within CD4 and CD8 positive subpopulations is shown in Table 34 and Table 35 respectively.

TABLE 34
CD40L expression in CD4+ cells

| | OT-001666 | | | OT-001967 | | | OT-001966 | | |
|---|---|---|---|---|---|---|---|---|---|
| Dose | Post | | Day | Post | | Day | Post | | Day |
| (nM) | Thaw | Restim | 4 | Thaw | Restim | 5 | Thaw | Restim | 4 |
| 0.01 | 134 | 592 | 372 | 156 | 913 | 473 | 183 | 340 | 415 |
| 0.1 | 138 | 658 | 420 | 160 | 922 | 474 | 185 | 340 | 499 |
| 1 | 145 | 682 | 427 | 161 | 913 | 483 | 193 | 364 | 545 |
| 10 | 162 | 658 | 476 | 172 | 1131 | 497 | 213 | 472 | 616 |
| 100 | 208 | 953 | 732 | 200 | 1549 | 630 | 258 | 561 | 1028 |
| 1000 | 241 | 1688 | 1397 | 223 | 1232 | 998 | 292 | 741 | 1551 |
| 10000 | 537 | 1577 | 1274 | 457 | 291 | 1000 | 577 | 447 | 1095 |

TABLE 35
CD40L expression in CD8+ cells

| | OT-001666 | | | OT-001967 | | | OT-001966 | | |
|---|---|---|---|---|---|---|---|---|---|
| Dose | Post | | Day | Post | | Day | Post | | Day |
| (nM) | Thaw | Restim | 4 | Thaw | Restim | 5 | Thaw | Restim | 4 |
| 0.01 | 103 | 238 | 165 | 108 | | 153 | 113 | 340 | 168 |
| 0.1 | 105 | 244 | 171 | 105 | 269 | 153 | 117 | 340 | 176 |
| 1 | 107 | 263 | 172 | 108 | 274 | 157 | 121 | 364 | 190 |
| 10 | 117 | 253 | 176 | 114 | 265 | 158 | 148 | 472 | 212 |
| 100 | 170 | 354 | 313 | 149 | 326 | 226 | 204 | 561 | 442 |
| 1000 | 213 | 567 | 601 | 178 | 445 | 424 | 230 | 741 | 669 |
| 10000 | 326 | 458 | 404 | 263 | 372 | 392 | 375 | 447 | 438 |

[0640] As shown in Table 34 and Table 35, Bazedoxifene affected cell health at highest dose. Restimulation of T cells was necessary for higher expression after freeze thaw. Within the CD8 positive cells, highest ER regulated CD40L expression was observed with long linker OT-001966 and restimulation.

### Example 14. Human and E. coli DHFR Regulated CD40L Expression

[0641] HEK 293T cells were transiently transduced with hDHFR regulated constructs namely OT-001962, OT-001961, OT-001963 for 24 hours. Following transfection, cells were treated with 50 μM TMP for 24 hours and CD40L cell surface expression was measured using flow cytometry. Table 36 shows % CD40L positive cells with TMP treatment. CD40L expression in the absence of ligand was virtually undetectable.

TABLE 36
% CD40L expression with TMP treatment

| | % |
|---|---|
| Construct | CD40L |
| OT-001962 | 14.3 |
| OT-001961 | 14.6 |
| OT-001963 | 13.3 |

[0642] The data in Table 36 show that CD40L can be regulated by hDHFR DDs and TMP.

[0643] Jurkat cells were transduced with lentiviruses corresponding to OT-001662, OT-001962, OT-001961, OT-001963. 24 hours after transduction, cells were split and treated with DMSO or 50 μM TMP for another 24 hours until flow cytometry-based analysis. The results are shown in Table 37 where SR indicates stabilization ration.

TABLE 37
% CD40L expression with TMP treatment

| Construct | Vehicle | TMP | SR |
|---|---|---|---|
| OT-001662 | 1 | 90 | 90 |
| OT-001962 | 3 | 50 | 16.7 |
| OT-001961 | 2 | 3.5 | 1.8 |
| OT-001963 | 2 | 20 | 10 |

[0644] Among the hDHFR constructs tested, OT-001962 showed strong TMP dependent regulation and the highest stabilization ratio.

[0645] Dose response with TMP in T cells were conducted for OT-001962. Expression of CD40L was measured at (a) day 4 after transduction, (b) after freezing and thawing the cells or (c) after freezing and thawing the cells followed by restimulation with CD3/CD28 beads. The CD40L MFI (median fluorescence intensity) within CD4 and CD8 positive subpopulations is shown in Table 38.

TABLE 38
CD40L expression with OT-001962

| | CD4+ | | | CD8+ | | |
|---|---|---|---|---|---|---|
| Dose | Post | | Day | Post | | Day |
| (nM) | Thaw | Restim | 4 | Thaw | Restim | 4 |
| 0.1 | 153 | 631 | 388 | 111 | 254 | 181 |
| 1 | 156 | 647 | 396 | 116 | 257 | 178 |
| 10 | 158 | 645 | 405 | 114 | 258 | 182 |
| 100 | 165 | 644 | 388 | 117 | 255 | 182 |
| 1000 | 166 | 737 | 480 | 118 | 258 | 204 |
| 10000 | 186 | 1382 | 1067 | 129 | 382 | 393 |
| 100000 | 395 | 6275 | 5917 | 236 | 1185 | 1941 |

[0646] As shown in Table 38, restimulation after freeze and thaw was required to achieve CD40L expression that was comparable to the expression obtained 4 days after transduction.

[0647] HEK293T cells were transiently transfected with the constructs in Table 39 (1 μg of DNA). 24 hours after transfection, the media was removed and replaced with fresh medium containing 50 μM TMP or DMSO. Another 24 hours later cells were analyzed by flow cytometry for CD40L surface expression. Table 39 provides CD40L expression as both % CD40L positive cells and the Median fluorescence intensity (MFI) values.

TABLE 39
CD40L expression with CD40L-ecDHFR constructs

| | | | | SR (for | SR |
|---|---|---|---|---|---|
| | | % | MFI | % | (for |
| Construct | Ligand | CD40L | (Median) | CD40L) | MET) |
| OT-002021 | TMP | 70.7 | 18589 | 2.98 | 3.31 |
| | Vehicle | 23.7 | 5616 | | |
| OT-002022 | TMP | 70.5 | 19941 | 2.96 | 2.89 |
| | Vehicle | 23.8 | 6896 | | |
| OT-002023 | TMP | 62.4 | 16902 | 3.55 | 2.84 |
| | Vehicle | 17.6 | 5956 | | |
| OT-002024 | TMP | 53.9 | 12938 | 3.05 | 1.93 |
| | Vehicle | 17.7 | 6718 | | |
| OT-002025 | TMP | 61.7 | 16230 | 1.41 | 2.24 |
| | Vehicle | 43.7 | 7241 | | |
| OT-002026 | TMP | 63.4 | 17721 | 3.66 | 2.45 |
| | Vehicle | 17.3 | 7241 | | |
| OT-002027 | TMP | 70.7 | 19679 | 2.84 | 2.58 |
| | Vehicle | 24.9 | 7619 | | |
| OT-002028 | TMP | 69.1 | 16196 | 2.81 | 2.42 |
| | Vehicle | 24.6 | 6705 | | |
| OT-002029 | TMP | 45 | 7720 | 2.07 | 1.03 |
| | Vehicle | 21.7 | 7519 | | |
| OT-002030 | TMP | 64.9 | 14855 | 1.95 | 1.92 |
| | Vehicle | 33.3 | 7734 | | |
| OT-002031 | TMP | 64.8 | 15856 | 2.44 | 2.16 |
| | Vehicle | 26.6 | 7351 | | |
| OT-002032 | TMP | 68.7 | 21363 | 3.37 | 2.88 |
| | Vehicle | 20.4 | 7407 | | |
| OT-002033 | TMP | 17.3 | 5521 | 1.63 | 0.93 |
| | Vehicle | 10.6 | 5933 | | |
| OT-002034 | TMP | 71.1 | 20569 | 2.44 | 2.59 |
| | Vehicle | 29.1 | 7957 | | |
| OT-002035 | TMP | 23.8 | 8311 | 0.89 | 0.97 |
| | Vehicle | 26.7 | 8535 | | |
| OT-002036 | TMP | 69.5 | 17914 | 2.37 | 2.66 |
| | Vehicle | 29.3 | 6730 | | |
| OT-002037 | TMP | 63.5 | 13928 | 2.08 | 2.00 |
| | Vehicle | 30.6 | 6961 | | |
| OT-002038 | TMP | 67.9 | 20029 | 1.86 | 2.89 |
| | Vehicle | 36.6 | 6922 | | |
| OT-002039 | TMP | 64.2 | 16404 | 1.83 | 2.10 |
| | Vehicle | 35.1 | 7793 | | |
| OT-002040 | TMP | 65.8 | 16938 | 1.65 | 2.18 |
| | Vehicle | 40 | 7778 | | |

[0648] With the exception of OT-002035, all constructs tested, showed TMP mediated expression of CD40L.

### Example 15. Regulation of Cleavage Resistant CD40L

[0649] T cells were transduced with OT-001668 and on day 4, the percentage of CD40L expressing T cells (within the both CD4 and CD8) subpopulations was calculated. The results are shown in Table 40.

TABLE 40
CD40L expression

| Construct | CD4+ | CD8+ |
|---|---|---|
| Empty Vector | 20.6 | 0.51 |
| OT-001668 | 95.5 | 86.7 |

[0650] High expression of CD40L was observed with the cleavage resistant construct OT-001668. Some expression was observed with the T cells transduced with empty vector, which is likely the expression of endogenous CD40L expressed by the CD4+ T cells. T cells were transduced with ecDHFR regulated construct OT-001671 that include a CD40L protein that was resistant to cleavage. On day 4 cells were treated with 10 μM TMP for 24 hours. TMP-mediated Regulation of CD40L expression was observed in both the CD4 and the CD8 T cell populations. In an independent experiment, T cells transduced with varying volumes of virus corresponding to OT-001671 were treated with increasing doses of TMP for 24 hours. The percentage of CD40L positive cells is shown in Table 41. In Table 41, 0.5 μL, 2 μL, and 10 μL indicate the different volumes of virus that were used.

TABLE 41
TMP dose response

| TMP dose | CD4+ | | | CD8+ | | |
|---|---|---|---|---|---|---|
| (μM) | 0.5 μL | 2 μL | 10 μL | 0.5 μL | 2 μL | 10 μL |
| 0.001 | 17.9 | 11.8 | 4.74 | 0.59 | 0.6 | 1.18 |
| 0.01 | 18.8 | 12.2 | 6.79 | 0.56 | 0.59 | 0.89 |
| 0.1 | 20.4 | 14.9 | 7.65 | 0.45 | 0.88 | 0.95 |
| 1 | 20.3 | 17.6 | 17.2 | 0.43 | 1.29 | 2.87 |
| 10 | 27.5 | 30 | 43.7 | 2.44 | 5.57 | 12.4 |

[0651] ecDHFR regulated cleavage resistant CD40L demonstrated an increase in the percentage of CD40L positive cells in response to TMP dose increments. Higher levels of virus added (0.5, 2, or 10 μl) increased CD40L levels at higher doses of TMP. Similar experimental trends were observed with the measurements of median fluorescent intensity values.

### Example 16. In Vivo CD40L Regulation in Jurkat Cells

[0652] Jurkat cells stably expressing OT-001661, OT-002034 were intravenously infused into 8-week old NSG mice (20 million cells per mouse). Starting by day 15, mice were orally dosed according to the study design shown in Table 42 and Jurkat cells were harvested on day 16 from the bone marrow and analyzed by FACS. In Tables 41 and 42, TMP refers to Trimethoprim and all dosing is relative to “0 hr” time point on day 16. The results are shown in Table 43 and Table 44 where “EV” refers to empty vector control.

TABLE 42
Study design

| | | Jurkat | | |
|---|---|---|---|---|
| | Mice | Cells | | Ligand (dosing relative to “0 hr” |
| Gr. | (n) | (×106) | Vector (Name) | time point on day 16 |
| 1 | 4 | 20 | Parental Jurkat | Vehicle (1 dose at −20 h, 1x dose at |
| | | | cells | 0 h) |
| 2 | 4 | 20 | OT-001661 | Vehicle (1x dose at −20 h, 1x dose |
| | | | | at 0 h) |
| 3 | 4 | 20 | OT-002034 | Vehicle (3x dose on day 16 at 0, 4, |
| | | | (ecDHFR) | 8 h) |
| 4 | 4 | 20 | OT-002034 | TMP 500 mg/kg (3x dose on day |
| | | | (ecDHFR) | 16 at 0, 4, 8 h) |

TABLE 43
CD40L MFI values

| | | | OT-002034 | OT-002034 |
|---|---|---|---|---|
| Description | EV | OT-001661 | Vehicle | TMP |
| Mouse 1 | 145 | 507 | 101 | 608 |
| Mouse 2 | 153 | 572 | 80.6 | 542 |
| Mouse 3 | 121 | 660 | 97.9 | 505 |
| Mouse 4 | 158 | 607 | 95.1 | 428 |
| Average | 144.25 | 586.5 | 93.65 | 520.75 |

TABLE 44
Percent CD40L positive cells

| | | | OT-002034 | OT-002034 |
|---|---|---|---|---|
| Description | EV | OT-001661 | Vehicle | TMP |
| Mouse 1 | 9.27 | 52.5 | 2.36 | 61 |
| Mouse 2 | 9.11 | 57.5 | 0.83 | 56.3 |
| Mouse 3 | 5.46 | 64.2 | 2.17 | 52.2 |
| Mouse 4 | 10.4 | 61.4 | 1.92 | 44.1 |
| Average | 8.56 | 58.9 | 1.82 | 53.4 |

[0653] As shown in Table 43 and Table 44, OT-002034 expressing Jurkat cells retrieved from bone marrows of mice treated with TMP showed increased CD40L values and % CD40L positive cells when compared to mice treated with vehicle control, or empty vector, but comparable to Jurkat cells expressing OT-001661.

[0654] While the present disclosure has been described at some length and with some particularity with respect to the several described embodiments, it is not intended that it should be limited to any such particulars or embodiments or any particular embodiment, but it is to be construed with references to the appended claims so as to provide the broadest possible interpretation of such claims in view of the prior art and, therefore, to effectively encompass the intended scope of the disclosure.

[0655] All publications, patent applications, patents, and other references mentioned herein are incorporated by reference in their entirety. In case of conflict, the present specification, including definitions, will control. In addition, section headings, the materials, methods, and examples are illustrative only and not intended to be limiting.

The application's sequence listing, which the Patent Office published only in electronic form, follows.

SEQUENCE LISTING (6675 sequences)

SEQ ID NO: 1 - protein, 875 aa, Homo sapiens
MERAGPSFGQQRQQQQPQQQKQQQRDQDSVEAWLDDHWDFTFSYFVRKATREMVNAWFAERVHTIPVCKEGIRGHTESCSCPLQQSPRADNSAPGTPTRKISASEFDRPLRPIVVKDSEGTVSFLSDSEKKEQMPLTPPRFDHDEGDQCSRLLELVKDISSHLDVTALCHKIFLHIHGLISADRYSLFLVCEDSSNDKFLISRLFDVAEGSTLEEVSNNCIRLEWNKGIVGHVAALGEPLNIKDAYEDPRFNAEVDQITGYKTQSILCMPIKNHREEVVGVAQAINKKSGNGGTFTEKDEKDFAAYLAFCGIVLHNAQLYETSLLENKRNQVLLDLASLIFEEQQSLEVILKKIAATIISFMQVQKCTIFIVDEDCSDSFSSVFHMECEELEKSSDTLTREHDANKINYMYAQYVKNTMEPLNIPDVSKDKRFPWTTENTGNVNQQCIRSLLCTPIKNGKKNKVIGVCQLVNKMEENTGKVKPFNRNDEQFLEAFVIFCGLGIQNTQMYEAVERAMAKQMVTLEVLSYHASAAEEETRELQSLAAAVVPSAQTLKITDFSFSDFELSDLETALCTIRMFTDLNLVQNFQMKHEVLCRWILSVKKNYRKNVAYHNWRHAFNTAQCMFAALKAGKIQNKLTDLEILALLIAALSHDLDHRGVNNSYIQRSEHPLAQLYCHSIMEHHHFDQCLMILNSPGNQILSGLSIEEYKTTLKIIKQAILATDLALYIKRRGEFFELIRKNQFNLEDPHQKELFLAMLMTACDLSAITKPWPIQQRIAELVATEFFDQGDRERKELNIEPTDLMNREKKNKIPSMQVGFIDAICLQLYEALTHVSEDCFPLLDGCRKNRQKWQALAEQQEKMLINGESGQAKRN

SEQ ID NO: 2 - DNA, 2628 bp, Homo sapiens
atggagcgggccggccccagcttcgggcagcagcgacagcagcagcagccccagcagcagaagcagcagcagagggatcaggactcggtcgaagcatggctggacgatcactgggactttaccttctcatactttgttagaaaagccaccagagaaatggtcaatgcatggtttgctgagagagttcacaccatccctgtgtgcaaggaaggtatcagaggccacaccgaatcttgctcttgtcccttgcagcagagtcctcgtgcagataacagtgcccctggaacaccaaccaggaaaatctctgcctctgaatttgaccggcctcttagacccattgttgtcaaggattctgagggaactgtgagcttcctctctgactcagaaaagaaggaacagatgcctctaacccctccaaggtttgatcatgatgaaggggaccagtgctcaagactcttggaattagtgaaggatatttctagtcatttggatgtcacagccttatgtcacaaaattttcttgcatatccatggactgatatctgctgaccgctattccctgttccttgtctgtgaagacagctccaatgacaagtttcttatcagccgcctctttgatgttgctgaaggttcaacactggaagaagtttcaaataactgtatccgcttagaatggaacaaaggcattgtgggacatgtggcagcgcttggtgagcccttgaacatcaaagatgcatatgaggatcctcggttcaatgcagaagttgaccaaattacaggctacaagacacaaagcattctttgtatgccaattaagaatcatagggaagaggttgttggtgtagcccaggccatcaacaagaaatcaggaaacggtgggacatttactgaaaaagatgaaaaggactttgctgcttatttggcattttgtggtattgttcttcataatgctcagctctatgagacttcactgctggagaacaagagaaatcaggtgctgcttgaccttgctagtttaatttttgaagaacaacaatcattagaagtaattttgaagaaaatagctgccactattatctctttcatgcaagtgcagaaatgcaccattttcatagtggatgaagattgctccgattctttttctagtgtgtttcacatggagtgtgaggaattagaaaaatcatctgatacattaacaagggaacatgatgcaaacaaaatcaattacatgtatgctcagtatgtcaaaaatactatggaaccacttaatatcccagatgtcagtaaggataaaagatttccctggacaactgaaaatacaggaaatgtaaaccagcagtgcattagaagtttgctttgtacacctataaaaaatggaaagaagaataaagttataggggtttgccaacttgttaataagatggaggagaatactggcaaggttaagcctttcaaccgaaatgacgaacagtttctggaagcttttgtcatcttttgtggcttggggatccagaacacgcagatgtatgaagcagtggagagagccatggccaagcaaatggtcacattggaggttctgtcgtatcatgcttcagcagcagaggaagaaacaagagagctacagtcgttagcggctgctgtggtgccatctgcccagacccttaaaattactgactttagcttcagtgactttgagctgtctgatctggaaacagcactgtgtacaattcggatgtttactgacctcaaccttgtgcagaacttccagatgaaacatgaggttctttgcagatggattttaagtgttaagaagaattatcggaagaatgttgcctatcataattggagacatgcctttaatacagctcagtgcatgtttgctgctctaaaagcaggcaaaattcagaacaagctgactgacctggagatacttgcattgctgattgctgcactaagccacgatttggatcaccgtggtgtgaataactcttacatacagcgaagtgaacatccacttgcccagctttactgccattcaatcatggaacaccatcattttgaccagtgcctgatgattcttaatagtccaggcaatcagattctcagtggcctctccattgaagaatataagaccacgttgaaaataatcaagcaagctattttagctacagacctagcactgtacattaagaggcgaggagaattttttgaacttataagaaaaaatcaattcaatttggaagatcctcatcaaaaggagttgtttttggcaatgctgatgacagcttgtgatctttctgcaattacaaaaccctggcctattcaacaacggatagcagaacttgtagcaactgaattttttgatcaaggagacagagagagaaaagaactcaacatagaacccactgatctaatgaacagggagaagaaaaacaaaatcccaagtatgcaagttgggttcatagatgccatctgcttgcaactgtatgaggccctgacccacgtgtcagaggactgtttccctttgctagatggctgcagaaagaacaggcagaaatggcaggcccttgcagaacagcaggagaagatgctgattaatggggaaagcggccaggccaagcggaactga

SEQ ID NO: 3 - protein, 519 aa, Homo sapiens
MDDHVTIRKKHLQRPIFRLRCLVKQLERGDVNVVDLKKNIEYAASVLEAVYIDETRRLLDTEDELSDIQTDSVPSEVRDWLASTFTRKMGMTKKKPEEKPKFRSIVHAVQAGIFVERMYRKTYHMVGLAYPAAVIVTLKDVDKWSFDVFALNEASGEHSLKFMIYELFTRYDLINRFKIPVSCLITFAEALEVGYSKYKNPYHNLIHAADVTQTVHYIMLHTGIMHWLTELEILAMVFAAAIHDYEHTGTTNNFHIQTRSDVAILYNDRSVLENHHVSAAYRLMQEEEMNILINLSKDDWRDLRNLVIEMVLSTDMSGHFQQIKNIRNSLQQPEGIDRAKTMSLILHAADISHPAKSWKLHYRWTMALMEEFFLQGDKEAELGLPFSPLCDRKSTMVAQSQIGFIDFIVEPTFSLLTDSTEKIVIPLIEEASKAETSSYVASSSTTIVGLHIADALRRSNTKGSMSDGSYSPDYSLAAVDLKSFKNNLVDIIQQNKERWKELAAQEARTSSQKCEFIHQ

SEQ ID NO: 4 - protein, 536 aa, Homo sapiens
MELSPRSPPEMLEESDCPSPLELKSAPSKKMWIKLRSLLRYMVKQLENGEINIEELKKNLEYTASLLEAVYIDETRQILDTEDELQELRSDAVPSEVRDWLASTFTQQARAKGRRAEEKPKFRSIVHAVQAGIFVERMFRRTYTSVGPTYSTAVLNCLKNLDLWCFDVFSLNQAADDHALRTIVFELLTRHNLISRFKIPTVFLMSFLDALETGYGKYKNPYHNQIHAADVTQTVHCFLLRTGMVHCLSEIELLAIIFAAAIHDYEHTGTTNSFHIQTKSECAIVYNDRSVLENHHISSVFRLMQDDEMNIFINLTKDEFVELRALVIEMVLATDMSCHFQQVKTMKTALQQLERIDKPKALSLLLHAADISHPTKQWLVHSRWTKALMEEFFRQGDKEAELGLPFSPLCDRTSTLVAQSQIGFIDFIVEPTFSVLTDVAEKSVQPLADEDSKSKNQPSFQWRQPSLDVEVGDPNPDVVSFRSTWVKRIQENKQKWKERAASGITNQMSIDELSPCEEEAPPSPAEDEHNQNGNLD

SEQ ID NO: 5 - protein, 709 aa, Homo sapiens
MESPTKEIEEFESNSLKYLQPEQIEKIWLRLRGLRKYKKTSQRLRSLVKQLERGEASVVDLKKNLEYAATVLESVYIDETRRLLDTEDELSDIQSDAVPSEVRDWLASTFTRQMGMMLRRSDEKPRFKSIVHAVQAGIFVERMYRRTSNMVGLSYPPAVIEALKDVDKWSFDVFSLNEASGDHALKFIFYELLTRYDLISRFKIPISALVSFVEALEVGYSKHKNPYHNLMHAADVTQTVHYLLYKTGVANWLTELEIFAIIFSAAIHDYEHTGTTNNFHIQTRSDPAILYNDRSVLENHHLSAAYRLLQDDEEMNILINLSKDDWREFRTLVIEMVMATDMSCHFQQIKAMKTALQQPEAIEKPKALSLMLHTADISHPAKAWDLHHRWTMSLLEEFFRQGDREAELGLPFSPLCDRKSTMVAQSQVGFIDFIVEPTFTVLTDMTEKIVSPLIDETSQTGGTGQRRSSLNSISSSDAKRSGVKTSGSEGSAPINNSVISVDYKSFKATWTEVVHINRERWRAKVPKEEKAKKEAEEKARLAAEEQQKEMEAKSQAEEGASGKAEKKTSGETKNQVNGTRANKSDNPRGKNSKAEKSSGEQQQNGDFKDGKNKTDKKDHSNIGNDSKKTDGTKQRSHGSPAPSTSSTCRLTLPVIKPPLRHFKRPAYASSSYAPSVSKKTDEHPARYKMLDQRIKMKKIQNISHNWNRK

SEQ ID NO: 6 - protein, 941 aa, Homo sapiens
MGQACGHSILCRSQQYPAARPAEPRGQQVFLKPDEPPPPPQPCADSLQDALLSLGSVIDISGLQRAVKEALSAVLPRVETVYTYLLDGESQLVCEDPPHELPQEGKVREAIISQKRLGCNGLGFSDLPGKPLARLVAPLAPDTQVLVMPLADKEAGAVAAVILVHCGQLSDNEEWSLQAVEKHTLVALRRVQVLQQRGPREAPRAVQNPPEGTAEDQKGGAAYTDRDRKILQLCGELYDLDASSLQLKVLQYLQQETRASRCCLLLVSEDNLQLSCKVIGDKVLGEEVSFPLTGCLGQVVEDKKSIQLKDLTSEDVQQLQSMLGCELQAMLCVPVISRATDQVVALACAFNKLEGDLFTDEDEHVIQHCFHYTSTVLTSTLAFQKEQKLKCECQALLQVAKNLFTHLDDVSVLLQEIITEARNLSNAEICSVFLLDQNELVAKVFDGGVVDDESYEIRIPADQGIAGHVATTGQILNIPDAYAHPLFYRGVDDSTGFRTRNILCFPIKNENQEVIGVAELVNKINGPWFSKFDEDLATAFSIYCGISIAHSLLYKKVNEAQYRSHLANEMMMYHMKVSDDEYTKLLHDGIQPVAAIDSNFASFTYTPRSLPEDDTSMAILSMLQDMNFINNYKIDCPTLARFCLMVKKGYRDPPYHNWMHAFSVSHFCYLLYKNLELTNYLEDIEIFALFISCMCHDLDHRGTNNSFQVASKSVLAALYSSEGSVMERHHFAQAIAILNTHGCNIFDHFSRKDYQRMLDLMRDIILATDLAHHLRIFKDLQKMAEVGYDRNNKQHHRLLLCLLMTSCDLSDQTKGWKTTRKIAELIYKEFFSQGDLEKAMGNRPMEMMDREKAYIPELQISFMEHIAMPIYKLLQDLFPKAAELYERVASNREHWTKVSHKFTIRGLPSNNSLDFLDEEYEVPDLDGTRAPINGCCSLDAE

SEQ ID NO: 7 - protein, 1141 aa, Homo sapiens
MAVPGDAARVRDKPVHSGVSQAPTAGRDCHHRADPASPRDSGCRGCWGDLVLQPLRSSRKLSSALCAGSLSFLLALLVRLVRGEVGCDLEQCKEAAAAEEEEAAPGAEGGVFPGPRGGAPGGGARLSPWLQPSALLFSLLCAFFWMGLYLLRAGVRLPLAVALLAACCGGEALVQIGLGVGEDHLLSLPAAGVVLSCLAAATWLVLRLRLGVLMIALTSAVRTVSLISLERFKVAWRPYLAYLAGVLGILLARYVEQILPQSAEAAPREHLGSQLIAGTKEDIPVFKRRRRSSSVVSAEMSGCSSKSHRRTSLPCIPREQLMGHSEWDHKRGPRGSQSSGTSITVDIAVMGEAHGLITDLLADPSLPPNVCTSLRAVSNLLSTQLTFQAIHKPRVNPVTSLSENYTCSDSEESSEKDKLAIPKRLRRSLPPGLLRRVSSTWTTTTSATGLPTLEPAPVRRDRSTSIKLQEAPSSSPDSWNNPVMMTLTKSRSFTSSYAISAANHVKAKKQSRPGALAKISPLSSPCSSPLQGTPASSLVSKISAVQFPESADTTAKQSLGSHRALTYTQSAPDLSPQILTPPVICSSCGRPYSQGNPADEPLERSGVATRTPSRTDDTAQVTSDYETNNNSDSSDIVQNEDETECLREPLRKASACSTYAPETMMFLDKPILAPEPLVMDNLDSIMEQLNTWNFPIFDLVENIGRKCGRILSQVSYRLFEDMGLFEAFKIPIREFMNYFHALEIGYRDIPYHNRIHATDVLHAVWYLTTQPIPGLSTVINDHGSTSDSDSDSGFTHGHMGYVFSKTYNVTDDKYGCLSGNIPALELMALYVAAAMHDYDHPGRTNAFLVATSAPQAVLYNDRSVLENHHAAAAWNLFMSRPEYNFLINLDHVEFKHFRFLVIEAILATDLKKHFDFVAKFNGKVNDDVGIDWTNENDRLLVCQMCIKLADINGPAKCKELHLQWTDGIVNEFYEQGDEEASLGLPISPFMDRSAPQLANLQESFISHIVGPLCNSYDSAGLMPGKWVEDSDESGDTDDPEEEEEEAPAPNEEETCENNESPKKKTFKRRKIYCQITQHLLQNHKMWKKVIEEEQRLAGIENQSLDQTPQSHSSEQIQAIKEEEEEKGKPRGEEIPTQKPDQ

SEQ ID NO: 8 - protein, 1112 aa, Homo sapiens
MRRDERDAKAMRSLQPPDGAGSPPESLRNGYVKSCVSPLRQDPPRGFFFHLCRFCNVELRPPPASPQQPRRCSPFCRARLSLGALAAFVLALLLGAEPESWAAGAAWLRTLLSVCSHSLSPLFSIACAFFFLTCFLTRTKRGPGPGRSCGSWWLLALPACCYLGDFLVWQWWSWPWGDGDAGSAAPHTPPEAAAGRLLLVLSCVGLLLTLAHPLRLRHCVLVLLLASFVWWVSFTSLGSLPSALRPLLSGLVGGAGCLLALGLDHFFQIREAPLHPRLSSAAEEKVPVIRPRRRSSCVSLGETAASYYGSCKIFRRPSLPCISREQMILWDWDLKQWYKPHYQNSGGGNGVDLSVLNEARNMVSDLLTDPSLPPQVISSLRSISSLMGAFSGSCRPKINPLTPFPGFYPCSEIEDPAEKGDRKLNKGLNRNSLPTPQLRRSSGTSGLLPVEQSSRWDRNNGKRPHQEFGISSQGCYLNGPFNSNLLTIPKQRSSSVSLTHHVGLRRAGVLSSLSPVNSSNHGPVSTGSLTNRSPIEFPDTADFLNKPSVILQRSLGNAPNTPDFYQQLRNSDSNLCNSCGHQMLKYVSTSESDGTDCCSGKSGEEENIFSKESFKLMETQQEEETEKKDSRKLFQEGDKWLTEEAQSEQQTNIEQEVSLDLILVEEYDSLIEKMSNWNFPIFELVEKMGEKSGRILSQVMYTLFQDTGLLEIFKIPTQQFMNYFRALENGYRDIPYHNRIHATDVLHAVWYLTTRPVPGLQQIHNGCGTGNETDSDGRINHGRIAYISSKSCSNPDESYGCLSSNIPALELMALYVAAAMHDYDHPGRTNAFLVATNAPQAVLYNDRSVLENHHAASAWNLYLSRPEYNFLLHLDHVEFKRFRFLVIEAILATDLKKHFDFLAEFNAKANDVNSNGIEWSNENDRLLVCQVCIKLADINGPAKVRDLHLKWTEGIVNEFYEQGDEEANLGLPISPFMDRSSPQLAKLQESFITHIVGPLCNSYDAAGLLPGQWLEAEEDNDTESGDDEDGEELDTEDEEMENNLNPKPPRRKSRRRIFCQLMHHLTENHKIWKEIVEEEEKCKADGNKLQVENSSLPQADEIQVIEEADEEE

SEQ ID NO: 9 - protein, 886 aa, Homo sapiens
MEPPTVPSERSLSLSLPGPREGQATLKPPPQHLWRQPRTPIRIQQRGYSDSAERAERERQPHRPIERADAMDTSDRPGLRTTRMSWPSSFHGTGTGSGGAGGGSSRRFEAENGPTPSPGRSPLDSQASPGLVLHAGAATSQRRESFLYRSDSDYDMSPKTMSRNSSVTSEAHAEDLIVTPFAQVLASLRSVRSNFSLLTNVPVPSNKRSPLGGPTPVCKATLSEETCQQLARETLEELDWCLEQLETMQTYRSVSEMASHKFKRMLNRELTHLSEMSRSGNQVSEYISTTFLDKQNEVEIPSPTMKEREKQQAPRPRPSQPPPPPVPHLQPMSQITGLKKLMHSNSLNNSNIPRFGVKTDQEELLAQELENLNKWGLNIFCVSDYAGGRSLTCIMYMIFQERDLLKKFRIPVDTMVTYMLTLEDHYHADVAYHNSLHAADVLQSTHVLLATPALDAVFTDLEILAALFAAAIHDVDHPGVSNQFLINTNSELALMYNDESVLENHHLAVGFKLLQEDNCDIFQNLSKRQRQSLRKMVIDMVLATDMSKHMTLLADLKTMVETKKVTSSGVLLLDNYSDRIQVLRNMVHCADLSNPTKPLELYRQWTDRIMAEFFQQGDRERERGMEISPMCDKHTASVEKSQVGFIDYIVHPLWETWADLVHPDAQEILDTLEDNRDWYYSAIRQSPSPPPEEESRGPGHPPLPDKFQFELTLEEEEEEEISMAQIPCTAQEALTAQGLSGVEEALDATIAWEASPAQESLEVMAQEASLEAELEAVYLTQQAQSTGSAPVAPDEFSSREEFVVAVSHSSPSALALQSPLLPAWRTLSVSEHAPGLPGLPSTAAEVEAQREHQAAKRACSACAGTFGEDTSALPAPGGGGSGGDPT

SEQ ID NO: 10 - protein, 736 aa, Homo sapiens
MKKSRSVMTVMADDNVKDYFECSLSKSYSSSSNTLGIDLWRGRRCCSGNLQLPPLSQRQSERARTPEGDGISRPTTLPLTTLPSIAITTVSQECFDVENGPSPGRSPLDPQASSSAGLVLHATFPGHSQRRESFLYRSDSDYDLSPKAMSRNSSLPSEQHGDDLIVTPFAQVLASLRSVRNNFTILTNLHGTSNKRSPAASQPPVSRVNPQEESYQKLAMETLEELDWCLDQLETIQTYRSVSEMASNKFKRMLNRELTHLSEMSRSGNQVSEYISNTFLDKQNDVEIPSPTQKDREKKKKQQLMTQISGVKKLMHSSSLNNTSISRFGVNTENEDHLAKELEDLNKWGLNIFNVAGYSHNRPLTCIMYAIFQERDLLKTFRISSDTFITYMMTLEDHYHSDVAYHNSLHAADVAQSTHVLLSTPALDAVFTDLEILAAIFAAAIHDVDHPGVSNQFLINTNSELALMYNDESVLENHHLAVGFKLLQEEHCDIFMNLTKKQRQTLRKMVIDMVLATDMSKHMSLLADLKTMVETKKVTSSGVLLLDNYTDRIQVLRNMVHCADLSNPTKSLELYRQWTDRIMEEFFQQGDKERERGMEISPMCDKHTASVEKSQVGFIDYIVHPLWETWADLVQPDAQDILDTLEDNRNWYQSMIPQSPSPPLDEQNRDCQGLMEKFQFELTLDEEDSEGPEKEGEGHSYFSSTKTLCVIDPENRDSLGETDIDIATEDKSPVDT

SEQ ID NO: 11 - protein, 712 aa, Homo sapiens
MENLGVGEGAEACSRLSRSRGRHSMTRAPKHLWRQPRRPIRIQQRFYSDPDKSAGCRERDLSPRPELRKSRLSWPVSSCRRFDLENGLSCGRRALDPQSSPGLGRIMQAPVPHSQRRESFLYRSDSDYELSPKAMSRNSSVASDLHGEDMIVTPFAQVLASLRTVRSNVAALARQQCLGAAKQGPVGNPSSSNQLPPAEDTGQKLALETLDELDWCLDQLETLQTRHSVGEMASNKFKRILNRELTHLSETSRSGNQVSEYISRTFLDQQTEVELPKVTAEEAPQPMSRISGLHGLCHSASLSSATVPRFGVQTDQEEQLAKELEDTNKWGLDVFKVAELSGNRPLTAIIFSIFQERDLLKTFQIPADTLATYLLMLEGHYHANVAYHNSLHAADVAQSTHVLLATPALEAVFTDLEILAALFASAIHDVDHPGVSNQFLINTNSELALMYNDASVLENHHLAVGFKLLQAENCDIFQNLSAKQRLSLRRMVIDMVLATDMSKHMNLLADLKTMVETKKVTSLGVLLLDNYSDRIQVLQNLVHCADLSNPTKPLPLYRQWTDRIMAEFFQQGDRERESGLDISPMCDKHTASVEKSQVGFIDYIAHPLWETWADLVHPDAQDLLDTLEDNREWYQSKIPRSPSDLTNPERDGPDRFQFELTLEEAEEEDEEEEEEGEETALAKEALELPDTELLSPEAGPDPGDLPLDNQRT

SEQ ID NO: 12 - protein, 809 aa, Homo sapiens
MEAEGSSAPARAGSGEGSDSAGGATLKAPKHLWRHEQHHQYPLRQPQFRLLHPHHHLPPPPPPSPQPQPQCPLQPPPPPPLPPPPPPPGAARGRYASSGATGRVRHRGYSDTERYLYCRAMDRTSYAVETGHRPGLKKSRMSWPSSFQGLRRFDVDNGTSAGRSPLDPMTSPGSGLILQANFVHSQRRESFLYRSDSDYDLSPKSMSRNSSIASDIHGDDLIVTPFAQVLASLRTVRNNFAALTNLQDRAPSKRSPMCNQPSINKATITEEAYQKLASETLEELDWCLDQLETLQTRHSVSEMASNKFKRMLNRELTHLSEMSRSGNQVSEFISNTFLDKQHEVEIPSPTQKEKEKKKRPMSQISGVKKLMHSSSLTNSSIPRFGVKTEQEDVLAKELEDVNKWGLHVFRIAELSGNRPLTVIMHTIFQERDLLKTFKIPVDTLITYLMTLEDHYHADVAYHNNIHAADVVQSTHVLLSTPALEAVFTDLEILAAIFASAIHDVDHPGVSNQFLINTNSELALMYNDSSVLENHHLAVGFKLLQEENCDIFQNLTKKQRQSLRKMVIDIVLATDMSKHMNLLADLKTMVETKKVTSSGVLLLDNYSDRIQVLQNMVHCADLSNPTKPLQLYRQWTDRIMEEFFRQGDRERERGMEISPMCDKHNASVEKSQVGFIDYIVHPLWETWADLVHPDAQDILDTLEDNREWYQSTIPQSPSPAPDDPEEGRQGQTEKFQFELTLEEDGESDTEKDSGSQVEEDTSCSDSKTLCTQDSESTEIPLDEQVEEEAVGEEEESQPEACVIDDRSPDT

SEQ ID NO: 13 - protein, 860 aa, Homo sapiens
MGEVTAEEVEKFLDSNIGFAKQYYNLHYRAKLISDLLGAKEAAVDFSNYHSPSSMEESEIIFDLLRDFQENLQTEKCIFNVMKKLCFLLQADRMSLFMYRTRNGIAELATRLFNVHKDAVLEDCLVMPDQEIVFPLDMGIVGHVAHSKKIANVPNTEEDEHFCDFVDILTEYKTKNILASPIMNGKDVVAIIMAVNKVDGSHFTKRDEEILLKYLNFANLIMKVYHLSYLHNCETRRGQILLWSGSKVFEELTDIERQFHKALYTVRAFLNCDRYSVGLLDMTKQKEFFDVWPVLMGEVPPYSGPRTPDGREINFYKVIDYILHGKEDIKVIPNPPPDHWALVSGLPAYVAQNGLICNIMNAPAEDFFAFQKEPLDESGWMIKNVLSMPIVNKKEEIVGVATFYNRKDGKPFDEMDETLMESLTQFLGWSVLNPDTYESMNKLENRKDIFQDIVKYHVKCDNEEIQKILKTREVYGKEPWECEEEELAEILQAELPDADKYEINKFHFSDLPLTELELVKCGIQMYYELKVVDKFHIPQEALVRFMYSLSKGYRKITYHNWRHGFNVGQTMFSLLVTGKLKRYFTDLEALAMVTAAFCHDIDHRGTNNLYQMKSQNPLAKLHGSSILERHHLEFGKTLLRDESLNIFQNLNRRQHEHAIHMMDIAIIATDLALYFKKRTMFQKIVDQSKTYESEQEWTQYMMLEQTRKEIVMAMMMTACDLSAITKPWEVQSQVALLVAAEFWEQGDLERTVLQQNPIPMMDRNKADELPKLQVGFIDFVCTFVYKEFSRFHEEITPMLDGITNNRKEWKALADEYDAKMKVQEEKKQKQQSAKSAAAGNQPGGNPSPGGATTSKSCCIQ

SEQ ID NO: 14 - protein, 854 aa, Homo sapiens
MSLSEEQARSFLDQNPDFARQYFGKKLSPENVAAACEDGCPPDCDSLRDLCQVEESTALLELVQDMQESINMERVVFKVLRRLCTLLQADRCSLFMYRQRNGVAELATRLFSVQPDSVLEDCLVPPDSEIVFPLDIGVVGHVAQTKKMVNVEDVAECPHFSSFADELTDYKTKNMLATPIMNGKDVVAVIMAVNKLNGPFFTSEDEDVFLKYLNFATLYLKIYHLSYLHNCETRRGQVLLWSANKVFEELTDIERQFHKAFYTVRAYLNCERYSVGLLDMTKEKEFFDVWSVLMGESQPYSGPRTPDGREIVFYKVIDYVLHGKEEIKVIPTPSADHWALASGLPSYVAESGFICNIMNASADEMFKFQEGALDDSGWLIKNVLSMPIVNKKEEIVGVATFYNRKDGKPFDEQDEVLMESLTQFLGWSVMNTDTYDKMNKLENRKDIAQDMVLYHVKCDRDEIQLILPTRARLGKEPADCDEDELGEILKEELPGPTTFDIYEFHFSDLECTELDLVKCGIQMYYELGVVRKFQIPQEVLVRFLFSISKGYRRITYHNWRHGFNVAQTMFTLLMTGKLKSYYTDLEAFAMVTAGLCHDIDHRGTNNLYQMKSQNPLAKLHGSSILERHHLEFGKFLLSEETLNIYQNLNRRQHEHVIHLMDIAIIATDLALYFKKRAMFQKIVDESKNYQDKKSWVEYLSLETTRKEIVMAMMMTACDLSAITKPWEVQSKVALLVAAEFWEQGDLERTVLDQQPIPMMDRNKAAELPKLQVGFIDFVCTFVYKEFSRFHEEILPMFDRLQNNRKEWKALADEYEAKVKALEEKEEEERVAAKKVGTEICNGGPAPKSSTCCIL

SEQ ID NO: 15 - protein, 858 aa, Homo sapiens
MGEINQVAVEKYLEENPQFAKEYFDRKLRVEVLGEIFKNSQVPVQSSMSFSELTQVEESALCLELLWTVQEEGGTPEQGVHRALQRLAHLLQADRCSMFLCRSRNGIPEVASRLLDVTPTSKFEDNLVGPDKEVVFPLDIGIVGWAAHTKKTHNVPDVKKNSHFSDFMDKQTGYVTKNLLATPIVVGKEVLAVIMAVNKVNASEFSKQDEEVFSKYLNFVSIILRLHHTSYMYNIESRRSQILMWSANKVFEELTDVERQFHKALYTVRSYLNCERYSIGLLDMTKEKEFYDEWPIKLGEVEPYKGPKTPDGREVNFYKIIDYILHGKEEIKVIPTPPADHWTLISGLPTYVAENGFICNMMNAPADEYFTFQKGPVDETGWVIKNVLSLPIVNKKEDIVGVATFYNRKDGKPFDEHDEYITETLTQFLGWSLLNTDTYDKMNKLENRKDIAQEMLMNQTKATPEEIKSILKFQEKLNVDVIDDCEEKQLVAILKEDLPDPRSAELYEFRFSDFPLTEHGLIKCGIRLFFEINVVEKFKVPVEVLTRWMYTVRKGYRAVTYHNWRHGFNVGQTMFTLLMTGRLKKYYTDLEAFAMLAAAFCHDIDHRGTNNLYQMKSTSPLARLHGSSILERHHLEYSKTLLQDESLNIFQNLNKRQFETVIHLFEVAIIATDLALYFKKRTMFQKIVDACEQMQTEEEAIKYVTVDPTKKEIIMAMMMTACDLSAITKPWEVQSQVALMVANEFWEQGDLERTVLQQQPIPMMDRNKRDELPKLQVGFIDFVCTFVYKEFSRFHKEITPMLSGLQNNRVEWKSLADEYDAKMKVIEEEAKKQEGGAEKAAEDSGGGDDKKSKTCLML

SEQ ID NO: 16 - protein, 482 aa, Homo sapiens
MEVCYQLPVLPLDRPVPQHVLSRRGAISFSSSSALFGCPNPRQLSQRRGAISYDSSDQTALYIRMLGDVRVRSRAGFESERRGSHPYIDFRIFHSQSEIEVSVSARNIRRLLSFQRYLRSSRFFRGTAVSNSLNILDDDYNGQAKCMLEKVGNWNFDIFLFDRLTNGNSLVSLTFHLFSLHGLIEYFHLDMMKLRRFLVMIQEDYHSQNPYHNAVHAADVTQAMHCYLKEPKLANSVTPWDILLSLIAAATHDLDHPGVNQPFLIKTNHYLATLYKNTSVLENHHWRSAVGLLRESGLFSHLPLESRQQMETQIGALILATDISRQNEYLSLFRSHLDRGDLCLEDTRHRHLVLQMALKCADICNPCRTWELSKQWSEKVTEEFFHQGDIEKKYHLGVSPLCDRHTESIANIQIGFMTYLVEPLFTEWARFSNTRLSQTMLGHVGLNKASWKGLQREQSSSEDTDAAFELNSQLLPQENRLS

SEQ ID NO: 17 - protein, 450 aa, Homo sapiens
MSCLMVERCGEILFENPDQNAKCVCMLGDIRLRGQTGVRAERRGSYPFIDFRLLNSTTYSGEIGTKKKVKRLLSFQRYFHASRLLRGIIPQAPLHLLDEDYLGQARHMLSKVGMWDFDIFLFDRLTNGNSLVTLLCHLFNTHGLIHHFKLDMVTLHRFLVMVQEDYHSQNPYHNAVHAADVTQAMHCYLKEPKLASFLTPLDIMLGLLAAAAHDVDHPGVNQPFLIKTNHHLANLYQNMSVLENHHWRSTIGMLRESRLLAHLPKEMTQDIEQQLGSLILATDINRQNEFLTRLKAHLHNKDLRLEDAQDRHFMLQIALKCADICNPCRIWEMSKQWSERVCEEFYRQGELEQKFELEISPLCNQQKDSIPSIQIGFMSYIVEPLFREWAHFTGNSTLSENMLGHLAHNKAQWKSLLPRQHRSRGSSGSGPDHDHAGQGTESEEQEGDSP

SEQ ID NO: 18 - protein, 829 aa, Homo sapiens
MGCAPSIHISERLVAEDAPSPAAPPLSSGGPRLPQGQKTAALPRTRGAGLLESELRDGSGKKVAVADVQFGPMRFHQDQLQVLLVFTKEDNQCNGFCRACEKAGFKCTVTKEAQAVLACFLDKHHDIIIIDHRNPRQLDAEALCRSIRSSKLSENTVIVGVVRRVDREELSVMPFISAGFTRRYVENPNIMACYNELLQLEFGEVRSQLKLRACNSVFTALENSEDAIEITSEDRFIQYANPAFETTMGYQSGELIGKELGEVPINEKKADLLDTINSCIRIGKEWQGIYYAKKKNGDNIQQNVKIIPVIGQGGKIRHYVSIIRVCNGNNKAEKISECVQSDTHTDNQTGKHKDRRKGSLDVKAVASRATEVSSQRRHSSMARIHSMTIEAPITKVINIINAAQESSPMPVTEALDRVLEILRTTELYSPQFGAKDDDPHANDLVGGLMSDGLRRLSGNEYVLSTKNTQMVSSNIITPISLDDVPPRIARAMENEEYWDFDIFELEAATHNRPLIYLGLKMFARFGICEFLHCSESTLRSWLQIIEANYHSSNPYHNSTHSADVLHATAYFLSKERIKETLDPIDEVAALIAATIHDVDHPGRTNSFLCNAGSELAILYNDTAVLESHHAALAFQLTTGDDKCNIFKNMERNDYRTLRQGIIDMVLATEMTKHFEHVNKFVNSINKPLATLEENGETDKNQEVINTMLRTPENRTLIKRMLIKCADVSNPCRPLQYCIEWAARISEEYFSQTDEEKQQGLPVVMPVFDRNTCSIPKSQISFIDYFITDMFDAWDAFVDLPDLMQHLDNNFKYWKGLDEMKLRNLRPPPE

SEQ ID NO: 19 - protein, 885 aa, Homo sapiens
MGCAPSIHVSQSGVIYCRDSDESSSPRQTTSVSQGPAAPLPGLFVQTDAADAIPPSRASGPPSVARVRRARTELGSGSSAGSAAPAATTSRGRRRHCCSSAEAETQTCYTSVKQVSSAEVRIGPMRLTQDPIQVLLIFAKEDSQSDGFWWACDRAGYRCNIARTPESALECFLDKHHEIIVIDHRQTQNFDAEAVCRSIRATNPSEHTVILAVVSRVSDDHEEASVLPLLHAGFNRRFMENSSIIACYNELIQIEHGEVRSQFKLRACNSVFTALDHCHEAIEITSDDHVIQYVNPAFERMMGYHKGELLGKELADLPKSDKNRADLLDTINTCIKKGKEWQGVYYARRKSGDSIQQHVKITPVIGQGGKIRHFVSLKKLCCTTDNNKQIHKIHRDSGDNSQTEPHSFRYKNRRKESIDVKSISSRGSDAPSLQNRRYPSMARIHSMTIEAPITKVINIINAAQENSPVTVAEALDRVLEILRTTELYSPQLGTKDEDPHTSDLVGGLMTDGLRRLSGNEYVFTKNVHQSHSHLAMPITINDVPPCISQLLDNEESWDFNIFELEAITHKRPLVYLGLKVFSRFGVCEFLNCSETTLRAWFQVIEANYHSSNAYHNSTHAADVLHATAFFLGKERVKGSLDQLDEVAALIAATVHDVDHPGRTNSFLCNAGSELAVLYNDTAVLESHHTALAFQLTVKDTKCNIFKNIDRNHYRTLRQAIIDMVLATEMTKHFEHVNKFVNSINKPMAAEIEGSDCECNPAGKNFPENQILIKRMMIKCADVANPCRPLDLCIEWAGRISEEYFAQTDEEKRQGLPVVMPVFDRNTCSIPKSQISFIDYFITDMFDAWDAFAHLPALMQHLADNYKHWKTLDDLKCKSLRLPSDS

SEQ ID NO: 20 - protein, 593 aa, Homo sapiens
MGSGSSSYRPKAIYLDIDGRIQKVIFSKYCNSSDIMDLFCIATGLPRNTTISLLTTDDAMVSIDPTMPANSERTPYKVRPVAIKQLSAGVEDKRTTSRGQSAERPLRDRRVVGLEQPRREGAFESGQVEPRPREPQGCYQEGQRIPPEREELIQSVLAQVAEQFSRAFKINELKAEVANHLAVLEKRVELEGLKVVEIEKCKSDIKKMREELAARSSRTNCPCKYSFLDNHKKLTPRRDVPTYPKYLLSPETIEALRKPTFDVWLWEPNEMLSCLEHMYHDLGLVRDFSINPVTLRRWLFCVHDNYRNNPFHNFRHCFCVAQMMYSMVWLCSLQEKFSQTDILILMTAAICHDLDHPGYNNTYQINARTELAVRYNDISPLENHHCAVAFQILAEPECNIFSNIPPDGFKQIRQGMITLILATDMARHAEIMDSFKEKMENFDYSNEEHMTLLKMILIKCCDISNEVRPMEVAEPWVDCLLEEYFMQSDREKSEGLPVAPFMDRDKVTKATAQIGFIKFVLIPMFETVTKLFPMVEEIMLQPLWESRDRYEELKRIDDAMKELQKKTDSLTSGATEKSRERSRDVKNSEGDCA

SEQ ID NO: 21 - protein, 779 aa, Homo sapiens
MRIEERKSQHLTGLTDEKVKAYLSLHPQVLDEFVSESVSAETVEKWLKRKNNKSEDESAPKEVSRYQDTNMQGVVYELNSYIEQRLDTGGDNQLLLYELSSIIKIATKADGFALYFLGECNNSLCIFTPPGIKEGKPRLIPAGPITQGTTVSAYVAKSRKTLLVEDILGDERFPRGTGLESGTRIQSVLCLPIVTAIGDLIGILELYRHWGKEAFCLSHQEVATANLAWASVAIHQVQVCRGLAKQTELNDFLLDVSKTYFDNIVAIDSLLEHIMIYAKNLVNADRCALFQVDHKNKELYSDLFDIGEEKEGKPVFKKTKEIRFSIEKGIAGQVARTGEVLNIPDAYADPRFNREVDLYTGYTTRNILCMPIVSRGSVIGVVQMVNKISGSAFSKTDENNFKMFAVFCALALHCANMYHRIRHSECIYRVTMEKLSYHSICTSEEWQGLMQFTLPVRLCKEIELFHFDIGPFENMWPGIFVYMVHRSCGTSCFELEKLCRFIMSVKKNYRRVPYHNWKHAVTVAHCMYAILQNNHTLFTDLERKGLLIACLCHDLDHRGFSNSYLQKFDHPLAALYSTSTMEQHHFSQTVSILQLEGHNIFSTLSSSEYEQVLEIIRKAIIATDLALYFGNRKQLEEMYQTGSLNLNNQSHRDRVIGLMMTACDLCSVTKLWPVTKLTANDIYAEFWAEGDEMKKLGIQPIPMMDRDKKDEVPQGQLGFYNAVAIPCYTTLTQILPPTEPLLKACRDNLSQWEKVIRGEETATWISSPSVAQKAAASED

SEQ ID NO: 22 - protein, 933 aa, Homo sapiens
MAASRLDFGEVETFLDRHPELFEDYLMRKGKQEMVEKWLQRHSQGQGALGPRPSLAGTSSLAHSTCRGGSSVGGGTGPNGSAHSQPLPGGGDCGGVPLSPSWAGGSRGDGNLQRRASQKELRKSFARSKAIHVNRTYDEQVTSRAQEPLSSVRRRALLRKASSLPPTTAHILSALLESRVNLPRYPPTAIDYKCHLKKHNERQFFLELVKDISNDLDLTSLSYKILIFVCLMVDADRCSLFLVEGAAAGKKTLVSKFFDVHAGTPLLPCSSTENSNEVQVPWGKGIIGYVGEHGETVNIPDAYQDRRFNDEIDKLTGYKTKSLLCMPIRSSDGEIIGVAQAINKIPEGAPFTEDDEKVMQMYLPFCGIAISNAQLFAASRKEYERSRALLEVVNDLFEEQTDLEKIVKKIMHRAQTLLKCERCSVLLLEDIESPVVKFTKSFELMSPKCSADAENSFKESMEKSSYSDWLINNSIAELVASTGLPVNISDAYQDPRFDAEADQISGFHIRSVLCVPIWNSNHQIIGVAQVLNRLDGKPFDDADQRLFEAFVIFCGLGINNTIMYDQVKKSWAKQSVALDVLSYHATCSKAEVDKFKAANIPLVSELAIDDIHFDDFSLDVDAMITAALRMFMELGMVQKFKIDYETLCRWLLTVRKNYRMVLYHNWRHAFNVCQLMFAMLTTAGFQDILTEVEILAVIVGCLCHDLDHRGTNNAFQAKSGSALAQLYGTSATLEHHHFNHAVMILQSEGHNIFANLSSKEYSDLMQLLKQSILATDLTLYFERRTEFFELVSKGEYDWNIKNHRDIFRSMLMTACDLGAVTKPWEISRQVAELVTSEFFEQGDRERLELKLTPSAIFDRNRKDELPRLQLEWIDSICMPLYQALVKVNVKLKPMLDSVATNRSKWEELHQKRLLASTASSSPASVMVAKEDRN

SEQ ID NO: 23 - protein, 833 aa, Homo sapiens
MLPFGDKTREMVNAWFAERVHTIPVCKEGIRGHTESCSCPLQQSPRADNSAPGTPTRKISASEFDRPLRPIVVKDSEGTVSFLSDSEKKEQMPLTPPRFDHDEGDQCSRLLELVKDISSHLDVTALCHKIFLHIHGLISADRYSLFLVCEDSSNDKFLISRLFDVAEGSTLEEVSNNCIRLEWNKGIVGHVAALGEPLNIKDAYEDPRFNAEVDQITGYKTQSILCMPIKNHREEVVGVAQAINKKSGNGGTFTEKDEKDFAAYLAFCGIVLHNAQLYETSLLENKRNQVLLDLASLIFEEQQSLEVILKKIAATIISFMQVQKCTIFIVDEDCSDSFSSVFHMECEELEKSSDTLTREHDANKINYMYAQYVKNTMEPLNIPDVSKDKRFPWTTENTGNVNQQCIRSLLCTPIKNGKKNKVIGVCQLVNKMEENTGKVKPFNRNDEQFLEAFVIFCGLGIQNTQMYEAVERAMAKQMVTLEVLSYHASAAEEETRELQSLAAAVVPSAQTLKITDFSFSDFELSDLETALCTIRMFTDLNLVQNFQMKHEVLCRWILSVKKNYRKNVAYHNWRHAFNTAQCMFAALKAGKIQNKLTDLEILALLIAALSHDLDHRGVNNSYIQRSEHPLAQLYCHSIMEHHHFDQCLMILNSPGNQILSGLSIEEYKTTLKIIKQAILATDLALYIKRRGEFFELIRKNQFNLEDPHQKELFLAMLMTACDLSAITKPWPIQQRIAELVATEFFDQGDRERKELNIEPTDLMNREKKNKIPSMQVGFIDAICLQLYEALTHVSEDCFPLLDGCRKNRQKWQALAEQQEKMLINGESGQAKRN

SEQ ID NO: 24 - DNA, 6836 bp, Homo sapiens
tggttctgagtcgccgacctcacctcacctcacctgcgcgcgttgttgcccctacggagcctcctggagtccaggatcggcggagttcgaaaacgaacttcccacgtttgctatgttgccctttggagacaaaacaagagaaatggtcaatgcatggtttgctgagagagttcacaccatccctgtgtgcaaggaaggtatcagaggccacaccgaatcttgctcttgtcccttgcagcagagtcctcgtgcagataacagtgcccctggaacaccaaccaggaaaatctctgcctctgaatttgaccggcctcttagacccattgttgtcaaggattctgagggaactgtgagcttcctctctgactcagaaaagaaggaacagatgcctctaacccctccaaggtttgatcatgatgaaggggaccagtgctcaagactcttggaattagtgaaggatatttctagtcatttggatgtcacagccttatgtcacaaaattttcttgcatatccatggactgatatctgctgaccgctattccctgttccttgtctgtgaagacagctccaatgacaagtttcttatcagccgcctctttgatgttgctgaaggttcaacactggaagaagtttcaaataactgtatccgcttagaatggaacaaaggcattgtgggacatgtggcagcgcttggtgagcccttgaacatcaaagatgcatatgaggatcctcggttcaatgcagaagttgaccaaattacaggctacaagacacaaagcattctttgtatgccaattaagaatcatagggaagaggttgttggtgtagcccaggccatcaacaagaaatcaggaaacggtgggacatttactgaaaaagatgaaaaggactttgctgcttatttggcattttgtggtattgttcttcataatgctcagctctatgagacttcactgctggagaacaagagaaatcaggtgctgcttgaccttgctagtttaatttttgaagaacaacaatcattagaagtaattttgaagaaaatagctgccactattatctctttcatgcaagtgcagaaatgcaccattttcatagtggatgaagattgctccgattctttttctagtgtgtttcacatggagtgtgaggaattagaaaaatcatctgatacattaacaagggaacatgatgcaaacaaaatcaattacatgtatgctcagtatgtcaaaaatactatggaaccacttaatatcccagatgtcagtaaggataaaagatttccctggacaactgaaaatacaggaaatgtaaaccagcagtgcattagaagtttgctttgtacacctataaaaaatggaaagaagaataaagttataggggtttgccaacttgttaataagatggaggagaatactggcaaggttaagcctttcaaccgaaatgacgaacagtttctggaagcttttgtcatcttttgtggcttggggatccagaacacgcagatgtatgaagcagtggagagagccatggccaagcaaatggtcacattggaggttctgtcgtatcatgcttcagcagcagaggaagaaacaagagagctacagtcgttagcggctgctgtggtgccatctgcccagacccttaaaattactgactttagcttcagtgactttgagctgtctgatctggaaacagcactgtgtacaattcggatgtttactgacctcaaccttgtgcagaacttccagatgaaacatgaggttctttgcagatggattttaagtgttaagaagaattatcggaagaatgttgcctatcataattggagacatgcctttaatacagctcagtgcatgtttgctgctctaaaagcaggcaaaattcagaacaagctgactgacctggagatacttgcattgctgattgctgcactaagccacgatttggatcaccgtggtgtgaataactcttacatacagcgaagtgaacatccacttgcccagctttactgccattcaatcatggaacaccatcattttgaccagtgcctgatgattcttaatagtccaggcaatcagattctcagtggcctctccattgaagaatataagaccacgttgaaaataatcaagcaagctattttagctacagacctagcactgtacattaagaggcgaggagaattttttgaacttataagaaaaaatcaattcaatttggaagatcctcatcaaaaggagttgtttttggcaatgctgatgacagcttgtgatctttctgcaattacaaaaccctggcctattcaacaacggatagcagaacttgtagcaactgaattttttgatcaaggagacagagagagaaaagaactcaacatagaacccactgatctaatgaacagggagaagaaaaacaaaatcccaagtatgcaagttgggttcatagatgccatctgcttgcaactgtatgaggccctgacccacgtgtcagaggactgtttccctttgctagatggctgcagaaagaacaggcagaaatggcaggcccttgcagaacagcaggagaagatgctgattaatggggaaagcggccaggccaagcggaactgagtggcctatttcatgcagagttgaagtttacagagatggtgtgttctgcaatatgcctagtttcttacacactgtctgtatagtgtctgtatttggtatatactttgccactgctgtatttttatttttgcacaacttttgagagtatagcatgaatgtttttagaggactattacatattttttgtatatttgttttatgctactgaactgaaaggatcaacaacatccactgttagcacattgataaaagcattgtttgtgatatttcgtgtactgcaaagtgtatgcagtattcttgcactgaggtttttttgcttggggattattttaaataattggtttttgtgttttctgaattaccattttttcaagaatgtttggaatctttcctttttcaaaagtaggttaggagcaaattatcatacattctgtgacatttaaagcctttataggatagtgaaaaatgctggctgagtggattttaagagaaataattgtatttgttaacagtgtctttttttaaaaagttaaggcactctgaaacaaatggaaagtcctatgaaactgtattgtaaagaaaacattatttaattgatatgctgttttgtgagagaacaggcaagacagaactttgtcacttcagtgcagtacatttttctgaaagctacccataaaatcactttcatctcacctacctgatgcaaagcaggtgaaaccttaggagatgatccagtcactgacttgattgagggataagtgtgatttagaaatggaatggccttggatgtctatcagtgaagaaaaatgttctgttagaagatctctctaagagtttttttccttctgagcttccttttcaaaataaaagtgacaattgtagcattgacttgaagtgagacatggttatagataagagagtacaaaatgactctttttcctgtcaattgaaatttaaagaaaagttttaattatataaatagcaaagggctattgccaatactagggtcaaaaatgaatttgagggaacagtgggtaagaaactttatgcctgaataacatttagcagtattgtgattgaaaaattgccatattttgatgtataggacaagtcaactgagatccagagaatcctggatgtgaatgctaaacactggcccttaactcacattcaatgtattttcttcccataacatttagtatagttaatattttcttagaatttgagcccatttaagtggattaatattctacatgtgtgcccctaaagacacatttactcaatattggagaagtagataatgaattaagcaactggtctaggaaaggaaaatttgtttcaaatatgcaggaatgtttggatttggggagagtagaaggagagatttgcttgatttgttaacttctacctccaacccacaaaaaagatatttgatctgagtttctatcactaatttggatagaaaatttctaagggacatggtaatccagcattctcaaggacctttcgccaaaatgtgttttccatctatgtcccgattcccctaaattttgcctaaaattcagtatgttccttaagtttttaaaattctgagtgtgtacaaatatcttgacataatgcagttttatttttatcattctggtaaaaaaacaaaaaatagaagcaaaacacattgtattgccattattttgtatttggtaaaggttaatctaggaagttaccaactgtttaatgctatatgtattgtatacttgtattttcaggatattttattttttttgccatacagataaaatttgtaaggttgcccctttgtggcactggtgtgtaaaatacacagactatcactaaaataatagttatatatacatacaggtgtatacttatgcatgcatacataaatccttagtatagaaaaattgcataaagaatagcaatctttaataaacctttttattacattgtgatttagcagttatgctaaaatatgtacttatgctttagtagtttgtttggtcccctctagtatgtgtcactgagaaattttttaaagacatggtagatcgtgtttagaggctttgtatgtgtgtcattttaataagcaagaagatatatttagattagaaatggtttggtctgcctttgaatattgtttattttactttactagttgagacattaaaggaagctgggcaatgcctattttatttctttgttggatattttagttcatacaaagcagagtacttctttagggctggttaattggttcaaataatttttaatttcctttctagtatcttctcaagttggaaaaatatacatacagtcctccttcaccttactctgtatttatattacccataactagcaagaagttcttgttctagattttttgtttgtttagttataacagagtaacataccatttaattacaatttttagccagaaaagtccccactattttactaacttgttaaaagatatctatataattgcctggccttatatttttcagtagattagaccgtgccaatcacaatcctgggtggatttgtgtaagtcacttaacctctgtgtgcctaaacaagttgtgcttttttaaaaggagttatgtttgggcaaagcctttgtcttcaagcagaatgtcacagaaggcagctactttataagccccaatgggccatggagaccactgtcagaaatgggatattagtctagagagaaggtgatctattcccacatgtcatttctaatgttgagtttccatgactgaacaaagagaatatatttattcagcttcacttgcagatcactagtgaatgtgagatttagagctcattgagtatattgcttcaaggtacaaacccaggatgatgatgttgtcaccactgtctcttaattttgaataatagtttcctttaataggagtattagagataagaaagtatatgaaaatatactggaaatattggattcttggagaaaactgttcagtcacagatatattcttgcctagcagtgaagtgcctttattttcagcatagcaaataaatattagacctgttccaatttgatctacaatttttttctgtgtttttcaccagattgtactcctaaaacttaacaggccatcacaagcaattgtcttttgtttacaagattgatttaatatgagaggatacaaaatgtcatcgttatcctctcttatgaacaactgtagtcaaaataaggtggcacaatttaattgttttgtatcagaaatacactgacccaccttttattgagtcctgccacatgttaggtaccgtgctctgctgtggagacagagcagtgaccccaaggagctcacggtccctgaaggaggtgctagagaagagacttagcttctgatactgccaatttaatgtgagaacatggggtatactgcatcatttccattttcatcaataacatatgttttatgcaccttctttacctgaaacttactaagaatctaccagtaaacaaacatcctgtctttttgcaagtatgaatcacttaacctgctgatagttgaagaacactttaggagttttgtattcttgtatatagtttattttttccatgtgctagccaggtaaagattacacagttcttctggactgttaaattgtgcatggttttggaccccttctgctctactacagagagtgaagaagaaagtattaaagctcactttaccattccatatacttactaaaagcctgtgtaaacatgtcttaatgaatgttgttgaaagcaatgtaaatagttgaaaatataaatttatattacagtttaagaaaaccttatgaggcatcactagccactgttaatatctatttgtattcttataccttttcaatatatttgaacaaatatagtttctggcactatttttatactaggaaaaggagttactatgtatattatgcttagcttttaaggcattttaaataaccatgaatgttgatttcattactttcctttcctccatcacgagagtcatttcagatgactctttcatgacaaaatcactttaaaggaacacttacctccgattcctgtataaagtcatgagatggtcaaggtggttttccattgtgcaaattcttcacctgtcagtggtttcctcattttgccatgctttgtaaaaataaaaagaatgatcaagtaggtatgaaaaaaaaaaaaaaaaaa

SEQ ID NO: 25 - protein, 823 aa, Homo sapiens
MVNAWFAERVHTIPVCKEGIRGHTESCSCPLQQSPRADNSAPGTPTRKISASEFDRPLRPIVVKDSEGTVSFLSDSEKKEQMPLTPPRFDHDEGDQCSRLLELVKDISSHLDVTALCHKIFLHIHGLISADRYSLFLVCEDSSNDKFLISRLFDVAEGSTLEEVSNNCIRLEWNKGIVGHVAALGEPLNIKDAYEDPRFNAEVDQITGYKTQSILCMPIKNHREEVVGVAQAINKKSGNGGTFTEKDEKDFAAYLAFCGIVLHNAQLYETSLLENKRNQVLLDLASLIFEEQQSLEVILKKIAATIISFMQVQKCTIFIVDEDCSDSFSSVFHMECEELEKSSDTLTREHDANKINYMYAQYVKNTMEPLNIPDVSKDKRFPWTTENTGNVNQQCIRSLLCTPIKNGKKNKVIGVCQLVNKMEENTGKVKPFNRNDEQFLEAFVIFCGLGIQNTQMYEAVERAMAKQMVTLEVLSYHASAAEEETRELQSLAAAVVPSAQTLKITDFSFSDFELSDLETALCTIRMFTDLNLVQNFQMKHEVLCRWILSVKKNYRKNVAYHNWRHAFNTAQCMFAALKAGKIQNKLTDLEILALLIAALSHDLDHRGVNNSYIQRSEHPLAQLYCHSIMEHHHFDQCLMILNSPGNQILSGLSIEEYKTTLKIIKQAILATDLALYIKRRGEFFELIRKNQFNLEDPHQKELFLAMLMTACDLSAITKPWPIQQRIAELVATEFFDQGDRERKELNIEPTDLMNREKKNKIPSMQVGFIDAICLQLYEALTHVSEDCFPLLDGCRKNRQKWQALAEQQEKMLINGESGQAKRN

SEQ ID NO: 26 - DNA, 2499 bp, Homo sapiens
atgttgccctttggagacaaaacaagagaaatggtcaatgcatggtttgctgagagagttcacaccatccctgtgtgcaaggaaggtatcagaggccacaccgaatcttgctcttgtcccttgcagcagagtcctcgtgcagataacagtgcccctggaacaccaaccaggaaaatctctgcctctgaatttgaccggcctcttagacccattgttgtcaaggattctgagggaactgtgagcttcctctctgactcagaaaagaaggaacagatgcctctaacccctccaaggtttgatcatgatgaaggggaccagtgctcaagactcttggaattagtgaaggatatttctagtcatttggatgtcacagccttatgtcacaaaattttcttgcatatccatggactgatatctgctgaccgctattccctgttccttgtctgtgaagacagctccaatgacaagtttcttatcagccgcctctttgatgttgctgaaggttcaacactggaagaagtttcaaataactgtatccgcttagaatggaacaaaggcattgtgggacatgtggcagcgcttggtgagcccttgaacatcaaagatgcatatgaggatcctcggttcaatgcagaagttgaccaaattacaggctacaagacacaaagcattctttgtatgccaattaagaatcatagggaagaggttgttggtgtagcccaggccatcaacaagaaatcaggaaacggtgggacatttactgaaaaagatgaaaaggactttgctgcttatttggcattttgtggtattgttcttcataatgctcagctctatgagacttcactgctggagaacaagagaaatcaggtgctgcttgaccttgctagtttaatttttgaagaacaacaatcattagaagtaattttgaagaaaatagctgccactattatctctttcatgcaagtgcagaaatgcaccattttcatagtggatgaagattgctccgattctttttctagtgtgtttcacatggagtgtgaggaattagaaaaatcatctgatacattaacaagggaacatgatgcaaacaaaatcaattacatgtatgctcagtatgtcaaaaatactatggaaccacttaatatcccagatgtcagtaaggataaaagatttccctggacaactgaaaatacaggaaatgtaaaccagcagtgcattagaagtttgctttgtacacctataaaaaatggaaagaagaataaagttataggggtttgccaacttgttaataagatggaggagaatactggcaaggttaagcctttcaaccgaaatgacgaacagtttctggaagcttttgtcatcttttgtggcttggggatccagaacacgcagatgtatgaagcagtggagagagccatggccaagcaaatggtcacattggaggttctgtcgtatcatgcttcagcagcagaggaagaaacaagagagctacagtcgttagcggctgctgtggtgccatctgcccagacccttaaaattactgactttagcttcagtgactttgagctgtctgatctggaaacagcactgtgtacaattcggatgtttactgacctcaaccttgtgcagaacttccagatgaaacatgaggttctttgcagatggattttaagtgttaagaagaattatcggaagaatgttgcctatcataattggagacatgcctttaatacagctcagtgcatgtttgctgctctaaaagcaggcaaaattcagaacaagctgactgacctggagatacttgcattgctgattgctgcactaagccacgatttggatcaccgtggtgtgaataactcttacatacagcgaagtgaacatccacttgcccagctttactgccattcaatcatggaacaccatcattttgaccagtgcctgatgattcttaatagtccaggcaatcagattctcagtggcctctccattgaagaatataagaccacgttgaaaataatcaagcaagctattttagctacagacctagcactgtacattaagaggcgaggagaattttttgaacttataagaaaaaatcaattcaatttggaagatcctcatcaaaaggagttgtttttggcaatgctgatgacagcttgtgatctttctgcaattacaaaaccctggcctattcaacaacggatagcagaacttgtagcaactgaattttttgatcaaggagacagagagagaaaagaactcaacatagaacccactgatctaatgaacagggagaagaaaaacaaaatcccaagtatgcaagttgggttcatagatgccatctgcttgcaactgtatgaggccctgacccacgtgtcagaggactgtttccctttgctagatggctgcagaaagaacaggcagaaatggcaggcccttgcagaacagcaggagaagatgctgattaatggggaaagcggccaggccaagcggaac

SEQ ID NO: 27 - DNA, 6788 bp, Homo sapiens
cctcgccctggccctggctgggcggggaagctggggtgagggacgagtccacgggacagcccaaaggcaacatgacggaaccttgccaaaagaaatggtcaatgcatggtttgctgagagagttcacaccatccctgtgtgcaaggaaggtatcagaggccacaccgaatcttgctcttgtcccttgcagcagagtcctcgtgcagataacagtgcccctggaacaccaaccaggaaaatctctgcctctgaatttgaccggcctcttagacccattgttgtcaaggattctgagggaactgtgagcttcctctctgactcagaaaagaaggaacagatgcctctaacccctccaaggtttgatcatgatgaaggggaccagtgctcaagactcttggaattagtgaaggatatttctagtcatttggatgtcacagccttatgtcacaaaattttcttgcatatccatggactgatatctgctgaccgctattccctgttccttgtctgtgaagacagctccaatgacaagtttcttatcagccgcctctttgatgttgctgaaggttcaacactggaagaagtttcaaataactgtatccgcttagaatggaacaaaggcattgtgggacatgtggcagcgcttggtgagcccttgaacatcaaagatgcatatgaggatcctcggttcaatgcagaagttgaccaaattacaggctacaagacacaaagcattctttgtatgccaattaagaatcatagggaagaggttgttggtgtagcccaggccatcaacaagaaatcaggaaacggtgggacatttactgaaaaagatgaaaaggactttgctgcttatttggcattttgtggtattgttcttcataatgctcagctctatgagacttcactgctggagaacaagagaaatcaggtgctgcttgaccttgctagtttaatttttgaagaacaacaatcattagaagtaattttgaagaaaatagctgccactattatctctttcatgcaagtgcagaaatgcaccattttcatagtggatgaagattgctccgattctttttctagtgtgtttcacatggagtgtgaggaattagaaaaatcatctgatacattaacaagggaacatgatgcaaacaaaatcaattacatgtatgctcagtatgtcaaaaatactatggaaccacttaatatcccagatgtcagtaaggataaaagatttccctggacaactgaaaatacaggaaatgtaaaccagcagtgcattagaagtttgctttgtacacctataaaaaatggaaagaagaataaagttataggggtttgccaacttgttaataagatggaggagaatactggcaaggttaagcctttcaaccgaaatgacgaacagtttctggaagcttttgtcatcttttgtggcttggggatccagaacacgcagatgtatgaagcagtggagagagccatggccaagcaaatggtcacattggaggttctgtcgtatcatgcttcagcagcagaggaagaaacaagagagctacagtcgttagcggctgctgtggtgccatctgcccagacccttaaaattactgactttagcttcagtgactttgagctgtctgatctggaaacagcactgtgtacaattcggatgtttactgacctcaaccttgtgcagaacttccagatgaaacatgaggttctttgcagatggattttaagtgttaagaagaattatcggaagaatgttgcctatcataattggagacatgcctttaatacagctcagtgcatgtttgctgctctaaaagcaggcaaaattcagaacaagctgactgacctggagatacttgcattgctgattgctgcactaagccacgatttggatcaccgtggtgtgaataactcttacatacagcgaagtgaacatccacttgcccagctttactgccattcaatcatggaacaccatcattttgaccagtgcctgatgattcttaatagtccaggcaatcagattctcagtggcctctccattgaagaatataagaccacgttgaaaataatcaagcaagctattttagctacagacctagcactgtacattaagaggcgaggagaattttttgaacttataagaaaaaatcaattcaatttggaagatcctcatcaaaaggagttgtttttggcaatgctgatgacagcttgtgatctttctgcaattacaaaaccctggcctattcaacaacggatagcagaacttgtagcaactgaattttttgatcaaggagacagagagagaaaagaactcaacatagaacccactgatctaatgaacagggagaagaaaaacaaaatcccaagtatgcaagttgggttcatagatgccatctgcttgcaactgtatgaggccctgacccacgtgtcagaggactgtttccctttgctagatggctgcagaaagaacaggcagaaatggcaggcccttgcagaacagcaggagaagatgctgattaatggggaaagcggccaggccaagcggaactgagtggcctatttcatgcagagttgaagtttacagagatggtgtgttctgcaatatgcctagtttcttacacactgtctgtatagtgtctgtatttggtatatactttgccactgctgtatttttatttttgcacaacttttgagagtatagcatgaatgtttttagaggactattacatattttttgtatatttgttttatgctactgaactgaaaggatcaacaacatccactgttagcacattgataaaagcattgtttgtgatatttcgtgtactgcaaagtgtatgcagtattcttgcactgaggtttttttgcttggggattattttaaataattggtttttgtgttttctgaattaccattttttcaagaatgtttggaatctttcctttttcaaaagtaggttaggagcaaattatcatacattctgtgacatttaaagcctttataggatagtgaaaaatgctggctgagtggattttaagagaaataattgtatttgttaacagtgtctttttttaaaaagttaaggcactctgaaacaaatggaaagtcctatgaaactgtattgtaaagaaaacattatttaattgatatgctgttttgtgagagaacaggcaagacagaactttgtcacttcagtgcagtacatttttctgaaagctacccataaaatcactttcatctcacctacctgatgcaaagcaggtgaaaccttaggagatgatccagtcactgacttgattgagggataagtgtgatttagaaatggaatggccttggatgtctatcagtgaagaaaaatgttctgttagaagatctctctaagagtttttttccttctgagcttccttttcaaaataaaagtgacaattgtagcattgacttgaagtgagacatggttatagataagagagtacaaaatgactctttttcctgtcaattgaaatttaaagaaaagttttaattatataaatagcaaagggctattgccaatactagggtcaaaaatgaatttgagggaacagtgggtaagaaactttatgcctgaataacatttagcagtattgtgattgaaaaattgccatattttgatgtataggacaagtcaactgagatccagagaatcctggatgtgaatgctaaacactggcccttaactcacattcaatgtattttcttcccataacatttagtatagttaatattttcttagaatttgagcccatttaagtggattaatattctacatgtgtgcccctaaagacacatttactcaatattggagaagtagataatgaattaagcaactggtctaggaaaggaaaatttgtttcaaatatgcaggaatgtttggatttggggagagtagaaggagagatttgcttgatttgttaacttctacctccaacccacaaaaaagatatttgatctgagtttctatcactaatttggatagaaaatttctaagggacatggtaatccagcattctcaaggacctttcgccaaaatgtgttttccatctatgtcccgattcccctaaattttgcctaaaattcagtatgttccttaagtttttaaaattctgagtgtgtacaaatatcttgacataatgcagttttatttttatcattctggtaaaaaaacaaaaaatagaagcaaaacacattgtattgccattattttgtatttggtaaaggttaatctaggaagttaccaactgtttaatgctatatgtattgtatacttgtattttcaggatattttattttttttgccatacagataaaatttgtaaggttgcccctttgtggcactggtgtgtaaaatacacagactatcactaaaataatagttatatatacatacaggtgtatacttatgcatgcatacataaatccttagtatagaaaaattgcataaagaatagcaatctttaataaacctttttattacattgtgatttagcagttatgctaaaatatgtacttatgctttagtagtttgtttggtcccctctagtatgtgtcactgagaaattttttaaagacatggtagatcgtgtttagaggctttgtatgtgtgtcattttaataagcaagaagatatatttagattagaaatggtttggtctgcctttgaatattgtttattttactttactagttgagacattaaaggaagctgggcaatgcctattttatttctttgttggatattttagttcatacaaagcagagtacttctttagggctggttaattggttcaaataatttttaatttcctttctagtatcttctcaagttggaaaaatatacatacagtcctccttcaccttactctgtatttatattacccataactagcaagaagttcttgttctagattttttgtttgtttagttataacagagtaacataccatttaattacaatttttagccagaaaagtccccactattttactaacttgttaaaagatatctatataattgcctggccttatatttttcagtagattagaccgtgccaatcacaatcctgggtggatttgtgtaagtcacttaacctctgtgtgcctaaacaagttgtgcttttttaaaaggagttatgtttgggcaaagcctttgtcttcaagcagaatgtcacagaaggcagctactttataagccccaatgggccatggagaccactgtcagaaatgggatattagtctagagagaaggtgatctattcccacatgtcatttctaatgttgagtttccatgactgaacaaagagaatatatttattcagcttcacttgcagatcactagtgaatgtgagatttagagctcattgagtatattgcttcaaggtacaaacccaggatgatgatgttgtcaccactgtctcttaattttgaataatagtttcctttaataggagtattagagataagaaagtatatgaaaatatactggaaatattggattcttggagaaaactgttcagtcacagatatattcttgcctagcagtgaagtgcctttattttcagcatagcaaataaatattagacctgttccaatttgatctacaatttttttctgtgtttttcaccagattgtactcctaaaacttaacaggccatcacaagcaattgtcttttgtttacaagattgatttaatatgagaggatacaaaatgtcatcgttatcctctcttatgaacaactgtagtcaaaataaggtggcacaatttaattgttttgtatcagaaatacactgacccaccttttattgagtcctgccacatgttaggtaccgtgctctgctgtggagacagagcagtgaccccaaggagctcacggtccctgaaggaggtgctagagaagagacttagcttctgatactgccaatttaatgtgagaacatggggtatactgcatcatttccattttcatcaataacatatgttttatgcaccttctttacctgaaacttactaagaatctaccagtaaacaaacatcctgtctttttgcaagtatgaatcacttaacctgctgatagttgaagaacactttaggagttttgtattcttgtatatagtttattttttccatgtgctagccaggtaaagattacacagttcttctggactgttaaattgtgcatggttttggaccccttctgctctactacagagagtgaagaagaaagtattaaagctcactttaccattccatatacttactaaaagcctgtgtaaacatgtcttaatgaatgttgttgaaagcaatgtaaatagttgaaaatataaatttatattacagtttaagaaaaccttatgaggcatcactagccactgttaatatctatttgtattcttataccttttcaatatatttgaacaaatatagtttctggcactatttttatactaggaaaaggagttactatgtatattatgcttagcttttaaggcattttaaataaccatgaatgttgatttcattactttcctttcctccatcacgagagtcatttcagatgactctttcatgacaaaatcactttaaaggaacacttacctccgattcctgtataaagtcatgagatggtcaaggtggttttccattgtgcaaattcttcacctgtcagtggtttcctcattttgccatgctttgtaaaaataaaaagaatgatcaagtaggtatgaaaaaaaaaaaaaaaaaa

SEQ ID NO: 28 - protein, 643 aa, Homo sapiens
MERAGPSFGQQRQQQQPQQQKQQQRDQDSVEAWLDDHWDFTFSYFVRKATREMVNAWFAERVHTIPVCKEGIRGHTESCSCPLQQSPRADNSAPGTPTRKISASEFDRPLRPIVVKDSEGTVSFLSDSEKKEQMPLTPPRFDHDEGDQCSRLLELVKDISSHLDVTALCHKIFLHIHGLISADRYSLFLVCEDSSNDKFLISRLFDVAEGSTLEEVSNNCIRLEWNKGIVGHVAALGEPLNIKDAYEDPRFNAEVDQITGYKTQSILCMPIKNHREEVVGVAQAINKKSGNGGTFTEKDEKDFAAYLAFCGIVLHNAQLYETSLLENKRNQVLLDLASLIFEEQQSLEVILKKIAATIISFMQVQKCTIFIVDEDCSDSFSSVFHMECEELEKSSDTLTREHDANKINYMYAQYVKNTMEPLNIPDVSKDKRFPWTTENTGNVNQQCIRSLLCTPIKNGKKNKVIGVCQLVNKMEENTGKVKPFNRNDEQFLEAFVIFCGLGIQNTQMYEAVERAMAKQMVTLEVLSYHASAAEEETRELQSLAAAVVPSAQTLKITDFSFSDFELSDLETALCTIRMFTDLNLVQNFQMKHEVLCRWILSVKKNYRKNVAYHNWRHAFNTAQCMFAALKAGKIQILTSVGID

SEQ ID NO: 29 - DNA, 2469 bp, Homo sapiens
atggtcaatgcatggtttgctgagagagttcacaccatccctgtgtgcaaggaaggtatcagaggccacaccgaatcttgctcttgtcccttgcagcagagtcctcgtgcagataacagtgcccctggaacaccaaccaggaaaatctctgcctctgaatttgaccggcctcttagacccattgttgtcaaggattctgagggaactgtgagcttcctctctgactcagaaaagaaggaacagatgcctctaacccctccaaggtttgatcatgatgaaggggaccagtgctcaagactcttggaattagtgaaggatatttctagtcatttggatgtcacagccttatgtcacaaaattttcttgcatatccatggactgatatctgctgaccgctattccctgttccttgtctgtgaagacagctccaatgacaagtttcttatcagccgcctctttgatgttgctgaaggttcaacactggaagaagtttcaaataactgtatccgcttagaatggaacaaaggcattgtgggacatgtggcagcgcttggtgagcccttgaacatcaaagatgcatatgaggatcctcggttcaatgcagaagttgaccaaattacaggctacaagacacaaagcattctttgtatgccaattaagaatcatagggaagaggttgttggtgtagcccaggccatcaacaagaaatcaggaaacggtgggacatttactgaaaaagatgaaaaggactttgctgcttatttggcattttgtggtattgttcttcataatgctcagctctatgagacttcactgctggagaacaagagaaatcaggtgctgcttgaccttgctagtttaatttttgaagaacaacaatcattagaagtaattttgaagaaaatagctgccactattatctctttcatgcaagtgcagaaatgcaccattttcatagtggatgaagattgctccgattctttttctagtgtgtttcacatggagtgtgaggaattagaaaaatcatctgatacattaacaagggaacatgatgcaaacaaaatcaattacatgtatgctcagtatgtcaaaaatactatggaaccacttaatatcccagatgtcagtaaggataaaagatttccctggacaactgaaaatacaggaaatgtaaaccagcagtgcattagaagtttgctttgtacacctataaaaaatggaaagaagaataaagttataggggtttgccaacttgttaataagatggaggagaatactggcaaggttaagcctttcaaccgaaatgacgaacagtttctggaagcttttgtcatcttttgtggcttggggatccagaacacgcagatgtatgaagcagtggagagagccatggccaagcaaatggtcacattggaggttctgtcgtatcatgcttcagcagcagaggaagaaacaagagagctacagtcgttagcggctgctgtggtgccatctgcccagacccttaaaattactgactttagcttcagtgactttgagctgtctgatctggaaacagcactgtgtacaattcggatgtttactgacctcaaccttgtgcagaacttccagatgaaacatgaggttctttgcagatggattttaagtgttaagaagaattatcggaagaatgttgcctatcataattggagacatgcctttaatacagctcagtgcatgtttgctgctctaaaagcaggcaaaattcagaacaagctgactgacctggagatacttgcattgctgattgctgcactaagccacgatttggatcaccgtggtgtgaataactcttacatacagcgaagtgaacatccacttgcccagctttactgccattcaatcatggaacaccatcattttgaccagtgcctgatgattcttaatagtccaggcaatcagattctcagtggcctctccattgaagaatataagaccacgttgaaaataatcaagcaagctattttagctacagacctagcactgtacattaagaggcgaggagaattttttgaacttataagaaaaaatcaattcaatttggaagatcctcatcaaaaggagttgtttttggcaatgctgatgacagcttgtgatctttctgcaattacaaaaccctggcctattcaacaacggatagcagaacttgtagcaactgaattttttgatcaaggagacagagagagaaaagaactcaacatagaacccactgatctaatgaacagggagaagaaaaacaaaatcccaagtatgcaagttgggttcatagatgccatctgcttgcaactgtatgaggccctgacccacgtgtcagaggactgtttccctttgctagatggctgcagaaagaacaggcagaaatggcaggcccttgcagaacagcaggagaagatgctgattaatggggaaagcggccaggccaagcggaac

SEQ ID NO: 30 - protein, 187 aa, Homo sapiens
MVGSLNCIVAVSQNMGIGKNGDLPWPPLRNEFRYFQRMTTTSSVEGKQNLVIMGKKTWFSIPEKNRPLKGRINLVLSRELKEPPQGAHFLSRSLDDALKLTEQPELANKVDMVWIVGGSSVYKEAMNHPGHLKLFVTRIMQDFESDTFFPEIDLEKYKLLPEYPGVLSDVQEEKGIKYKFEVYEKND

SEQ ID NO: 31 - DNA, 561 bp, Homo sapiens
atggttggttcgctaaactgcatcgtcgctgtgtcccagaacatgggcatcggcaagaacggggacctgccctggccaccgctcaggaatgaattcagatatttccagagaatgaccacaacctcttcagtagaaggtaaacagaatctggtgattatgggtaagaagacctggttctccattcctgagaagaatcgacctttaaagggtagaattaatttagttctcagcagagaactcaaggaacctccacaaggagctcattttctttccagaagtctagatgatgccttaaaacttactgaacaaccagaattagcaaataaagtagacatggtctggatagttggtggcagttctgtttataaggaagccatgaatcacccaggccatcttaaactatttgtgacaaggatcatgcaagactttgaaagtgacacgttttttccagaaattgatttggagaaatataaacttctgccagaatacccaggtgttctctctgatgtccaggaggagaaaggcattaagtacaaatttgaagtatatgagaagaatgat

SEQ ID NO: 32 - protein, 97 aa, Artificial Sequence [sequence omitted]

SEQ ID NO: 33 - protein, 187 aa, Homo sapiens
MFLLLNCIVAVSQNMGIGKNGDLPRPPLRNEFRYFQRMTTTSSVEGKQNLVIMGRKTWFSIPEKNRPLKDRINLVLSRELKEPPQGAHFLARSLDDALKLTERPELANKVDMIWIVGGSSVYKEAMNHLGHLKLFVTRIMQDFESDTFFSEIDLEKYKLLPEYPGVLSDVQEGKHIKYKFEVCEKDD

SEQ ID NO: 34 - DNA, 554 bp, Homo sapiens
atgtttcttttgctaaactgcatcgtcgctgtgtcccaaaacatgggcatcggcaagaacggggacctgcccaggccgccgctcaggaatgaattcaggtatttccagagaatgaccacaacttcttcagtagagggtaaacagaatctggtgattatgggtaggaagacctggttctccattcctgagaagaatcgacctttaaaggatagaattaatttagttctcagcagagaactcaaggaacctccacaaggagctcattttcttgccagaagtttggatgatgccttaaaacttactgaacgaccagaattagcaaataaagtagacatgatttggatagttggtggcagttctgtttataaggaagccatgaatcacctaggccatcttaaactatttgtgacaaggatcatgcaggactttgaaagtgacacgtttttttcagaaattgacttggagaaatataaacttctgcctgaatacccaggtgttctctctgatgtccaggaggggaaacacatcaagtacaaatttgaagtatgtgagaa

SEQ ID NO: 35 - protein, 159 aa, E.coli [sequence omitted]

SEQ ID NO: 36 - DNA, 477 bp, Homo sapiens
atgatctctctgattgcggcgctggcagttgaccgcgttattggcatggaaaacgcgatgccatggaacctcccggctgacctggcgtggttcaaacgtaacaccctgaacaaacctgtgatcatgggtcgtcacacctgggaatctattggccgtcctctcccgggtcgtaaaaacatcattctgtcttctcagccaggcaccgacgaccgtgttacctgggttaaaagcgttgacgaagcgattgctgcgtgcggtgatgttcctgaaattatggtgatcggcggtggccgtgtttacgaacagttcctgccgaaagcgcagaaactgtacctgacccacatcgacgcggaagttgaaggtgacacccacttcccggactacgaaccggatgattgggagagcgtattctccgaattccatgatgcggatgcgcaaaactctcattcttactgttttgaaatcctggaacgtcgt

SEQ ID NO: 37 - protein, 108 aa, Homo sapiens
MGVQVETISPGDGRTFPKRGQTCVVHYTGMLEDGKKFDSSRDRNKPFKFMLGKQEVIRGWEEGVAQMSVGQRAKLTISPDYAYGATGHPGIIPPHATLVFDVELLKLE

SEQ ID NO: 38 - protein, 505 aa, Homo sapiens
MGETLGDSPIDPESDSFTDTLSANISQEMTMVDTEMPFWPTNFGISSVDLSVMEDHSHSFDIKPFTTVDFSSISTPHYEDIPFTRTDPVVADYKYDLKLQEYQSAIKVEPASPPYYSEKTQLYNKPHEEPSNSLMAIECRVCGDKASGFHYGVHACEGCKGFFRRTIRLKLIYDRCDLNCRIHKKSRNKCQYCRFQKCLAVGMSHNAIRFGRMPQAEKEKLLAEISSDIDQLNPESADLRALAKHLYDSYIKSFPLTKAKARAILTGKTTDKSPFVIYDMNSLMMGEDKIKFKHITPLQEQSKEVAIRIFQGCQFRSVEAVQEITEYAKSIPGFVNLDLNDQVTLLKYGVHEIIYTMLASLMNKDGVLISEGQGFMTREFLKSLRKPFGDFMEPKFEFAVKFNALELDDSDLAIFIAVIILSGDRPGLLNVKPIEDIQDNLLQALELQLKLNHPESSQLFAKLLQKMTDLRQIVTEHVQLLQVIKKTETDMSLHPLLQEIYKDLY

SEQ ID NO: 39 - protein, 260 aa, Homo sapiens
MSHHWGYGKHNGPEHWHKDFPIAKGERQSPVDIDTHTAKYDPSLKPLSVSYDQATSLRILNNGHAFNVEFDDSQDKAVLKGGPLDGTYRLIQFHFHWGSLDGQGSEHTVDKKKYAAELHLVHWNTKYGDFGKAVQQPDGLAVLGIFLKVGSAKPGLQKVVDVLDSIKTKGKSADFTNFDPRGLLPESLDYWTYPGSLTTPPLLECVTWIVLKEPISVSSEQVLKFRKLNFNGEGEPEELMVDNWRPAQPLKNRQIKASFK

SEQ ID NO: 40 - protein, 231 aa, Homo sapiens
MAGKKVLIVYAHQEPKSFNGSLKNVAVDELSRQGCTVTVSDLYAMNLEPRATDKDITGTLSNPEVFNYGVETHEAYKQRSLASDITDEQKKVREADLVIFQFPLYWFSVPAILKGWMDRVLCQGFAFDIPGFYDSGLLQGKLALLSVTTGGTAEMYTKTGVNGDSRYFLWPLQHGTLHFCGFKVLAPQISFAPEIASEEERKGMVAAWSQRLQTIWKEEPIPCTAHWHFGQ

SEQ ID NO: 41 - protein, 766 aa, Homo sapiens
MKTPWKVLLGLLGAAALVTIITVPVVLLNKGTDDATADSRKTYTLTDYLKNTYRLKLYSLRWISDHEYLYKQENNILVFNAEYGNSSVFLENSTFDEFGHSINDYSISPDGQFILLEYNYVKQWRHSYTASYDIYDLNKRQLITEERIPNNTQWVTWSPVGHKLAYVWNNDIYVKIEPNLPSYRITWTGKEDIIYNGITDWVYEEEVFSAYSALWWSPNGTFLAYAQFNDTEVPLIEYSFYSDESLQYPKTVRVPYPKAGAVNPTVKFFVVNTDSLSSVTNATSIQITAPASMLIGDHYLCDVTWATQERISLQWLRRIQNYSVMDICDYDESSGRWNCLVARQHIEMSTTGWVGRFRPSEPHFTLDGNSFYKIISNEEGYRHICYFQIDKKDCTFITKGTWEVIGIEALTSDYLYYISNEYKGMPGGRNLYKIQLSDYTKVTCLSCELNPERCQYYSVSFSKEAKYYQLRCSGPGLPLYTLHSSVNDKGLRVLEDNSALDKMLQNVQMPSKKLDFIILNETKFWYQMILPPHFDKSKKYPLLLDVYAGPCSQKADTVFRLNWATYLASTENIIVASFDGRGSGYQGDKIMHAINRRLGTFEVEDQIEAARQFSKMGFVDNKRIAIWGWSYGGYVTSMVLGSGSGVFKCGIAVAPVSRWEYYDSVYTERYMGLPTPEDNLDHYRNSTVMSRAENFKQVEYLLIHGTADDNVHFQQSAQISKALVDVGVDFQAMWYTDEDHGIASSTAHQHIYTHMSHFIKQCFSLP

SEQ ID NO: 42 - protein, 595 aa, Homo sapiens [sequence omitted]

SEQ ID NO: 43 - protein, 326 aa, Artificial Sequence
  Description of Artificial Sequence: Synthetic Destabilizing Domain (DD)
EETRELQSLAAAVVPSAQTLKITDFSFSDFELSDLETALCTIRMFTDLNLVQNFQMKHEVLCRWILSVKKNYRKNVAYHNWRHAFNTAQCMFAALKAGKIQNKLTDLEILALLIAALSHDLDHRGVNNSYIQRSEHPLAQLYCHSIMEHHHFDQCLMILNSPGNQILSGLSIEEYKTTLKIIKQAILATDLALYIKRRGEFFELIRKNQFNLEDPHQKELFLAMLMTACDLSAITKPWPIQQRIAELVATEFFDQGDRERKELNIEPTDLMNREKKNKIPSMQVGFIDAICLQLYEALTHVSEDCFPLLDGCRKNRQKWQALAEQQ

SEQ ID NO: 44 - DNA, 978 bp, Homo sapiens
gaagaaacaagagagctacagtcgttagcggctgctgtggtgccatctgcccagacccttaaaattactgactttagcttcagtgactttgagctgtctgatctggaaacagcactgtgtacaattcggatgtttactgacctcaaccttgtgcagaacttccagatgaaacatgaggttctttgcagatggattttaagtgttaagaagaattatcggaagaatgttgcctatcataattggagacatgcctttaatacagctcagtgcatgtttgctgctctaaaagcaggcaaaattcagaacaagctgactgacctggagatacttgcattgctgattgctgcactaagccacgatttggatcaccgtggtgtgaataactcttacatacagcgaagtgaacatccacttgcccagctttactgccattcaatcatggaacaccatcattttgaccagtgcctgatgattcttaatagtccaggcaatcagattctcagtggcctctccattgaagaatataagaccacgttgaaaataatcaagcaagctattttagctacagacctagcactgtacattaagaggcgaggagaattttttgaacttataagaaaaaatcaattcaatttggaagatcctcatcaaaaggagttgtttttggcaatgctgatgacagcttgtgatctttctgcaattacaaaaccctggcctattcaacaacggatagcagaacttgtagcaactgaattttttgatcaaggagacagagagagaaaagaactcaacatagaacccactgatctaatgaacagggagaagaaaaacaaaatcccaagtatgcaagttgggttcatagatgccatctgcttgcaactgtatgaggccctgacccacgtgtcagaggactgtttccctttgctagatggctgcagaaagaacaggcagaaatggcaggcccttgcagaacagcag

SEQ ID NO: 45 - protein, 296 aa, Artificial Sequence
  Description of Artificial Sequence: Synthetic Destabilizing Domain (DD)
EETRELQSLAAAVVPSAQTLKITDFSFSDFELSDLETALCTIRMFTDLNLVQNFQMKHEVLCRWILSVKKNYRKNVAYHNWRHAFNTAQCMFAALKAGKIQNKLTDLEILALLIAALSHDLDHRGVNNSYIQRSEHPLAQLYCHSIMEHHHFDQCLMILNSPGNQILSGLSIEEYKTTLKIIKQAILATDLALYIKRRGEFFELIRKNQFNLEDPHQKELFLAMLMTACDLSAITKPWPIQQRIAELVATEFFDQGDRERKELNIEPTDLMNREKKNKIPSMQVGFIDAICLQLYE

SEQ ID NO: 46 - protein, 302 aa, Artificial Sequence
  Description of Artificial Sequence: Synthetic Destabilizing Domain (DD)
EETRELQSLAAAVVPSAQTLKITDFSFSDFELSDLETALCTIRMFTDLNLVQNFQMKHEVLCRWILSVKKNYRKNVAYHNWRHAFNTAQCMFAALKAGKIQNKLTDLEILALLIAALSHDLDHRGVNNSYIQRSEHPLAQLYCHSIMEHHHFDQCLMILNSPGNQILSGLSIEEYKTTLKIIKQAILATDLALYIKRRGEFFELIRKNQFNLEDPHQKELFLAMLMTACDLSAITKPWPIQQRIAELVATEFFDQGDRERKELNIEPTDLMNREKKNKIPSMQVGFIDAICLQLYEALTHVS

SEQ ID NO: 47 - protein, 294 aa, Artificial Sequence
  Description of Artificial Sequence: Synthetic Destabilizing Domain (DD)
SDLETALCTIRMFTDLNLVQNFQMKHEVLCRWILSVKKNYRKNVAYHNWRHAFNTAQCMFAALKAGKIQNKLTDLEILALLIAALSHDLDHRGVNNSYIQRSEHPLAQLYCHSIMEHHHFDQCLMILNSPGNQILSGLSIEEYKTTLKIIKQAILATDLALYIKRRGEFFELIRKNQFNLEDPHQKELFLAMLMTACDLSAITKPWPIQQRIAELVATEFFDQGDRERKELNIEPTDLMNREKKNKIPSMQVGFIDAICLQLYEALTHVSEDCFPLLDGCRKNRQKWQALAEQQ

SEQ ID NO: 48 - protein, 247 aa, Artificial Sequence
  Description of Artificial Sequence: Synthetic Destabilizing Domain (DD)
MKHEVLCRWILSVKKNYRKNVAYHNWRHAFNTAQCMFAALKAGKIQNKLTDLEILALLIAALSHDLDHRGVNNSYIQRSEHPLAQLYCHSIMEHHHFDQCLMILNSPGNQILSGLSIEEYKTTLKIIKQAILATDLALYIKRRGEFFELIRKNQFNLEDPHQKELFLAMLMTACDLSAITKPWPIQQRIAELVATEFFDQGDRERKELNIEPTDLMNREKKNKIPSMQVGFIDAICLQLYEALTHVS

SEQ ID NO: 49 - protein, 271 aa, Artificial Sequence
  Description of Artificial Sequence: Synthetic Destabilizing Domain (DD)
MKHEVLCRWILSVKKNYRKNVAYHNWRHAFNTAQCMFAALKAGKIQNKLTDLEILALLIAALSHDLDHRGVNNSYIQRSEHPLAQLYCHSIMEHHHFDQCLMILNSPGNQILSGLSIEEYKTTLKIIKQAILATDLALYIKRRGEFFELIRKNQFNLEDPHQKELFLAMLMTACDLSAITKPWPIQQRIAELVATEFFDQGDRERKELNIEPTDLMNREKKNKIPSMQVGFIDAICLQLYEALTHVSEDCFPLLDGCRKNRQKWQALAEQQ

SEQ ID NO: 50 - protein, 323 aa, Artificial Sequence
  Description of Artificial Sequence: Synthetic Destabilizing Domain (DD)
FKIPVSCLITFAEALEVGYSKYKNPYHNLIHAADVTQTVHYIMLHTGIMHWLTELEILAMVFAAAIHDYEHTGTTNNFHIQTRSDVAILYNDRSVLENHHVSAAYRLMQEEEMNILINLSKDDWRDLRNLVIEMVLSTDMSGHFQQIKNIRNSLQQPEGIDRAKTMSLILHAADISHPAKSWKLHYRWTMALMEEFFLQGDKEAELGLPFSPLCDRKSTMVAQSQIGFIDFIVEPTFSLLTDSTEKIVIPLIEEASKAETSSYVASSSTTIVGLHIADALRRSNTKGSMSDGSYSPDYSLAAVDLKSFKNNLVDIIQQNKERW

SEQ ID NO: 51 - protein, 300 aa, Artificial Sequence
  Description of Artificial Sequence: Synthetic Destabilizing Domain (DD)
FKIPTVFLMSFLDALETGYGKYKNPYHNQIHAADVTQTVHCFLLRTGMVHCLSEIELLAIIFAAAIHDYEHTGTTNSFHIQTKSECAIVYNDRSVLENHHISSVFRLMQDDEMNIFINLTKDEFVELRALVIEMVLATDMSCHFQQVKTMKTALQQLERIDKPKALSLLLHAADISHPTKQWLVHSRWTKALMEEFFRQGDKEAELGLPFSPLCDRTSTLVAQSQIGFIDFIVEPTFSVLTDVAEKSVQPLADEDSKSKNQPSFQWRQPSLDVEVGDPNPDVVSFRSTWVKRIQENKQKW

SEQ ID NO: 52 - protein, 320 aa, Artificial Sequence
  Description of Artificial Sequence: Synthetic Destabilizing Domain (DD)
FKIPISALVSFVEALEVGYSKHKNPYHNLMHAADVTQTVHYLLYKTGVANWLTELEIFAIIFSAAIHDYEHTGTTNNFHIQTRSDPAILYNDRSVLENHHLSAAYRLLQDDEEMNILINLSKDDWREFRTLVIEMVMATDMSCHFQQIKAMKTALQQPEAIEKPKALSLMLHTADISHPAKAWDLHHRWTMSLLEEFFRQGDREAELGLPFSPLCDRKSTMVAQSQVGFIDFIVEPTFTVLTDMTEKIVSPLIDETSQTGGTGQRRSSLNSISSSDAKRSGVKTSGSEGSAPINNSVISVDYKSFKATWTEVVHINRERW

SEQ ID NO: 53 - protein, 259 aa, Artificial Sequence
  Description of Artificial Sequence: Synthetic Destabilizing Domain (DD)
KIDCPTLARFCLMVKKGYRDPPYHNWMHAFSVSHFCYLLYKNLELTNYLEDIEIFALFISCMCHDLDHRGTNNSFQVASKSVLAALYSSEGSVMERHHFAQAIAILNTHGCNIFDHFSRKDYQRMLDLMRDIILATDLAHHLRIFKDLQKMAEVGYDRNNKQHHRLLLCLLMTSCDLSDQTKGWKTTRKIAELIYKEFFSQGDLEKAMGNRPMEMMDREKAYIPELQISFMEHIAMPIYKLLQDLFPKAAELYERVASN

SEQ ID NO: 54 - protein, 359 aa, Artificial Sequence
  Description of Artificial Sequence: Synthetic Destabilizing Domain (DD)
FKIPIREFMNYFHALEIGYRDIPYHNRIHATDVLHAVWYLTTQPIPGLSTVINDHGSTSDSDSDSGFTHGHMGYVFSKTYNVTDDKYGCLSGNIPALELMALYVAAAMHDYDHPGRTNAFLVATSAPQAVLYNDRSVLENHHAAAAWNLFMSRPEYNFLINLDHVEFKHFRFLVIEAILATDLKKHFDFVAKFNGKVNDDVGIDWTNENDRLLVCQMCIKLADINGPAKCKELHLQWTDGIVNEFYEQGDEEASLGLPISPFMDRSAPQLANLQESFISHIVGPLCNSYDSAGLMPGKWVEDSDESGDTDDPEEEEEEAPAPNEEETCENNESPKKKTFKRRKIYCQITQHLLQNHKMW

SEQ ID NO: 55 - protein, 360 aa, Artificial Sequence
  Description of Artificial Sequence: Synthetic Destabilizing Domain (DD)
FKIPTQQFMNYFRALENGYRDIPYHNRIHATDVLHAVWYLTTRPVPGLQQIHNGCGTGNETDSDGRINHGRIAYISSKSCSNPDESYGCLSSNIPALELMALYVAAAMHDYDHPGRTNAFLVATNAPQAVLYNDRSVLENHHAASAWNLYLSRPEYNFLLHLDHVEFKRFRFLVIEAILATDLKKHFDFLAEFNAKANDVNSNGIEWSNENDRLLVCQVCIKLADINGPAKVRDLHLKWTEGIVNEFYEQGDEEANLGLPISPFMDRSSPQLAKLQESFITHIVGPLCNSYDAAGLLPGQWLEAEEDNDTESGDDEDGEELDTEDEEMENNLNPKPPRRKSRRRIFCQLMHHLTENHKIW

SEQ ID NO: 56 - protein, 394 aa, Artificial Sequence
  Description of Artificial Sequence: Synthetic Destabilizing Domain (DD)
QPMSQITGLKKLMHSNSLNNSNIPRFGVKTDQEELLAQELENLNKWGLNIFCVSDYAGGRSLTCIMYMIFQERDLLKKFRIPVDTMVTYMLTLEDHYHADVAYHNSLHAADVLQSTHVLLATPALDAVFTDLEILAALFAAAIHDVDHPGVSNQFLINTNSELALMYNDESVLENHHLAVGFKLLQEDNCDIFQNLSKRQRQSLRKMVIDMVLATDMSKHMTLLADLKTMVETKKVTSSGVLLLDNYSDRIQVLRNMVHCADLSNPTKPLELYRQWTDRIMAEFFQQGDRERERGMEISPMCDKHTASVEKSQVGFIDYIVHPLWETWADLVHPDAQEILDTLEDNRDWYYSAIRQSPSPPPEEESRGPGHPPLPDKFQFELTLEEEEEEEISM

SEQ ID NO: 57 - protein, 353 aa, Artificial Sequence
  Description of Artificial Sequence: Synthetic Destabilizing Domain (DD)
VNTENEDHLAKELEDLNKWGLNIFNVAGYSHNRPLTCIMYAIFQERDLLKTFRISSDTFITYMMTLEDHYHSDVAYHNSLHAADVAQSTHVLLSTPALDAVFTDLEILAAIFAAAIHDVDHPGVSNQFLINTNSELALMYNDESVLENHHLAVGFKLLQEEHCDIFMNLTKKQRQTLRKMVIDMVLATDMSKHMSLLADLKTMVETKKVTSSGVLLLDNYTDRIQVLRNMVHCADLSNPTKSLELYRQWTDRIMEEFFQQGDKERERGMEISPMCDKHTASVEKSQVGFIDYIVHPLWETWADLVQPDAQDILDTLEDNRNWYQSMIPQSPSPPLDEQNRDCQGLMEKFQFEL

SEQ ID NO: 58 - protein, 366 aa, Artificial Sequence
  Description of Artificial Sequence: Synthetic Destabilizing Domain (DD)
VQTDQEEQLAKELEDTNKWGLDVFKVAELSGNRPLTAIIFSIFQERDLLKTFQIPADTLATYLLMLEGHYHANVAYHNSLHAADVAQSTHVLLATPALEAVFTDLEILAALFASAIHDVDHPGVSNQFLINTNSELALMYNDASVLENHHLAVGFKLLQAENCDIFQNLSAKQRLSLRRMVIDMVLATDMSKHMNLLADLKTMVETKKVTSLGVLLLDNYSDRIQVLQNLVHCADLSNPTKPLPLYRQWTDRIMAEFFQQGDRERESGLDISPMCDKHTASVEKSQVGFIDYIAHPLWETWADLVHPDAQDLLDTLEDNREWYQSKIPRSPSDLTNPERDGPDRFQFELTLEEAEEEDEEEEEEGE

SEQ ID NO: 59 - protein, 366 aa, Artificial Sequence
  Description of Artificial Sequence: Synthetic Destabilizing Domain (DD)
VKTEQEDVLAKELEDVNKWGLHVFRIAELSGNRPLTVIMHTIFQERDLLKTFKIPVDTLITYLMTLEDHYHADVAYHNNIHAADVVQSTHVLLSTPALEAVFTDLEILAAIFASAIHDVDHPGVSNQFLINTNSELALMYNDSSVLENHHLAVGFKLLQEENCDIFQNLTKKQRQSLRKMVIDIVLATDMSKHMNLLADLKTMVETKKVTSSGVLLLDNYSDRIQVLQNMVHCADLSNPTKPLQLYRQWTDRIMEEFFRQGDRERERGMEISPMCDKHNASVEKSQVGFIDYIVHPLWETWADLVHPDAQDILDTLEDNREWYQSTIPQSPSPAPDDPEEGRQGQTEKFQFELTLEEDGESDTEKD

SEQ ID NO: 60 - protein, 337 aa, Artificial Sequence
  Description of Artificial Sequence: Synthetic Destabilizing Domain (DD)
EEEELAEILQAELPDADKYEINKFHFSDLPLTELELVKCGIQMYYELKVVDKFHIPQEALVRFMYSLSKGYRKITYHNWRHGFNVGQTMFSLLVTGKLKRYFTDLEALAMVTAAFCHDIDHRGTNNLYQMKSQNPLAKLHGSSILERHHLEFGKTLLRDESLNIFQNLNRRQHEHAIHMMDIAIIATDLALYFKKRTMFQKIVDQSKTYESEQEWTQYMMLEQTRKEIVMAMMMTACDLSAITKPWEVQSQVALLVAAEFWEQGDLERTVLQQNPIPMMDRNKADELPKLQVGFIDFVCTFVYKEFSRFHEEITPMLDGITNNRKEWKALADEYDAK

SEQ ID NO: 61 - protein, 341 aa, Artificial Sequence
  Description of Artificial Sequence: Synthetic Destabilizing Domain (DD)
PADCDEDELGEILKEELPGPTTFDIYEFHFSDLECTELDLVKCGIQMYYELGVVRKFQIPQEVLVRFLFSISKGYRRITYHNWRHGFNVAQTMFTLLMTGKLKSYYTDLEAFAMVTAGLCHDIDHRGTNNLYQMKSQNPLAKLHGSSILERHHLEFGKFLLSEETLNIYQNLNRRQHEHVIHLMDIAIIATDLALYFKKRAMFQKIVDESKNYQDKKSWVEYLSLETTRKEIVMAMMMTACDLSAITKPWEVQSKVALLVAAEFWEQGDLERTVLDQQPIPMMDRNKAAELPKLQVGFIDFVCTFVYKEFSRFHEEILPMFDRLQNNRKEWKALADEYEAK

SEQ ID NO: 62 - protein, 340 aa, Artificial Sequence
  Description of Artificial Sequence: Synthetic Destabilizing Domain (DD)
DDCEEKQLVAILKEDLPDPRSAELYEFRFSDFPLTEHGLIKCGIRLFFEINVVEKFKVPVEVLTRWMYTVRKGYRAVTYHNWRHGFNVGQTMFTLLMTGRLKKYYTDLEAFAMLAAAFCHDIDHRGTNNLYQMKSTSPLARLHGSSILERHHLEYSKTLLQDESLNIFQNLNKRQFETVIHLFEVAIIATDLALYFKKRTMFQKIVDACEQMQTEEEAIKYVTVDPTKKEIIMAMMMTACDLSAITKPWEVQSQVALMVANEFWEQGDLERTVLQQQPIPMMDRNKRDELPKLQVGFIDFVCTFVYKEFSRFHKEITPMLSGLQNNRVEWKSLADEYDAK

SEQ ID NO: 63 - protein, 265 aa, Artificial Sequence
  Description of Artificial Sequence: Synthetic Destabilizing Domain (DD)
FHLDMMKLRRFLVMIQEDYHSQNPYHNAVHAADVTQAMHCYLKEPKLANSVTPWDILLSLIAAATHDLDHPGVNQPFLIKTNHYLATLYKNTSVLENHHWRSAVGLLRESGLFSHLPLESRQQMETQIGALILATDISRQNEYLSLFRSHLDRGDLCLEDTRHRHLVLQMALKCADICNPCRTWELSKQWSEKVTEEFFHQGDIEKKYHLGVSPLCDRHTESIANIQIGFMTYLVEPLFTEWARFSNTRLSQTMLGHVGLNKASW

SEQ ID NO: 64 - protein, 239 aa, Artificial Sequence
  Description of Artificial Sequence: Synthetic Destabilizing Domain (DD)
YHNAVHAADVTQAMHCYLKEPKLASFLTPLDIMLGLLAAAAHDVDHPGVNQPFLIKTNHHLANLYQNMSVLENHHWRSTIGMLRESRLLAHLPKEMTQDIEQQLGSLILATDINRQNEFLTRLKAHLHNKDLRLEDAQDRHFMLQIALKCADICNPCRIWEMSKQWSERVCEEFYRQGELEQKFELEISPLCNQQKDSIPSIQIGFMSYIVEPLFREWAHFTGNSTLSENMLGHLAHNK

SEQ ID NO: 65 - protein, 283 aa, Artificial Sequence
  Description of Artificial Sequence: Synthetic Destabilizing Domain (DD)
LHCSESTLRSWLQIIEANYHSSNPYHNSTHSADVLHATAYFLSKERIKETLDPIDEVAALIAATIHDVDHPGRTNSFLCNAGSELAILYNDTAVLESHHAALAFQLTTGDDKCNIFKNMERNDYRTLRQGIIDMVLATEMTKHFEHVNKFVNSINKPLATLEENGETDKNQEVINTMLRTPENRTLIKRMLIKCADVSNPCRPLQYCIEWAARISEEYFSQTDEEKQQGLPVVMPVFDRNTCSIPKSQISFIDYFITDMFDAWDAFVDLPDLMQHLDNNFKYW

SEQ ID NO: 66 - protein, 279 aa, Artificial Sequence
  Description of Artificial Sequence: Synthetic Destabilizing Domain (DD)
LNCSETTLRAWFQVIEANYHSSNAYHNSTHAADVLHATAFFLGKERVKGSLDQLDEVAALIAATVHDVDHPGRTNSFLCNAGSELAVLYNDTAVLESHHTALAFQLTVKDTKCNIFKNIDRNHYRTLRQAIIDMVLATEMTKHFEHVNKFVNSINKPMAAEIEGSDCECNPAGKNFPENQILIKRMMIKCADVANPCRPLDLCIEWAGRISEEYFAQTDEEKRQGLPVVMPVFDRNTCSIPKSQISFIDYFITDMFDAWDAFAHLPALMQHLADNYKHW

SEQ ID NO: 67 - protein, 263 aa, Artificial Sequence
  Description of Artificial Sequence: Synthetic Destabilizing Domain (DD)
FSINPVTLRRWLFCVHDNYRNNPFHNFRHCFCVAQMMYSMVWLCSLQEKFSQTDILILMTAAICHDLDHPGYNNTYQINARTELAVRYNDISPLENHHCAVAFQILAEPECNIFSNIPPDGFKQIRQGMITLILATDMARHAEIMDSFKEKMENFDYSNEEHMTLLKMILIKCCDISNEVRPMEVAEPWVDCLLEEYFMQSDREKSEGLPVAPFMDRDKVTKATAQIGFIKFVLIPMFETVTKLFPMVEEIMLQPLWESRDRY

SEQ ID NO: 68 - protein, 302 aa, Artificial Sequence
  Description of Artificial Sequence: Synthetic Destabilizing Domain (DD)
CKEIELFHFDIGPFENMWPGIFVYMVHRSCGTSCFELEKLCRFIMSVKKNYRRVPYHNWKHAVTVAHCMYAILQNNHTLFTDLERKGLLIACLCHDLDHRGFSNSYLQKFDHPLAALYSTSTMEQHHFSQTVSILQLEGHNIFSTLSSSEYEQVLEIIRKAIIATDLALYFGNRKQLEEMYQTGSLNLNNQSHRDRVIGLMMTACDLCSVTKLWPVTKLTANDIYAEFWAEGDEMKKLGIQPIPMMDRDKKDEVPQGQLGFYNAVAIPCYTTLTQILPPTEPLLKACRDNLSQWEKVIRGEE

SEQ ID NO: 69 - protein, 266 aa, Artificial Sequence
  Description of Artificial Sequence: Synthetic Destabilizing Domain (DD)
FKIDYETLCRWLLTVRKNYRMVLYHNWRHAFNVCQLMFAMLTTAGFQDILTEVEILAVIVGCLCHDLDHRGTNNAFQAKSGSALAQLYGTSATLEHHHFNHAVMILQSEGHNIFANLSSKEYSDLMQLLKQSILATDLTLYFERRTEFFELVSKGEYDWNIKNHRDIFRSMLMTACDLGAVTKPWEISRQVAELVTSEFFEQGDRERLELKLTPSAIFDRNRKDELPRLQLEWIDSICMPLYQALVKVNVKLKPMLDSVATNRSKW

SEQ ID NO: 70 - protein, 135 aa, Artificial Sequence
  Description of Artificial Sequence: Synthetic Destabilizing Domain (DD)
MGKKTWFSIPEKNRPLKGRINLVLSRELKEPPQGAHFLSRSLDDALKLTEQPELANKVDMVWIVGGSSVYKEAMNHPGHLKLFVTRIMQDFESDTFFPEIDLEKYKLLPEYPGVLSDVQEEKGIKYKFEVYEKND

SEQ ID NO: 71 - DNA, 406 bp, Homo sapiens
gggtaagaagacctggttctccattcctgagaagaatcgacctttaaagggtagaattaatttagttctcagcagagaactcaaggaacctccacaaggagctcattttctttccagaagtctagatgatgccttaaaacttactgaacaaccagaattagcaaataaagtagacatggtctggatagttggtggcagttctgtttataaggaagccatgaatcacccaggccatcttaaactatttgtgacaaggatcatgcaagactttgaaagtgacacgttttttccagaaattgatttggagaaatataaacttctgccagaatacccaggtgttctctctgatgtccaggaggagaaaggcattaagtacaaatttgaagtatatgagaagaatgattaa

SEQ ID NO: 72 - protein, 129 aa, Artificial Sequence
  Description of Artificial Sequence: Synthetic Destabilizing Domain (DD)
MVGSLNCIVAVSQNMGIGKNGDLPWPPLRNEFRYFQRMTTTSSVEGKQNLVIMGKKTWFSIPEKNRPLKGRINLVLSRELKEPPQGAHFLSRSLDDALKLTEQPELANKVDMVWIVGGSSVYKIPRCSL

SEQ ID NO: 73 - DNA, 389 bp, Homo sapiens
atggttggttcgctaaactgcatcgtcgctgtgtcccagaacatgggcatcggcaagaacggggacctgccctggccaccgctcaggaatgaattcagatatttccagagaatgaccacaacctcttcagtagaaggtaaacagaatctggtgattatgggtaagaagacctggttctccattcctgagaagaatcgacctttaaagggtagaattaatttagttctcagcagagaactcaaggaacctccacaaggagctcattttctttccagaagtctagatgatgccttaaaacttactgaacaccagaattagcaaataaagtagacatggtctggatagttggtggcagttctgtttataagatacccaggtgttctctctga

SEQ ID NO: 74 - protein, 107 aa, Artificial Sequence
  Description of Artificial Sequence: Synthetic Destabilizing Domain (DD)
GVQVETISPGDGRTFPKRGQTCVVHYTGMLEDGKKFDSSRDRNKPFKFMLGKQEVIRGWEEGVAQMSVGQRAKLTISPDYAYGATGHPGIIPPHATLVFDVELLKLE

SEQ ID NO: 75 - protein, 189 aa, Artificial Sequence
  Description of Artificial Sequence: Synthetic Destabilizing Domain (DD)
SVEAVQEITEYAKSIPGFVNLDLNDQVTLLKYGVHEIIYTMLASLMNKDGVLISEGQGFMTREFLKSLRKPFGDFMEPKFEFAVKFNALELDDSDLAIFIAVIILSGDRPGLLNVKPIEDIQDNLLQALELQLKLNHPESSQLFAKLLQKMTDLRQIVTEHVQLLQVIKKTETDMSLHPLLQEIYKDLY

SEQ ID NO: 76 - protein, 245 aa, Artificial Sequence
  Description of Artificial Sequence: Synthetic Destabilizing Domain (DD)
SLALSLTADQMVSALLDAEPPILYSEYDPTRPFSEASMMGLLTNLADRELVHMINWAKRVPGFVDLTLHDQVHLLECAWLEILMIGLVWRSMEHPGKLLFAPNLLLDRNQGKCVEGMVEIFDMLLATSSRFRMMNLQGEEFVCLKSIILLNSGVYTFLSSTLKSLEEKDHIHRVLDKITDTLIHLMAKAGLTLQQQHQRLAQLLLILSHIRHMSNKGMEHLYSMKCKNVVPLYDLLLEMLDAHRL

SEQ ID NO: 77 - DNA, 735 bp, Homo sapiens
tcgttggcactttccctgactgccgaccagatggtgtccgcccttctggacgccgagcctccaattctgtactcggagtacgatccgactcgcccgttctccgaagccagcatgatgggcctgttgactaacctggcggaccgcgagttggtgcacatgattaactgggctaagcgggtgccgggcttcgtggacctgactctgcacgaccaagtgcacctcctggaatgcgcctggctggaaatcctcatgatcggcctcgtgtggagatccatggagcatcccggaaagctcctgtttgcacccaacctcctgcttgatcgcaaccagggaaaatgcgtggaagggatggtcgagattttcgacatgctgctcgccacctcttcccggttccggatgatgaatctgcagggagaagagttcgtgtgtctgaagtcaatcatcctgctgaactccggggtctataccttcctgagctcgaccctcaagtcactggaggaaaaagaccacatccatcgcgtgctcgataagatcaccgacacccttatccatctcatggcgaaggctggactgaccctgcaacagcagcaccagaggctggcccagttgctgctgattctgagccacatccggcacatgtcgaacaaggggatggaacacctgtacagcatgaagtgcaagaacgtcgtgcctctgtacgatctgctcctggaaatgctggacgcgcacagactc

SEQ ID NO: 78 - protein, 187 aa, Artificial Sequence
  Description of Artificial Sequence: Synthetic Destabilizing Domain (DD)
MVGSLNCIVAVSQNMGIGKNGDLPWPPLRNEFRYFQRMTTTSSVEGKQNLVIMGKKTWFSIPEKNRPLKGRINLVLSRELKEPPQGAHFLSRSLDDALKLTEQPELANKVDMVWIVGGSSVIKEAMNHPGHLKLFVTRIMQDFESDTFFPEIDLEKYKLLPEYPGVLSDVQEEKGIKYKFEVYEKND

SEQ ID NO: 79 - DNA, 561 bp, Artificial Sequence
  Description of Artificial Sequence: Synthetic Destabilizing Domain (DD)
atggttggttcgctaaactgcatcgtcgctgtgtcccagaacatgggcatcggcaagaacggggacctgccctggccaccgctcaggaatgaattcagatatttccagagaatgaccacaacctcttcagtagaaggtaaacagaatctggtgattatgggtaagaagacctggttctccattcctgagaagaatcgacctttaaagggtagaattaatttagttctcagcagagaactcaaggaacctccacaaggagctcattttctttccagaagtctagatgatgccttaaaacttactgaacaaccagaattagcaaataaagtagacatggtctggatagttggtggcagttctgttattaaggaagccatgaatcacccaggccatcttaaactatttgtgacaaggatcatgcaagactttgaaagtgacacgttttttccagaaattgatttggagaaatataaacttctgccagaatacccaggtgttctctctgatgtccaggaggagaaaggcattaagtacaaatttgaagtatatgagaagaatgat

SEQ ID NO: 80 - protein, 187 aa, Artificial Sequence
  Description of Artificial Sequence: Synthetic Destabilizing Domain (DD)
MVGSLNCIVAVSQNMGIGKNGDLPWPPLRNEFRYFQRMTTTSSVEGKQNLVIMGKKTWFSIPEKNRPLKGRINLVLSRELREPPQGAHFLSRSLDDALKLTEQPELANKVDMVWIVGGSSVYKEAMNHPGHLKLFVTRIMQDFESDTFFPEIDLEKYKLLPEYPGVLSDVQEEKGIKYKFEVYEKND

SEQ ID NO: 81 - DNA, 561 bp, Artificial Sequence
  Description of Artificial Sequence: Synthetic Destabilizing Domain (DD)
atggttggttcgctaaactgcatcgtcgctgtgtcccagaacatgggcatcggcaagaacggggacctgccctggccaccgctcaggaatgaattcagatatttccagagaatgaccacaacctcttcagtagaaggtaaacagaatctggtgattatgggtaagaagacctggttctccattcctgagaagaatcgacctttaaagggtagaattaatttagttctcagcagagaactcagggaacctccacaaggagctcattttctttccagaagtctagatgatgccttaaaacttactgaacaaccagaattagcaaataaagtagacatggtctggatagttggtggcagttctgtttataaggaagccatgaatcacccaggccatcttaaactatttgtgacaaggatcatgcaagactttgaaagtgacacgttttttccagaaattgatttggagaaatataaacttctgccagaatacccaggtgttctctctgatgtccaggaggagaaaggcattaagtacaaatttgaagtatatgagaagaatgat

SEQ ID NO: 82 - protein, 187 aa, Artificial Sequence
  Description of Artificial Sequence: Synthetic Destabilizing Domain (DD)
MVGSLNCIVAVSQNMGIGKNGDLPWPPLRNEFRYFQRMTTTSSVEGKQNLVIMGKKTWSSIPEKNRPLKGRINLVLSRELKEPPQGAHFLSRSLDDALKLTEQPELANKVDMVWIVGGSSVYKEAMNHPGHLKLFVTRIMQDFESDTFFPEIDLEKYKLLPEYPGVLSDVQEEKGIKYKFEVYEKND

SEQ ID NO: 83 - DNA, 561 bp, Artificial Sequence
  Description of Artificial Sequence: Synthetic Destabilizing Domain (DD)
atggttggttcgctaaactgcatcgtcgctgtgtcccagaacatgggcatcggcaagaacggggacctgccctggccaccgctcaggaatgaattcagatatttccagagaatgaccacaacctcttcagtagaaggtaaacagaatctggtgattatgggtaagaagacctggtcctccattcctgagaagaaccgacctttaaagggtagaattaatttagttctcagcagagaactcaaggaacctccacaaggagctcattttctttccagaagtctagatgatgccttaaaacttactgaacaaccagaattagcaaataaagtagacatggtctggatagttggtggcagttctgtttataaggaagccatgaatcacccaggccatcttaaactatttgtgacaaggatcatgcaagactttgaaagtgacacgttttttccagaaattgatttggagaaatataaacttctgccagaatacccaggtgttctctctgatgtccaggaggagaaaggcattaagtacaaatttgaagtatatgagaagaatgat

SEQ ID NO: 84 - protein, 187 aa, Artificial Sequence
  Description of Artificial Sequence: Synthetic Destabilizing Domain (DD)
MVGSLNCIVAVSQNMGVGKNGDLPWPPLRNEFRYFQRMTTTSSVEGKQNLVIMGKKTWFSIPEKNRPLKGRINLVLSRELKEPPQGAHFLSRSLDDALKLTEQPELANKVDMVWIVGGSSVYKEAMNHPGHLKLFVTRIMQDFESDTFFPEIDLEKYKLLPEYPGVLSDVQEEKGIKYKFEVYEKND

SEQ ID NO: 85 - DNA, 561 bp, Artificial Sequence
  Description of Artificial Sequence: Synthetic Destabilizing Domain (DD)
atggttggttcgctaaactgcatcgtcgctgtgtcccagaacatgggcgtcggcaagaacggggacctgccctggccaccgctcaggaatgaattcagatatttccagagaatgaccacaacctcttcagtagaaggtaaacagaatctggtgattatgggtaagaagacctggttctccattcctgagaagaatcgacctttaaagggtagaattaatttagttctcagcagagaactcaaggaacctccacaaggagctcattttctttccagaagtctagatgatgccttaaaacttactgaacaaccagaattagcaaataaagtagacatggtctggatagttggtggcagttctgtttataaggaagccatgaatcacccaggccatcttaaactatttgtgacaaggatcatgcaagactttgaaagtgacacgttttttccagaaattgatttggagaaatataaacttctgccagaatacccaggtgttctctctgatgtccaggaggagaaaggcattaagtacaaatttgaagtatatgagaagaatgat

SEQ ID NO: 86 - protein, 187 aa, Artificial Sequence
  Description of Artificial Sequence: Synthetic Destabilizing Domain (DD)
MVGSLNCIVAVSQNMGIGKNGDLPWPPLRNEFRYFQRMTTTSSVEGKQNLVIMGKKTWFSIPEKDRPLKGRINLVLSRELKEPPQGAHFLSRSLDDALKLTEQPELANKVDMVWIVGGSSVYKEAMNHPGHLKLFVTRIMQDFESDTFFPEIDLEKYKLLPEYPGVLSDVQEEKGIKYKFEVYEKND

SEQ ID NO: 87 - DNA, 561 bp, Artificial Sequence
  Description of Artificial Sequence: Synthetic Destabilizing Domain (DD)
atggttggttcgctaaactgcatcgtcgctgtgtcccagaacatgggcatcggcaagaacggggacctgccctggccaccgctcaggaatgaattcagatatttccagagaatgaccacaacctcttcagtagaaggtaaacagaatctggtgattatgggtaagaagacctggttctccattcctgagaaggatcgacctttaaagggtagaattaatttagttctcagcagagaactcaaggaacctccacaaggagctcattttctttccagaagtctagatgatgccttaaaacttactgaacaaccagaattagcaaataaagtagacatggtctggatagttggtggcagttctgtttataaggaagccatgaatcacccaggccatcttaaactatttgtgacaaggatcatgcaagactttgaaagtgacacgttttttccagaaattgatttggagaaatataaacttctgccagaatacccaggtgttctctctgatgtccaggaggagaaaggcattaagtacaaatttgaagtatatgagaagaatgat

SEQ ID NO: 88 - protein, 187 aa, Artificial Sequence
  Description of Artificial Sequence: Synthetic Destabilizing Domain (DD)
MVGSLNCIVAVSQNMGIGKNGDLPWPPLRNEFRYFQRMTTTSSVEGKQNLVIMGKKTWFSIPEKNRPLKGRINLVLSRELKEPPQGAHFLSRSLDDALKLTEQPELVNKVDMVWIVGGSSVYKEAMNHPGHLKLFVTRIMQDFESDTFFPEIDLEKYKLLPEYPGVLSDVQEEKGIKYKFEVYEKND

SEQ ID NO: 89 - DNA, 561 bp, Artificial Sequence
  Description of Artificial Sequence: Synthetic Destabilizing Domain (DD)
atggttggttcgctaaactgcatcgtcgctgtgtcccagaacatgggcatcggcaagaacggggacctgccctggccaccgctcaggaatgaattcagatatttccagagaatgaccacaacctcttcagtagaaggtaaacagaatctggtgattatgggtaagaagacctggttctccattcctgagaagaatcgacctttaaagggtagaattaatttagttctcagcagagaactcaaggaacctccacaaggagctcattttctttccaggagtctagatgatgccttaaaacttactgaacaaccagaattagtaaataaagtagacatggtctggatagttggtggcagttctgtttataaggaagccatgaatcacccaggccatcttaaactatttgtgacaaggatcatgcaagactttgaaagtgacacgttttttccagaaattgatttggagaaatataaacttctgccagaatacccaggtgttctctctgatgtccaggaggagaaaggcattaagtacaaatttgaagtatatgagaagaatgat

SEQ ID NO: 90 - protein, 187 aa, Artificial Sequence
  Description of Artificial Sequence: Synthetic Destabilizing Domain (DD)
MVGSLNCIVAVSQNMGIGKNGDLPWPPLRNEFRYFQRMTTTSSVEGKQNLVIMGKKTWFSIPEKNRPLKGRINLVLSRELKEPPQGAHFLSRSLDDALKLTEQPELANKVDMVWIVGGSSVYKEAMYHPGHLKLFVTRIMQDFESDTFFPEIDLEKYKLLPEYPGVLSDVQEEKGIKYKFEVYEKND

SEQ ID NO: 91 - DNA, 561 bp, Artificial Sequence
  Description of Artificial Sequence: Synthetic Destabilizing Domain (DD)
atggttggttcgctaaactgcatcgtcgctgtgtcccagaacatgggcatcggcaagaacggggacctgccctggccaccgctcaggaatgaattcagatatttccagagaatgaccacaacctcttcagtagaaggtaaacagaatctggtgattatgggtaagaagacctggttctccattcctgagaagaatcgacctttaaagggtagaattaatttagttctcagcagagaactcaaggaacctccacaaggagctcattttctttccagaagtctagatgatgccttaaaacttactgaacaaccagaattagcaaataaagtagacatggtctggatagttggtggcagttctgtttataaggaagccatgtatcacccaggccatcttaaactatttgtgacaaggatcatgcaagactttgaaagtgacacgttttttccagaaattgatttagagaaatataaacttctgccagaatacccaggtgttctctctgatgtccaggaggagaaaggcattaagtacaaatttgaagtatatgagaagaatgat

SEQ ID NO: 92 - protein, 187 aa, Artificial Sequence
  Description of Artificial Sequence: Synthetic Destabilizing Domain (DD)
MVGSLNCIVAVSQNMGIGKNGDLPWPPLRNEFRYFQRMTTTSSVEGKQNLVIMGKKTWFSIPEKNRPLKGRINLVLSRELKEPPQGAHFLSRSLDDALKLTEQPELANKVDMVWIVGGSSVYKEAMNHPGHLKLFVTRIIQDFESDTFFPEIDLEKYKLLPEYPGVLSDVQEEKGIKYKFEVYEKND

SEQ ID NO: 93 - DNA, 561 bp, Artificial Sequence
  Description of Artificial Sequence: Synthetic Destabilizing Domain (DD)
atggttggttcgctaaactgcatcgtcgctgtgtcccagaacatgggcatcggcaagaacggggacctgccctggccaccgctcaggaatgaattcagatatttccagagaatgaccacaacctcttcagtagaaggtaaacagaatctggtgattatgggtaagaagacctggttctccattcctgagaagaatcgacctttaaagggtagaattaatttagttctcagcagagaactcaaggaacctccacaaggagctcattttctttccagaagtctagatgatgccttaaaacttactgaacaaccagaattagcaaataaagtagacatggtctggatagttggtggcagttctgtttataaggaagccatgaatcacccaggccatcttaaactatttgtgacaaggatcatacaagactttgaaagtgacacgttttttccagaaattgatttggagaaatataaacttctgccagaatacccaggtgttctctctgatgtccaggaggagaaaggcattaagtacaaatttgaagtatatgagaagaatgat

SEQ ID NO: 94 - protein, 187 aa, Artificial Sequence
  Description of Artificial Sequence: Synthetic Destabilizing Domain (DD)
MVGSLNCIVAVSQNMGIGKNGDLPWPPLRNEFRYFQRMTTTSSVEGKQNLVIMGKKTWFSIPEKNRPLKGRINLVLSRELKEPPQGAHFLSRSLDDALKLTEQPELANKVDMVWIVGGSSVYKEAMNHPGHLKLFVTRIMQDFESDTFFPEIDLEKYKLLPEYPGVLSDVQEEKGIKYKFEVYEEND

SEQ ID NO: 95 - DNA, 561 bp, Artificial Sequence
  Description of Artificial Sequence: Synthetic Destabilizing Domain (DD)
atggttggttcgctaaactgcatcgtcgctgtgtcccagaacatgggcatcggcaagaacggggacctgccctggccaccgctcaggaatgaattcagatatttccagagaatgaccacaacctcttcagtagaaggtaaacagaatctggtgattatgggtaagaagacctggttctccattcctgagaagaatcgacctttaaagggtagaattaatttagttctcagcagagaactcaaggaacctccacaaggagctcattttctttccagaagtctagatgatgccttaaaacttactgaacaaccagaattagcaaataaagtagacatggtctggatagttggtggcagttctgtttataaggaagccatgaatcacccaggccatcttaaactatttgtgacaaggatcatgcaagactttgaaagtgacacgttttttccagaaattgatttggagaaatataaacttctgccagaatacccaggtgttctctctgatgtccaggaggagaaaggcattaagtacaaatttgaagtatatgaggagaatgat

SEQ ID NO: 96 - protein, 187 aa, Artificial Sequence
  Description of Artificial Sequence: Synthetic Destabilizing Domain (DD)
MVGSLNCIVAVSQNMGIGKNGDLPWPPLRNEFRYFQRMTTTSSVEGKQNLVIMGKKTWFSIPEKNRPLKGRINLVLSRELKEPPQGAHFLSRSLDDALKLTEQPELANKVDMVWIVGGSSVYKEAMNHPGHLKLFVTRIMQDFESDTFFPEIDLEKYKLLPEYPGVLSDVQEEKGIKYKFEVYEKDD

SEQ ID NO: 97 - DNA, 561 bp, Artificial Sequence
  Description of Artificial Sequence: Synthetic Destabilizing Domain (DD)
atggttggttcgctaaactgcatcgtcgctgtgtcccagaacatgggcatcggcaagaacggggacctgccctggccaccgctcaggaatgaattcagatatttccagagaatgaccacaacctcttcagtagaaggtaaacagaatctggtaattatgggtaagaagacctggttctccattcctgagaagaatcgacctttaaagggtagaattaatttagttctcagcagagaactcaaggaacctccacaaggagctcattttctttccagaagtctagatgatgccttaaaacttactgaacaaccagaattagcaaataaagtagacatggtctggatagttggtggcagttctgtttataaggaagccatgaatcacccaggccatcttaaactatttgtgacaaggatcatgcaagactttgaaagtgacacgttttttccagaaattgatttggagaaatataaacttctgccagaatacccaggtgttctctctgatgtccaggaggagaaaggcattaagtacaaatttgaggtatatgagaaggatgat

SEQ ID NO: 98 - protein, 186 aa, Artificial Sequence [sequence omitted]

SEQ ID NO: 99 - DNA, 558 bp, Artificial Sequence
  Description of Artificial Sequence: Synthetic Destabilizing Domain (DD)
gttggttcgctaaactgcatcgtcgctgtgtcccagaacatgggcatcggcaagaacggggacctgccctggccaccgctcaggaatgaattcagatatttccagagaatgaccacaacctcttcagtagaaggtaaacagaatctggtgattatgggtaagaagacctggttctccattcctgagaagaatcgacctttaaagggtagaattaatttagttctcagcagagaactcaaggaacctccacaaggagctcattttctttccagaagtctagatgatgccttaaaacttactgaacaaccagaattagcaaataaagtagacatggtctggatagttggtggcagttctgtttataaggaagccatgaatcacccaggccatcttaaactatttgtgacaaggatcatgcaagactttgaaagtgacacgttttttccagaaattgatttggagaaatataaacttctgccagaatacccaggtgttctctctgatgtccaggaggagaaaggcattaagtacaaatttgaagtatatgagaagaatgat

SEQ ID NO: 100 - protein, 186 aa, Artificial Sequence
  Description of Artificial Sequence: Synthetic Destabilizing Domain (DD)
VGSLNCIVAVSQNMGIGKNGDLPWPPLRNEFRYFQRMTTTSSVEGKQNLVIMGKKTWFSIPEKNRPLKGRINLVLSRELKEPPQGAHFLSRSLDDALKLTEQPELANKVDMVWIVGGSSVYKEAMNHPGHLKLFVTRIMQDFESDTFFPEIDLEKYKLLPEYPGVLSDVQEEKGIKYKFEVYEKDD

SEQ ID NO: 101 - DNA, 558 bp, Artificial Sequence
  Description of Artificial Sequence: Synthetic Destabilizing Domain (DD)
gttggttcgctaaactgcatcgtcgctgtgtcccagaacatgggcatcggcaagaacggggacctgccctggccaccgctcaggaatgaattcagatatttccagagaatgaccacaacctcttcagtagaaggtaaacagaatctggtgattatgggtaagaagacctggttctccattcctgagaagaatcgacctttaaagggtagaattaatttagttctcagcagagaactcaaggaacctccacaaggagctcattttctttccagaagtctagatgatgccttaaaacttactgaacaaccagaattagcaaataaagtagacatggtctggatagttggtggcagttctgtttataaggaagccatgaatcacccaggccatcttaaactatttgtgacaaggatcatgcaagactttgaaagtgacacgttttttccagaaattgatttggagaaatataaacttctgccagaatacccaggtgttctctctgatgtccaggaggagaaaggcattaagtacaaatttgaagtatatgagaaggatgat

SEQ ID NO: 102 - protein, 186 aa, Artificial Sequence
  Description of Artificial Sequence: Synthetic Destabilizing Domain (DD)
VGSLNCIVAVSQNMGIGKNGDLPWPPLRNEFRYFQRMTTTSSVEGKQNLVIMGKKTWFSIPEKNRPLKGRINLVLSRELKEPPQGAHFLSRSLDDALKLTEQPELANKVDMVWIVGGSSVYKEAMNHPGHLKLFVTRIIQDFESDTFFPEIDLEKYKLLPEYPGVLSDVQEEKGIKYKFEVYEKND

SEQ ID NO: 103 - DNA, 558 bp, Artificial Sequence
  Description of Artificial Sequence: Synthetic Destabilizing Domain (DD)
gttggttcgctaaactgcatcgtcgctgtgtcccagaacatgggcatcggcaagaacggggacctgccctggccaccgctcaggaatgaattcagatatttccagagaatgaccacaacctcttcagtagaaggtaaacagaatctggtgattatgggtaagaagacctggttctccattcctgagaagaatcgacctttaaagggtagaattaatttagttctcagcagagaactcaaggaacctccacaaggagctcattttctttccagaagtctagatgatgccttaaaacttactgaacaaccagaattagcaaataaagtagacatggtctggatagttggtggcagttctgtttataaggaagccatgaatcacccaggccatcttaaactatttgtgacaaggatcattcaagactttgaaagtgacacgttttttccagaaattgatttggagaaatataaacttctgccagaatacccaggtgttctctctgatgtccaggaggagaaaggcattaagtacaaatttgaagtatatgagaagaatgat

SEQ ID NO: 104 - protein, 187 aa, Artificial Sequence
  Description of Artificial Sequence: Synthetic Destabilizing Domain (DD)
MVGSLNRIVAVSQNMGIGKNGDLPWPPLRNEFRYFQRMTTTSSVEGKQNLVIMGKKTWFSIPEKNRPLKGRINLVLSRELKEPPQGAHFLSRSLDDALKLTEQPELANKVDMVWIVGGSSVYKEAMNHPGHLKLFVTRIMQDFESDTFFPEIDLEKYKLLPECPGVLSDVQEEKGIKYKFEVYEKND

SEQ ID NO: 105 - DNA, 561 bp, Artificial Sequence
  Description of Artificial Sequence: Synthetic Destabilizing Domain (DD)
atggttggttcgctaaaccgcatcgtcgctgtgtcccagaacatgggcatcggcaagaacggggacctgccctggccaccgctcaggaatgaattcagatatttccagagaatgaccacaacctcttcagtagaaggtaaacagaatctggtgattatgggtaagaagacctggttctccattcctgagaagaatcgacctttaaagggtagaattaatttagttctcagcagagaactcaaggaacctccacaaggagctcattttctttccagaagtctagatgatgccttaaaacttactgaacaaccagaattagcaaataaagtagacatggtctggatagttggtggcagttctgtttataaggaagccatgaatcacccaggccatcttaaactatttgtgacaaggatcatgcaagactttgaaagtgacacgttttttccagaaattgatttggagaaatataaacttctgccagaatgcccaggtgttctctctgatgtccaggaggagaaaggcattaagtacaaatttgaagtatatgagaagaatgat

SEQ ID NO: 106 - protein, 187 aa, Artificial Sequence
  Description of Artificial Sequence: Synthetic Destabilizing Domain (DD)
MVGSLNCIVVVSQNMGIGKNGDLPWPPLRNEFRYFQRMTTTSSVEGKQNLVIMGKKTWFSIPEKNRPLKGRINLVLSRELKEPPQGAYFLSRSLDDALKLTEQPELANKVDMVWIVGGSSVYKEAMNHPGHLKLFVTRIMQDFESDTFFPEIDLEKYKLLPEYPGVLSDVQEEKGIKYKFEVYEKND

SEQ ID NO: 107 - DNA, 561 bp, Artificial Sequence
  Description of Artificial Sequence: Synthetic Destabilizing Domain (DD)
atggttggttcgctaaactgcatcgttgttgtgtcccagaacatgggcatcggcaagaacggggacctgccctggccaccgctcaggaatgaattcagatatttccagagaatgaccacaacctcttcagtagaaggtaaacagaatctggtgattatgggtaagaagacctggttctccattcctgagaagaatcgacctttaaagggtagaattaatttagttctcagcagagaactcaaggaacctccacaaggagcttattttctttccagaagtctagatgatgccttaaaacttactgaacaaccagaattagcaaataaagtagacatggtctggatagttggtggcagttctgtttataaggaagccatgaatcacccaggccatcttaaactatttgtgacaaggatcatgcaagactttgaaagtgacacgttttttccagaaattgatttggagaaatataaacttctgccagaatacccaggtgttctctctgatgtccaggaggagaaaggcattaagtacaaatttgaagtatatgagaagaatgat

SEQ ID NO: 108 - protein, 187 aa, Artificial Sequence
  Description of Artificial Sequence: Synthetic Destabilizing Domain (DD)
MVGSLNCIVAVSQNMGVGKNGDLPWPPLRNEFRYFQRMTTTSSVEGKQNLVIMGKKTWFSIPEKNRPLKGRINLVLSRELKEPPQGAHFLSRSLDDALKLTEQPELANKVDMVWIVGGSSVIKEAMNHPGHLKLFVTRIMQDFESDTFFPEIDLEKYKLLPEYPGVLSDVQEEKGIKYKFEVYEKND

SEQ ID NO: 109 - DNA, 561 bp, Artificial Sequence
  Description of Artificial Sequence: Synthetic Destabilizing Domain (DD)
atggttggttcgctaaactgcatcgtcgctgtgtcccagaacatgggcgtcggcaagaacggggacctgccctggccaccgctcaggaatgaattcagatatttccagagaatgaccacaacctcttcagtagaaggtaaacagaatctggtgattatgggtaagaagacctggttctccattcctgagaagaatcgacctttaaagggtagaattaatttagttctcagcagagaactcaaggaacctccacaaggagctcattttctttccagaagtctagatgatgccttaaaacttactgaacaaccagaattagcaaataaagtagacatggtctggatagttggtggcagttctgttattaaggaagccatgaatcacccaggccatcttaaactatttgtgacaaggatcatgcaagactttgaaagtgacacgttttttccagaaattgatttggagaaatataaacttctgccagaatacccaggtgttctctctgatgtccaggaggagaaaggcattaagtacaaatttgaagtatatgagaagaatgat

SEQ ID NO: 110 - protein, 187 aa, Artificial Sequence
  Description of Artificial Sequence: Synthetic Destabilizing Domain (DD)
MVGSLNCIVAVSQNMGIGKNTDLPWPPLRNEFRYFQRMTTTSSVEGKQNLVIMGKKTWFSIPEKNRPLKGRINLVLSRELKEPPQGAHFLSRSLDDALKLTEQPELANKVDMVWIVGGSSVIKEAMNHPGHLKLFVTRIMQDFESDTFFPEIDLEKYKLLPEYPGVLSDVQEEKGIKYKFEVYEKND

SEQ ID NO: 111 - DNA, 561 bp, Artificial Sequence
  Description of Artificial Sequence: Synthetic Destabilizing Domain (DD)
atggttggttcgctaaactgcatcgtcgctgtgtcccagaacatgggcatcggcaagaacacggacctgccctggccaccgctcaggaatgaattcagatatttccagagaatgaccacaacctcttcagtagaaggtaaacagaatctggtgattatgggtaagaagacctggttctccattcctgagaagaatcgacctttaaagggtagaattaatttagttctcagcagagaactcaaggaacctccacaaggagctcattttctttccagaagtctagatgatgccttaaaacttactgaacaaccagaattagcaaataaagtagacatggtctggatagttggtggcagttctgttattaaggaagccatgaatcacccaggccatcttaaactatttgtgacaaggatcatgcaagactttgaaagtgacacgttttttccagaaattgatttggagaaatataaacttctgccagaatacccaggtgttctctctgatgtccaggaggagaaaggcattaagtacaaatttgaagtatatgagaagaatgat

SEQ ID NO: 112 - protein, 187 aa, Artificial Sequence
  Description of Artificial Sequence: Synthetic Destabilizing Domain (DD)
MVGSLNCIVAVSQNMGIGKNGDLPWPPLRNEFRYFKRMTTTSSVEGKQNLVIMGKKTWFSIPEKNRPLKGRINLVLSRELKEPPQGAHFLSRSLDDALKLTEQPELANKVDMVWIVGGSSVIKEAMNHPGHLKLFVTRIMQDFESDTFFPEIDLEKYKLLPEYPGVLSDVQEEKGIKYKFEVYEKND

SEQ ID NO: 113 - DNA, 561 bp, Artificial Sequence
  Description of Artificial Sequence: Synthetic Destabilizing Domain (DD)
atggttggttcgctaaactgcatcgtcgctgtgtcccagaacatgggcatcggcaagaacggggacctgccctggccaccgctcaggaatgaattcagatatttcaagagaatgaccacaacctcttcagtagaaggtaaacagaatctggtgattatgggtaagaagacctggttctccattcctgagaagaatcgacctttaaagggtagaattaatttagttctcagcagagaactcaaggaacctccacaaggagctcattttctttccagaagtctagatgatgccttaaaacttactgaacaaccagaattagcaaataaagtagacatggtctggatagttggtggcagttctgttattaaggaagccatgaatcacccaggccatcttaaactatttgtgacaaggatcatgcaagactttgaaagtgacacgttttttccagaaattgatttggagaaatataaacttctgccagaatacccaggtgttctctctgatgtccaggaggagaaaggcattaagtacaaatttgaagtatatgagaagaatgat

SEQ ID NO: 114 - protein, 187 aa, Artificial Sequence
  Description of Artificial Sequence: Synthetic Destabilizing Domain (DD)
MVGSLNCIVAVSQNMGIGKNGDLPWPPLRNEFRYFQRMTTTSSVEGKQNLVITGKKTWFSIPEKNRPLKGRINLVLSRELKEPPQGAHFLSRSLDDALKLTEQPELANKVDMVWIVGGSSVYKEAMNHPGHLKLFVTIIMQDFESDTFFPEIDLEKYKLLPEYPGVLSDVQEEKGIKYKFEVYEKND

SEQ ID NO: 115 - DNA, 561 bp, Artificial Sequence
  Description of Artificial Sequence: Synthetic Destabilizing Domain (DD)
atggttggttcgctaaactgcatcgtcgctgtgtcccagaacatgggcatcggcaagaacggggacctgccctggccaccgctcaggaatgaattcagatatttccagagaatgaccacaacctcttcagtagaaggtaaacagaatctggtgattacgggtaagaagacctggttctccattcctgagaagaatcgacctttaaagggtagaattaatttagttctcagcagagaactcaaggaacctccacaaggagctcattttctttccagaagtctagatgatgccttaaaacttactgaacaaccagaattagcaaataaagtagacatggtctggatagttggtggcagttctgtttataaggaagccatgaatcacccaggccatcttaaactatttgtgacaatcatcatgcaagactttgaaagtgacacgttttttccagaaattgatttggagaaatataaacttctgccagaatacccaggtgttctctctgatgtccaggaggagaaaggcattaagtacaaatttgaagtatatgagaagaatgat

SEQ ID NO: 116 - protein, 187 aa, Artificial Sequence
  Description of Artificial Sequence: Synthetic Destabilizing Domain (DD)
MVGSLNCIVAVSQNMGIGKNGDLPWPPLRNEFRYFQRMTTTSSVEGKQNLVIMGKKAWFSIPEKNRPLKGRANLVLSRELKEPPQGAHFLSRSLDDALKLTEQPELANKVDMVWIVGGSSVYKEAMNHPGHLKLFVTRIMQDFESDTFFPEIDLEKYKLLPEYPGVLSDVQEEKGIKYKFEVYEKND

SEQ ID NO: 117 - DNA, 561 bp, Artificial Sequence
  Description of Artificial Sequence: Synthetic Destabilizing Domain (DD)
atggttggttcgctaaactgcatcgtcgctgtgtcccagaacatgggcatcggcaagaacggggacctgccctggccaccgctcaggaatgaattcagatatttccagagaatgaccacaacctcttcggtagaaggtaaacagaatctggtgattatgggtaagaaggcctggttctccattcctgagaagaatcgacctttaaagggtagagctaatttagttctcagcagagaactcaaggaacctccacaaggagctcattttctttccagaagtctagatgatgccttaaaacttactgaacaaccagaattagcaaataaagtagacatggtctggatagttggtggcagttctgtttataaggaagccatgaatcacccaggccatcttaaactatttgtgacaaggatcatgcaagactttgaaagtgacacgttttttccagaaattgatttggagaaatataaacttctgccagaatacccaggtgttctctctgatgtccaggaggagaaaggcattaagtacaaatttgaagtatatgagaagaatgat

SEQ ID NO: 118 - protein, 187 aa, Artificial Sequence
  Description of Artificial Sequence: Synthetic Destabilizing Domain (DD)
MVGSLNCIVAVSQNMGIGKNGDLPWPPLRNEFRYFQRMTTTSSVEGKQNLVIMGKKTWFSIPGKNRPLKGRINLVLSRELKEPPQGAHFLSRSLDDALKLTEQPELANKVDMVWIVGGSSVYKEAMNHPGHLKLFVTRIMQDFESDTFFPEIDLEKYKLLPEYPGVLSDVQEEKGFKYKFEVYEKND

SEQ ID NO: 119 - protein, 187 aa, Artificial Sequence
  Description of Artificial Sequence: Synthetic Destabilizing Domain (DD)
MVGSLNCIVAVSQNMGIGKNGDLPWPPLRNEFRYFQRMTTTSSVEGKQNLVIMGKKTWFSIPEKNRPLKGRINNVLSRELKEPPQGAHFLSRSLDDALKLTEQPELANKVDMVWIVGGSSVIKEAMNHPGHLKLFVTRIMQDFESDTFFPEIDLEKYKLLPEYPGVLSDVQEEKGIKYKFEVYEKND

SEQ ID NO: 120 - DNA, 561 bp, Artificial Sequence
  Description of Artificial Sequence: Synthetic Destabilizing Domain (DD)
atggttggttcgctaaactgcatcgtcgctgtgtcccagaacatgggcatcggcaagaacggggacctgccctggccaccgctcaggaatgaattcagatatttccagagaatgaccacaacctcttcagtagaaggtaaacagaatctggtgattatgggtaagaagacctggttctccattcctgagaagaatcgacctttaaagggtagaattaataacgttctcagcagagaactcaaggaacctccacaaggagctcattttctttccagaagtctagatgatgccttaaaacttactgaacaaccagaattagcaaataaagtagacatggtctggatagttggtggcagttctgttattaaggaagccatgaatcacccaggccatcttaaactatttgtgacaaggatcatgcaagactttgaaagtgacacgttttttccagaaattgatttggagaaatataaacttctgccagaatacccaggtgttctctctgatgtccaggaggagaaaggcattaagtacaaatttgaagtatatgagaagaatgat

SEQ ID NO: 121 - protein, 187 aa, Artificial Sequence
  Description of Artificial Sequence: Synthetic Destabilizing Domain (DD)
MVGSLNCIVAVSQNMGIGKNGDLPWPPLRNEFRYFQRMTTTSSVEGKQNLVIMGKKTWFSIPEKNRPLKGRINLFLSRELKEPPQGAHFLSRSLDDALKLTEQPELANKVDMVWIVGGSSVIKEAMNHPGHLKLFVTRIMQDFESDTFFPEIDLEKYKLLPEYPGVLSDVQEEKGIKYKFEVYEKND

SEQ ID NO: 122 - DNA, 561 bp, Artificial Sequence
  Description of Artificial Sequence: Synthetic Destabilizing Domain (DD)
atggttggttcgctaaactgcatcgtcgctgtgtcccagaacatgggcatcggcaagaacggggacctgccctggccaccgctcaggaatgaattcagatatttccagagaatgaccacaacctcttcagtagaaggtaaacagaatctggtgattatgggtaagaagacctggttctccattcctgagaagaatcgacctttaaagggtagaattaatttatttctcagcagagaactcaaggaacctccacaaggagctcattttctttccagaagtctagatgatgccttaaaacttactgaacaaccagaattagcaaataaagtagacatggtctggatagttggtggcagttctgttattaaggaagccatgaatcacccaggccatcttaaactatttgtgacaaggatcatgcaagactttgaaagtgacacgttttttccagaaattgatttggagaaatataaacttctgccagaatacccaggtgttctctctgatgtccaggaggagaaaggcattaagtacaaatttgaagtatatgagaagaatgat

SEQ ID NO: 123 - protein, 187 aa, Artificial Sequence
  Description of Artificial Sequence: Synthetic Destabilizing Domain (DD)
MVGSLNCIVAVSQNMGIGKNGDLPWPPLRNEFRYFQRMTTTSSVEGKQNLVIMGKKTWFSIPEKNRPLKGRINLVLSRELKEPPQGAHFLSRSADDALKLTEQPELANKVDMVWIVGGSSVYKEAMNHPGHLKLFVTRIMQDFESDAFFPEIDLEKYKLLPEYPGVLSDVQEEKGIKYKFEVYEKND

SEQ ID NO: 124 - DNA, 561 bp, Artificial Sequence
  Description of Artificial Sequence: Synthetic Destabilizing Domain (DD)
atggttggttcgctaaactgcatcgtcgctgtgtcccagaacatgggcatcggcaagaacggggacctgccctggccaccgctcaggaatgaattcagatatttccagagaatgaccacaacctcttcagtagaaggtaaacagaatctggtgattatgggtaagaagacctggttctccattcctgagaagaatcgacctttaaagggtagaattaatttagttctcagcagagaactcaaggaacctccacaaggagctcattttctttccagaagtgcagatgatgccttaaaacttactgaacaaccagaattagcaaataaagtagacatggtctggatagttggtggcagttctgtttataaggaagccatgaatcacccaggccatcttaaactatttgtgacaaggatcatgcaagactttgaaagtgacgcgttttttccagaaattgatttggagaaatataaacttctgccagaatacccaggtgttctctctgatgtccaggaggagaaaggcattaagtacaaatttgaagtatatgagaagaatgat

SEQ ID NO: 125 - protein, 187 aa, Artificial Sequence
  Description of Artificial Sequence: Synthetic Destabilizing Domain (DD)
MVGSLNCIVAVSQNMGIGKNGDLPWPPLRNEFRYFQRMTTTSSVEGKQNLVIMGKKTWFSIPEKNRPLKGRINLVLSRELKEPPQGAHFLSRSLDDALKLTEQPELANKVDMVWIVGGSSAIKEAMNHPGHLKLFVTRIMQDFESDTFFPEIDLEKYKLLPEYPGVLSDVQEEKGIKYKFEVYEKND

SEQ ID NO: 126 - DNA, 561 bp, Artificial Sequence
  Description of Artificial Sequence: Synthetic Destabilizing Domain (DD)
atggttggttcgctaaactgcatcgtcgctgtgtcccagaacatgggcatcggcaagaacggggacctgccctggccaccgctcaggaatgaattcagatatttccagagaatgaccacaacctcttcagtagaaggtaaacagaatctggtgattatgggtaagaagacctggttctccattcctgagaagaatcgacctttaaagggtagaattaatttagttctcagcagagaactcaaggaacctccacaaggagctcattttctttccagaagtctagatgatgccttaaaacttactgaacaaccagaattagcaaataaagtagacatggtctggatagttggtggcagttctgctattaaggaagccatgaatcacccaggccatcttaaactatttgtgacaaggatcatgcaagactttgaaagtgacacgttttttccagaaattgatttggagaaatataaacttctgccagaatacccaggtgttctctctgatgtccaggaggagaaaggcattaagtacaaatttgaagtatatgagaagaatgat

SEQ ID NO: 127 - protein, 187 aa, Artificial Sequence
  Description of Artificial Sequence: Synthetic Destabilizing Domain (DD)
MVGSLNCIVAVSQNMGIGKNGDLPWPPLRNEFRYFQRMTTTSSVEGKQNLVIMGKKTWFSIPEKNRPLKGRINLVLSRELKEPPQGAHFLSRSLDDALKLTEQPELANKVDMVWIVGGSSVIKEFMNHPGHLKLFVTRIMQDFESDTFFPEIDLEKYKLLPEYPGVLSDVQEEKGIKYKFEVYEKND

SEQ ID NO: 128 - DNA, 561 bp, Artificial Sequence
  Description of Artificial Sequence: Synthetic Destabilizing Domain (DD)
atggttggttcgctaaactgcatcgtcgctgtgtcccagaacatgggcatcggcaagaacggggacctgccctggccaccgctcaggaatgaattcagatatttccagagaatgaccacaacctcttcagtagaaggtaaacagaatctggtgattatgggtaagaagacctggttctccattcctgagaagaatcgacctttaaagggtagaattaatttagttctcagcagagaactcaaggaacctccacaaggagctcattttctttccagaagtctagatgatgccttaaaacttactgaacaaccagaattagcaaataaagtagacatggtctggatagttggtggcagttctgttattaaggaattcatgaatcacccaggccatcttaaactatttgtgacaaggatcatgcaagactttgaaagtgacacgttttttccagaaattgatttggagaaatataaacttctgccagaatacccaggtgttctctctgatgtccaggaggagaaaggcattaagtacaaatttgaagtatatgagaagaatgat

SEQ ID NO: 129 - protein, 187 aa, Artificial Sequence
  Description of Artificial Sequence: Synthetic Destabilizing Domain (DD)
MVGSLNCIVAVSQNMGIGKNGDLPWPPLRNEFRYFQRMTTTSSVEGKQNLVIMGKKTWFSIPEKNRPLKGRINLVLSRELKEPPQGAHFLSRSLDDALKLTEQPELANKVDMVWIVGGSSVIKEAMYHPGHLKLFVTRIMQDFESDTFFPEIDLEKYKLLPEYPGVLSDVQEEKGIKYKFEVYEKND

SEQ ID NO: 130 - DNA, 561 bp, Artificial Sequence
  Description of Artificial Sequence: Synthetic Destabilizing Domain (DD)
atggttggttcgctaaactgcatcgtcgctgtgtcccagaacatgggcatcggcaagaacggggacctgccctggccaccgctcaggaatgaattcagatatttccagagaatgaccacaacctcttcagtagaaggtaaacagaatctggtgattatgggtaagaagacctggttctccattcctgagaagaatcgacctttaaagggtagaattaatttagttctcagcagagaactcaaggaacctccacaaggagctcattttctttccagaagtctagatgatgccttaaaacttactgaacaaccagaattagcaaataaagtagacatggtctggatagttggtggcagttctgttattaaggaagccatgtatcacccaggccatcttaaactatttgtgacaaggatcatgcaagactttgaaagtgacacgttttttccagaaattgatttggagaaatataaacttctgccagaatacccaggtgttctctctgatgtccaggaggagaaaggcattaagtacaaatttgaagtatatgagaagaatgat

SEQ ID NO: 131 - protein, 187 aa, Artificial Sequence
  Description of Artificial Sequence: Synthetic Destabilizing Domain (DD)
MVGSLNCIVAVSQNMGIGKNGDLPWPPLRNEFRYFQRMTTTSSVEGKQNLVIMGKKTWFSIPEKNRPLKGRINLVLSRELKEPPQGAHFLSRSLDDALKLTEQPELANKVDMVWIVGGSSVIKEAMNHPGHLKLFVTRIIQDFESDTFFPEIDLEKYKLLPEYPGVLSDVQEEKGIKYKFEVYEKND

SEQ ID NO: 132 - DNA, 561 bp, Artificial Sequence
  Description of Artificial Sequence: Synthetic Destabilizing Domain (DD)
atggttggttcgctaaactgcatcgtcgctgtgtcccagaacatgggcatcggcaagaacggggacctgccctggccaccgctcaggaatgaattcagatatttccagagaatgaccacaacctcttcagtagaaggtaaacagaatctggtgattatgggtaagaagacctggttctccattcctgagaagaatcgacctttaaagggtagaattaatttagttctcagcagagaactcaaggaacctccacaaggagctcattttctttccagaagtctagatgatgccttaaaacttactgaacaaccagaattagcaaataaagtagacatggtctggatagttggtggcagttctgttattaaggaagccatgaatcacccaggccatcttaaactatttgtgacaaggatcatccaagactttgaaagtgacacgttttttccagaaattgatttggagaaatataaacttctgccagaatacccaggtgttctctctgatgtccaggaggagaaaggcattaagtacaaatttgaagtatatgagaagaatgat

SEQ ID NO: 133 - protein, 187 aa, Artificial Sequence
  Description of Artificial Sequence: Synthetic Destabilizing Domain (DD)
MVGSLNCIVAVSQNMGIGKNGDLPWPPLRNEFRYFQRMTTTSSVEGKQNLVIMGKKTWFSIPEKNRPLKGRINLVLSRELKEPPQGAHFLSRSLDDALKLTEQPELANKVDMVWIVGGSSVYKEAMNHPGRLKLFVTRIMQDFGSDTFFPEIDLEKYKLLPEYPGVLSDVQEEKGIKYKFEVYEKND

SEQ ID NO: 134 - DNA, 561 bp, Artificial Sequence
  Description of Artificial Sequence: Synthetic Destabilizing Domain (DD)
atggttggttcgctaaactgcatcgtcgctgtgtcccagaacatgggcatcggcaagaacggggacctgccctggccaccgctcaggaatgaattcagatatttccagaggatgaccacaacctcttcagtagaaggtaaacagaatctggtgattatgggtaagaagacctggttctccattcctgagaagaatcgacctttaaagggtagaattaatttagttcttagcagagaactcaaggaacctccacaaggagctcattttctttccagaagtttagatgatgccttaaaacttactgaacaaccagaattagcaaataaagtagacatggtctggatagttggtggcagttctgtttataaggaagccatgaatcacccaggccgtcttaaactatttgtgacaaggatcatgcaagactttggaagtgacacgttttttccagaaattgatttggagaaatataaacttctgccagaatacccaggtgttctctctgatgtccaggaggagaaaggcattaagtacaaatttgaagtatatgagaagaatgat

SEQ ID NO: 135 - protein, 187 aa, Artificial Sequence
  Description of Artificial Sequence: Synthetic Destabilizing Domain (DD)
MVGSLNCIVAVSQNMGIGKNGDLPWPPLRNEFRYFQRMTTTSSVEGKQNLVIMGKKTWFSIPEKNRPLKGRINLVLSRELKEPPQGAHFLSRSLDDALKLTEQPELANKVDMVWIVGGSSVYKEAMNHPGHLKLFVRRIMQDLESDTFFPEIDLEKYKLLPEYPGVLSDVQEEKGIKYKFEVYEKND

SEQ ID NO: 136 - DNA, 561 bp, Artificial Sequence
  Description of Artificial Sequence: Synthetic Destabilizing Domain (DD)
atggttggttcgctaaactgcatcgtcgctgtgtcccagaacatgggcatcggcaagaacggggacctgccctggccaccgctcaggaatgaattcagatacttccagagaatgaccacaacctcttcagtagaaggtaaacagaatctggtgattatgggtaagaagacctggttctccattcctgagaagaatcgacctttaaagggtagaattaatttagttctcagcagagaactcaaggaacctccacaaggagctcattttctttccagaagtctagatgatgccttaaaacttactgaacaaccagaattagcaaataaagtagacatggtctggatagttggtggcagttctgtttataaggaagccatgaatcacccaggccatcttaaactatttgtgagaaggatcatgcaagaccttgaaagtgacacgttttttccagaaattgatttggagaaatataaacttctgccagaatacccaggtgttctctctgatgtccaggaggagaaaggcattaagtacaaatttgaagtatatgagaagaatgat

SEQ ID NO: 137 - protein, 187 aa, Artificial Sequence
  Description of Artificial Sequence: Synthetic Destabilizing Domain (DD)
MVGSLNCIVAVSQNMGIGKNGDLPWPPLRNEFRYFQRMTTTSSVEGKQNLVIMGKKTWFSIPEKNRPLKGRINLVLSRELKEPPQGAHFLSRSLDDALKLTEQPELANKVDMVWIVGGSSVYKEAMNHPGHLKLFVTRIMQDFESDTFFPEIDLEKYKLLPGYPGVLSDVQEEKGFKYKFEVYEKND

SEQ ID NO: 138 - DNA, 561 bp, Artificial Sequence
  Description of Artificial Sequence: Synthetic Destabilizing Domain (DD)
atggttggttcgctaaactgcatcgtcgctgtgtcccagaacatgggcatcggcaagaacggggacctgccctggccaccgctcaggaatgaattcagatatttccagagaatgaccacaacctcttcagtagaaggtaaacagaatctggtgattatgggtaagaagacctggttctccattcctgagaagaatcgacctttaaagggtagaattaatttagttctcagcagagaactcaaggaacctccacaaggagctcattttctttccagaagtctagatgatgccttaaaacttactgaacaaccagaattagcaaataaagtagacatggtctggatagttggtggcagttctgtttataaggaagccatgaatcacccaggccatcttaaactatttgtgacaaggatcatgcaagactttgaaagtgacacgttttttccagaaattgatttggagaaatataaacttctgccaggatacccaggtgttctctctgatgtccaggaggagaaaggctttaagtacaaatttgaagtatatgagaagaatgat

SEQ ID NO: 139 - protein, 187 aa, Artificial Sequence
  Description of Artificial Sequence: Synthetic Destabilizing Domain (DD)
MVGSLNCIVAVSQNMGIGKNGDLPWPPLRNEFRYFQRMTTTSSVEGKQNLVIMGKKTWFSIPEKNRPLKGRINLVLSRELKEPPQGAHFLSRSLDDALKLTEQPELANKVDMVWIVGGSSVYKEAMNHPGHLKLFVTRIMQDFESDTFFPEIDLEKYKLLPEYPGVLSDVQEEKGIKHKFGVYEKND

SEQ ID NO: 140 - DNA, 561 bp, Artificial Sequence
  Description of Artificial Sequence: Synthetic Destabilizing Domain (DD)
atggttggttcgctaaactgcatcgtcgctgtgtcccagaacatgggcatcggcaagaacggggacctgccctggccaccgctcaggaatgaattcagatatttccagagaatgaccacaacctcttcagtagaaggtaaacagaatctggtgattatgggtaagaagacctggttctccattcctgagaagaatcgacctttaaagggtagaattaatttagttctcagcagagaactcaaggaacctccacaaggagctcattttctttccagaagtctagatgatgccttaaaacttactgaacaaccagaattagcaaataaagtagacatggtctggatagttggtggcagttctgtttataaggaagccatgaatcacccaggccatcttaaactatttgtgacaaggatcatgcaagactttgaaagtgacacgttttttccagaaattgatttggagaaatataaacttctgccagaatacccaggtgttctctctgatgtccaggaggagaaaggcattaagcacaaatttggagtatatgagaagaatgat

SEQ ID NO: 141 - protein, 187 aa, Artificial Sequence
  Description of Artificial Sequence: Synthetic Destabilizing Domain (DD)
MVGSLNCIVAVSQNMGIGKNGDLPWPPLRNEFRYFQRMTTTSSVEGKQNLVIMGKKTWFSIPEKNRPLKGRINLVLSRELKEPPQGAHFLSRSLDDALKLTEQPELANKVDMVWIVGGSSVYKEAMNHPGHLKLFVTRIMQDFESDTFFPEIDLEKYKLLPEYPGVLSDVQEEKGIKYKFEVHEEND

SEQ ID NO: 142 - DNA, 561 bp, Artificial Sequence
  Description of Artificial Sequence: Synthetic Destabilizing Domain (DD)
atggttggttcgctaaactgcatcgtcgctgtgtcccagaacatgggcatcggcaagaacggggacctgccctggccaccgctcaggaatgaattcagatatttccagagaatgaccacaacctcttcagtagaaggtaaacagaatctggtgattatgggtaagaagacctggttctccattcctgagaagaatcgacctttaaagggtagaattaatttagttctcagcagagaactcaaggagcctccacaaggagctcattttctttccagaagtctagatgatgccttaaaacttactgaacaaccagaattagcaaataaagtagacatggtctggatagttggtggcagttctgtttataaggaagccatgaatcacccaggccatcttaaactatttgtgacaaggatcatgcaagacttcgaaagtgacacgttttttccagaaattgatttggagaaatataaacttctgccagaatacccaggtgttctctctgatgtccaggaggagaaaggcattaagtacaaatttgaagtacatgaggagaatgat

SEQ ID NO: 143 - protein, 186 aa, Artificial Sequence
  Description of Artificial Sequence: Synthetic Destabilizing Domain (DD)
VGSLNCIVAVSQNMGVGKNGDLPWPPLRNEFRYFQRMTTTSSVEGKQNLVIMGKKTWFSIPEKNRPLKGRINLVLSRELKEPPQGAHFLSRSLDDALKLTEQPELANKVDMVWIVGGSSVYKEAMNHPGHLKLFVTRIMQDFESDTFFPEIDLEKYKLLPEYPGVLSDVQEEKGIKYKFEVYEKND

SEQ ID NO: 144 - DNA, 558 bp, Artificial Sequence
  Description of Artificial Sequence: Synthetic Destabilizing Domain (DD)
gttggttcgctaaactgcatcgtcgctgtgtcccagaacatgggcgtcggcaagaacggggacctgccctggccaccgctcaggaatgaattcagatatttccagagaatgaccacaacctcttcagtagaaggtaaacagaatctggtgattatgggtaagaagacctggttctccattcctgagaagaatcgacctttaaagggtagaattaatttagttctcagcagagaactcaaggaacctccacaaggagctcattttctttccagaagtctagatgatgccttaaaacttactgaacaaccagaattagcaaataaagtagacatggtctggatagttggtggcagttctgtttataaggaagccatgaatcacccaggccatcttaaactatttgtgacaaggatcatgcaagactttgaaagtgacacgttttttccagaaattgatttggagaaatataaacttctgccagaatacccaggtgttctctctgatgtccaggaggagaaaggcattaagtacaaatttgaagtatatgagaagaatgat

SEQ ID NO: 145 - protein, 186 aa, Artificial Sequence
  Description of Artificial Sequence: Synthetic Destabilizing Domain (DD)
VGSLNCIVAVSQNMGIGKNGDLPWPPLRNEFRYFQRMTTTSSVEGKQNLVIMGKKTWFSIPEKNRPLKGRINLVLSRELKEPPQGAHFLSRSLDDALKLTEQPELANKVDMVWIVGGSSVIKEAMNHPGHLKLFVTRIMQDFESDTFFPEIDLEKYKLLPEYPGVLSDVQEEKGIKYKFEVYEKND

SEQ ID NO: 146 - DNA, 558 bp, Artificial Sequence
  Description of Artificial Sequence: Synthetic Destabilizing Domain (DD)
gtgggctccctgaactgcatcgtggccgtgagccagaacatgggcatcggcaagaatggcgacctgccttggccacctctgaggaacgagttcagatactttcagaggatgaccacaaccagctccgtggagggcaagcagaacctggtcatcatgggcaagaagacatggttctctatccccgagaagaaccgccctctgaagggccggatcaatctggtgctgagcagagagctgaaggagccaccacagggagcacacttcctgagccggagcctggacgatgccctgaagctgaccgagcagcccgagctggccaacaaggtggacatggtgtggatcgtgggcggctctagcgtgatcaaggaggccatgaatcacccaggccacctgaagctgttcgtgacaagaatcatgcaggactttgagtccgataccttctttcccgagatcgacctggagaagtacaagctgctgcctgagtatccaggcgtgctgtctgatgtgcaggaggagaagggcatcaagtacaagttcgaggtgtatgagaagaatgat

SEQ ID NO: 147 - DNA, 558 bp, Artificial Sequence
  Description of Artificial Sequence: Synthetic Destabilizing Domain (DD)
gttggttcgctaaactgcatcgtcgctgtgtcccagaacatgggcatcggcaagaacggggacctgccctggccaccgctcaggaatgaattcagatatttccagagaatgaccacaacctcttcagtagaaggtaaacagaatctggtgattatgggtaagaagacctggttctccattcctgagaagaatcgacctttaaagggtagaattaatttagttctcagcagagaactcaaggaacctccacaaggagctcattttctttccagaagtctagatgatgccttaaaacttactgaacaaccagaattagcaaataaagtagacatggtctggatagttggtggcagttctgttattaaggaagccatgaatcacccaggccatcttaaactatttgtgacaaggatcatgcaagactttgaaagtgacacgttttttccagaaattgatttggagaaatataaacttctgccagaatacccaggtgttctctctgatgtccaggaggagaaaggcattaagtacaaatttgaagtatatgagaagaatgat

SEQ ID NO: 148 - DNA, 558 bp, Artificial Sequence
  Description of Artificial Sequence: Synthetic Destabilizing Domain (DD)
gttggttcgctaaactgcatcgtggccgtgagccagaacatgggcatcggcaagaatggcgacctgccttggccacctctgaggaacgagttcagatactttcagaggatgaccacaaccagctccgtggagggcaagcagaacctggtcatcatgggcaagaagacatggttctctatccccgagaagaaccgccctctgaagggccggatcaatctggtgctgagcagagagctgaaggagccaccacagggagcacacttcctgagccggagcctggacgatgccctgaagctgaccgagcagcccgagctggccaacaaggtggacatggtgtggatcgtgggcggctctagcgtgatcaaggaggccatgaatcacccaggccacctgaagctgttcgtgacaagaatcatgcaggactttgagtccgataccttctttcccgagatcgacctggagaagtacaagctgctgcctgagtatccaggcgtgctgtctgatgtgcaggaggagaagggcatcaagtacaagttcgaggtgtatgagaagaatgat

SEQ ID NO: 149 - protein, 186 aa, Artificial Sequence
  Description of Artificial Sequence: Synthetic Destabilizing Domain (DD)
VGSLNCIVAVSQNMGIGKNGDLPWPPLRNEFRYFQRMTTTSSVEGKQNLVIMGKKTWFSIPEKNRPLKGRINLVLSRELKEPPQGAHFLSRSLDDALKLTEQPELANKVDMVWIVGGSSVYKEAMNHPGHLKLFVTRIMQDFESDTFFPEIDLEKYKLLPEYPGVLSDVQEEKGIKYKFEVYEEND

SEQ ID NO: 150 - DNA, 558 bp, Artificial Sequence
  Description of Artificial Sequence: Synthetic Destabilizing Domain (DD)
gttggttcgctaaactgcatcgtcgctgtgtcccagaacatgggcatcggcaagaacggggacctgccctggccaccgctcaggaatgaattcagatatttccagagaatgaccacaacctcttcagtagaaggtaaacagaatctggtgattatgggtaagaagacctggttctccattcctgagaagaatcgacctttaaagggtagaattaatttagttctcagcagagaactcaaggaacctccacaaggagctcattttctttccagaagtctagatgatgccttaaaacttactgaacaaccagaattagcaaataaagtagacatggtctggatagttggtggcagttctgtttataaggaagccatgaatcacccaggccatcttaaactatttgtgacaaggatcatgcaagactttgaaagtgacacgttttttccagaaattgatttggagaaatataaacttctgccagaatacccaggtgttctctctgatgtccaggaggagaaaggcattaagtacaaatttgaagtatatgaggagaatgat

SEQ ID NO: 151 - protein, 186 aa, Artificial Sequence
  Description of Artificial Sequence: Synthetic Destabilizing Domain (DD)
VGSLNCIVAVSQNMGIGKNGDLPWPPLRNEFRYFQRMTTTSSVEGKQNLVIMGKKTWFSIPEKNRPLKGRINLVLSRELKEPPQGAHFLSRSLDDALKLTEQPELANKVDMVWIVGGSSVYKEAMYHPGHLKLFVTRIMQDFESDTFFPEIDLEKYKLLPEYPGVLSDVQEEKGIKYKFEVYEKND

SEQ ID NO: 152 - DNA, 558 bp, Artificial Sequence
  Description of Artificial Sequence: Synthetic Destabilizing Domain (DD)
gttggttcgctaaactgcatcgtcgctgtgtcccagaacatgggcatcggcaagaacggggacctgccctggccaccgctcaggaatgaattcagatatttccagagaatgaccacaacctcttcagtagaaggtaaacagaatctggtgattatgggtaagaagacctggttctccattcctgagaagaatcgacctttaaagggtagaattaatttagttctcagcagagaactcaaggaacctccacaaggagctcattttctttccagaagtctagatgatgccttaaaacttactgaacaaccagaattagcaaataaagtagacatggtctggatagttggtggcagttctgtttataaggaagccatgtatcacccaggccatcttaaactatttgtgacaaggatcatgcaagactttgaaagtgacacgttttttccagaaattgatttggagaaatataaacttctgccagaatacccaggtgttctctctgatgtccaggaggagaaaggcattaagtacaaatttgaagtatatgagaagaatgat

SEQ ID NO: 153 - protein, 187 aa, Artificial Sequence
  Description of Artificial Sequence: Synthetic Destabilizing Domain (DD)
MVGSLNCVVAVSQNMGIGKNGDLPWPPLRNEFRYFQRMTTTSSVEGKQNLVIMGKKTWFSIPEKNRPLKGRINLVLSRELKEPPQGAHFLSRSLDDALKLTEQPELANKVDMVWIVGGSSVYKEAMNHPGHLELFVTRIMQDFESDTFFPEIDLEKYKLLPECPGVLSDVQEEKGIKYKFEVYEKND

SEQ ID NO: 154 - DNA, 561 bp, Artificial Sequence
  Description of Artificial Sequence: Synthetic Destabilizing Domain (DD)
atggttggttcgctaaactgcgtcgtcgctgtgtcccagaacatgggcatcggcaagaacggggacctgccctggccaccgctcaggaatgaattcagatatttccagagaatgaccacaacctcttcagtagaaggtaaacagaatctggtgattatgggtaagaagacctggttctccattcctgagaagaatcgacctttaaagggtagaattaatttagttctcagcagagaactcaaggaacctccacaaggagctcattttctttccagaagtctagatgatgccttaaaacttactgaacaaccagaattagcaaataaagtagacatggtctggatagttggtggcagttctgtttataaggaagccatgaatcacccaggccatcttgaactatttgtgacaaggatcatgcaagactttgaaagtgacacgttttttccagaaattgatttggagaaatataaacttctgccagaatgcccaggtgttctctctgatgtccaggaggagaaaggcattaagtacaaatttgaagtatatgagaagaatgat

SEQ ID NO: 155 - protein, 187 aa, Artificial Sequence
  Description of Artificial Sequence: Synthetic Destabilizing Domain (DD)
MVGSLNCIAAVSQNMGIGKNGDLPWPPLRNEFRYFQRMTTTSSVEGKQNLVIMGKKTWFSIPEKNRPLKGRINLVLSRELKEPPQGAHFLSRRLDDALKLTEQPELANKVDMVWIVGGSSVYKEAMNHPGHLKLFVTRIMQDFESDTFFLEIDLEKYKLLPEYPGVLSDVQEEKGIKYKFEVYEKND

SEQ ID NO: 156 - DNA, 561 bp, Artificial Sequence
  Description of Artificial Sequence: Synthetic Destabilizing Domain (DD)
atggttggttcgctaaactgcatcgccgctgtgtcccagaacatgggcatcggcaagaacggggacctgccctggccaccgctcaggaatgaattcagatatttccagagaatgaccacaacctcttcagtagaaggtaaacagaatctggtgattatgggtaagaagacctggttctccattcctgagaagaatcgacctttaaagggtagaattaatttagttctcagcagagaactcaaggaacctccacaaggagctcattttctttccagaaggctagatgatgccttaaaacttactgaacaaccagaattagcaaataaagtagacatggtctggatagttggtggcagttctgtttataaggaagccatgaatcacccaggccatcttaaactatttgtgacaaggatcatgcaagactttgaaagtgacacgttttttctagaaattgatttggagaaatataaacttctgccagaatacccaggtgttctctctgatgtccaggaggagaaaggcattaagtacaaatttgaagtatatgagaagaatgat

SEQ ID NO: 157 - protein, 187 aa, Artificial Sequence
  Description of Artificial Sequence: Synthetic Destabilizing Domain (DD)
MVGSLNCIVAVSQNMGIGENGDLPWPPLRNEFRYFQRMTTTSSVEGKQNLVIMGKKTWFSIPEKNRPLKGRINLVLSRELKEPPQGAHLLSRSLDDALKLTEQPELANKVDMVWIVGGSSVYKEAMNHPGHLKLFVTRIMQDFESDTFFPEIDLEKYKLLPEYPGVLSDVQEEKGIKYKFGVYEKND

SEQ ID NO: 158 - DNA, 561 bp, Artificial Sequence
  Description of Artificial Sequence: Synthetic Destabilizing Domain (DD)
atggttggttcgctaaactgcatcgtcgctgtgtcccagaacatgggcatcggcgagaacggggacctgccctggccaccgctcaggaatgaattcagatatttccagagaatgaccacaacctcttcagtagaaggtaaacagaatctggtgattatgggtaagaagacctggttctccattcctgagaagaatcgacctttaaagggtagaattaatttagttctcagcagagaactcaaggaacctccacaaggagctcatcttctttccagaagtctagatgatgccttaaaacttactgaacaaccagaattagcaaataaagtagacatggtctggatagttggtggcagttctgtctataaggaagccatgaatcacccaggccatcttaaactatttgtgacaaggatcatgcaagactttgaaagtgacacgttttttccagaaattgatttggagaaatataaacttctgccagaatacccaggtgttctctctgatgtccaggaggagaaaggcattaagtacaaatttggagtatatgagaagaatgat

SEQ ID NO: 159 - protein, 187 aa, Artificial Sequence
  Description of Artificial Sequence: Synthetic Destabilizing Domain (DD)
MVGSLNCIVAVSQNMGIGKNEDLPWPPLRNEFRYFQRMTTTSSVEGKQNLVIMGKKTWFSIPEKNRPLKGRVNLVLSRELKEPPQGAHFLSRSLDDALKLTEQPELANKVDMVWIVGGSSVYKEAMNHPGHLKLFVTRIMQDFESDTFFPEIDLEKYKLLPEYPGVLSDVQEEKGTKYKFEVYEKND

SEQ ID NO: 160 - DNA, 561 bp, Artificial Sequence
  Description of Artificial Sequence: Synthetic Destabilizing Domain (DD)
atggttggttcgctaaactgcatcgtcgctgtgtcccagaacatgggcatcggcaagaacgaggacctgccctggccaccgctcaggaatgaattcagatatttccagagaatgaccacaacctcttcagtagaaggtaaacagaatctggtgattatgggtaagaagacctggttctccattcctgagaagaatcgacctttaaagggtagagttaatttagttcttagcagagaactcaaggaacctccacaaggagctcattttctttccagaagtctagatgatgccttaaaacttactgaacaaccagaattagcaaataaagtagacatggtctggatagttggtggcagttccgtttataaggaagccatgaatcacccaggccatcttaaactatttgtgacaaggatcatgcaagactttgaaagtgacacgttttttccagaaattgatttggagaaatataaacttctgccagaatacccaggcgttctctctgatgtccaggaggagaaaggcactaagtacaaatttgaagtatatgagaagaatgat

SEQ ID NO: 161 - protein, 187 aa, Artificial Sequence
  Description of Artificial Sequence: Synthetic Destabilizing Domain (DD)
MVGSLNCIVAVSQNMGIGKNGDSPWPPLRNEFRYFQRMTTTSSVEGKQNLVIMGKKTWFSIPEKNRPLKGRINLVLSRELKEPPQGAHFLSRSLDDALKLTEQPELANKVDMVWIVGGSSAYKEAMNHPGHLKLFVTRIMQDFESDTFFPEIDLEKCKLLPEYPGVLSDVQEEKGIKYKFEVYEKND

SEQ ID NO: 162 - DNA, 561 bp, Artificial Sequence
  Description of Artificial Sequence: Synthetic Destabilizing Domain (DD)
atggttggctcgctaaactgcatcgtcgctgtgtcccagaacatgggcatcggcaagaacggggactcgccctggccaccgctcaggaatgaattcagatatttccagagaatgaccacaacctcttcagtagaaggtaaacagaatctggtgattatgggtaagaagacctggttctccattcctgagaagaatcgacctttaaagggtagaattaatttagttctcagcagagaactcaaggaacctccacaaggagctcattttctttccagaagtctagatgatgccttaaaacttactgaacaaccagaattagcaaataaagtagacatggtctggatagttggtggcagttctgcttataaggaagccatgaatcacccaggccatcttaaactatttgtgacaaggatcatgcaagactttgaaagtgacacgttttttccagaaattgatttggagaaatgtaaacttctgccagaatacccaggtgttctctctgatgtccaggaggagaaaggcattaagtacaaatttgaagtatatgagaagaatgat

SEQ ID NO: 163 - protein, 187 aa, Artificial Sequence
  Description of Artificial Sequence: Synthetic Destabilizing Domain (DD)
MVGSLNCIVAVSQNMGIGKNGDLPWPPLRNDMRYFQRMTTTSSVEGKQNLVIMGKKTWFSIPEKNRPLKGRINLVLSRELKEPPQGAHFLSRSLDDALKLTEQPELANKVDMVWIIGGSSVYKEAMNHPGHLKLFVTRIMQDFESDTFFPEIDLEKYKLLPEYPGVLSDVQEEKGIKYKFEVYEKND

SEQ ID NO: 164 - DNA, 561 bp, Artificial Sequence
  Description of Artificial Sequence: Synthetic Destabilizing Domain (DD)
atggttggttcgctaaactgcatcgtcgctgtgtcccagaacatgggcatcggcaagaacggggacctgccctggccaccgctcaggaatgatatgagatatttccagagaatgaccacaacctcttcagtagaaggtaaacagaatctggtgattatgggtaagaagacctggttctccattcctgagaagaatcgacctttaaagggtagaattaatttagttctcagcagagaactcaaggaacctccacaaggagctcattttctttccagaagtctagatgatgccttaaaacttactgaacaaccagaattagcaaataaagtagacatggtctggataattggtggcagttctgtttataaggaagccatgaatcacccaggccatcttaaactatttgtgacaaggatcatgcaagactttgaaagtgacacgttttttccagaaattgatttggagaaatataaacttctgccagaatacccaggtgttctctctgatgtccaggaggagaaaggcattaagtacaaatttgaagtatatgagaagaatgat

SEQ ID NO: 165 - protein, 187 aa, Artificial Sequence
  Description of Artificial Sequence: Synthetic Destabilizing Domain (DD)
MVGSLNCIVAVSQNMGIGKNGDLPWPPLRNEFRYFFRMTTTSSVEGKQNLVIMGKKTWFSIPEKFRPLKGRINLVLSRELKEPPQGAHFLSRSLDDALKLTEQPELANKVDMVWIVGGSSVIKEAMNHPGHLKLFVTRIMQDFESDTFFPEIDLEKYKLLPEYPGVLSDVQEEKGIKYKFEVYEKND

SEQ ID NO: 166 - protein, 187 aa, Artificial Sequence
  Description of Artificial Sequence: Synthetic Destabilizing Domain (DD)
MVGSLNCIVAVSQNMGIGKNGDLPWPPLRNEFRYFKRMTTTSSVEGKQNLVIMGKKTWFSIPEKFRPLKGRINLVLSRELKEPPQGAHFLSRSLDDALKLTEQPELANKVDMVWIVGGSSVIKEAMNHPGHLKLFVTRIMQDFESDTFFPEIDLEKYKLLPEYPGVLSDVQEEKGIKYKFEVYEKND

SEQ ID NO: 167 - DNA, 561 bp, Artificial Sequence
  Description of Artificial Sequence: Synthetic Destabilizing Domain (DD)
atggttggttcgctaaactgcatcgtcgctgtgtcccagaacatgggcatcggcaagaacggggacctgccctggccaccgctcaggaatgaattcagatatttcaagagaatgaccacaacctcttcagtagaaggtaaacagaatctggtgattatgggtaagaagacctggttctccattcctgagaagttccgacctttaaagggtagaattaatttagttctcagcagagaactcaaggaacctccacaaggagctcattttctttccagaagtctagatgatgccttaaaacttactgaacaaccagaattagcaaataaagtagacatggtctggatagttggtggcagttctgttattaaggaagccatgaatcacccaggccatcttaaactatttgtgacaaggatcatgcaagactttgaaagtgacacgttttttccagaaattgatttggagaaatataaacttctgccagaatacccaggtgttctctctgatgtccaggaggagaaaggcattaagtacaaatttgaagtatatgagaagaatgat

SEQ ID NO: 168 - protein, 187 aa, Artificial Sequence
  Description of Artificial Sequence: Synthetic Destabilizing Domain (DD)
MVGSLNCIVAVSQNMGIGKNGDLPWPPLRNEFRYFFRMTTTSSVEGKQNLVIMGKKTWFSIPEKNRPLKGRINLVLSRELKEPPQGAHFLSRSLDDALKLTEQPELANKVDMVWIVGGSSVIKEFMNHPGHLKLFVTRIMQDFESDTFFPEIDLEKYKLLPEYPGVLSDVQEEKGIKYKFEVYEKND

SEQ ID NO: 169 - DNA, 561 bp, Artificial Sequence
  Description of Artificial Sequence: Synthetic Destabilizing Domain (DD)
atggtgggcagcctgaactgtatcgtggccgtgtcccagaacatgggcatcggcaagaatggcgatctgccatggccccctctgcggaacgagttcagatacttctttaggatgaccacaaccagctccgtggagggcaagcagaacctggtcatcatgggcaagaagacctggttttctatccccgagaagaacagacctctgaagggcaggatcaatctggtgctgagcagagagctgaaggagccaccacagggagcacacttcctgagccggagcctggacgatgccctgaagctgacagagcagccagagctggccaacaaggtggacatggtgtggatcgtgggcggctctagcgtgatcaaggagtttatgaatcaccccggccacctgaagctgttcgtgaccagaatcatgcaggactttgagtccgatacattctttcctgagatcgatctggagaagtacaagctgctgccagagtatcccggcgtgctgtctgacgtgcaggaggagaagggcatcaagtacaagttcgaggtgtatgagaagaacgat

SEQ ID NO: 170 - protein, 187 aa, Artificial Sequence
  Description of Artificial Sequence: Synthetic Destabilizing Domain (DD)
MVGSLNCIVAVSQNMGIGKNGDLPWPPLRNEFRYFQRMTTTSSVEGKQDLVIMGKKTWSSIPEKNRPLKGRINLVLSRELKEPPQGAHFLSRSLDDALKLTEQPELANKVDMVWIVGGSSVYKEAMNHPGHLKLFVTRIMQDFESDTFFPEIGLEKYKLLPEYPGVLSDVQEEKGIKYKFEVYEKND

SEQ ID NO: 171 - DNA, 561 bp, Artificial Sequence
  Description of Artificial Sequence: Synthetic Destabilizing Domain (DD)
atggttggttcgctaaactgcatcgtcgctgtgtcccagaacatgggcatcggcaagaacggggacctgccctggccaccgctcaggaatgaattcagatatttccagagaatgaccacaacctcttcagtagaaggtaaacaggatctggtgattatgggtaagaagacctggtcctccattcctgagaagaatcgacctttaaagggtagaattaatttagttctcagcagagaactcaaggaacctccacaaggagctcattttctttccagaagtctagatgatgccttaaaacttactgaacaaccagaattagcaaataaagtagacatggtctggatagttggtggcagttctgtttataaggaagccatgaatcacccaggccatcttaaactgtttgtgacaaggatcatgcaagactttgaaagtgacacgttttttccagaaattggtttggagaaatataaacttctgccagaatacccaggtgttctctctgatgtccaggaggagaaaggcattaagtacaaatttgaagtatatgagaagaatgat

SEQ ID NO: 172 - protein, 187 aa, Artificial Sequence
  Description of Artificial Sequence: Synthetic Destabilizing Domain (DD)
MVGSLNCIVAVSQNMGIGKNGDLPWPPLRNEFRYFQRMTTTSSVEGKQNLVIMGKKTWFSIPEKNRPLKGRINLVLSRELKEPPQGAHFLSRSLDDALKLTEQPELANKADMVWIVGGSSVYKEAMNHPGHLKLFMTRIMQDFESDTFFPEIDLEKYKLLPEYPGVLSDVQEEKGIRYKFEVYEKND

SEQ ID NO: 173 - DNA, 561 bp, Artificial Sequence
  Description of Artificial Sequence: Synthetic Destabilizing Domain (DD)
atggttggttcgctaaactgcatcgtcgctgtgtcccagaacatgggcatcggcaagaacggggacctgccctggccaccgctcaggaatgaattcagatacttccagagaatgaccacaacctcttcagtagaaggtaaacagaatctggtgattatgggtaagaagacctggttctccattcctgagaagaatcgacctttaaagggtagaattaatttagtcctcagcagagaactcaaggaacctccacaaggagctcattttctttccagaagtctagatgatgccttaaaacttactgaacaaccagaattagcaaataaagcagacatggtctggatagttggtggcagttctgtttataaggaagccatgaatcacccaggccatcttaaactatttatgacgaggatcatgcaagactttgaaagtgacacgttttttccagaaattgacctggagaaatataaactcctgccagaatacccaggtgttctctctgatgtccaggaggagaaaggcattaggtacaaatttgaagtatatgagaagaatgat

SEQ ID NO: 174 - protein, 187 aa, Artificial Sequence
  Description of Artificial Sequence: Synthetic Destabilizing Domain (DD)
MVGSLNCIVAVSQNMGIGKNGDLPWPPLRNEFRYFQRMTTTSSVEGKQNLVIMGKKTWFSIPEKNRPLKGRINLVLSRELKEPPQGAHFLSRSLDDALKLTEQPELANKVDMVWIVGGSSVIKEAMNHPGRLKLFVTRIMQDFGSDTFFPEIDLEKYKLLPEYPGVLSDVQEEKGIKYKFEVYEKND

SEQ ID NO: 175 - DNA, 561 bp, Artificial Sequence
  Description of Artificial Sequence: Synthetic Destabilizing Domain (DD)
atggttggttcgctaaactgcatcgtcgctgtgtcccagaacatgggcatcggcaagaacggggacctgccctggccaccgctcaggaatgaattcagatatttccagagaatgaccacaacctcttcagtagaaggtaaacagaatctggtgattatgggtaagaagacctggttctccattcctgagaagaatcgacctttaaagggtagaattaatttagttctcagcagagaactcaaggaacctccacaaggagctcattttctttccagaagtctagatgatgccttaaaacttactgaacaaccagaattagcaaataaagtagacatggtctggatagttggtggcagttctgttattaaggaagccatgaatcacccaggccgtcttaaactatttgtgacaaggatcatgcaagactttggaagtgacacgttttttccagaaattgatttggagaaatataaacttctgccagaatacccaggtgttctctctgatgtccaggaggagaaaggcattaagtacaaatttgaagtatatgagaagaatgat

SEQ ID NO: 176 - protein, 186 aa, Artificial Sequence
  Description of Artificial Sequence: Synthetic Destabilizing Domain (DD)
VGSLNCIVAVSQNMGVGKNGDLPWPPLRNEFRYFQRMTTTSSVEGKQNLVIMGKKTWFSIPEKNRPLKGRINLVLSRELKEPPQGAHFLSRSLDDALKLTEQPELANKVDMVWIVGGSSVIKEAMNHPGHLKLFVTRIMQDFESDTFFPEIDLEKYKLLPEYPGVLSDVQEEKGIKYKFEVYEKND

SEQ ID NO: 177 - DNA, 558 bp, Artificial Sequence
  Description of Artificial Sequence: Synthetic Destabilizing Domain (DD)
gttggttcgctaaactgcatcgtcgctgtgtcccagaacatgggcgtcggcaagaacggggacctgccctggccaccgctcaggaatgaattcagatatttccagagaatgaccacaacctcttcagtagaaggtaaacagaatctggtgattatgggtaagaagacctggttctccattcctgagaagaatcgacctttaaagggtagaattaatttagttctcagcagagaactcaaggaacctccacaaggagctcattttctttccagaagtctagatgatgccttaaaacttactgaacaaccagaattagcaaataaagtagacatggtctggatagttggtggcagttctgttattaaggaagccatgaatcacccaggccatcttaaactatttgtgacaaggatcatgcaagactttgaaagtgacacgttttttccagaaattgatttggagaaatataaacttctgccagaatacccaggtgttctctctgatgtccaggaggagaaaggcattaagtacaaatttgaagtatatgagaagaatgat

SEQ ID NO: 178 - DNA, 558 bp, Artificial Sequence; identical to SEQ ID NO: 144
  Description of Artificial Sequence: Synthetic Destabilizing Domain (DD)

SEQ ID NO: 179 - protein, 186 aa, Artificial Sequence
  Description of Artificial Sequence: Synthetic Destabilizing Domain (DD)
VGSLNCIVAVSQNMGIGKNTDLPWPPLRNEFRYFQRMTTTSSVEGKQNLVIMGKKTWFSIPEKNRPLKGRINLVLSRELKEPPQGAHFLSRSLDDALKLTEQPELANKVDMVWIVGGSSVIKEAMNHPGHLKLFVTRIMQDFESDTFFPEIDLEKYKLLPEYPGVLSDVQEEKGIKYKFEVYEKND

SEQ ID NO: 180 - DNA, 558 bp, Artificial Sequence
  Description of Artificial Sequence: Synthetic Destabilizing Domain (DD)
gttggttcgctaaactgcatcgtcgctgtgtcccagaacatgggcatcggcaagaacacggacctgccctggccaccgctcaggaatgaattcagatatttccagagaatgaccacaacctcttcagtagaaggtaaacagaatctggtgattatgggtaagaagacctggttctccattcctgagaagaatcgacctttaaagggtagaattaatttagttctcagcagagaactcaaggaacctccacaaggagctcattttctttccagaagtctagatgatgccttaaaacttactgaacaaccagaattagcaaataaagtagacatggtctggatagttggtggcagttctgttattaaggaagccatgaatcacccaggccatcttaaactatttgtgacaaggatcatgcaagactttgaaagtgacacgttttttccagaaattgatttggagaaatataaacttctgccagaatacccaggtgttctctctgatgtccaggaggagaaaggcattaagtacaaatttgaagtatatgagaagaatgat

SEQ ID NO: 181 - protein, 186 aa, Artificial Sequence
  Description of Artificial Sequence: Synthetic Destabilizing Domain (DD)
VGSLNCIVAVSQNMGIGKNTDLPWPPLRNEFRYFQRMTTTSSVEGKQNLVIMGKKTWFSIPEKNRPLKGRINLVLSRELKEPPQGAHFLSRSLDDALKLTEQPELANKVDMVWIVGGSSVNKEAMNHPGHLKLFVTRIMQDFESDTFFPEIDLEKYKLLPEYPGVLSDVQEEKGIKYKFEVYEKND

SEQ ID NO: 182 - DNA, 558 bp, Artificial Sequence
  Description of Artificial Sequence: Synthetic Destabilizing Domain (DD)
gttggttcgctaaactgcatcgtcgctgtgtcccagaacatgggcatcggcaagaacacggacctgccctggccaccgctcaggaatgaattcagatatttccagagaatgaccacaacctcttcagtagaaggtaaacagaatctggtgattatgggtaagaagacctggttctccattcctgagaagaatcgacctttaaagggtagaattaatttagttctcagcagagaactcaaggaacctccacaaggagctcattttctttccagaagtctagatgatgccttaaaacttactgaacaaccagaattagcaaataaagtagacatggtctggatagttggtggcagttctgttaataaggaagccatgaatcacccaggccatcttaaactatttgtgacaaggatcatgcaagactttgaaagtgacacgttttttccagaaattgatttggagaaatataaacttctgccagaatacccaggtgttctctctgatgtccaggaggagaaaggcattaagtacaaatttgaagtatatgagaagaatgat

SEQ ID NO: 183 - protein, 186 aa, Artificial Sequence
  Description of Artificial Sequence: Synthetic Destabilizing Domain (DD)
VGSLNCIVAVSQNMGIGKNGDLPWPPLRNEFRYFKRMTTTSSVEGKQNLVIMGKKTWFSIPEKNRPLKGRINLVLSRELKEPPQGAHFLSRSLDDALKLTEQPELANKVDMVWIVGGSSVIKEAMNHPGHLKLFVTRIMQDFESDTFFPEIDLEKYKLLPEYPGVLSDVQEEKGIKYKFEVYEKND

SEQ ID NO: 184 - DNA, 558 bp, Artificial Sequence
  Description of Artificial Sequence: Synthetic Destabilizing Domain (DD)
gtgggctccctgaactgcatcgtggccgtgagccagaacatgggcatcggcaagaatggcgacctgccttggccacctctgaggaacgagttcagatactttaagaggatgaccacaaccagctccgtggagggcaagcagaacctggtcatcatgggcaagaagacatggttctctatccccgagaagaaccgccctctgaagggccggatcaatctggtgctgagcagagagctgaaggagccaccacagggagcacacttcctgagccggagcctggacgatgccctgaagctgaccgagcagcccgagctggccaacaaggtggacatggtgtggatcgtgggcggctctagcgtgatcaaggaggccatgaatcacccaggccacctgaagctgttcgtgacaagaatcatgcaggactttgagtccgataccttctttcccgagatcgacctggagaagtacaagctgctgcctgagtatccaggcgtgctgtctgatgtgcaggaggagaagggcatcaagtacaagttcgaggtgtatgagaagaatgat

SEQ ID NO: 185 - DNA, 558 bp, Artificial Sequence
  Description of Artificial Sequence: Synthetic Destabilizing Domain (DD)
gttggttcgctaaactgcatcgtcgctgtgtcccagaacatgggcatcggcaagaacggggacctgccctggccaccgctcaggaatgaattcagatatttcaagagaatgaccacaacctcttcagtagaaggtaaacagaatctggtgattatgggtaagaagacctggttctccattcctgagaagaatcgacctttaaagggtagaattaatttagttctcagcagagaactcaaggaacctccacaaggagctcattttctttccagaagtctagatgatgccttaaaacttactgaacaaccagaattagcaaataaagtagacatggtctggatagttggtggcagttctgttattaaggaagccatgaatcacccaggccatcttaaactatttgtgacaaggatcatgcaagactttgaaagtgacacgttttttccagaaattgatttggagaaatataaacttctgccagaatacccaggtgttctctctgatgtccaggaggagaaaggcattaagtacaaatttgaagtatatgagaagaatgat

SEQ ID NO: 186 - DNA, 558 bp, Artificial Sequence
  Description of Artificial Sequence: Synthetic Destabilizing Domain (DD)
gtgggctccctgaactgcatcgtggccgtgagccagaacatgggcatcggcaagaatggcgacctgccatggccacctctgaggaacgagttcaggtactttaagagaatgaccacaaccagctccgtggagggcaagcagaacctggtcatcatgggcaagaagacctggttcagcatccccgagaagaacaggcctctgaagggcagaatcaatctggtgctgtccagggagctgaaggagccaccacagggagcccactttctgtctcgcagcctggacgatgccctgaagctgacagagcagcccgagctggccaacaaggtggatatggtgtggatcgtgggcggctctagcgtgatcaaggaggccatgaatcaccccggccacctgaagctgttcgtgaccaggatcatgcaggactttgagtccgatacattctttcctgagatcgacctggagaagtataagctgctgccagagtaccccggcgtgctgagcgatgtgcaggaggagaagggcatcaagtataagttcgaggtgtacgagaagaacgac

SEQ ID NO: 187 - protein, 186 aa, Artificial Sequence
  Description of Artificial Sequence: Synthetic Destabilizing Domain (DD)
VGSLNCIVAVSQNMGIGKNGDLPWPPLRNEFRYFQRMTTTSSVEGKQNLVITGKKTWFSIPEKNRPLKGRINLVLSRELKEPPQGAHFLSRSLDDALKLTEQPELANKVDMVWIVGGSSVYKEAMNHPGHLKLFVTIIMQDFESDTFFPEIDLEKYKLLPEYPGVLSDVQEEKGIKYKFEVYEKND

SEQ ID NO: 188 - DNA, 558 bp, Artificial Sequence
  Description of Artificial Sequence: Synthetic Destabilizing Domain (DD)
gttggttcgctaaactgcatcgtcgctgtgtcccagaacatgggcatcggcaagaacggggacctgccctggccaccgctcaggaatgaattcagatatttccagagaatgaccacaacctcttcagtagaaggtaaacagaatctggtgattacgggtaagaagacctggttctccattcctgagaagaatcgacctttaaagggtagaattaatttagttctcagcagagaactcaaggaacctccacaaggagctcattttctttccagaagtctagatgatgccttaaaacttactgaacaaccagaattagcaaataaagtagacatggtctggatagttggtggcagttctgtttataaggaagccatgaatcacccaggccatcttaaactatttgtgacaatcatcatgcaagactttgaaagtgacacgttttttccagaaattgatttggagaaatataaacttctgccagaatacccaggtgttctctctgatgtccaggaggagaaaggcattaagtacaaatttgaagtatatgagaagaatgat

SEQ ID NO: 189 - protein, 186 aa, Artificial Sequence
  Description of Artificial Sequence: Synthetic Destabilizing Domain (DD)
VGSLNCIVAVSQNMGIGKNGDLPWPPLRNEFRYFQRMTTTSSVEGKQNLVIMGKKTWFSIPEKNRPLKGRINNVLSRELKEPPQGAHFLSRSLDDALKLTEQPELANKVDMVWIVGGSSVIKEAMNHPGHLKLFVTRIMQDFESDTFFPEIDLEKYKLLPEYPGVLSDVQEEKGIKYKFEVYEKND

SEQ ID NO: 190 - DNA, 558 bp, Artificial Sequence
  Description of Artificial Sequence: Synthetic Destabilizing Domain (DD)
gttggttcgctaaactgcatcgtcgctgtgtcccagaacatgggcatcggcaagaacggggacctgccctggccaccgctcaggaatgaattcagatatttccagagaatgaccacaacctcttcagtagaaggtaaacagaatctggtgattatgggtaagaagacctggttctccattcctgagaagaatcgacctttaaagggtagaattaataacgttctcagcagagaactcaaggaacctccacaaggagctcattttctttccagaagtctagatgatgccttaaaacttactgaacaaccagaattagcaaataaagtagacatggtctggatagttggtggcagttctgttattaaggaagccatgaatcacccaggccatcttaaactatttgtgacaaggatcatgcaagactttgaaagtgacacgttttttccagaaattgatttggagaaatataaacttctgccagaatacccaggtgttctctctgatgtccaggaggagaaaggcattaagtacaaatttgaagtatatgagaagaatgat

SEQ ID NO: 191 - protein, 186 aa, Artificial Sequence
  Description of Artificial Sequence: Synthetic Destabilizing Domain (DD)
VGSLNCIVAVSQNMGIGKNGDLPWPPLRNEFRYFQRMTTTSSVEGKQNLVIMGKKTWFSIPEKNRPLKGRINLFLSRELKEPPQGAHFLSRSLDDALKLTEQPELANKVDMVWIVGGSSVIKEAMNHPGHLKLFVTRIMQDFESDTFFPEIDLEKYKLLPEYPGVLSDVQEEKGIKYKFEVYEKND

SEQ ID NO: 192 - DNA, 558 bp, Artificial Sequence
  Description of Artificial Sequence: Synthetic Destabilizing Domain (DD)
gttggttcgctaaactgcatcgtcgctgtgtcccagaacatgggcatcggcaagaacggggacctgccctggccaccgctcaggaatgaattcagatatttccagagaatgaccacaacctcttcagtagaaggtaaacagaatctggtgattatgggtaagaagacctggttctccattcctgagaagaatcgacctttaaagggtagaattaatttatttctcagcagagaactcaaggaacctccacaaggagctcattttctttccagaagtctagatgatgccttaaaacttactgaacaaccagaattagcaaataaagtagacatggtctggatagttggtggcagttctgttattaaggaagccatgaatcacccaggccatcttaaactatttgtgacaaggatcatgcaagactttgaaagtgacacgttttttccagaaattgatttggagaaatataaacttctgccagaatacccaggtgttctctctgatgtccaggaggagaaaggcattaagtacaaatttgaagtatatgagaagaatgat

SEQ ID NO: 193 - protein, 186 aa, Artificial Sequence
  Description of Artificial Sequence: Synthetic Destabilizing Domain (DD)
VGSLNCIVAVSQNMGIGKNGDLPWPPLRNEFRYFQRMTTTSSVEGKQNLVIMGKKTWFSIPEKNRPLKGRINLVLSRELKEPPQGAHFLSRSADDALKLTEQPELANKVDMVWIVGGSSVYKEAMNHPGHLKLFVTRIMQDFESDAFFPEIDLEKYKLLPEYPGVLSDVQEEKGIKYKFEVYEKND

SEQ ID NO: 194 - DNA, 558 bp, Artificial Sequence
  Description of Artificial Sequence: Synthetic Destabilizing Domain (DD)
gttggttcgctaaactgcatcgtcgctgtgtcccagaacatgggcatcggcaagaacggggacctgccctggccaccgctcaggaatgaattcagatatttccagagaatgaccacaacctcttcagtagaaggtaaacagaatctggtgattatgggtaagaagacctggttctccattcctgagaagaatcgacctttaaagggtagaattaatttagttctcagcagagaactcaaggaacctccacaaggagctcattttctttccagaagtgcagatgatgccttaaaacttactgaacaaccagaattagcaaataaagtagacatggtctggatagttggtggcagttctgtttataaggaagccatgaatcacccaggccatcttaaactatttgtgacaaggatcatgcaagactttgaaagtgacgcgttttttccagaaattgatttggagaaatataaacttctgccagaatacccaggtgttctctctgatgtccaggaggagaaaggcattaagtacaaatttgaagtatatgagaagaatgat

SEQ ID NO: 195 - protein, 186 aa, Artificial Sequence
  Description of Artificial Sequence: Synthetic Destabilizing Domain (DD)
VGSLNCIVAVSQNMGIGKNGDLPWPPLRNEFRYFQRMTTTSSVEGKQNLVIMGKKTWFSIPEKNRPLKGRINLVLSRELKEPPQGAHFLSRSLDDALKLTEQPELANKVDMVWIVGGSSAIKEAMNHPGHLKLFVTRIMQDFESDTFFPEIDLEKYKLLPEYPGVLSDVQEEKGIKYKFEVYEKND

SEQ ID NO: 196 - DNA, 558 bp, Artificial Sequence
  Description of Artificial Sequence: Synthetic Destabilizing Domain (DD)
gttggttcgctaaactgcatcgtcgctgtgtcccagaacatgggcatcggcaagaacggggacctgccctggccaccgctcaggaatgaattcagatatttccagagaatgaccacaacctcttcagtagaaggtaaacagaatctggtgattatgggtaagaagacctggttctccattcctgagaagaatcgacctttaaagggtagaattaatttagttctcagcagagaactcaaggaacctccacaaggagctcattttctttccagaagtctagatgatgccttaaaacttactgaacaaccagaattagcaaataaagtagacatggtctggatagttggtggcagttctgctattaaggaagccatgaatcacccaggccatcttaaactatttgtgacaaggatcatgcaagactttgaaagtgacacgttttttccagaaattgatttggagaaatataaacttctgccagaatacccaggtgttctctctgatgtccaggaggagaaaggcattaagtacaaatttgaagtatatgagaagaatgat

SEQ ID NO: 197 - protein, 186 aa, Artificial Sequence
  Description of Artificial Sequence: Synthetic Destabilizing Domain (DD)
VGSLNCIVAVSQNMGIGKNGDLPWPPLRNEFRYFQRMTTTSSVEGKQNLVIMGKKTWFSIPEKNRPLKGRINLVLSRELKEPPQGAHFLSRSLDDALKLTEQPELANKVDMVWIVGGSSVIKEFMNHPGHLKLFVTRIMQDFESDTFFPEIDLEKYKLLPEYPGVLSDVQEEKGIKYKFEVYEKND

SEQ ID NO: 198 - DNA, 558 bp, Artificial Sequence
  Description of Artificial Sequence: Synthetic Destabilizing Domain (DD)
gttggttcgctaaactgcatcgtcgctgtgtcccagaacatgggcatcggcaagaacggggacctgccctggccaccgctcaggaatgaattcagatatttccagagaatgaccacaacctcttcagtagaaggtaaacagaatctggtgattatgggtaagaagacctggttctccattcctgagaagaatcgacctttaaagggtagaattaatttagttctcagcagagaactcaaggaacctccacaaggagctcattttctttccagaagtctagatgatgccttaaaacttactgaacaaccagaattagcaaataaagtagacatggtctggatagttggtggcagttctgttattaaggaattcatgaatcacccaggccatcttaaactatttgtgacaaggatcatgcaagactttgaaagtgacacgttttttccagaaattgatttggagaaatataaacttctgccagaatacccaggtgttctctctgatgtccaggaggagaaaggcattaagtacaaatttgaagtatatgagaagaatgat

SEQ ID NO: 199 - DNA, 558 bp, Artificial Sequence
  Description of Artificial Sequence: Synthetic Destabilizing Domain (DD)
gtgggctccctgaactgcatcgtggccgtgagccagaacatgggcatcggcaagaatggcgacctgccttggccacctctgaggaacgagttcagatactttcagaggatgaccacaaccagctccgtggagggcaagcagaacctggtcatcatgggcaagaagacatggttctctatccccgagaagaaccgccctctgaagggccggatcaatctggtgctgagcagagagctgaaggagccaccacagggagcacacttcctgagccggagcctggacgatgccctgaagctgaccgagcagcccgagctggccaacaaggtggacatggtgtggatcgtgggcggctctagcgtgatcaaggagttcatgaatcacccaggccacctgaagctgttcgtgacaagaatcatgcaggactttgagtccgataccttctttcccgagatcgacctggagaagtacaagctgctgcctgagtatccaggcgtgctgtctgatgtgcaggaggagaagggcatcaagtacaagttcgaggtgtatgagaagaatgat

SEQ ID NO: 200 - DNA, 558 bp, Artificial Sequence
  Description of Artificial Sequence: Synthetic Destabilizing Domain (DD)
gtgggctccctgaactgcatcgtggccgtgagccagaacatgggcatcggcaagaatggcgacctgccatggccacctctgaggaacgagttcaggtactttcagagaatgaccacaaccagctccgtggagggcaagcagaacctggtcatcatgggcaagaagacctggttcagcatccccgagaagaacaggcctctgaagggcagaatcaatctggtgctgtccagggagctgaaggagccaccacagggagcccactttctgtctcgcagcctggacgatgccctgaagctgacagagcagcccgagctggccaacaaggtggatatggtgtggatcgtgggcggctctagcgtgatcaaggagttcatgaatcaccccggccacctgaagctgttcgtgaccaggatcatgcaggactttgagtccgatacattctttcctgagatcgacctggagaagtataagctgctgccagagtaccccggcgtgctgagcgatgtgcaggaggagaagggcatcaagtataagtttgaggtgtacgagaagaacgac

SEQ ID NO: 201 - protein, 186 aa, Artificial Sequence
  Description of Artificial Sequence: Synthetic Destabilizing Domain (DD)
VGSLNCIVAVSQNMGIGKNGDLPWPPLRNEFRYFQRMTTTSSVEGKQNLVIMGKKTWFSIPEKNRPLKGRINLVLSRELKEPPQGAHFLSRSLDDALKLTEQPELANKVDMVWIVGGSSVIKEAMNHPGHLKLFVTRIIQDFESDTFFPEIDLEKYKLLPEYPGVLSDVQEEKGIKYKFEVYEKND

SEQ ID NO: 202 - DNA, 558 bp, Artificial Sequence
  Description of Artificial Sequence: Synthetic Destabilizing Domain (DD)
gttggttcgctaaactgcatcgtcgctgtgtcccagaacatgggcatcggcaagaacggggacctgccctggccaccgctcaggaatgaattcagatatttccagagaatgaccacaacctcttcagtagaaggtaaacagaatctggtgattatgggtaagaagacctggttctccattcctgagaagaatcgacctttaaagggtagaattaatttagttctcagcagagaactcaaggaacctccacaaggagctcattttctttccagaagtctagatgatgccttaaaacttactgaacaaccagaattagcaaataaagtagacatggtctggatagttggtggcagttctgttattaaggaagccatgaatcacccaggccatcttaaactatttgtgacaaggatcatccaagactttgaaagtgacacgttttttccagaaattgatttggagaaatataaacttctgccagaatacccaggtgttctctctgatgtccaggaggagaaaggcattaagtacaaatttgaagtatatgagaagaatgat

SEQ ID NO: 203 - protein, 186 aa, Artificial Sequence
  Description of Artificial Sequence: Synthetic Destabilizing Domain (DD)
VGSLNCIVAVSQNMGIGKNGDLPWPPLRNEFRYFQRMTTTSSVEGKQNLVIMGKKTWFSIPEKNRPLKGRINLVLSRELKEPPQGAHFLSRSLDDALKLTEQPELANKVDMVWIVGGSSVIKEAMYHPGHLKLFVTRIMQDFESDTFFPEIDLEKYKLLPEYPGVLSDVQEEKGIKYKFEVYEKND

SEQ ID NO: 204 - DNA, 558 bp, Artificial Sequence
  Description of Artificial Sequence: Synthetic Destabilizing Domain (DD)
gttggttcgctaaactgcatcgtcgctgtgtcccagaacatgggcatcggcaagaacggggacctgccctggccaccgctcaggaatgaattcagatatttccagagaatgaccacaacctcttcagtagaaggtaaacagaatctggtgattatgggtaagaagacctggttctccattcctgagaagaatcgacctttaaagggtagaattaatttagttctcagcagagaactcaaggaacctccacaaggagctcattttctttccagaagtctagatgatgccttaaaacttactgaacaaccagaattagcaaataaagtagacatggtctggatagttggtggcagttctgttattaaggaagccatgtatcacccaggccatcttaaactatttgtgacaaggatcatgcaagactttgaaagtgacacgttttttccagaaattgatttggagaaatataaacttctgccagaatacccaggtgttctctctgatgtccaggaggagaaaggcattaagtacaaatttgaagtatatgagaagaatgat

SEQ ID NO: 205 - protein, 186 aa, Artificial Sequence
  Description of Artificial Sequence: Synthetic Destabilizing Domain (DD)
VGSLNCIVAVSQNMGIGKNGDLPWPPLRNEFRYFQRMTTTSSVEGKQNLVIMGKKTWFSIPEKNRPLKGRINLVLSRELKEPPQGAHFLSRSLDDALKLTEQPELANKVDMVWIVGGSSVYKEAMNHPGRLKLFVTRIMQDFGSDTFFPEIDLEKYKLLPEYPGVLSDVQEEKGIKYKFEVYEKND

SEQ ID NO: 206 - DNA, 558 bp, Artificial Sequence
  Description of Artificial Sequence: Synthetic Destabilizing Domain (DD)
gttggttcgctaaactgcatcgtcgctgtgtcccagaacatgggcatcggcaagaacggggacctgccctggccaccgctcaggaatgaattcagatatttccagagaatgaccacaacctcttcagtagaaggtaaacagaatctggtgattatgggtaagaagacctggttctccattcctgagaagaatcgacctttaaagggtagaattaatttagttctcagcagagaactcaaggaacctccacaaggagctcattttctttccagaagtctagatgatgccttaaaacttactgaacaaccagaattagcaaataaagtagacatggtctggatagttggtggcagttctgtttataaggaagccatgaatcacccaggcagacttaaactatttgtgacaaggatcatgcaagactttggaagtgacacgttttttccagaaattgatttggagaaatataaacttctgccagaatacccaggtgttctctctgatgtccaggaggagaaaggcattaagtacaaatttgaagtatatgagaagaatgat

SEQ ID NO: 207 - protein, 186 aa, Artificial Sequence
  Description of Artificial Sequence: Synthetic Destabilizing Domain (DD)
VGSLNCIVAVSQNMGIGKNGDLPWPPLRNEFRYFQRMTTTSSVEGKQNLVIMGKKTWFSIPEKNRPLKGRINLVLSRELKEPPQGAHFLSRSLDDALKLTEQPELANKVDMVWIVGGSSVYKEAMNHPGHLKLFVTRIMQDFESDTFFPEIDLEKYKLLPGYPGVLSDVQEEKGFKYKFEVYEKND

SEQ ID NO: 208 - DNA, 558 bp, Artificial Sequence
  Description of Artificial Sequence: Synthetic Destabilizing Domain (DD)
gttggttcgctaaactgcatcgtcgctgtgtcccagaacatgggcatcggcaagaacggggacctgccctggccaccgctcaggaatgaattcagatatttccagagaatgaccacaacctcttcagtagaaggtaaacagaatctggtgattatgggtaagaagacctggttctccattcctgagaagaatcgacctttaaagggtagaattaatttagttctcagcagagaactcaaggaacctccacaaggagctcattttctttccagaagtctagatgatgccttaaaacttactgaacaaccagaattagcaaataaagtagacatggtctggatagttggtggcagttctgtttataaggaagccatgaatcacccaggccatcttaaactatttgtgacaaggatcatgcaagactttgaaagtgacacgttttttccagaaattgatttggagaaatataaacttctgccaggatacccaggtgttctctctgatgtccaggaggagaaaggctttaagtacaaatttgaagtatatgagaagaatgat

SEQ ID NO: 209 - protein, 187 aa, Artificial Sequence
  Description of Artificial Sequence: Synthetic Destabilizing Domain (DD)
MVGSLNCIVAVSQNMGIGKNGDLPWPPLRNEFRYFQRMTTTSSVEGKQNLVIMRKKTWFSIPEKNRPLKGRINLVLSRELKEPPQGAHFLSRSLDDALKLTEQPELANKVDMVWIVGGSSVYKEAMNHPGHLKLFVTRIVQDFESDTFFPEIDLEKYKLLPEYPGVLCDVQEEKGIKYKFEVYEKND

SEQ ID NO: 210 - protein, 187 aa, Artificial Sequence
  Description of Artificial Sequence: Synthetic Destabilizing Domain (DD)
MVGSLNCIVAVSQNMGIGKNGDLPWPPLRNEFRYFQRMTTTSSVEGKQNLVIMRKKTWFSIPEKNRPLKGRINLVLSRELKEPPQGAHFLSRSLDDALKLTEQPELANKVDMVWLVGGSSVYKEAMNHPGHLKLFVTRIVQDFESDTFFPEIDLEKYKLLPEYPGVLCDVQEEKGIKYKFEVYEKND

SEQ ID NO: 211 - DNA, 561 bp, Artificial Sequence
  Description of Artificial Sequence: Synthetic Destabilizing Domain (DD)
atggttggttcgctgaactgcatcgtcgctgtgtcccagaacatgggcatcggcaagaacggggacctgccctggccaccgctcaggaatgaattcagatatttccagagaatgaccacaacctcctcagtagaaggtaagcagaatctggtgattatgcgtaagaagacctggttctccattcctgagaagaatagacctttaaagggtagaattaatttagttctcagcagagaactcaaggaacctccacaaggagcccattttctttccagaagtctagatgatgccttaaaacttactgaacaaccagaattagcaaataaagtagacatggtctggttagttggtggcagttctgtttataaggaagccatgaatcacccaggccatcttaaactatttgtgacaaggatcgtgcaagactttgaaagtgacacgttttttccagaaattgatttggagaaatataaacttctgccagaatacccaggtgttctctgtgatgtccaggaggagaaaggcattaagtacaaatttgaggtatatgagaagaatgat

SEQ ID NO: 212 - protein, 187 aa, Artificial Sequence
  Description of Artificial Sequence: Synthetic Destabilizing Domain (DD)
MAGSLNCIVAVSQNMGIGKNGDLPWPPLRNEFGYFRRMTTTSSVEGKQNLVIMGKKTWFSIPEKNRPLKGRINLVLSRELKEPPQGAHFLSRSLDDALKPTEQPELANKVDMVWIVGGSSVYKEAMNHPGHLKLFVTRIMQDFESDTFFPEIDLEKYKLLPEYPGVLSDVQEEKGIKYKFEVYERND

SEQ ID NO: 213 - DNA, 561 bp, Artificial Sequence
  Description of Artificial Sequence: Synthetic Destabilizing Domain (DD)
atggctggttcgctaaactgcatcgtcgctgtgtcccagaacatgggcatcggcaagaacggggacctgccctggccaccgctcaggaatgaattcggatatttccggagaatgaccacaacctcttcagtagaaggtaaacagaatctggtgattatgggtaagaagacctggttctccattcctgagaagaatcgacctttaaagggtagaattaatttagttctcagcagagaactcaaggaacctccacaaggagctcattttctttccagaagtctagatgatgccttaaaacctactgaacaaccagaattagcaaataaagtagacatggtctggatagttggtggcagttctgtttataaggaagccatgaatcacccaggccatcttaaactatttgtgacaaggatcatgcaagactttgaaagtgacacgttttttccagaaattgatttggagaaatataaacttctgccagaatacccaggtgttctctctgatgtccaggaggagaagggcattaagtacaaatttgaagtatatgagaggaatgat

SEQ ID NO: 214 - protein, 187 aa, Artificial Sequence
  Description of Artificial Sequence: Synthetic Destabilizing Domain (DD)
MVGSLNCIVAVSQNMGIGKNGSLPWPPLRNEMSYFSRMTTTSSVEGKQNLVIMGKKTWFSIPEKSRPLKGRINLVLSRELKEPPQGAHFLSRSLDDALKLTEQPELANKVDMVWIVGGSSVYKEAMNHPGHLKLFVTRIMQDFESDTFFPEIDLEKYKLLPEYPGVLSDVQEEKGIKYKFEVYEKND

SEQ ID NO: 215 - DNA, 561 bp, Artificial Sequence
  Description of Artificial Sequence: Synthetic Destabilizing Domain (DD)
atggttggttcgctaaactgcatcgtcgctgtgtcccagaacatgggcatcggcaagaacgggtccctgccctggccaccgctcaggaatgaaatgagctatttctcgagaatgaccacaacctcttcagtagaaggtaaacagaatctggtgattatgggtaagaagacctggttctccattcctgagaagagtcgacctttaaagggtagaattaatttagttctcagcagagaactcaaggaacctccacaaggagctcattttctttccagaagtctagatgatgccttaaaacttactgaacaaccagaattagcaaataaagtagacatggtctggatagttggtggcagttctgtttataaggaagccatgaatcacccaggccatcttaaactatttgtgacaaggatcatgcaagactttgaaagtgacacgttttttccagaaattgatttggagaaatataaacttctgccagaatacccaggtgttctctctgatgtccaggaggagaaaggcattaagtacaaatttgaagtatatgagaagaatgat

SEQ ID NO: 216 - protein, 186 aa, Artificial Sequence
  Description of Artificial Sequence: Synthetic Destabilizing Domain (DD)
VGSLNCIVAVSQNMGIGKNGDLPWPPLRNDMRYFQRMTTTSSVEGKQNLVIMGKKTWFSIPEKNRPLKGRINLVLSRELKEPPQGAHFLSRSLDDALKLTEQPELANKVDMVWIIGGSSVYKEAMNHPGHLKLFVTRIMQDFESDTFFPEIDLEKYKLLPEYPGVLSDVQEEKGIKYKFEVYEKND

SEQ ID NO: 217 - DNA, 558 bp, Artificial Sequence
  Description of Artificial Sequence: Synthetic Destabilizing Domain (DD)
gttggttcgctaaactgcatcgtcgctgtgtcccagaacatgggcatcggcaagaacggggacctgccctggccaccgctcaggaatgatatgagatatttccagagaatgaccacaacctcttcagtagaaggtaaacagaatctggtgattatgggtaagaagacctggttctccattcctgagaagaatcgacctttaaagggtagaattaatttagttctcagcagagaactcaaggaacctccacaaggagctcattttctttccagaagtctagatgatgccttaaaacttactgaacaaccagaattagcaaataaagtagacatggtctggataattggtggcagttctgtttataaggaagccatgaatcacccaggccatcttaaactatttgtgacaaggatcatgcaagactttgaaagtgacacgttttttccagaaattgatttggagaaatataaacttctgccagaatacccaggtgttctctctgatgtccaggaggagaaaggcattaagtacaaatttgaagtatatgagaagaatgat

SEQ ID NO: 218 - protein, 186 aa, Artificial Sequence
  Description of Artificial Sequence: Synthetic Destabilizing Domain (DD)
VGSLNCIVAVSQNMGIGKNGDLPWPPLRNEFRYFFRMTTTSSVEGKQNLVIMGKKTWFSIPEKFRPLKGRINLVLSRELKEPPQGAHFLSRSLDDALKLTEQPELANKVDMVWIVGGSSVIKEAMNHPGHLKLFVTRIMQDFESDTFFPEIDLEKYKLLPEYPGVLSDVQEEKGIKYKFEVYEKND

SEQ ID NO: 219 - DNA, 558 bp, Artificial Sequence
  Description of Artificial Sequence: Synthetic Destabilizing Domain (DD)
gttggttcgctaaactgcatcgtcgctgtgtcccagaacatgggcatcggcaagaacggggacctgccctggccaccgctcaggaatgaattcagatatttcttcagaatgaccacaacctcttcagtagaaggtaaacagaatctggtgattatgggtaagaagacctggttctccattcctgagaagttccgacctttaaagggtagaattaatttagttctcagcagagaactcaaggaacctccacaaggagctcattttctttccagaagtctagatgatgccttaaaacttactgaacaaccagaattagcaaataaagtagacatggtctggatagttggtggcagttctgttattaaggaagccatgaatcacccaggccatcttaaactatttgtgacaaggatcatgcaagactttgaaagtgacacgttttttccagaaattgatttggagaaatataaacttctgccagaatacccaggtgttctctctgatgtccaggaggagaaaggcattaagtacaaatttgaagtatatgagaagaatgat

SEQ ID NO: 220 - DNA, 558 bp, Artificial Sequence
  Description of Artificial Sequence: Synthetic Destabilizing Domain (DD)
gtgggctccctgaactgcatcgtggccgtgagccagaacatgggcatcggcaagaatggcgacctgccttggccacctctgaggaacgagttcagatactttttcaggatgaccacaaccagctccgtggagggcaagcagaacctggtcatcatgggcaagaagacatggttctctatccccgagaagttccgccctctgaagggccggatcaatctggtgctgagcagagagctgaaggagccaccacagggagcacacttcctgagccggagcctggacgatgccctgaagctgaccgagcagcccgagctggccaacaaggtggacatggtgtggatcgtgggcggctctagcgtgatcaaggaggccatgaatcacccaggccacctgaagctgttcgtgacaagaatcatgcaggactttgagtccgataccttctttcccgagatcgacctggagaagtacaagctgctgcctgagtatccaggcgtgctgtctgatgtgcaggaggagaagggcatcaagtacaagttcgaggtgtatgagaagaatgat

SEQ ID NO: 221 - protein, 186 aa, Artificial Sequence
  Description of Artificial Sequence: Synthetic Destabilizing Domain (DD)
VGSLNCIVAVSQNMGIGKNGDLPWPPLRNEFRYFFRMTTTSSVEGKQNLVIMGKKTWFSIPEKNRPLKGRINLVLSRELKEPPQGAHFLSRSLDDALKLTEQPELANKVDMVWIVGGSSVIKEFMNHPGHLKLFVTRIMQDFESDTFFPEIDLEKYKLLPEYPGVLSDVQEEKGIKYKFEVYEKND

SEQ ID NO: 222 - DNA, 558 bp, Artificial Sequence
  Description of Artificial Sequence: Synthetic Destabilizing Domain (DD)
gtgggcagcctgaactgtatcgtggccgtgtcccagaacatgggcatcggcaagaatggcgatctgccatggccccctctgcggaacgagttcagatacttctttaggatgaccacaaccagctccgtggagggcaagcagaacctggtcatcatgggcaagaagacctggttttctatccccgagaagaacagacctctgaagggcaggatcaatctggtgctgagcagagagctgaaggagccaccacagggagcacacttcctgagccggagcctggacgatgccctgaagctgacagagcagccagagctggccaacaaggtggacatggtgtggatcgtgggcggctctagcgtgatcaaggagtttatgaatcaccccggccacctgaagctgttcgtgaccagaatcatgcaggactttgagtccgatacattctttcctgagatcgatctggagaagtacaagctgctgccagagtatcccggcgtgctgtctgacgtgcaggaggagaagggcatcaagtacaagttcgaggtgtatgagaagaacgat

SEQ ID NO: 223 - protein, 186 aa, Artificial Sequence
  Description of Artificial Sequence: Synthetic Destabilizing Domain (DD)
VGSLNCIVAVSQNMGIGKNGDLPWPPLRNEFRYFKRMTTTSSVEGKQNLVIMGKKTWFSIPEKFRPLKGRINLVLSRELKEPPQGAHFLSRSLDDALKLTEQPELANKVDMVWIVGGSSVIKEAMNHPGHLKLFVTRIMQDFESDTFFPEIDLEKYKLLPEYPGVLSDVQEEKGIKYKFEVYEKND

SEQ ID NO: 224 - DNA, 558 bp, Artificial Sequence
  Description of Artificial Sequence: Synthetic Destabilizing Domain (DD)
gttggttcgctaaactgcatcgtcgctgtgtcccagaacatgggcatcggcaagaacggggacctgccctggccaccgctcaggaatgaattcagatatttcaagagaatgaccacaacctcttcagtagaaggtaaacagaatctggtgattatgggtaagaagacctggttctccattcctgagaagttccgacctttaaagggtagaattaatttagttctcagcagagaactcaaggaacctccacaaggagctcattttctttccagaagtctagatgatgccttaaaacttactgaacaaccagaattagcaaataaagtagacatggtctggatagttggtggcagttctgttattaaggaagccatgaatcacccaggccatcttaaactatttgtgacaaggatcatgcaagactttgaaagtgacacgttttttccagaaattgatttggagaaatataaacttctgccagaatacccaggtgttctctctgatgtccaggaggagaaaggcattaagtacaaatttgaagtatatgagaagaatgat

SEQ ID NO: 225 - protein, 186 aa, Artificial Sequence
  Description of Artificial Sequence: Synthetic Destabilizing Domain (DD)
VGSLNCIVAVSQNMGIGKNGDLPWPPLRNEFRYFQRMTTTSSVEGKQNLVIMGKKTWFSIPEKNRPLKGRINLVLSRELKEPPQGAHFLSRSLDDALKLTEQPELANKVDMVWIVGGSSVIKEAMNHPGRLKLFVTRIMQDFGSDTFFPEIDLEKYKLLPEYPGVLSDVQEEKGIKYKFEVYEKND

SEQ ID NO: 226 - DNA, 558 bp, Artificial Sequence
  Description of Artificial Sequence: Synthetic Destabilizing Domain (DD)
gttggttcgctaaactgcatcgtcgctgtgtcccagaacatgggcatcggcaagaacggggacctgccctggccaccgctcaggaatgaattcagatatttccagagaatgaccacaacctcttcagtagaaggtaaacagaatctggtgattatgggtaagaagacctggttctccattcctgagaagaatcgacctttaaagggtagaattaatttagttctcagcagagaactcaaggaacctccacaaggagctcattttctttccagaagtctagatgatgccttaaaacttactgaacaaccagaattagcaaataaagtagacatggtctggatagttggtggcagttctgttattaaggaagccatgaatcacccaggccgtcttaaactatttgtgacaaggatcatgcaagactttggaagtgacacgttttttccagaaattgatttggagaaatataaacttctgccagaatacccaggtgttctctctgatgtccaggaggagaaaggcattaagtacaaatttgaagtatatgagaagaatgat

SEQ ID NO: 227 - protein, 186 aa, Artificial Sequence
  Description of Artificial Sequence: Synthetic Destabilizing Domain (DD)
VGSLNCIVAVSQNMGIGKNGSLPWPPLRNEMSYFSRMTTTSSVEGKQNLVIMGKKTWFSIPEKSRPLKGRINLVLSRELKEPPQGAHFLSRSLDDALKLTEQPELANKVDMVWIVGGSSVYKEAMNHPGHLKLFVTRIMQDFESDTFFPEIDLEKYKLLPEYPGVLSDVQEEKGIKYKFEVYEKND

SEQ ID NO: 228 - DNA, 558 bp, Artificial Sequence
  Description of Artificial Sequence: Synthetic Destabilizing Domain (DD)
gttggttcgctaaactgcatcgtcgctgtgtcccagaacatgggcatcggcaagaacgggtccctgccctggccaccgctcaggaatgaaatgagctatttctcgagaatgaccacaacctcttcagtagaaggtaaacagaatctggtgattatgggtaagaagacctggttctccattcctgagaagagtcgacctttaaagggtagaattaatttagttctcagcagagaactcaaggaacctccacaaggagctcattttctttccagaagtctagatgatgccttaaaacttactgaacaaccagaattagcaaataaagtagacatggtctggatagttggtggcagttctgtttataaggaagccatgaatcacccaggccatcttaaactatttgtgacaaggatcatgcaagactttgaaagtgacacgttttttccagaaattgatttggagaaatataaacttctgccagaatacccaggtgttctctctgatgtccaggaggagaaaggcattaagtacaaatttgaagtatatgagaagaatgat

SEQ ID NO: 229 - protein, 187 aa, Artificial Sequence
  Description of Artificial Sequence: Synthetic Destabilizing Domain (DD)
MVGSLNCIVAVSQNMGNGKNGDLPWPPLRNEFRYFQRMTTTSSVEGKQNLVIMGKKTWFSIPEKNRPLKGRINLVLSRELKEPPQGAHFLSRSLDDASRLTEQPELANKVDTVWIVGGSSVYKEAMNHPGHLKLFVTRIMQDFESDTFFPGIDLEKYKLLPGYPGVLSDVQGEKGIKYKFEVYEKND

SEQ ID NO: 230 - DNA, 561 bp, Artificial Sequence
  Description of Artificial Sequence: Synthetic Destabilizing Domain (DD)
atggttggttcgctaaactgcatcgtcgctgtgtcccagaacatgggcaacggcaagaacggggacctgccctggccaccgctcaggaatgaattcagatatttccagagaatgaccacaacctcttcagtagaaggtaaacagaatctggtgattatgggtaagaagacctggttctccattcctgagaagaatcgacctttaaagggtagaattaatttagttctcagcagagaactcaaggaacctccacaaggagctcattttctttccagaagtctggatgatgcctcaagacttactgaacaaccagaattagccaataaagtagacacagtctggatagttggtggcagttctgtttataaggaagccatgaatcacccaggccatcttaaactatttgtgacaaggatcatgcaagactttgaaagtgacacgttttttccaggaattgatttggagaaatataaacttctgccaggatacccaggtgttctctctgatgtccagggggagaaaggcattaagtacaaatttgaagtatatgagaagaatgat

SEQ ID NO: 231 - protein, 187 aa, Artificial Sequence
  Description of Artificial Sequence: Synthetic Destabilizing Domain (DD)
MVGSLNCIVAVSQNMSVGKNGDLPWPPLRNEFRYFQRMTTTSSVEGKQNLVIMGKKTWFSIPEKNRPLKGRINLVLSRELKEPPQGAHLLSRSLDGALKLTEQPELANKVDMVWIVGGSSVYEEAMNHPGHLKLFVTRIVQDFESGTFFPEIDLERYKLLPEYPGVLSDVQEEKGIKYKFEVYEKND

SEQ ID NO: 232 - DNA, 561 bp, Artificial Sequence
  Description of Artificial Sequence: Synthetic Destabilizing Domain (DD)
atggttggttcgctaaactgcatcgtcgctgtgtcccagaacatgagcgtcggcaagaacggggacctgccctggccaccgctcaggaatgaattcagatattttcagagaatgaccacaacctcttcagtagaaggtaaacagaatctggtgattatgggtaagaagacctggttctccattcctgagaagaatcgacctttaaagggtagaattaatttagttctcagcagagaactcaaggaacctccacaaggagctcatcttctttccagaagtctagatggtgccttaaaacttactgagcaaccagaattagcaaataaagtagacatggtctggatagttggtggcagttctgtttatgaggaagccatgaatcacccaggccatcttaaactatttgtgacaaggatcgtgcaagactttgagagtggcacgtttttcccagaaattgatttggagagatataaacttctgccagaatacccaggtgttctctctgatgtccaggaggagaaaggcattaagtacaaatttgaagtatatgagaagaatgat

SEQ ID NO: 233 - protein, 187 aa, Artificial Sequence
  Description of Artificial Sequence: Synthetic Destabilizing Domain (DD)
MVGSLNCIVAVSQNMGIGKNGDLPWPPLRNEFRYFQRMTTTSSVEGKQNLVIMGKKTWFSIPEKNRPLKGRINLVLSRELREPPQGAHFLSRSLDDALRPTGQPELADKVDMVWIVGGSSVYREAMNRPGHLKLFVTRIMQGFESDTFFPEIDLEKYKLLPEYPGVLSDVQEEKGIKYKLEVYEEND

SEQ ID NO: 234 - DNA, 561 bp, Artificial Sequence
  Description of Artificial Sequence: Synthetic Destabilizing Domain (DD)
atggttggttcgctaaactgcatcgtcgctgtgtcccagaacatgggcatcggcaagaacggggacctgccctggccaccgctcaggaatgaattcagatatttccagagaatgaccacaacctcttcagtagaaggtaaacagaatctggtgattatgggtaagaagacctggttctccattcctgagaagaatcgacctttaaagggtagaattaatttagttctcagcagagagctcagggaacctccacaaggagctcattttctttccagaagtctagatgatgccttaagacctactggacaaccagaattagcagataaagtagacatggtctggatagttggtggcagttctgtttatagggaagccatgaatcgcccaggccatcttaaactgtttgtaacaaggatcatgcaaggctttgaaagtgacacgttttttccagaaattgatttggagaaatataagcttctgccagaatacccaggtgttctctctgatgtccaggaggagaaaggcattaagtacaaacttgaagtgtatgaggagaatgat

SEQ ID NO: 235 - protein, 187 aa, Artificial Sequence
  Description of Artificial Sequence: Synthetic Destabilizing Domain (DD)
MVGSLNCIVAVSQNMGIGKNGDLPWPPLRNEFRYFQRMTTTSSVEGKQNLVIMGKKTWFSIPEKNRPLKGRINLVLSRELKEPPQGAHFLSRSLDDALKLTEQPELANKVDMVWIVGGSSVYKEAMNHPGHLKLFVTGIMQGSESDTFFPEIDLERYELLPGYPGALSDVQEEKGIECKFEVYEESD

SEQ ID NO: 236 - DNA, 561 bp, Artificial Sequence
  Description of Artificial Sequence: Synthetic Destabilizing Domain (DD)
atggttggttcgctaaactgcatcgtcgctgtgtcccagaacatgggcatcggcaagaacggggacctgccctggccaccgctcaggaatgaattcagatatttccagagaatgaccacaacctcttcagtagaaggtaaacagaatctggtgattatgggtaagaagacctggttctccattcctgagaagaatcgacctttaaagggtagaattaatttagttctcagcagagaactcaaggaacctccacaaggagctcattttctttccagaagtctagatgatgccttaaaacttactgaacaaccagaattagcaaataaagtagacatggtctggatagttggtggcagttctgtttataaggaagccatgaatcacccaggccatcttaaactatttgtgacagggatcatgcaaggctctgaaagtgacacgttttttccagaaattgatttggagagatatgaacttctgccaggatacccaggtgctctctctgatgttcaggaggagaaaggcattgagtgcaaatttgaagtatatgaggagagtgac

SEQ ID NO: 237 - protein, 187 aa, Artificial Sequence
  Description of Artificial Sequence: Synthetic Destabilizing Domain (DD)
MVGSLNCIVAVSQSMGIGKNGDLSWPPLRNEFRYLQRMTTTSSVEGKQNLVITGKETWFSIPEKNRPLKGRINLVLSRELKEPPQGAHFLSGGLDDALKLTEQPELANKVDMVWIVGGSSVYKEAMSYPGHLKLLVTRIMQDSESDTFFPEIDLEKYKPPPEYPGVLSDVQEAKGIKYKLEVYEKND

SEQ ID NO: 238 - DNA, 561 bp, Artificial Sequence
  Description of Artificial Sequence: Synthetic Destabilizing Domain (DD)
atggttggttcgctaaactgcatcgtcgctgtgtcccagagcatgggcatcggcaagaacggggacctgtcctggccaccgctcaggaatgaattcagatatctccagagaatgaccacaacctcttcagtagaaggtaaacagaatctggtgattacgggtaaggagacctggttctccattcctgagaagaatcgacctttaaagggtagaatcaatttagtcctcagcagagagctcaaggaacctccacaaggagctcattttctttccgggggtctagatgatgccttaaaacttactgaacaaccagaattagcaaataaagtagacatggtctggatagttggtggcagttctgtttataaggaagccatgagttacccaggccatcttaaactacttgtgacaaggatcatgcaagactctgaaagtgacacgttttttccagaaattgatttggagaaatataaacctccgccagaatacccaggtgttctctctgatgtccaggaggcgaaaggcattaagtacaaacttgaagtatatgagaagaatgat

SEQ ID NO: 239 - protein, 187 aa, Artificial Sequence
  Description of Artificial Sequence: Synthetic Destabilizing Domain (DD)
MVGSLNCIVAVSQNMGIGKNGDLPWPPLRNEFRYLQGMTTTSSVEGKQNLVIMGKKTWFSIPEKARPSEGGINLVLSREPKEPPQGAHFLSRSLDDALGLTEQPELANKVDMVWIVDGSSVYKEAMNHPGHPKLFVTRVIQGFESGTFFPEIDLEKYKLLPEYPGVLSDVQEGKGIKYKFEVYEKNG

SEQ ID NO: 240 - DNA, 561 bp, Artificial Sequence
  Description of Artificial Sequence: Synthetic Destabilizing Domain (DD)
atggttggttcgctaaactgcatcgtcgctgtgtcccagaacatgggcatcggcaagaacggggacctgccctggccaccgctcaggaatgaattcagatatctccagggaatgaccacaacctcttcagtagaaggtaaacagaatctggtgattatgggtaagaagacctggttctccattcctgagaaggctcgaccttcagagggtggaattaatttagttctcagtagagaacccaaggaacctccacaaggagctcatttcctttccagaagtctagatgatgccttaggacttactgaacaaccggaattagcaaataaagtagacatggtctggatagttgatggcagctctgtttataaggaagccatgaatcacccaggccaccctaaactatttgtgacaagggtcatacaaggctttgaaagtggcacgttttttccagaaattgatttggagaaatataaacttctgccagaatacccaggtgttctctctgacgtccaggaggggaaaggcattaagtacaaatttgaagtatatgagaagaatggt

SEQ ID NO: 241 - protein, 187 aa, Artificial Sequence
  Description of Artificial Sequence: Synthetic Destabilizing Domain (DD)
MVGSLNCIVAVSQNMGIGKNGDLPWPPPRHEFRYFQRVTTTSSAEGKQNLVIMGKKTWFSIPEKNRPSKGRIGLVLSGELKEPPQGAHFLSRSLDDTLRLTEQPELTNRVNMVWIVGGSSVYKEAMNHPGHLRPVVTRIMQDFESDAFFPEVDLEKYRLLPEYPGVLSDVQGEKGIKYKFEAYRKND

SEQ ID NO: 242 - DNA, 561 bp, Artificial Sequence
  Description of Artificial Sequence: Synthetic Destabilizing Domain (DD)
atggttggttcgctaaactgcatcgtcgctgtgtcccagaacatgggcatcggcaagaacggggacctgccctggccaccgcccaggcatgaattcagatatttccagagagtgaccacaacctcttcagcagaaggtaaacagaatctggtgattatgggcaagaagacctggttctccatccctgagaagaatcgaccttcaaagggtagaattggtttagttctcagcggagaactcaaggaacctccacagggagcccactttctctccaggagtctagatgataccttaagacttactgaacaaccagaattaacgaatagagtaaacatggtctggatagttggtggcagttctgtttataaggaggccatgaatcacccaggccaccttagaccagttgtgacaaggatcatgcaggactttgaaagcgacgcgttttttccagaagttgacttggagaaatatagacttctaccagaatacccaggtgttctctctgatgtccagggggagaaaggcattaagtacaaatttgaagcatataggaagaatgat

SEQ ID NO: 243 - protein, 187 aa, Artificial Sequence
  Description of Artificial Sequence: Synthetic Destabilizing Domain (DD)
MAGSLNCIVAVSQNMGVGKNGDLPWPPLRDGFRYFRRMTTTSSVEGKQNLVIMGKKTWSSIPEKNRPLEGRTNLVLSRELKEPPQGAYLLSRSLDDALKLTEQPELADEAGMVWVVGGSSVDKEAMNHPGHPKLSVTRIVQDFGSDAFFPEIDLEKCKLLPEYPGVLSDAQEERGIKYKFEVYEKSD

SEQ ID NO: 244 - DNA, 561 bp, Artificial Sequence
  Description of Artificial Sequence: Synthetic Destabilizing Domain (DD)
atggctggttcgctaaactgcatcgtcgctgtgtcccagaatatgggcgtcggcaagaacggggacctgccctggccaccgctcagggatggattcagatatttccggagaatgaccacaacctcttcagtagaaggtaaacagaatctggtgattatgggtaagaagacctggtcctccattcctgagaagaatcgacctttagagggtagaactaatttagttctcagcagagaactcaaggaacctccacaaggagcttatcttctttccagaagtctagatgatgccttaaaacttactgagcagccagaattagcagatgaagcaggcatggtctgggtagttggtggcagttctgttgataaggaagccatgaatcacccaggccatcccaaactatctgtgacaaggatcgtgcaagactttggaagtgacgcgttttttccagaaattgatttggagaaatgcaaacttctgccagaatacccaggtgttctctctgatgcccaggaggagagaggcattaagtacaaatttgaagtatacgagaagagtgac

SEQ ID NO: 245 - protein, 187 aa, Artificial Sequence
  Description of Artificial Sequence: Synthetic Destabilizing Domain (DD)
MVGSLNCIVAVSQNMGIGKNGDLPWPPLRNEFRYFQRMTTTSSVEGKQNLVIMGKKTWFSIPEKNRPLKGRINLVLSRELKEPPQGAHFLSRSLDDALKPTGRSGLADKVDMARIVGGSSVCKEAIRYPGHPKLPVTRTMQDFESDTSLPEVALEKYKLLPEYPGVLSGAQEEKGARYKFEAYERSD

SEQ ID NO: 246 - DNA, 561 bp, Artificial Sequence
  Description of Artificial Sequence: Synthetic Destabilizing Domain (DD)
atggttggttcgctaaactgcatcgtcgctgtgtcccagaacatgggcatcggcaagaacggggacctgccctggccaccgctcaggaatgaattcagatatttccagagaatgaccacaacctcttcagtagaaggtaaacagaatctggtgattatgggtaagaagacctggttctccattcctgagaagaatcgacctttaaagggtagaattaatttagttctcagcagagaactcaaggaacctccacaaggagcccattttctctccagaagtctggatgatgccctaaaacctactggacgatcaggattagcagataaagtagacatggcccggatagttggcggcagctctgtttgtaaggaagccataaggtacccaggccaccctaagctacctgtgacaaggaccatgcaagactttgaaagtgacacgtctcttccagaagttgccttggagaagtataagcttctgccagaatacccaggtgtgctctctggtgcccaggaggagaagggcgctaggtacaagtttgaagcatacgaaaggagtgat

SEQ ID NO: 247 - protein, 186 aa, Artificial Sequence
  Description of Artificial Sequence: Synthetic Destabilizing Domain (DD)
MVGSLNCIVTVSRSMGIGKDGDLSWPPLRSEFRYFQRTTATSSVEGRQSLVIMGKRTWFSTPERNRPLRGRANLVLSGELKGPPQGAHLLSRSLDGALKLTEQPELADKVDVVRIVGGSSVDEEAMNHPGHLKLFVTRVMRGFESDTLFPGIDLGKRKLLPEYPGVLSDVREEKGIKYKLEVCGNN

SEQ ID NO: 248 - DNA, 558 bp, Artificial Sequence
  Description of Artificial Sequence: Synthetic Destabilizing Domain (DD)
atggttggctcgctaaactgcatcgtcactgtgtcccggagcatgggcatcggcaaggacggggacctgtcctggccaccgctcaggagtgaattcaggtactttcagagaacgaccgcaacctcttcagtagaaggtagacagagtctggtgatcatgggcaagaggacctggttctccactcctgagaggaatcgacccttaaggggtagagctaacttagttctcagcggagagctcaagggacctccacaaggagctcatcttctttccagaagtctagatggtgccttaaaacttactgaacagccagagttagcagataaagtagacgtggtccggatagttggtggcagttctgttgatgaggaagccatgaatcacccaggccatcttaaactatttgtgacaagagtcatgcggggctttgaaagtgatacgctttttccaggaatcgacttggggaaacgtaaacttctgccagaatacccaggtgttctctctgatgtccgggaggagaaaggcattaagtacaaacttgaagtatgtgggaataat

SEQ ID NO: 249 - protein, 186 aa, Artificial Sequence
  Description of Artificial Sequence: Synthetic Destabilizing Domain (DD)
VGSLNCIVAVSQNMGAGKNGDLPWPPLRNEFRYFQRMTTTSSVEGKQNLVIMGKKTWFSIPEKNRPLKGRINLVLSRELKEPPQGAHFLSRSLDDALKLTEQPELANKVDMVWIVGGSSVYKEAMNHPGHLKLFVTRIMQDFESDTFFPEIDLEKYKLLPEYPGVLSDVQEEKGIKYKFEVYEKND

SEQ ID NO: 250 - DNA, 558 bp, Artificial Sequence
  Description of Artificial Sequence: Synthetic Destabilizing Domain (DD)
gttggttcgctaaactgcatcgtcgctgtgtcccagaacatgggcgccggcaagaacggggacctgccctggccaccgctcaggaatgaattcagatatttccagagaatgaccacaacctcttcagtagaaggtaaacagaatctggtgattatgggtaagaagacctggttctccattcctgagaagaatcgacctttaaagggtagaattaatttagttctcagcagagaactcaaggaacctccacaaggagctcattttctttccagaagtctagatgatgccttaaaacttactgaacaaccagaattagcaaataaagtagacatggtctggatagttggtggcagttctgtttataaggaagccatgaatcacccaggccatcttaaactatttgtgacaaggatcatgcaagactttgaaagtgacacgttttttccagaaattgatttggagaaatataaacttctgccagaatacccaggtgttctctctgatgtccaggaggagaaaggcattaagtacaaatttgaagtatatgagaagaatgat

SEQ ID NO: 251 - protein, 186 aa, Artificial Sequence
  Description of Artificial Sequence: Synthetic Destabilizing Domain (DD)
VGSLNCIVAVSQNMGAGKNGDLPWPPLRNEFRYFQRMTTTSSVEGKQNLVIMGKKTWFSIPEKNRPLKGRINLVLSRELKEPPQGAHFLSRSLDDALKLTEQPELANKVDMVWIVGGSSVIKEAMNHPGHLKLFVTRIMQDFESDTFFPEIDLEKYKLLPEYPGVLSDVQEEKGIKYKFEVYEKND

SEQ ID NO: 252 - DNA, 558 bp, Artificial Sequence
  Description of Artificial Sequence: Synthetic Destabilizing Domain (DD)
gttggttcgctaaactgcatcgtcgctgtgtcccagaacatgggcgccggcaagaacggggacctgccctggccaccgctcaggaatgaattcagatatttccagagaatgaccacaacctcttcagtagaaggtaaacagaatctggtgattatgggtaagaagacctggttctccattcctgagaagaatcgacctttaaagggtagaattaatttagttctcagcagagaactcaaggaacctccacaaggagctcattttctttccagaagtctagatgatgccttaaaacttactgaacaaccagaattagcaaataaagtagacatggtctggatagttggtggcagttctgttattaaggaagccatgaatcacccaggccatcttaaactatttgtgacaaggatcatgcaagactttgaaagtgacacgttttttccagaaattgatttggagaaatataaacttctgccagaatacccaggtgttctctctgatgtccaggaggagaaaggcattaagtacaaatttgaagtatatgagaagaatgat

SEQ ID NO: 253 - protein, 159 aa, Artificial Sequence
  Description of Artificial Sequence: Synthetic Destabilizing Domain (DD)
MISLIAALAVDYVIGMENAMPWNLPADLAWFKRNTLNKPVIMGRHTWESIGRPLPGRKNIILSSQPGTDDRVTWVKSVDEAIAACGDVPEIMVIGGGRVIEQFLPKAQKLYLTHIDAEVEGDTHFPDYEPDDWESVFSEFHDADAQNSHSYCFEILERR

SEQ ID NO: 254 - DNA, 477 bp, Artificial Sequence
  Description of Artificial Sequence: Synthetic Destabilizing Domain (DD)
atgatctctctgattgcggcgctggcagttgactacgttattggcatggaaaacgcgatgccatggaacctcccggctgacctggcgtggttcaaacgtaacaccctgaacaaacctgtgatcatgggtcgtcacacctgggaatctattggccgtcctctcccgggtcgtaaaaacatcattctgtcttctcagccaggcaccgacgaccgtgttacctgggttaaaagcgttgacgaagcgattgctgcgtgcggtgatgttcctgaaattatggtgatcggcggtggccgtgttatcgaacagttcctgccgaaagcgcagaaactgtacctgacccacatcgacgcggaagttgaaggtgacacccacttcccggactacgaaccggatgattgggagagcgtattctccgaattccatgatgcggatgcgcaaaactctcattcttactgttttgaaatcctggaacgtcgt

SEQ ID NO: 255 - protein, 158 aa, Artificial Sequence
  Description of Artificial Sequence: Synthetic Destabilizing Domain (DD)
ISLIAALAVDYVIGMENAMPWNLPADLAWFKRNTLNKPVIMGRHTWESIGRPLPGRKNIILSSQPGTDDRVTWVKSVDEAIAACGDVPEIMVIGGGRVIEQFLPKAQKLYLTHIDAEVEGDTHFPDYEPDDWESVFSEFHDADAQNSHSYCFEILERR

SEQ ID NO: 256 - DNA, 474 bp, Artificial Sequence
  Description of Artificial Sequence: Synthetic Destabilizing Domain (DD)
atctctctgattgcggcgctggcagttgactacgttattggcatggaaaacgcgatgccatggaacctcccggctgacctggcgtggttcaaacgtaacaccctgaacaaacctgtgatcatgggtcgtcacacctgggaatctattggccgtcctctcccgggtcgtaaaaacatcattctgtcttctcagccaggcaccgacgaccgtgttacctgggttaaaagcgttgacgaagcgattgctgcgtgcggtgatgttcctgaaattatggtgatcggcggtggccgtgttatcgaacagttcctgccgaaagcgcagaaactgtacctgacccacatcgacgcggaagttgaaggtgacacccacttcccggactacgaaccggatgattgggagagcgtattctccgaattccatgatgcggatgcgcaaaactctcattcttactgttttgaaatcctggaacgtcgt

SEQ ID NO: 257 - DNA, 474 bp, Artificial Sequence
  Description of Artificial Sequence: Synthetic Destabilizing Domain (DD)
atctctctgatcgccgccctggccgtggattacgtgatcggcatggagaacgccatgccatggaatctgccagcagacctggcatggttcaagaggaacacactgaataagccagtgatcatgggcagacacacctgggagtccatcggccggccactgccaggcagaaagaacatcatcctgagctcccagcccggcacagacgatagggtgacctgggtgaagagcgtggacgaggcaatcgcagcatgcggcgatgtgcctgagatcatggtcatcggaggaggacgcgtgatcgagcagttcctgccaaaggcccagaagctgtacctgacacacatcgatgccgaggtggagggcgacacccactttcctgattatgagccagacgattgggagtccgtgttctctgagtttcacgacgccgatgcccagaactctcacagctattgttttgagatcctggagcggaga

SEQ ID NO: 258 - DNA, 474 bp, Artificial Sequence
  Description of Artificial Sequence: Synthetic Destabilizing Domain (DD)
atctccctgatcgccgccctggccgtggattatgtgatcggcatggagaacgccatgccctggaatctgcccgccgacctggcctggttcaagaggaataccctgaacaagcccgtcatcatgggcaggcacacctgggaaagcatcggcagacccctgcccggcaggaagaacatcatcctgtccagccagcccggcaccgacgacagagtgacctgggtgaagagcgtggacgaagctatcgccgcttgcggcgacgtgcccgagatcatggtgatcggcggcggcagggtgatcgaacagttcctgcccaaggcccagaagctgtacctgacccacatcgatgccgaggtggaaggcgatacacacttccccgattacgaacctgacgactgggaaagcgtgttttccgaattccacgacgccgacgcccagaacagccacagctactgcttcgagatcctggaaagaagg

SEQ ID NO: 259 - DNA, 474 bp, Artificial Sequence
  Description of Artificial Sequence: Synthetic Destabilizing Domain (DD)
atctccctgatcgccgccctggcagtggactacgtgatcggcatggagaacgccatgccctggaatctgcctgccgatctggcctggtttaagagaaacacactgaataagcccgtgatcatgggccggcacacctgggagtctatcggcaggcccctgcctggcaggaagaacatcatcctgtcctctcagcctggcacagacgatagagtgacctgggtgaagagcgtggacgaggcaatcgcagcatgtggcgatgtgcccgagatcatggtcatcggcggcggcagagtgatcgagcagttcctgcctaaggcccagaagctgtatctgacacacatcgacgccgaggtggagggcgacacccactttccagattacgagcccgacgattgggagtccgtgttctctgagtttcacgacgccgatgcccagaattcccactcttattgcttcgagatcctggagaggaga

SEQ ID NO: 260 - DNA, 474 bp, Artificial Sequence
  Description of Artificial Sequence: Synthetic Destabilizing Domain (DD)
atctccctgatcgccgccctggcagtggactacgtgatcggcatggagaacgccatgccctggaatctgcctgccgatctggcctggtttaagagaaacacactgaataagcccgtgatcatgggccggcacacctgggagagcatcggcagacctctgccaggccggaagaacatcatcctgtcctctcagcctggcacagacgatagagtgacctgggtgaagtccgtggacgaggcaatcgcagcatgcggcgatgtgcccgagatcatggtcatcggcggcggcagagtgatcgagcagttcctgcctaaggcccagaagctgtatctgacacacatcgacgccgaggtggagggcgacacccactttccagattacgagcccgacgattgggagtccgtgttctctgagtttcacgacgccgatgcccagaattcccactcttattgtttcgagatcctggagagaaga

SEQ ID NO: 261 - DNA, 474 bp, Artificial Sequence
  Description of Artificial Sequence: Synthetic Destabilizing Domain (DD)
atcagcctgatcgccgccctggcagtggactacgtgatcggcatggagaacgccatgccctggaatctgcctgccgatctggcctggttcaagagaaacacactgaataagcccgtgatcatgggccggcacacctgggagtccatcggcaggcccctgcctggcaggaagaacatcatcctgagctcccagcctggcacagacgatagagtgacctgggtgaagagcgtggacgaggcaatcgcagcatgcggcgatgtgcccgagatcatggtcatcggcggcggcagagtgatcgagcagttcctgcctaaggcccagaagctgtatctgacacacatcgacgccgaggtggagggcgacacccactttccagattacgagcccgacgattgggagtccgtgttctctgagtttcacgacgccgatgcccagaacagccactcctactgcttcgagatcctggagaggaga

SEQ ID NO: 262 - DNA, 474 bp, Artificial Sequence
  Description of Artificial Sequence: Synthetic Destabilizing Domain (DD)
atctctctgatcgccgccctggcagtggactacgtgatcggcatggagaacgccatgccatggaatctgcccgccgatctggcctggttcaagcggaacaccctgaataagccagtgatcatgggcagacacacatgggagtctatcggcaggcccctgcctggacgcaagaacatcatcctgagctcccagcccggcaccgacgatagggtgacatgggtgaagtccgtggacgaggcaatcgcagcatgcggcgatgtgcccgagatcatggtcatcggcggcggcagagtgatcgagcagttcctgcctaaggcccagaagctgtacctgacccacatcgacgccgaggtggagggcgacacacactttcctgattatgagccagacgattgggagagcgtgttctccgagtttcacgacgccgatgcccagaacagccacagctattgttttgagatcctggagcggaga

SEQ ID NO: 263 - DNA, 474 bp, Artificial Sequence
  Description of Artificial Sequence: Synthetic Destabilizing Domain (DD)
atctcacttatcgcagccttggcagttgattatgtgatcggcatggaaaatgcgatgccatggaatcttccggccgacctcgcttggttcaaacgcaacaccctgaacaaacccgttattatgggccgacatacatgggaaagtatcggcaggccattgcccggtcggaaaaacataatcctttcctcccagccgggcacggacgatagagtgacttgggtcaaatcagttgacgaggccattgctgcctgcggcgatgtacccgagattatggttatcggaggggggcgagttattgagcagtttctgcccaaagcgcagaagttgtaccttactcatatagatgcagaggtagagggcgacacgcatttccccgactacgaaccggatgattgggaatccgtattttccgaattccacgacgcggatgcccaaaacagtcactcttactgttttgaaattcttgagcgacgc

SEQ ID NO: 264 - protein, 158 aa, Artificial Sequence
  Description of Artificial Sequence: Synthetic Destabilizing Domain (DD)
ISLIAALAVDHVIGMENAMPWNLPADLAWFKRNTLNKPVIMGRHTWESIGRPLPGRKNIILSSQPGTDDRVTWVKSVDEAIAACGDVPEIMVIGGGRVYEQFLPKAQKLYLTHIDAEVEGDTHFPDYKPDDWESVFSEFHDADAQNSHSYCFEILERR

SEQ ID NO: 265 - DNA, 474 bp, Artificial Sequence
  Description of Artificial Sequence: Synthetic Destabilizing Domain (DD)
atctccctgatcgccgccctggcagtggaccacgtgatcggcatggagaacgccatgccatggaatctgcccgccgatctggcctggttcaagcggaacaccctgaataagccagtgatcatgggcagacacacatgggagtctatcggcaggcccctgcctggacgcaagaacatcatcctgagctcccagcccggcaccgacgatagggtgacatgggtgaagtccgtggacgaggcaatcgcagcatgcggcgatgtgcccgagatcatggtcatcggcggcggcagagtgtacgagcagttcctgcctaaggcccagaagctgtatctgacccacatcgacgccgaggtggagggcgacacacactttcctgattacaagccagacgattgggagtccgtgttctctgagtttcacgacgccgatgcccagaattctcacagctattgttttgagatcctggagcggaga

SEQ ID NO: 266 - DNA, 474 bp, Artificial Sequence
  Description of Artificial Sequence: Synthetic Destabilizing Domain (DD)
atctctctgattgcggcgctggcagttgaccacgttattggcatggaaaacgcgatgccatggaacctcccggctgacctggcgtggttcaaacgtaacaccctgaacaaacctgtgatcatgggtcgtcacacctgggaatctattggccgtcctctcccgggtcgtaaaaacatcattctgtcttctcagccaggcaccgacgaccgtgttacctgggttaaaagcgttgacgaagcgattgctgcgtgcggtgatgttcctgaaattatggtgatcggcggtggccgtgtttacgaacagttcctgccgaaagcgcagaaactgtacctgacccacatcgacgcggaagttgaaggtgacacccacttcccggactacaaaccggatgattgggagagcgtattctccgaattccatgatgcggatgcgcaaaactctcattcttactgttttgaaatcctggaacgtcgt

SEQ ID NO: 267 - protein, 158 aa, Artificial Sequence
  Description of Artificial Sequence: Synthetic Destabilizing Domain (DD)
ISLIAALAVDYVIGMENAMPWNLPADLAWFKRNTLNKPVIMGRHTWESIGRPLPGRKNIILSSQPGTDDRVTWVKSVDEAIAACGDVPEIMVIGGGRVYEQFLPKAQKLYLTHIDAEVEGDTHFPDYKPDDWESVFSEFHDADAQNSHSYCFEILERR

SEQ ID NO: 268 - DNA, 474 bp, Artificial Sequence
  Description of Artificial Sequence: Synthetic Destabilizing Domain (DD)
atctctctgattgcggcgctggcagttgactacgttattggcatggaaaacgcgatgccatggaacctcccggctgacctggcgtggttcaaacgtaacaccctgaacaaacctgtgatcatgggtcgtcacacctgggaatctattggccgtcctctcccgggtcgtaaaaacatcattctgtcttctcagccaggcaccgacgaccgtgttacctgggttaaaagcgttgacgaagcgattgctgcgtgcggtgatgttcctgaaattatggtgatcggcggtggccgtgtttacgaacagttcctgccgaaagcgcagaaactgtacctgacccacatcgacgcggaagttgaaggtgacacccacttcccggactacaaaccggatgattgggagagcgtattctccgaattccatgatgcggatgcgcaaaactctcattcttactgttttgaaatcctggaacgtcgt

SEQ ID NO: 269 - protein, 158 aa, Artificial Sequence
  Description of Artificial Sequence: Synthetic Destabilizing Domain (DD)
ISLIAALAVDYVIGMENAMPWNLPADLAWFKRNTLNKPVIMGRHTWESIGRPLPGRKNIILSSQPSTDDRVTWVKSVDEAIAACGDVPEIMVIGGGRVIEQFLPKAQKLYLTHIDAEVEGDTHFPDYEPDDWESVFSEFHDADAQNSHSYCFEILERR

SEQ ID NO: 270 - protein, 107 aa, Artificial Sequence; identical to SEQ ID NO: 74
  Description of Artificial Sequence: Synthetic Destabilizing Domain (DD)

SEQ ID NO: 271 - protein, 108 aa, Artificial Sequence
  Description of Artificial Sequence: Synthetic Destabilizing Domain (DD)
MGVQVETISPGDGRTFPKRGQTCVVHYTGMLEDGKKVDSSRDRNKPFKFMLGKQEVIRGWEEGVAQMSVGQRAKLTISPDYAYGATGHPGIIPPHATLVFDVELLKLE

SEQ ID NO: 272 - protein, 107 aa, Artificial Sequence
  Description of Artificial Sequence: Synthetic Destabilizing Domain (DD)
GVQVETISPGDGRTFPKRGQTCVVHYTGMLEDGKKVDSSRDRNKPFKFMLGKQEVIRGWEEGVAQMSVGQRAKLTISPDYAYGATGHPGIIPPHATLVFDVELLKLE

SEQ ID NO: 273 - DNA, 321 bp, Artificial Sequence
  Description of Artificial Sequence: Synthetic Destabilizing Domain (DD)
ggcgtgcaggttgagactataagcccaggcgacggcaggaccttccccaagaggggccagacatgcgtggtgcactacaccggcatgcttgaagacggcaaaaaggtggactcaagcagggacaggaacaagcccttcaagttcatgttgggcaaacaggaggtgatcagaggctgggaggagggtgttgcccagatgagcgtggggcagagggccaagctcacgataagtcccgattacgcctacggcgccaccggtcaccccggcatcatccccccacacgccaccctggtgttcgacgtggaattgctgaagctggag

SEQ ID NO: 274 - protein, 108 aa, Artificial Sequence
  Description of Artificial Sequence: Synthetic Destabilizing Domain (DD)
MGVQVETISPGDGRTFPKRGQTCVVHYTGMLEDGKKVDSSRDRNKPFKFMLGKQEVIRGWEEGVAQMSVGQRAKLTISPDYAYGATGHPGIIPPHATLVFDVELLKPE

SEQ ID NO: 275 - DNA, 324 bp, Artificial Sequence
  Description of Artificial Sequence: Synthetic Destabilizing Domain (DD)
atgggcgtgcaggttgagactataagcccaggcgacggcaggaccttccccaagaggggccagacatgcgtggtgcactacaccggcatgcttgaagacggcaaaaaggtggactcaagcagggacaggaacaagcccttcaagttcatgttgggcaaacaggaggtgatcagaggctgggaggagggtgttgcccagatgagcgtggggcagagggccaagctcacgataagtcccgattacgcctacggcgccaccggtcaccccggcatcatccccccacacgccaccctggtgttcgacgtggaattgctgaagcccgag

SEQ ID NO: 276 - DNA, 324 bp, Artificial Sequence
  Description of Artificial Sequence: Synthetic Destabilizing Domain (DD)
atgggcgtgcaggtggagacaatctcccctggcgatggccggaccttcccaaagagaggccagacatgcgtggtgcactacaccggcatgctggaggacggcaagaaggtggacagctcccgggatagaaacaagcctttcaagtttatgctgggcaagcaggaagtgatcaggggatgggaggagggagtggcacagatgtctgtgggccagagagccaagctgacaatcagccctgattacgcatatggagcaaccggacacccaggaatcatcccacctcacgccaccctggtgtttgacgtggagctgctgaagccagag

SEQ ID NO: 277 - protein, 107 aa, Artificial Sequence
  Description of Artificial Sequence: Synthetic Destabilizing Domain (DD)
GVQVETISPGDGRTFPKRGQTCVVHYTGMLEDGKKVDSSRDRNKPFKFMLGKQEVIRGWEEGVAQMSVGQRAKLTISPDYAYGATGHPGIIPPHATLVFDVELLKPE

SEQ ID NO: 278 - DNA, 321 bp, Artificial Sequence
  Description of Artificial Sequence: Synthetic Destabilizing Domain (DD)
ggcgtgcaggttgagactataagcccaggcgacggcaggaccttccccaagaggggccagacatgcgtggtgcactacaccggcatgcttgaagacggcaaaaaggtggactcaagcagggacaggaacaagcccttcaagttcatgttgggcaaacaggaggtgatcagaggctgggaggagggtgttgcccagatgagcgtggggcagagggccaagctcacgataagtcccgattacgcctacggcgccaccggtcaccccggcatcatccccccacacgccaccctggtgttcgacgtggaattgctgaagcccgag

SEQ ID NO: 279 - DNA, 321 bp, Artificial Sequence
  Description of Artificial Sequence: Synthetic Destabilizing Domain (DD)
ggagtgcaggtggagacaatctctcctggcgatggccggaccttcccaaagagaggccagacatgcgtggtgcactacaccggcatgctggaggacggcaagaaggtggacagctcccgggatagaaacaagccattcaagtttatgctgggcaagcaggaagtgatcaggggatgggaggagggagtggcacagatgtctgtgggccagagagccaagctgacaatcagccctgattacgcatatggagcaaccggacacccaggaatcatcccacctcacgccaccctggtgtttgatgtggagctgctgaagccagag

SEQ ID NO: 280 - DNA, 321 bp, Artificial Sequence
  Description of Artificial Sequence: Synthetic Destabilizing Domain (DD)
ggcgtgcaggtggagacaatcagcccaggcgacggacgcacctttccaaagaggggacagacatgcgtggtgcactacaccggcatgctggaggatggcaagaaggtggactcctctagagatcggaataagccattcaagtttatgctgggcaagcaggaagtgatcagaggctgggaggagggagtggcacagatgtctgtgggacagcgggccaagctgacaatcagccctgactatgcatacggagcaaccggacacccaggaatcatcccaccacacgccacactggtgttcgatgtggagctgctgaagcctgag

SEQ ID NO: 281 - DNA, 321 bp, Artificial Sequence
  Description of Artificial Sequence: Synthetic Destabilizing Domain (DD)
ggagtgcaggtggagacaatctccccaggcgacggcagaacctttcccaagcggggccagacatgcgtggtgcactataccggcatgctggaggatggcaagaaggtggactcctctagagatcggaacaagccattcaagtttatgctgggcaagcaggaagtgatcagaggctgggaggagggagtggcacagatgtctgtgggacagcgggccaagctgacaatcagcccagactatgcatacggagcaaccggacaccctggaatcatccctccacacgccaccctggtgttcgatgtggagctgctgaagcctgag

SEQ ID NO: 282 - DNA, 321 bp, Artificial Sequence
  Description of Artificial Sequence: Synthetic Destabilizing Domain (DD)
ggcgtgcaggtggagacaatctcccctggcgatggccggaccttcccaaagagaggccagacatgcgtggtgcactacaccggcatgctggaggacggcaagaaggtggacagctcccgggatagaaacaagcctttcaagtttatgctgggcaagcaggaagtgatcaggggatgggaggagggagtggcacagatgtctgtgggccagagagccaagctgacaatcagccctgattacgcatatggagcaaccggacacccaggaatcatcccacctcacgccaccctggtgtttgacgtggagctgctgaagccagag

SEQ ID NO: 283 - DNA, 321 bp, Artificial Sequence
  Description of Artificial Sequence: Synthetic Destabilizing Domain (DD)
ggagtgcaggtggagacaatctcccctggcgatggcaggaccttcccaaagcgcggccagacatgcgtggtgcactacaccggcatgctggaggacggcaagaaggtggacagctcccgggatagaaacaagccattcaagtttatgctgggcaagcaggaagtgatcaggggatgggaggagggagtggcacagatgtccgtgggacagcgcgccaagctgacaatctctcctgattacgcatatggagcaaccggacacccaggaatcatcccacctcacgccaccctggtgtttgacgtggagctgctgaagcccgag

SEQ ID NO: 284 - DNA, 321 bp, Artificial Sequence
  Description of Artificial Sequence: Synthetic Destabilizing Domain (DD)
ggcgtgcaggtggagacaatcagcccaggcgacggacgcaccttcccaaagaggggacagacatgcgtggtgcactacaccggcatgctggaggatggcaagaaggtggacagctccagagatcggaacaagccattcaagtttatgctgggcaagcaggaagtgatcagaggatgggaggagggagtggcacagatgagcgtgggacagcgggccaagctgacaatctcccctgactatgcatacggagcaaccggacacccaggaatcatcccacctcacgccacactggtgttcgacgtggagctgctgaagcctgag

SEQ ID NO: 285 - protein, 108 aa, Artificial Sequence
  Description of Artificial Sequence: Synthetic Destabilizing Domain (DD)
MGVQVETISPGDGRTFPKRGQTCVVHYTGMLGDGKKVDSSRDRNKPFKFMLGKQEVIRGWEEGVAQMSVGQGAKLTISPDYAYGATGHPGIIPPHATLVFDVELLELE

SEQ ID NO: 286 - protein, 107 aa, Artificial Sequence
  Description of Artificial Sequence: Synthetic Destabilizing Domain (DD)
GVQVETISPGDGRTFPKRGQTCVVHYTGMLGDGKKVDSSRDRNKPFKFMLGKQEVIRGWEEGVAQMSVGQGAKLTISPDYAYGATGHPGIIPPHATLVFDVELLELE

SEQ ID NO: 287 - DNA, 321 bp, Artificial Sequence
  Description of Artificial Sequence: Synthetic Destabilizing Domain (DD)
ggagtgcaggtggagacaatcagcccaggcgacggaaggacattcccaaagaggggacagacctgcgtggtgcactacacaggcatgctgggcgatggcaagaaggtggacagctcccgggatagaaacaagcccttcaagtttatgctgggcaagcaggaagtgatcaggggatgggaggagggagtggcacagatgtccgtgggacagggcgccaagctgaccatctctcctgactacgcctatggagcaacaggacacccaggaatcatcccacctcacgccaccctggtgtttgatgtggagctgctggagctggag

SEQ ID NO: 288 - DNA, 321 bp, Artificial Sequence
  Description of Artificial Sequence: Synthetic Destabilizing Domain (DD)
ggagtgcaggtggagacaatcagccccggcgatggcaggacctttcctaagcgcggccagacatgcgtggtgcactacaccggcatgctgggcgacggcaagaaggtggacagctcccgggatagaaataagcccttcaagtttatgctgggcaagcaggaagtgatcagaggctgggaggagggagtggcacagatgtctgtgggacagggcgccaagctgacaatcagcccagattacgcatatggagcaaccggacacccaggaatcatcccaccccacgccaccctggtgttcgacgtggagctgctggagctggag

SEQ ID NO: 289 - DNA, 321 bp, Artificial Sequence
  Description of Artificial Sequence: Synthetic Destabilizing Domain (DD)
ggagtgcaggtggaaaccatctccccaggagacgggcgcaccttccccaagcgcggccagacctgcgtggtgcactacaccgggatgcttggagatggaaagaaagttgactcctcccgggacagaaacaagccctttaagtttatgctaggcaagcaggaggtgatccgaggctgggaagaaggggttgcccagatgagtgtgggtcagggagccaaactgactatatctccagattatgcctatggtgccactgggcacccaggcatcatcccaccacatgccactctcgtcttcgatgtggagcttctagaactggaa

SEQ ID NO: 290 - DNA, 321 bp, Artificial Sequence
  Description of Artificial Sequence: Synthetic Destabilizing Domain (DD)
ggcgtgcaggttgagactataagcccaggcgacggcaggaccttccccaagaggggccagacatgcgtggtgcactacaccggcatgcttggcgacggcaaaaaggtggactcaagcagggacaggaacaagcccttcaagttcatgttgggcaaacaggaggtgatcagaggctgggaggagggtgttgcccagatgagcgtggggcagggcgccaagctcacgataagtcccgattacgcctacggcgccaccggtcaccccggcatcatccccccacacgccaccctggtgttcgacgtggaattgctggagctggag

SEQ ID NO: 291 - DNA, 321 bp, Artificial Sequence
  Description of Artificial Sequence: Synthetic Destabilizing Domain (DD)
ggcgtgcaggtggagacaatcagccccggcgatggccggacctttcctaagagaggccagacatgcgtggtgcactacaccggcatgctgggcgacggcaagaaggtggacagctccagggatcgcaataagcccttcaagtttatgctgggcaagcaggaagtgatcaggggatgggaggagggagtggcacagatgtccgtgggacagggcgccaagctgacaatctctccagattacgcatatggagcaaccggacacccaggaatcatcccaccccacgccaccctggtgttcgacgtggagctgctggagctggag

SEQ ID NO: 292 - DNA, 321 bp, Artificial Sequence
  Description of Artificial Sequence: Synthetic Destabilizing Domain (DD)
ggcgtgcaggtggagacaatcagccccggcgatggccggacctttcctaagcgcggccagacatgcgtggtgcactacaccggcatgctgggcgacggcaagaaggtggacagctccagggatagaaacaagccattcaagtttatgctgggcaagcaggaagtgatcagaggatgggaggagggagtggcacagatgtccgtgggacagggcgccaagctgacaatctctccagattacgcatatggagcaaccggacacccaggaatcatcccaccccacgccaccctggtgttcgacgtggagctgctggagctggag

SEQ ID NO: 293 - DNA, 321 bp, Artificial Sequence
  Description of Artificial Sequence: Synthetic Destabilizing Domain (DD)
ggcgtgcaggtggagacaatcagcccaggcgacggaaggacattcccaaagaggggacagacctgcgtggtgcactacacaggcatgctgggcgatggcaagaaggtggacagctcccgggatagaaacaagcccttcaagtttatgctgggcaagcaggaagtgatcaggggatgggaggagggagtggcacagatgtccgtgggacagggcgccaagctgaccatctctcctgactacgcctatggagcaacaggacacccaggaatcatcccacctcacgccaccctggtgtttgatgtggagctgctggagctggag

SEQ ID NO: 294 - protein, 326 aa, Artificial Sequence
  Description of Artificial Sequence: Synthetic Destabilizing Domain (DD)
EETRELQSLAAAVVPSAQTLKITDFSFSDFELSDLETALCTIRMFTDLNLVQNFQMKHEVLCRWILSVKKNYRKNVAYHNWRHAFNTAQCMFAALKAGKIQNKLTDLEILALLIAALSHDLDHRGVNNSYIQRSEHPLAQLYCHSIMEHHHFDQCLMILNSPGNQILSGLSIEEYKTTLKIIKQAILATDLALYIKRRGEFFELIRKNQFNLEDPHQKELFLAMLMTACDLSAITKPWPIQQRIAELVATEFFDQGDRERKELNIEPTDLMNREKKNKIPSMQVGFIDAICLQLYEALTHVSEDCFPLLDGCRKNRQKFQALAEQQ

SEQ ID NO: 295 - DNA, 978 bp, Artificial Sequence
  Description of Artificial Sequence: Synthetic Destabilizing Domain (DD)
gaagaaacaagagagctacagtcgttagcggctgctgtggtgccatctgcccagacccttaaaattactgactttagcttcagtgactttgagctgtctgatctggaaacagcactgtgtacaattcggatgtttactgacctcaaccttgtgcagaacttccagatgaaacatgaggttctttgcagatggattttaagtgttaagaagaattatcggaagaatgttgcctatcataattggagacatgcctttaatacagctcagtgcatgtttgctgctctaaaagcaggcaaaattcagaacaagctgactgacctggagatacttgcattgctgattgctgcactaagccacgatttggatcaccgtggtgtgaataactcttacatacagcgaagtgaacatccacttgcccagctttactgccattcaatcatggaacaccatcattttgaccagtgcctgatgattcttaatagtccaggcaatcagattctcagtggcctctccattgaagaatataagaccacgttgaaaataatcaagcaagctattttagctacagacctagcactgtacattaagaggcgaggagaattttttgaacttataagaaaaaatcaattcaatttggaagatcctcatcaaaaggagttgtttttggcaatgctgatgacagcttgtgatctttctgcaattacaaaaccctggcctattcaacaacggatagcagaacttgtagcaactgaattttttgatcaaggagacagagagagaaaagaactcaacatagaacccactgatctaatgaacagggagaagaaaaacaaaatcccaagtatgcaagttgggttcatagatgccatctgcttgcaactgtatgaggccctgacccacgtgtcagaggactgtttccctttgctagatggctgcagaaagaacaggcagaaattccaggcccttgcagaacagcag

SEQ ID NO: 296 - protein, 326 aa, Artificial Sequence
  Description of Artificial Sequence: Synthetic Destabilizing Domain (DD)
EETRELQSLAAAVVPSAQTLKITDFSFSDFELSDLETALCTIRMFTDLNLVQNFQMKHEVLCRWILSVKKNYRKNVAYHNWRHAFNTAQCMFAALKAGKIQNKLTDLEILALLIAALSHDLDHRGVNNSYIQRSEHPLAQLYCHSIMEHHHFDQCLMILNSPGNQILSGLSIEEYKTTLKIIKQAILATDLALYIKRRGEFFELIRKNQFNLEDPHQKELFLAMLMTACDLSAITKPWPIQQRIAELVATEFFDQGDRERKELNIEPTDLMNREKKNKIPSMQVGFADAICLQLYEALTHVSEDCFPLLDGCRKNRQKWQALAEQQ

SEQ ID NO: 297 - DNA, 978 bp, Artificial Sequence
  Description of Artificial Sequence: Synthetic Destabilizing Domain (DD)
gaagaaacaagagagctacagtcgttagcggctgctgtggtgccatctgcccagacccttaaaattactgactttagcttcagtgactttgagctgtctgatctggaaacagcactgtgtacaattcggatgtttactgacctcaaccttgtgcagaacttccagatgaaacatgaggttctttgcagatggattttaagtgttaagaagaattatcggaagaatgttgcctatcataattggagacatgcctttaatacagctcagtgcatgtttgctgctctaaaagcaggcaaaattcagaacaagctgactgacctggagatacttgcattgctgattgctgcactaagccacgatttggatcaccgtggtgtgaataactcttacatacagcgaagtgaacatccacttgcccagctttactgccattcaatcatggaacaccatcattttgaccagtgcctgatgattcttaatagtccaggcaatcagattctcagtggcctctccattgaagaatataagaccacgttgaaaataatcaagcaagctattttagctacagacctagcactgtacattaagaggcgaggagaattttttgaacttataagaaaaaatcaattcaatttggaagatcctcatcaaaaggagttgtttttggcaatgctgatgacagcttgtgatctttctgcaattacaaaaccctggcctattcaacaacggatagcagaacttgtagcaactgaattttttgatcaaggagacagagagagaaaagaactcaacatagaacccactgatctaatgaacagggagaagaaaaacaaaatcccaagtatgcaagttgggttcgccgatgccatctgcttgcaactgtatgaggccctgacccacgtgtcagaggactgtttccctttgctagatggctgcagaaagaacaggcagaaatggcaggcccttgcagaacagcag

SEQ ID NO: 298 - protein, 326 aa, Artificial Sequence
  Description of Artificial Sequence: Synthetic Destabilizing Domain (DD)
EETRELQSLAAAVVPSAQTLKITDFSFSDFELSDLETALCTIRMFTDLNLVQNFQMKHEVLCRWILSVKKNYRKNVAYHNWRHAFNTAQCMFAALKAGKIQNKLTDLEILALLIAALSHDLDHRGVNNSYIQRSEHPLAQLYCHSIMEHHHFDQCLMILNSPGNQILSGLSIEEYKTTLKIIKQAILATDLALYIKRRGEFFELIRKNQFNLEDPHQKELFLAMLMTACDLSAITKPWPIQQRIAELVATEFFDQGDRERKELNIEPTDLMNREKKNKIPSMQVGFIDAICLQLAEALTHVSEDCFPLLDGCRKNRQKWQALAEQQ

SEQ ID NO: 299 - DNA, 978 bp, Artificial Sequence
  Description of Artificial Sequence: Synthetic Destabilizing Domain (DD)
gaagaaacaagagagctacagtcgttagcggctgctgtggtgccatctgcccagacccttaaaattactgactttagcttcagtgactttgagctgtctgatctggaaacagcactgtgtacaattcggatgtttactgacctcaaccttgtgcagaacttccagatgaaacatgaggttctttgcagatggattttaagtgttaagaagaattatcggaagaatgttgcctatcataattggagacatgcctttaatacagctcagtgcatgtttgctgctctaaaagcaggcaaaattcagaacaagctgactgacctggagatacttgcattgctgattgctgcactaagccacgatttggatcaccgtggtgtgaataactcttacatacagcgaagtgaacatccacttgcccagctttactgccattcaatcatggaacaccatcattttgaccagtgcctgatgattcttaatagtccaggcaatcagattctcagtggcctctccattgaagaatataagaccacgttgaaaataatcaagcaagctattttagctacagacctagcactgtacattaagaggcgaggagaattttttgaacttataagaaaaaatcaattcaatttggaagatcctcatcaaaaggagttgtttttggcaatgctgatgacagcttgtgatctttctgcaattacaaaaccctggcctattcaacaacggatagcagaacttgtagcaactgaattttttgatcaaggagacagagagagaaaagaactcaacatagaacccactgatctaatgaacagggagaagaaaaacaaaatcccaagtatgcaagttgggttcatagatgccatctgcttgcaactggccgaggccctgacccacgtgtcagaggactgtttccctttgctagatggctgcagaaagaacaggcagaaatggcaggcccttgcagaacagcag

SEQ ID NO: 300 - protein, 326 aa, Artificial Sequence
  Description of Artificial Sequence: Synthetic Destabilizing Domain (DD)
EETRELQSLAAAVVPSAQTLKITDFSFSDFELSDLETALCTIRMFTDLNLVQNFQMKHEVLCRWILSVKKNYRKNVAYHNWRHAFNTAQCMFAALKAGKIQNKLTDLEILALLIAALSHDLDHRGVNNSYIQRSEHPLAQLYCHSIMEHHHFDQCLMILNSPGNQILSGLSIEEYKTTLKIIKQAILATDLALYIKRRGEFFELIRKNQFNLEDPHQKELFLAMLMTACDLSAITKPWPIQQRIAELVATEFADQGDRERKELNIEPTDLMNREKKNKIPSMQVGFIDAICLQLYEALTHVSEDCFPLLDGCRKNRQKWQALAEQQ

SEQ ID NO: 301 - DNA, 978 bp, Artificial Sequence
  Description of Artificial Sequence: Synthetic Destabilizing Domain (DD)
gaagaaacaagagagctacagtcgttagcggctgctgtggtgccatctgcccagacccttaaaattactgactttagcttcagtgactttgagctgtctgatctggaaacagcactgtgtacaattcggatgtttactgacctcaaccttgtgcagaacttccagatgaaacatgaggttctttgcagatggattttaagtgttaagaagaattatcggaagaatgttgcctatcataattggagacatgcctttaatacagctcagtgcatgtttgctgctctaaaagcaggcaaaattcagaacaagctgactgacctggagatacttgcattgctgattgctgcactaagccacgatttggatcaccgtggtgtgaataactcttacatacagcgaagtgaacatccacttgcccagctttactgccattcaatcatggaacaccatcattttgaccagtgcctgatgattcttaatagtccaggcaatcagattctcagtggcctctccattgaagaatataagaccacgttgaaaataatcaagcaagctattttagctacagacctagcactgtacattaagaggcgaggagaattttttgaacttataagaaaaaatcaattcaatttggaagatcctcatcaaaaggagttgtttttggcaatgctgatgacagcttgtgatctttctgcaattacaaaaccctggcctattcaacaacggatagcagaacttgtagcaactgaatttgccgatcaaggagacagagagagaaaagaactcaacatagaacccactgatctaatgaacagggagaagaaaaacaaaatcccaagtatgcaagttgggttcatagatgccatctgcttgcaactgtatgaggccctgacccacgtgtcagaggactgtttccctttgctagatggctgcagaaagaacaggcagaaatggcaggcccttgcagaacagcag

SEQ ID NO: 302 - protein, 326 aa, Artificial Sequence
  Description of Artificial Sequence: Synthetic Destabilizing Domain (DD)
EETRELQSLAAAVVPSAQTLKITDFSFSDFELSDLETALCTIRMFTDLNLVQNFQMKHEVLCRWILSVKKNYRKNVAYHNWRHAFNTAQCMFAALKAGKIQNKLTDLEILALLIAALSHDLDHRGVNNSYIQRSEHPLAQLYCHSIMEHHHFDQCLMILNSPGNQILSGLSIEEYKTTLKIIKQAILATDLALYIKRRGEFAELIRKNQFNLEDPHQKELFLAMLMTACDLSAITKPWPIQQRIAELVATEFFDQGDRERKELNIEPTDLMNREKKNKIPSMQVGFIDAICLQLYEALTHVSEDCFPLLDGCRKNRQKWQALAEQQ

SEQ ID NO: 303 - DNA, 978 bp, Artificial Sequence
  Description of Artificial Sequence: Synthetic Destabilizing Domain (DD)
gaagaaacaagagagctacagtcgttagcggctgctgtggtgccatctgcccagacccttaaaattactgactttagcttcagtgactttgagctgtctgatctggaaacagcactgtgtacaattcggatgtttactgacctcaaccttgtgcagaacttccagatgaaacatgaggttctttgcagatggattttaagtgttaagaagaattatcggaagaatgttgcctatcataattggagacatgcctttaatacagctcagtgcatgtttgctgctctaaaagcaggcaaaattcagaacaagctgactgacctggagatacttgcattgctgattgctgcactaagccacgatttggatcaccgtggtgtgaataactcttacatacagcgaagtgaacatccacttgcccagctttactgccattcaatcatggaacaccatcattttgaccagtgcctgatgattcttaatagtccaggcaatcagattctcagtggcctctccattgaagaatataagaccacgttgaaaataatcaagcaagctattttagctacagacctagcactgtacattaagaggcgaggagaatttgccgaacttataagaaaaaatcaattcaatttggaagatcctcatcaaaaggagttgtttttggcaatgctgatgacagcttgtgatctttctgcaattacaaaaccctggcctattcaacaacggatagcagaacttgtagcaactgaattttttgatcaaggagacagagagagaaaagaactcaacatagaacccactgatctaatgaacagggagaagaaaaacaaaatcccaagtatgcaagttgggttcatagatgccatctgcttgcaactgtatgaggccctgacccacgtgtcagaggactgtttccctttgctagatggctgcagaaagaacaggcagaaatggcaggcccttgcagaacagcag

SEQ ID NO: 304 - DNA, 978 bp, Artificial Sequence
  Description of Artificial Sequence: Synthetic Destabilizing Domain (DD)
gaagaaacaagagagctacagtcgttagcggctgctgtggtgccatctgcccagacccttaaaattactgactttagcttcagtgactttgagctgtctgatctggaaacagcactgtgtacaattcggatgtttactgacctcaaccttgtgcagaacttccagatgaaacatgaggttctttgcagatggattttaagtgttaagaagaattatcggaagaatgttgcctatcataattggagacatgcctttaatacagctcagtgcatgtttgctgctctaaaagcaggcaaaattcagaacaagctgactgacctggagatacttgcattgctgattgctgcactaagccacgatttggatcaccgtggtgtgaataactcttacatacagcgaagtgaacatccacttgcccagctttactgccattcaatcatggaacaccatcattttgaccagtgcctgatgattcttaatagtccaggcaatcagattctcagtggcctctccattgaagaatataagaccacgttgaaaataatcaagcaagctattttagctacagacctagcactgtacattaagaggcgaggagaatttgctgaacttataagaaaaaatcaattcaatttggaagatcctcatcaaaaggagttgtttttggcaatgctgatgacagcttgtgatctttctgcaattacaaaaccctggcctattcaacaacggatagcagaacttgtagcaactgaattttttgatcaaggagacagagagagaaaagaactcaacatagaacccactgatctaatgaacagggagaagaaaaacaaaatcccaagtatgcaagttgggttcatagatgccatctgcttgcaactgtatgaggccctgacccacgtgtcagaggactgtttccctttgctagatggctgcagaaagaacaggcagaaatggcaggcccttgcagaacagcag

SEQ ID NO: 305 - DNA, 978 bp, Artificial Sequence
  Description of Artificial Sequence: Synthetic Destabilizing Domain (DD)
gaagaaacaagagagctacagtcgttagcggctgctgtggtgccatctgcccagacccttaaaattactgactttagcttcagtgactttgagctgtctgatctggaaacagcactgtgtacaattcggatgtttactgacctcaaccttgtgcagaacttccagatgaaacatgaggttctttgcagatggattttaagtgttaagaagaattatcggaagaatgttgcctatcataattggagacatgcctttaatacagctcagtgcatgtttgctgctctaaaagcaggcaaaattcagaacaagctgactgacctggagatacttgcattgctgattgctgcactaagccacgatttggatcaccgtggtgtgaataactcttacatacagcgaagtgaacatccacttgcccagctttactgccattcaatcatggaacaccatcattttgaccagtgcctgatgattcttaatagtccaggcaatcagattctcagtggcctctccattgaagaatataagaccacgttgaaaataatcaagcaagctattttagctacagacctagcactgtacattaagaggcgaggagaatttgcggaacttataagaaaaaatcaattcaatttggaagatcctcatcaaaaggagttgtttttggcaatgctgatgacagcttgtgatctttctgcaattacaaaaccctggcctattcaacaacggatagcagaacttgtagcaactgaattttttgatcaaggagacagagagagaaaagaactcaacatagaacccactgatctaatgaacagggagaagaaaaacaaaatcccaagtatgcaagttgggttcatagatgccatctgcttgcaactgtatgaggccctgacccacgtgtcagaggactgtttccctttgctagatggctgcagaaagaacaggcagaaatggcaggcccttgcagaacagcag

SEQ ID NO: 306 - protein, 326 aa, Artificial Sequence
  Description of Artificial Sequence: Synthetic Destabilizing Domain (DD)
EETRELQSLAAAVVPSAQTLKITDFSFSDFELSDLETALCTIRMFTDLNLVQNFQMKHEVLCRWILSVKKNYRKNVAYHNWRHAFNTAQCMFAALKAGKIQNKLTDLEILALLIAALSHDLDHRGVNNSYIQRSEHPLAQLYCHSIMEHHHFDQCLMILNSPGNQILSGLSIEEYKTTLKIIKQAILATDLALLIKRRGEFFELIRKNQFNLEDPHQKELFLAMLMTACDLSAITKPWPIQQRIAELVATEFFDQGDRERKELNIEPTDLMNREKKNKIPSMQVGFIDAICLQLYEALTHVSEDCFPLLDGCRKNRQKWQALAEQQ

SEQ ID NO: 307 - DNA, 978 bp, Artificial Sequence
  Description of Artificial Sequence: Synthetic Destabilizing Domain (DD)
gaagaaacaagagagctacagtcgttagcggctgctgtggtgccatctgcccagacccttaaaattactgactttagcttcagtgactttgagctgtctgatctggaaacagcactgtgtacaattcggatgtttactgacctcaaccttgtgcagaacttccagatgaaacatgaggttctttgcagatggattttaagtgttaagaagaattatcggaagaatgttgcctatcataattggagacatgcctttaatacagctcagtgcatgtttgctgctctaaaagcaggcaaaattcagaacaagctgactgacctggagatacttgcattgctgattgctgcactaagccacgatttggatcaccgtggtgtgaataactcttacatacagcgaagtgaacatccacttgcccagctttactgccattcaatcatggaacaccatcattttgaccagtgcctgatgattcttaatagtccaggcaatcagattctcagtggcctctccattgaagaatataagaccacgttgaaaataatcaagcaagctattttagctacagacctagcactgctgattaagaggcgaggagaattttttgaacttataagaaaaaatcaattcaatttggaagatcctcatcaaaaggagttgtttttggcaatgctgatgacagcttgtgatctttctgcaattacaaaaccctggcctattcaacaacggatagcagaacttgtagcaactgaattttttgatcaaggagacagagagagaaaagaactcaacatagaacccactgatctaatgaacagggagaagaaaaacaaaatcccaagtatgcaagttgggttcatagatgccatctgcttgcaactgtatgaggccctgacccacgtgtcagaggactgtttccctttgctagatggctgcagaaagaacaggcagaaatggcaggcccttgcagaacagcag

SEQ ID NO: 308 - protein, 326 aa, Artificial Sequence
  Description of Artificial Sequence: Synthetic Destabilizing Domain (DD)
EETRELQSLAAAVVPSAQTLKITDFSFSDFELSDLETALCTIRMFTDLNLVQNFQMKHEVLCRWILSVKKNYRKNVAYHNWRHAFNTAQCMFAALKAGKIQNKLTDLEILALLIAALSHDLDHRGVNNSYIQRSEHPLAQLYCHSIMEHHHFDQCLMILNSPGNQILSGLSIEEYKTTLKIIKQAILATDLALYIKRLGEFFELIRKNQFNLEDPHQKELFLAMLMTACDLSAITKPWPIQQRIAELVATEFFDQGDRERKELNIEPTDLMNREKKNKIPSMQVGFIDAICLQLYEALTHVSEDCFPLLDGCRKNRQKWQALAEQQ

SEQ ID NO: 309 - DNA, 978 bp, Artificial Sequence
  Description of Artificial Sequence: Synthetic Destabilizing Domain (DD)
gaagaaacaagagagctacagtcgttagcggctgctgtggtgccatctgcccagacccttaaaattactgactttagcttcagtgactttgagctgtctgatctggaaacagcactgtgtacaattcggatgtttactgacctcaaccttgtgcagaacttccagatgaaacatgaggttctttgcagatggattttaagtgttaagaagaattatcggaagaatgttgcctatcataattggagacatgcctttaatacagctcagtgcatgtttgctgctctaaaagcaggcaaaattcagaacaagctgactgacctggagatacttgcattgctgattgctgcactaagccacgatttggatcaccgtggtgtgaataactcttacatacagcgaagtgaacatccacttgcccagctttactgccattcaatcatggaacaccatcattttgaccagtgcctgatgattcttaatagtccaggcaatcagattctcagtggcctctccattgaagaatataagaccacgttgaaaataatcaagcaagctattttagctacagacctagcactgtacattaagaggctgggagaattttttgaacttataagaaaaaatcaattcaatttggaagatcctcatcaaaaggagttgtttttggcaatgctgatgacagcttgtgatctttctgcaattacaaaaccctggcctattcaacaacggatagcagaacttgtagcaactgaattttttgatcaaggagacagagagagaaaagaactcaacatagaacccactgatctaatgaacagggagaagaaaaacaaaatcccaagtatgcaagttgggttcatagatgccatctgcttgcaactgtatgaggccctgacccacgtgtcagaggactgtttccctttgctagatggctgcagaaagaacaggcagaaatggcaggcccttgcagaacagcag

SEQ ID NO: 310 - DNA, 978 bp, Artificial Sequence
  Description of Artificial Sequence: Synthetic Destabilizing Domain (DD)
gaagaaacaagagagctacagtcgttagcggctgctgtggtgccatctgcccagacccttaaaattactgactttagcttcagtgactttgagctgtctgatctggaaacagcactgtgtacaattcggatgtttactgacctcaaccttgtgcagaacttccagatgaaacatgaggttctttgcagatggattttaagtgttaagaagaattatcggaagaatgttgcctatcataattggagacatgcctttaatacagctcagtgcatgtttgctgctctaaaagcaggcaaaattcagaacaagctgactgacctggagatacttgcattgctgattgctgcactaagccacgatttggatcaccgtggtgtgaataactcttacatacagcgaagtgaacatccacttgcccagctttactgccattcaatcatggaacaccatcattttgaccagtgcctgatgattcttaatagtccaggcaatcagattctcagtggcctctccattgaagaatataagaccacgttgaaaataatcaagcaagctattttagctacagacctagcactgtacattaagcggctaggagaattttttgaacttataagaaaaaatcaattcaatttggaagatcctcatcaaaaggagttgtttttggcaatgctgatgacagcttgtgatctttctgcaattacaaaaccctggcctattcaacaacggatagcagaacttgtagcaactgaattttttgatcaaggagacagagagagaaaagaactcaacatagaacccactgatctaatgaacagggagaagaaaaacaaaatcccaagtatgcaagttgggttcatagatgccatctgcttgcaactgtatgaggccctgacccacgtgtcagaggactgtttccctttgctagatggctgcagaaagaacaggcagaaatggcaggcccttgcagaacagcag

SEQ ID NO: 311 - DNA, 978 bp, Artificial Sequence
  Description of Artificial Sequence: Synthetic Destabilizing Domain (DD)
gaagaaacaagagagctacagtcgttagcggctgctgtggtgccatctgcccagacccttaaaattactgactttagcttcagtgactttgagctgtctgatctggaaacagcactgtgtacaattcggatgtttactgacctcaaccttgtgcagaacttccagatgaaacatgaggttctttgcagatggattttaagtgttaagaagaattatcggaagaatgttgcctatcataattggagacatgcctttaatacagctcagtgcatgtttgctgctctaaaagcaggcaaaattcagaacaagctgactgacctggagatacttgcattgctgattgctgcactaagccacgatttggatcaccgtggtgtgaataactcttacatacagcgaagtgaacatccacttgcccagctttactgccattcaatcatggaacaccatcattttgaccagtgcctgatgattcttaatagtccaggcaatcagattctcagtggcctctccattgaagaatataagaccacgttgaaaataatcaagcaagctattttagctacagacctagcactgtacattaagaggctaggagaattttttgaacttataagaaaaaatcaattcaatttggaagatcctcatcaaaaggagttgtttttggcaatgctgatgacagcttgtgatctttctgcaattacaaaaccctggcctattcaacaacggatagcagaacttgtagcaactgaattttttgatcaaggagacagagagagaaaagaactcaacatagaacccactgatctaatgaacagggagaagaaaaacaaaatcccaagtatgcaagttgggttcatagatgccatctgcttgcaactgtatgaggccctgacccacgtgtcagaggactgtttccctttgctagatggctgcagaaagaacaggcagaaatggcaggcccttgcagaacagcag

SEQ ID NO: 312 - DNA, 978 bp, Artificial Sequence
  Description of Artificial Sequence: Synthetic Destabilizing Domain (DD)
gaagaaacaagagagctacagtcgttagcggctgctgtggtgccatctgcccagacccttaaaattactgactttagcttcagtgactttgagctgtctgatctggaaacagcactgtgtacaattcggatgtttactgacctcaaccttgtgcagaacttccagatgaaacatgaggttctttgcagatggattttaagtgttaagaagaattatcggaagaatgttgcctatcataattggagacatgcctttaatacagctcagtgcatgtttgctgctctaaaagcaggcaaaattcagaacaagctgactgacctggagatacttgcattgctgattgctgcactaagccacgatttggatcaccgtggtgtgaataactcttacatacagcgaagtgaacatccacttgcccagctttactgccattcaatcatggaacaccatcattttgaccagtgcctgatgattcttaatagtccaggcaatcagattctcagtggcctctccattgaagaatataagaccacgttgaaaataatcaagcaagctattttagctacagacctagcactgtacattaagaggttaggagaattttttgaacttataagaaaaaatcaattcaatttggaagatcctcatcaaaaggagttgtttttggcaatgctgatgacagcttgtgatctttctgcaattacaaaaccctggcctattcaacaacggatagcagaacttgtagcaactgaattttttgatcaaggagacagagagagaaaagaactcaacatagaacccactgatctaatgaacagggagaagaaaaacaaaatcccaagtatgcaagttgggttcatagatgccatctgcttgcaactgtatgaggccctgacccacgtgtcagaggactgtttccctttgctagatggctgcagaaagaacaggcagaaatggcaggcccttgcagaacagcag

SEQ ID NO: 313 - protein, 326 aa, Artificial Sequence
  Description of Artificial Sequence: Synthetic Destabilizing Domain (DD)
EETRELQSLAAAVVPSAQTLKITDFSFSDFELSDLETALCTIRMFTDLNLVQNFQMKHEVLCRWILSVKKNYRKNVAYHNWRHAFNTAQCIFAALKAGKIQNKLTDLEILALLIAALSHDLDHRGVNNSYIQRSEHPLAQLYCHSIMEHHHFDQCLMILNSPGNQILSGLSIEEYKTTLKIIKQAILATDLALYIKRRGEFFELIRKNQFNLEDPHQKELFLAMLMTACDLSAITKPWPIQQRIAELVATEFFDQGDRERKELNIEPTDLMNREKKNKIPSMQVGFIDAICLQLYEALTHVSEDCFPLLDGCRKNRQKWQALAEQQ

SEQ ID NO: 314 - DNA, 978 bp, Artificial Sequence
  Description of Artificial Sequence: Synthetic Destabilizing Domain (DD)
gaagaaacaagagagctacagtcgttagcggctgctgtggtgccatctgcccagacccttaaaattactgactttagcttcagtgactttgagctgtctgatctggaaacagcactgtgtacaattcggatgtttactgacctcaaccttgtgcagaacttccagatgaaacatgaggttctttgcagatggattttaagtgttaagaagaattatcggaagaatgttgcctatcataattggagacatgcctttaatacagctcagtgcatctttgctgctctaaaagcaggcaaaattcagaacaagctgactgacctggagatacttgcattgctgattgctgcactaagccacgatttggatcaccgtggtgtgaataactcttacatacagcgaagtgaacatccacttgcccagctttactgccattcaatcatggaacaccatcattttgaccagtgcctgatgattcttaatagtccaggcaatcagattctcagtggcctctccattgaagaatataagaccacgttgaaaataatcaagcaagctattttagctacagacctagcactgtacattaagaggcgaggagaattttttgaacttataagaaaaaatcaattcaatttggaagatcctcatcaaaaggagttgtttttggcaatgctgatgacagcttgtgatctttctgcaattacaaaaccctggcctattcaacaacggatagcagaacttgtagcaactgaattttttgatcaaggagacagagagagaaaagaactcaacatagaacccactgatctaatgaacagggagaagaaaaacaaaatcccaagtatgcaagttgggttcatagatgccatctgcttgcaactgtatgaggccctgacccacgtgtcagaggactgtttccctttgctagatggctgcagaaagaacaggcagaaatggcaggcccttgcagaacagcag

SEQ ID NO: 315 - protein, 326 aa, Artificial Sequence
  Description of Artificial Sequence: Synthetic Destabilizing Domain (DD)
EETRELQSLAAAVVPSAQTLKITDFSFSDFELSDLETALCTIRMFTDLNLVQNFQMKHEVLCRWILSVKKNYRKNVAYHNWRHAFNTAQCMFAALKAGKIQNKLTDLEILALLIAALSHDLLHRGVNNSYIQRSEHPLAQLYCHSIMEHHHFDQCLMILNSPGNQILSGLSIEEYKTTLKIIKQAILATDLALYIKRRGEFFELIRKNQFNLEDPHQKELFLAMLMTACDLSAITKPWPIQQRIAELVATEFFDQGDRERKELNIEPTDLMNREKKNKIPSMQVGFIDAICLQLYEALTHVSEDCFPLLDGCRKNRQKWQALAEQQ

SEQ ID NO: 316 - DNA, 978 bp, Artificial Sequence
  Description of Artificial Sequence: Synthetic Destabilizing Domain (DD)
gaagaaacaagagagctacagtcgttagcggctgctgtggtgccatctgcccagacccttaaaattactgactttagcttcagtgactttgagctgtctgatctggaaacagcactgtgtacaattcggatgtttactgacctcaaccttgtgcagaacttccagatgaaacatgaggttctttgcagatggattttaagtgttaagaagaattatcggaagaatgttgcctatcataattggagacatgcctttaatacagctcagtgcatgtttgctgctctaaaagcaggcaaaattcagaacaagctgactgacctggagatacttgcattgctgattgctgcactaagccacgatttgctgcaccgtggtgtgaataactcttacatacagcgaagtgaacatccacttgcccagctttactgccattcaatcatggaacaccatcattttgaccagtgcctgatgattcttaatagtccaggcaatcagattctcagtggcctctccattgaagaatataagaccacgttgaaaataatcaagcaagctattttagctacagacctagcactgtacattaagaggcgaggagaattttttgaacttataagaaaaaatcaattcaatttggaagatcctcatcaaaaggagttgtttttggcaatgctgatgacagcttgtgatctttctgcaattacaaaaccctggcctattcaacaacggatagcagaacttgtagcaactgaattttttgatcaaggagacagagagagaaaagaactcaacatagaacccactgatctaatgaacagggagaagaaaaacaaaatcccaagtatgcaagttgggttcatagatgccatctgcttgcaactgtatgaggccctgacccacgtgtcagaggactgtttccctttgctagatggctgcagaaagaacaggcagaaatggcaggcccttgcagaacagcag

SEQ ID NO: 317 - protein, 326 aa, Artificial Sequence
  Description of Artificial Sequence: Synthetic Destabilizing Domain (DD)
DETRELQSLAAAVVPSAQTLKITDFSFSDFELSDLETALCTIRMFTDLNLVQNFQMKHEVLCRWILSVKKNYRKNVAYHNWRHAFNTAQCMFAALKAGKIQNKLTDLEILALLIAALSHDLDHRGVNNSYIQRSEHPLAQLYCHSIMEHHHFDQCLMILNSPGNQILSGLSIEEYKTTLKIIKQAILATDLALYIKRRGEFFELIRKNQFNLEDPHQKELFLAMLMTACDLSAITKPWPIQQRIAELVATEFFDQGDRERKELNIEPTDLMNREKKNKIPSMQVGFIDAICLQLYEALTHVSEDCFPLLDGCRKNRQKWQALAEQQ

SEQ ID NO: 318 - protein, 326 aa, Artificial Sequence
  Description of Artificial Sequence: Synthetic Destabilizing Domain (DD)
EGTRELQSLAAAVVPSAQTLKITDFSFSDFELSDLETALCTIRMFTDLNLVQNFQMKHEVLCRWILSVKKNYRKNVAYHNWRHAFNTAQCMFAALKAGKIQNKLTDLEILALLIAALSHDLDHRGVNNSYIQRSEHPLAQLYCHSIMEHHHFDQCLMILNSPGNQILSGLSIEEYKTTLKIIKQAILATDLALYIKRRGEFFELIRKNQFNLEDPHQKELFLAMLMTACDLSAITKPWPIQQRIAELVATEFFDQGDRERKELNIEPTDLMNREKKNKIPSMQVGFIDAICLQLYEALTHVSEDCFPLLDGCRKNRQKWQALAEQQ

SEQ ID NO: 319 - protein, 326 aa, Artificial Sequence
  Description of Artificial Sequence: Synthetic Destabilizing Domain (DD)
EETRELRSLAAAVVPSAQTLKITDFSFSDFELSDLETALCTIRMFTDLNLVQNFQMKHEVLCRWILSVKKNYRKNVAYHNWRHAFNTAQCMFAALKAGKIQNKLTDLEILALLIAALSHDLDHRGVNNSYIQRSEHPLAQLYCHSIMEHHHFDQCLMILNSPGNQILSGLSIEEYKTTLKIIKQAILATDLALYIKRRGEFFELIRKNQFNLEDPHQKELFLAMLMTACDLSAITKPWPIQQRIAELVATEFFDQGDRERKELNIEPTDLMNREKKNKIPSMQVGFIDAICLQLYEALTHVSEDCFPLLDGCRKNRQKWQALAEQQ

SEQ ID NO: 320 - protein, 326 aa, Artificial Sequence
  Description of Artificial Sequence: Synthetic Destabilizing Domain (DD)
EETRELQSLAAAVVPSAQTLRITDFSFSDFELSDLETALCTIRMFTDLNLVQNFQMKHEVLCRWILSVKKNYRKNVAYHNWRHAFNTAQCMFAALKAGKIQNKLTDLEILALLIAALSHDLDHRGVNNSYIQRSEHPLAQLYCHSIMEHHHFDQCLMILNSPGNQILSGLSIEEYKTTLKIIKQAILATDLALYIKRRGEFFELIRKNQFNLEDPHQKELFLAMLMTACDLSAITKPWPIQQRIAELVATEFFDQGDRERKELNIEPTDLMNREKKNKIPSMQVGFIDAICLQLYEALTHVSEDCFPLLDGCRKNRQKWQALAEQQ

SEQ ID NO: 321 - protein, 326 aa, Artificial Sequence
  Description of Artificial Sequence: Synthetic Destabilizing Domain (DD)
EETRELQSLAAAVVPSAQTLKITDLSFSDFELSDLETALCTIRMFTDLNLVQNFQMKHEVLCRWILSVKKNYRKNVAYHNWRHAFNTAQCMFAALKAGKIQNKLTDLEILALLIAALSHDLDHRGVNNSYIQRSEHPLAQLYCHSIMEHHHFDQCLMILNSPGNQILSGLSIEEYKTTLKIIKQAILATDLALYIKRRGEFFELIRKNQFNLEDPHQKELFLAMLMTACDLSAITKPWPIQQRIAELVATEFFDQGDRERKELNIEPTDLMNREKKNKIPSMQVGFIDAICLQLYEALTHVSEDCFPLLDGCRKNRQKWQALAEQQ

SEQ ID NO: 322 - protein, 326 aa, Artificial Sequence
  Description of Artificial Sequence: Synthetic Destabilizing Domain (DD)
EETRELQSLAAAVVPSAQTLKITDFSLSDFELSDLETALCTIRMFTDLNLVQNFQMKHEVLCRWILSVKKNYRKNVAYHNWRHAFNTAQCMFAALKAGKIQNKLTDLEILALLIAALSHDLDHRGVNNSYIQRSEHPLAQLYCHSIMEHHHFDQCLMILNSPGNQILSGLSIEEYKTTLKIIKQAILATDLALYIKRRGEFFELIRKNQFNLEDPHQKELFLAMLMTACDLSAITKPWPIQQRIAELVATEFFDQGDRERKELNIEPTDLMNREKKNKIPSMQVGFIDAICLQLYEALTHVSEDCFPLLDGCRKNRQKWQALAEQQ

SEQ ID NO: 323 - protein, 326 aa, Artificial Sequence
  Description of Artificial Sequence: Synthetic Destabilizing Domain (DD)
EETRELQSLAAAVVPSAQTLKITDFSFSDLELSDLETALCTIRMFTDLNLVQNFQMKHEVLCRWILSVKKNYRKNVAYHNWRHAFNTAQCMFAALKAGKIQNKLTDLEILALLIAALSHDLDHRGVNNSYIQRSEHPLAQLYCHSIMEHHHFDQCLMILNSPGNQILSGLSIEEYKTTLKIIKQAILATDLALYIKRRGEFFELIRKNQFNLEDPHQKELFLAMLMTACDLSAITKPWPIQQRIAELVATEFFDQGDRERKELNIEPTDLMNREKKNKIPSMQVGFIDAICLQLYEALTHVSEDCFPLLDGCRKNRQKWQALAEQQ

SEQ ID NO: 324 - protein, 326 aa, Artificial Sequence
  Description of Artificial Sequence: Synthetic Destabilizing Domain (DD)
EETRELQSLAAAVVPSAQTLKITDFSFSDSELSDLETALCTIRMFTDLNLVQNFQMKHEVLCRWILSVKKNYRKNVAYHNWRHAFNTAQCMFAALKAGKIQNKLTDLEILALLIAALSHDLDHRGVNNSYIQRSEHPLAQLYCHSIMEHHHFDQCLMILNSPGNQILSGLSIEEYKTTLKIIKQAILATDLALYIKRRGEFFELIRKNQFNLEDPHQKELFLAMLMTACDLSAITKPWPIQQRIAELVATEFFDQGDRERKELNIEPTDLMNREKKNKIPSMQVGFIDAICLQLYEALTHVSEDCFPLLDGCRKNRQKWQALAEQQ

SEQ ID NO: 325 - protein, 326 aa, Artificial Sequence
  Description of Artificial Sequence: Synthetic Destabilizing Domain (DD)
EETRELQSLAAAVVPSAQTLKITDFSFSDFELSDLETALCTIRMFTDLNLVQNFQMEHEVLCRWILSVKKNYRKNVAYHNWRHAFNTAQCMFAALKAGKIQNKLTDLEILALLIAALSHDLDHRGVNNSYIQRSEHPLAQLYCHSIMEHHHFDQCLMILNSPGNQILSGLSIEEYKTTLKIIKQAILATDLALYIKRRGEFFELIRKNQFNLEDPHQKELFLAMLMTACDLSAITKPWPIQQRIAELVATEFFDQGDRERKELNIEPTDLMNREKKNKIPSMQVGFIDAICLQLYEALTHVSEDCFPLLDGCRKNRQKWQALAEQQ

SEQ ID NO: 326 - protein, 326 aa, Artificial Sequence
  Description of Artificial Sequence: Synthetic Destabilizing Domain (DD)
EETRELQSLAAAVVPSAQTLKITDFSFSDFELSDLETALCTIRMFTDLNLVQSFQMKHEVLCRWILSVKKNYRKNVAYHNWRHAFNTAQCMFAALKAGKIQNKLTDLEILALLIAALSHDLDHRGVNNSYIQRSEHPLAQLYCHSIMEHHHFDQCLMILNSPGNQILSGLSIEEYKTTLKIIKQAILATDLALYIKRRGEFFELIRKNQFNLEDPHQKELFLAMLMTACDLSAITKPWPIQQRIAELVATEFFDQGDRERKELNIEPTDLMNREKKNKIPSMQVGFIDAICLQLYEALTHVSEDCFPLLDGCRKNRQKWQALAEQQ

SEQ ID NO: 327 - protein, 326 aa, Artificial Sequence
  Description of Artificial Sequence: Synthetic Destabilizing Domain (DD)
EETRELQSLAAAVVPSAQTLKITDFSFSDFELSDLETALCTIRMFTDLNLVQNFQMKHEVLCRWILSVKENYRKNVAYHNWRHAFNTAQCMFAALKAGKIQNKLTDLEILALLIAALSHDLDHRGVNNSYIQRSEHPLAQLYCHSIMEHHHFDQCLMILNSPGNQILSGLSIEEYKTTLKIIKQAILATDLALYIKRRGEFFELIRKNQFNLEDPHQKELFLAMLMTACDLSAITKPWPIQQRIAELVATEFFDQGDRERKELNIEPTDLMNREKKNKIPSMQVGFIDAICLQLYEALTHVSEDCFPLLDGCRKNRQKWQALAEQQ

SEQ ID NO: 328 - protein, 326 aa, Artificial Sequence
  Description of Artificial Sequence: Synthetic Destabilizing Domain (DD)
EETRELQSLAAAVVPSAQTLKITDFSFSDFELSDLETALCTIRMFTDLNLVQNFQMKHEVLCRWILSVKKNYRENVAYHNWRHAFNTAQCMFAALKAGKIQNKLTDLEILALLIAALSHDLDHRGVNNSYIQRSEHPLAQLYCHSIMEHHHFDQCLMILNSPGNQILSGLSIEEYKTTLKIIKQAILATDLALYIKRRGEFFELIRKNQFNLEDPHQKELFLAMLMTACDLSAITKPWPIQQRIAELVATEFFDQGDRERKELNIEPTDLMNREKKNKIPSMQVGFIDAICLQLYEALTHVSEDCFPLLDGCRKNRQKWQALAEQQ

SEQ ID NO: 329 - protein, 326 aa, Artificial Sequence
  Description of Artificial Sequence: Synthetic Destabilizing Domain (DD)
EETRELQSLAAAVVPSAQTLKITDFSFSDFELSDLETALCTIRMFTDLNLVQNFQMKHEVLCRWILSVKKNYRKHVAYHNWRHAFNTAQCMFAALKAGKIQNKLTDLEILALLIAALSHDLDHRGVNNSYIQRSEHPLAQLYCHSIMEHHHFDQCLMILNSPGNQILSGLSIEEYKTTLKIIKQAILATDLALYIKRRGEFFELIRKNQFNLEDPHQKELFLAMLMTACDLSAITKPWPIQQRIAELVATEFFDQGDRERKELNIEPTDLMNREKKNKIPSMQVGFIDAICLQLYEALTHVSEDCFPLLDGCRKNRQKWQALAEQQ

SEQ ID NO: 330 - protein, 326 aa, Artificial Sequence
  Description of Artificial Sequence: Synthetic Destabilizing Domain (DD)
EETRELQSLAAAVVPSAQTLKITDFSFSDFELSDLETALCTIRMFTDLNLVQNFQMKHEVLCRWILSVKKNYRKNVAYHNWRHAFNTAQCMFAALRAGKIQNKLTDLEILALLIAALSHDLDHRGVNNSYIQRSEHPLAQLYCHSIMEHHHFDQCLMILNSPGNQILSGLSIEEYKTTLKIIKQAILATDLALYIKRRGEFFELIRKNQFNLEDPHQKELFLAMLMTACDLSAITKPWPIQQRIAELVATEFFDQGDRERKELNIEPTDLMNREKKNKIPSMQVGFIDAICLQLYEALTHVSEDCFPLLDGCRKNRQKWQALAEQQ

SEQ ID NO: 331 - protein, 326 aa, Artificial Sequence
  Description of Artificial Sequence: Synthetic Destabilizing Domain (DD)
EETRELQSLAAAVVPSAQTLKITDFSFSDFELSDLETALCTIRMFTDLNLVQNFQMKHEVLCRWILSVKKNYRKNVAYHNWRHAFNTAQCMFAALKAGEIQNKLTDLEILALLIAALSHDLDHRGVNNSYIQRSEHPLAQLYCHSIMEHHHFDQCLMILNSPGNQILSGLSIEEYKTTLKIIKQAILATDLALYIKRRGEFFELIRKNQFNLEDPHQKELFLAMLMTACDLSAITKPWPIQQRIAELVATEFFDQGDRERKELNIEPTDLMNREKKNKIPSMQVGFIDAICLQLYEALTHVSEDCFPLLDGCRKNRQKWQALAEQQ

SEQ ID NO: 332 - protein, 326 aa, Artificial Sequence
  Description of Artificial Sequence: Synthetic Destabilizing Domain (DD)
EETRELQSLAAAVVPSAQTLKITDFSFSDFELSDLETALCTIRMFTDLNLVQNFQMKHEVLCRWILSVKKNYRKNVAYHNWRHAFNTAQCMFAALKAGKIQSKLTDLEILALLIAALSHDLDHRGVNNSYIQRSEHPLAQLYCHSIMEHHHFDQCLMILNSPGNQILSGLSIEEYKTTLKIIKQAILATDLALYIKRRGEFFELIRKNQFNLEDPHQKELFLAMLMTACDLSAITKPWPIQQRIAELVATEFFDQGDRERKELNIEPTDLMNREKKNKIPSMQVGFIDAICLQLYEALTHVSEDCFPLLDGCRKNRQKWQALAEQQ

SEQ ID NO: 333 - protein, 326 aa, Artificial Sequence
  Description of Artificial Sequence: Synthetic Destabilizing Domain (DD)
EETRELQSLAAAVVPSAQTLKITDFSFSDFELSDLETALCTIRMFTDLNLVQNFQMKHEVLCRWILSVKKNYRKNVAYHNWRHAFNTAQCMFAALKAGKIQNKLTDLEILALLIAALSHDLDHRGVSNSYIQRSEHPLAQLYCHSIMEHHHFDQCLMILNSPGNQILSGLSIEEYKTTLKIIKQAILATDLALYIKRRGEFFELIRKNQFNLEDPHQKELFLAMLMTACDLSAITKPWPIQQRIAELVATEFFDQGDRERKELNIEPTDLMNREKKNKIPSMQVGFIDAICLQLYEALTHVSEDCFPLLDGCRKNRQKWQALAEQQ

SEQ ID NO: 334 - DNA, 978 bp, Artificial Sequence
  Description of Artificial Sequence: Synthetic Destabilizing Domain (DD)
gaagaaacaagagagctacagtcgttagcggctgctgtggtgccatctgcccagacccttaaaattactgactttagcttcagtgactttgagctgtctgatctggaaacagcactgtgtacaattcggatgtttactgacctcaaccttgtgcagaacttccagatgaaacatgaggttctttgcagatggattttaagtgttaagaagaattatcggaagaatgttgcctatcataattggagacatgcctttaatacagctcagtgcatgtttgctgctctaaaagcaggcaaaattcagaacaagctgactgacctggagatacttgcattgctgattgctgcactaagccacgatttggatcaccgtggtgtgagtaactcttacatacagcgaagtgaacatccacttgcccaactttactgccattcaatcatggaacaccatcattttgaccagtgcctgatgattcttaatagtccaggcaatcagattctcagtggcctctccattgaagaatataagaccacgttgaaaataatcaagcaagctattttagctacagacctagcactgtacattaagaggcgaggagaattttttgaacttataagaaaaaatcaattcaatttggaagatcctcatcaaaaggaattgtttttggcaatgctgatgacagcttgtgatctttctgcaattacaaaaccctggcctattcaacaacggatagcagaacttgtagcaactgaattttttgatcaaggagacagagagagaaaagaactcaacatagaacccactgatctaatgaacagggagaagaaaaacaaaatcccaagtatgcaagttgggttcatagatgccatctgcttgcaactgtatgaggccctgacccacgtgtcagaggactgtttccctttgctagatggctgcagaaagaacaggcagaaatggcaggcccttgcagaacagcag

SEQ ID NO: 335 - protein, 326 aa, Artificial Sequence
  Description of Artificial Sequence: Synthetic Destabilizing Domain (DD)
EETRELQSLAAAVVPSAQTLKITDFSFSDFELSDLETALCTIRMFTDLNLVQNFQMKHEVLCRWILSVKKNYRKNVAYHNWRHAFNTAQCMFAALKAGKIQNKLTDLEILALLIAALSHDLDHRGVNNSYIQRSEHPLAQLDCHSIMEHHHFDQCLMILNSPGNQILSGLSIEEYKTTLKIIKQAILATDLALYIKRRGEFFELIRKNQFNLEDPHQKELFLAMLMTACDLSAITKPWPIQQRIAELVATEFFDQGDRERKELNIEPTDLMNREKKNKIPSMQVGFIDAICLQLYEALTHVSEDCFPLLDGCRKNRQKWQALAEQQ

SEQ ID NO: 336 - protein, 326 aa, Artificial Sequence
  Description of Artificial Sequence: Synthetic Destabilizing Domain (DD)
EETRELQSLAAAVVPSAQTLKITDFSFSDFELSDLETALCTIRMFTDLNLVQNFQMKHEVLCRWILSVKKNYRKNVAYHNWRHAFNTAQCMFAALKAGKIQNKLTDLEILALLIAALSHDLDHRGVNNSYIQRSEHPLAQLNCHSIMEHHHFDQCLMILNSPGNQILSGLSIEEYKTTLKIIKQAILATDLALYIKRRGEFFELIRKNQFNLEDPHQKELFLAMLMTACDLSAITKPWPIQQRIAELVATEFFDQGDRERKELNIEPTDLMNREKKNKIPSMQVGFIDAICLQLYEALTHVSEDCFPLLDGCRKNRQKWQALAEQQ

SEQ ID NO: 337 - protein, 326 aa, Artificial Sequence
  Description of Artificial Sequence: Synthetic Destabilizing Domain (DD)
EETRELQSLAAAVVPSAQTLKITDFSFSDFELSDLETALCTIRMFTDLNLVQNFQMKHEVLCRWILSVKKNYRKNVAYHNWRHAFNTAQCMFAALKAGKIQNKLTDLEILALLIAALSHDLDHRGVNNSYIQRSEHPLAQLYRHSIMEHHHFDQCLMILNSPGNQILSGLSIEEYKTTLKIIKQAILATDLALYIKRRGEFFELIRKNQFNLEDPHQKELFLAMLMTACDLSAITKPWPIQQRIAELVATEFFDQGDRERKELNIEPTDLMNREKKNKIPSMQVGFIDAICLQLYEALTHVSEDCFPLLDGCRKNRQKWQALAEQQ

SEQ ID NO: 338 - protein, 326 aa, Artificial Sequence
  Description of Artificial Sequence: Synthetic Destabilizing Domain (DD)
EETRELQSLAAAVVPSAQTLKITDFSFSDFELSDLETALCTIRMFTDLNLVQNFQMKHEVLCRWILSVKKNYRKNVAYHNWRHAFNTAQCMFAALKAGKIQNKLTDLEILALLIAALSHDLDHRGVNNSYIQRSEHPLAQLYCRSIMEHHHFDQCLMILNSPGNQILSGLSIEEYKTTLKIIKQAILATDLALYIKRRGEFFELIRKNQFNLEDPHQKELFLAMLMTACDLSAITKPWPIQQRIAELVATEFFDQGDRERKELNIEPTDLMNREKKNKIPSMQVGFIDAICLQLYEALTHVSEDCFPLLDGCRKNRQKWQALAEQQ

SEQ ID NO: 339 - protein, 326 aa, Artificial Sequence
  Description of Artificial Sequence: Synthetic Destabilizing Domain (DD)
EETRELQSLAAAVVPSAQTLKITDFSFSDFELSDLETALCTIRMFTDLNLVQNFQMKHEVLCRWILSVKKNYRKNVAYHNWRHAFNTAQCMFAALKAGKIQNKLTDLEILALLIAALSHDLDHRGVNNSYIQRSEHPLAQLYCHSIMEHHHFAQCLMILNSPGNQILSGLSIEEYKTTLKIIKQAILATDLALYIKRRGEFFELIRKNQFNLEDPHQKELFLAMLMTACDLSAITKPWPIQQRIAELVATEFFDQGDRERKELNIEPTDLMNREKKNKIPSMQVGFIDAICLQLYEALTHVSEDCFPLLDGCRKNRQKWQALAEQQ

SEQ ID NO: 340 - protein, 326 aa, Artificial Sequence
  Description of Artificial Sequence: Synthetic Destabilizing Domain (DD)
EETRELQSLAAAVVPSAQTLKITDFSFSDFELSDLETALCTIRMFTDLNLVQNFQMKHEVLCRWILSVKKNYRKNVAYHNWRHAFNTAQCMFAALKAGKIQNKLTDLEILALLIAALSHDLDHRGVNNSYIQRSEHPLAQLYCHSIMEHHHFDQCLMILNSPGNQILSGLSIEEYKTSLKIIKQAILATDLALYIKRRGEFFELIRKNQFNLEDPHQKELFLAMLMTACDLSAITKPWPIQQRIAELVATEFFDQGDRERKELNIEPTDLMNREKKNKIPSMQVGFIDAICLQLYEALTHVSEDCFPLLDGCRKNRQKWQALAEQQ

SEQ ID NO: 341 - protein, 326 aa, Artificial Sequence
  Description of Artificial Sequence: Synthetic Destabilizing Domain (DD)
EETRELQSLAAAVVPSAQTLKITDFSFSDFELSDLETALCTIRMFTDLNLVQNFQMKHEVLCRWILSVKKNYRKNVAYHNWRHAFNTAQCMFAALKAGKIQNKLTDLEILALLIAALSHDLDHRGVNNSYIQRSEHPLAQLYCHSIMEHHHFDQCLMILNSPGNQILSGLSIEEYKTTLKIIKQAILATNLALYIKRRGEFFELIRKNQFNLEDPHQKELFLAMLMTACDLSAITKPWPIQQRIAELVATEFFDQGDRERKELNIEPTDLMNREKKNKIPSMQVGFIDAICLQLYEALTHVSEDCFPLLDGCRKNRQKWQALAEQQ

SEQ ID NO: 342 - protein, 326 aa, Artificial Sequence
  Description of Artificial Sequence: Synthetic Destabilizing Domain (DD)
EETRELQSLAAAVVPSAQTLKITDFSFSDFELSDLETALCTIRMFTDLNLVQNFQMKHEVLCRWILSVKKNYRKNVAYHNWRHAFNTAQCMFAALKAGKIQNKLTDLEILALLIAALSHDLDHRGVNNSYIQRSEHPLAQLYCHSIMEHHHFDQCLMILNSPGNQILSGLSIEEYKTTLKIIKQAILATGLALYIKRRGEFFELIRKNQFNLEDPHQKELFLAMLMTACDLSAITKPWPIQQRIAELVATEFFDQGDRERKELNIEPTDLMNREKKNKIPSMQVGFIDAICLQLYEALTHVSEDCFPLLDGCRKNRQKWQALAEQQ

SEQ ID NO: 343 - protein, 326 aa, Artificial Sequence
  Description of Artificial Sequence: Synthetic Destabilizing Domain (DD)
EETRELQSLAAAVVPSAQTLKITDFSFSDFELSDLETALCTIRMFTDLNLVQNFQMKHEVLCRWILSVKKNYRKNVAYHNWRHAFNTAQCMFAALKAGKIQNKLTDLEILALLIAALSHDLDHRGVNNSYIQRSEHPLAQLYCHSIMEHHHFDQCLMILNSPGNQILSGLSIEEYKTTLKIIKQAILATDLALYIKRRGEFFEHIRKNQFNLEDPHQKELFLAMLMTACDLSAITKPWPIQQRIAELVATEFFDQGDRERKELNIEPTDLMNREKKNKIPSMQVGFIDAICLQLYEALTHVSEDCFPLLDGCRKNRQKWQALAEQQ

SEQ ID NO: 344 - protein, 326 aa, Artificial Sequence
  Description of Artificial Sequence: Synthetic Destabilizing Domain (DD)
EETRELQSLAAAVVPSAQTLKITDFSFSDFELSDLETALCTIRMFTDLNLVQNFQMKHEVLCRWILSVKKNYRKNVAYHNWRHAFNTAQCMFAALKAGKIQNKLTDLEILALLIAALSHDLDHRGVNNSYIQRSEHPLAQLYCHSIMEHHHFDQCLMILNSPGNQILSGLSIEEYKTTLKIIKQAILATDLALYIKRRGEFFELIRKSQFNLEDPHQKELFLAMLMTACDLSAITKPWPIQQRIAELVATEFFDQGDRERKELNIEPTDLMNREKKNKIPSMQVGFIDAICLQLYEALTHVSEDCFPLLDGCRKNRQKWQALAEQQ

SEQ ID NO: 345 - protein, 326 aa, Artificial Sequence
  Description of Artificial Sequence: Synthetic Destabilizing Domain (DD)
EETRELQSLAAAVVPSAQTLKITDFSFSDFELSDLETALCTIRMFTDLNLVQNFQMKHEVLCRWILSVKKNYRKNVAYHNWRHAFNTAQCMFAALKAGKIQNKLTDLEILALLIAALSHDLDHRGVNNSYIQRSEHPLAQLYCHSIMEHHHFDQCLMILNSPGNQILSGLSIEEYKTTLKIIKQAILATDLALYIKRRGEFFELIRKNQFNLEDPHQKELFLAMLMTSCDLSAITKPWPIQQRIAELVATEFFDQGDRERKELNIEPTDLMNREKKNKIPSMQVGFIDAICLQLYEALTHVSEDCFPLLDGCRKNRQKWQALAEQQ

SEQ ID NO: 346 - protein, 326 aa, Artificial Sequence
  Description of Artificial Sequence: Synthetic Destabilizing Domain (DD)
EETRELQSLAAAVVPSAQTLKITDFSFSDFELSDLETALCTIRMFTDLNLVQNFQMKHEVLCRWILSVKKNYRKNVAYHNWRHAFNTAQCMFAALKAGKIQNKLTDLEILALLIAALSHDLDHRGVNNSYIQRSEHPLAQLYCHSIMEHHHFDQCLMILNSPGNQILSGLSIEEYKTTLKIIKQAILATDLALYIKRRGEFFELIRKNQFNLEDPHQKELFLAMLMTACNLSAITKPWPIQQRIAELVATEFFDQGDRERKELNIEPTDLMNREKKNKIPSMQVGFIDAICLQLYEALTHVSEDCFPLLDGCRKNRQKWQALAEQQ

SEQ ID NO: 347 - protein, 326 aa, Artificial Sequence
  Description of Artificial Sequence: Synthetic Destabilizing Domain (DD)
EETRELQSLAAAVVPSAQTLKITDFSFSDFELSDLETALCTIRMFTDLNLVQNFQMKHEVLCRWILSVKKNYRKNVAYHNWRHAFNTAQCMFAALKAGKIQNKLTDLEILALLIAALSHDLDHRGVNNSYIQRSEHPLAQLYCHSIMEHHHFDQCLMILNSPGNQILSGLSIEEYKTTLKIIKQAILATDLALYIKRRGEFFELIRKNQFNLEDPHQKELFLAMLMTACGLSAITKPWPIQQRIAELVATEFFDQGDRERKELNIEPTDLMNREKKNKIPSMQVGFIDAICLQLYEALTHVSEDCFPLLDGCRKNRQKWQALAEQQ

SEQ ID NO: 348 - protein, 326 aa, Artificial Sequence
  Description of Artificial Sequence: Synthetic Destabilizing Domain (DD)
EETRELQSLAAAVVPSAQTLKITDFSFSDFELSDLETALCTIRMFTDLNLVQNFQMKHEVLCRWILSVKKNYRKNVAYHNWRHAFNTAQCMFAALKAGKIQNKLTDLEILALLIAALSHDLDHRGVNNSYIQRSEHPLAQLYCHSIMEHHHFDQCLMILNSPGNQILSGLSIEEYKTTLKIIKQAILATDLALYIKRRGEFFELIRKNQFNLEDPHQKELFLAMLMTACVLSAITKPWPIQQRIAELVATEFFDQGDRERKELNIEPTDLMNREKKNKIPSMQVGFIDAICLQLYEALTHVSEDCFPLLDGCRKNRQKWQALAEQQ

SEQ ID NO: 349 - protein, 326 aa, Artificial Sequence
  Description of Artificial Sequence: Synthetic Destabilizing Domain (DD)
EETRELQSLAAAVVPSAQTLKITDFSFSDFELSDLETALCTIRMFTDLNLVQNFQMKHEVLCRWILSVKKNYRKNVAYHNWRHAFNTAQCMFAALKAGKIQNKLTDLEILALLIAALSHDLDHRGVNNSYIQRSEHPLAQLYCHSIMEHHHFDQCLMILNSPGNQILSGLSIEEYKTTLKIIKQAILATDLALYIKRRGEFFELIRKNQFNLEDPHQKELFLAMLMTACDLFAITKPWPIQQRIAELVATEFFDQGDRERKELNIEPTDLMNREKKNKIPSMQVGFIDAICLQLYEALTHVSEDCFPLLDGCRKNRQKWQALAEQQ

SEQ ID NO: 350 - protein, 326 aa, Artificial Sequence
  Description of Artificial Sequence: Synthetic Destabilizing Domain (DD)
EETRELQSLAAAVVPSAQTLKITDFSFSDFELSDLETALCTIRMFTDLNLVQNFQMKHEVLCRWILSVKKNYRKNVAYHNWRHAFNTAQCMFAALKAGKIQNKLTDLEILALLIAALSHDLDHRGVNNSYIQRSEHPLAQLYCHSIMEHHHFDQCLMILNSPGNQILSGLSIEEYKTTLKIIKQAILATDLALYIKRRGEFFELIRKNQFNLEDPHQKELFLAMLMTACDLSAITKPWPIQQRIAELVATEFFDQGDREREELNIEPTDLMNREKKNKIPSMQVGFIDAICLQLYEALTHVSEDCFPLLDGCRKNRQKWQALAEQQ

SEQ ID NO: 351 - protein, 326 aa, Artificial Sequence
  Description of Artificial Sequence: Synthetic Destabilizing Domain (DD)
EETRELQSLAAAVVPSAQTLKITDFSFSDFELSDLETALCTIRMFTDLNLVQNFQMKHEVLCRWILSVKKNYRKNVAYHNWRHAFNTAQCMFAALKAGKIQNKLTDLEILALLIAALSHDLDHRGVNNSYIQRSEHPLAQLYCHSIMEHHHFDQCLMILNSPGNQILSGLSIEEYKTTLKIIKQAILATDLALYIKRRGEFFELIRKNQFNLEDPHQKELFLAMLMTACDLSAITKPWPIQQRIAELVATEFFDQGDRERKEFNIEPTDLMNREKKNKIPSMQVGFIDAICLQLYEALTHVSEDCFPLLDGCRKNRQKWQALAEQQ

SEQ ID NO: 352 - protein, 326 aa, Artificial Sequence
  Description of Artificial Sequence: Synthetic Destabilizing Domain (DD)
EETRELQSLAAAVVPSAQTLKITDFSFSDFELSDLETALCTIRMFTDLNLVQNFQMKHEVLCRWILSVKKNYRKNVAYHNWRHAFNTAQCMFAALKAGKIQNKLTDLEILALLIAALSHDLDHRGVNNSYIQRSEHPLAQLYCHSIMEHHHFDQCLMILNSPGNQILSGLSIEEYKTTLKIIKQAILATDLALYIKRRGEFFELIRKNQFNLEDPHQKELFLAMLMTACDLSAITKPWPIQQRIAELVATEFFDQGDRERKELNTEPTDLMNREKKNKIPSMQVGFIDAICLQLYEALTHVSEDCFPLLDGCRKNRQKWQALAEQQ

SEQ ID NO: 353 - protein, 326 aa, Artificial Sequence
  Description of Artificial Sequence: Synthetic Destabilizing Domain (DD)
EETRELQSLAAAVVPSAQTLKITDFSFSDFELSDLETALCTIRMFTDLNLVQNFQMKHEVLCRWILSVKKNYRKNVAYHNWRHAFNTAQCMFAALKAGKIQNKLTDLEILALLIAALSHDLDHRGVNNSYIQRSEHPLAQLYCHSIMEHHHFDQCLMILNSPGNQILSGLSIEEYKTTLKIIKQAILATDLALYIKRRGEFFELIRKNQFNLEDPHQKELFLAMLMTACDLSAITKPWPIQQRIAELVATEFFDQGDRERKELNIEPPDLMNREKKNKIPSMQVGFIDAICLQLYEALTHVSEDCFPLLDGCRKNRQKWQALAEQQ

SEQ ID NO: 354 - protein, 326 aa, Artificial Sequence
  Description of Artificial Sequence: Synthetic Destabilizing Domain (DD)
EETRELQSLAAAVVPSAQTLKITDFSFSDFELSDLETALCTIRMFTDLNLVQNFQMKHEVLCRWILSVKKNYRKNVAYHNWRHAFNTAQCMFAALKAGKIQNKLTDLEILALLIAALSHDLDHRGVNNSYIQRSEHPLAQLYCHSIMEHHHFDQCLMILNSPGNQILSGLSIEEYKTTLKIIKQAILATDLALYIKRRGEFFELIRKNQFNLEDPHQKELFLAMLMTACDLSAITKPWPIQQRIAELVATEFFDQGDRERKELNIEPTDLMNREKKNKIPCMQVGFIDAICLQLYEALTHVSEDCFPLLDGCRKNRQKWQALAEQQ

SEQ ID NO: 355 - protein, 326 aa, Artificial Sequence
  Description of Artificial Sequence: Synthetic Destabilizing Domain (DD)
EETRELQSLAAAVVPSAQTLKITDFSFSDFELSDLETALCTIRMFTDLNLVQNFQMKHEVLCRWILSVKKNYRKNVAYHNWRHAFNTAQCMFAALKAGKIQNKLTDLEILALLIAALSHDLDHRGVNNSYIQRSEHPLAQLYCHSIMEHHHFDQCLMILNSPGNQILSGLSIEEYKTTLKIIKQAILATDLALYIKRRGEFFELIRKNQFNLEDPHQKELFLAMLMTACDLSAITKPWPIQQRIAELVATEFFDQGDRERKELNIEPTDLMNREKKNKIPSAQVGFIDAICLQLYEALTHVSEDCFPLLDGCRKNRQKWQALAEQQ

SEQ ID NO: 356 - protein, 326 aa, Artificial Sequence
  Description of Artificial Sequence: Synthetic Destabilizing Domain (DD)
EETRELQSLAAAVVPSAQTLKITDFSFSDFELSDLETALCTIRMFTDLNLVQNFQMKHEVLCRWILSVKKNYRKNVAYHNWRHAFNTAQCMFAALKAGKIQNKLTDLEILALLIAALSHDLDHRGVNNSYIQRSEHPLAQLYCHSIMEHHHFDQCLMILNSPGNQILSGLSIEEYKTTLKIIKQAILATDLALYIKRRGEFFELIRKNQFNLEDPHQKELFLAMLMTACDLSAITKPWPIQQRIAELVATEFFDQGDRERKELNIEPTDLMNREKKNKIPSMQVGFIDATCLQLYEALTHVSEDCFPLLDGCRKNRQKWQALAEQQ

SEQ ID NO: 357 - protein, 326 aa, Artificial Sequence
  Description of Artificial Sequence: Synthetic Destabilizing Domain (DD)
EETRELQSLAAAVVPSAQTLKITDFSFSDFELSDLETALCTIRMFTDLNLVQNFQMKHEVLCRWILSVKKNYRKNVAYHNWRHAFNTAQCMFAALKAGKIQNKLTDLEILALLIAALSHDLDHRGVNNSYIQRSEHPLAQLYCHSIMEHHHFDQCLMILNSPGNQILSGLSIEEYKTTLKIIKQAILATDLALYIKRRGEFFELIRKNQFNLEDPHQKELFLAMLMTACDLSAITKPWPIQQRIAELVATEFFDQGDRERKELNIEPTDLMNREKKNKIPSMQVGFIDAICLQLYEALTHVSEDSFPLLDGCRKNRQKWQALAEQQ

SEQ ID NO: 358 - protein, 326 aa, Artificial Sequence
  Description of Artificial Sequence: Synthetic Destabilizing Domain (DD)
EETRELQSLAAAVVPSAQTLKITDFSFSDFELSDLETALCTIRMFTDLNLVQNFQMKHEVLCRWILSVKKNYRKNVAYHNWRHAFNTAQCMFAALKAGKIQNKLTDLEILALLIAALSHDLDHRGVNNSYIQRSEHPLAQLYCHSIMEHHHFDQCLMILNSPGNQILSGLSIEEYKTTLKIIKQAILATDLALYIKRRGEFFELIRKNQFNLEDPHQKELFLAMLMTACDLSAITKPWPIQQRIAELVATEFFDQGDRERKELNIEPTDLMNREKKNKIPSMQVGFIDAICLQLYEALTHVSEDCFPLLDGCRKNRQEWQALAEQQ

SEQ ID NO: 359 - protein, 326 aa, Artificial Sequence
  Description of Artificial Sequence: Synthetic Destabilizing Domain (DD)
EETRELQSLAAAVVPSAQTLKITDFGFSDFELSDLETALCTIRMFTDLNLVQNFQMKHEVLCRWILSVKKNYRKNVAYHNWRHAFNTAQCMFAALKAGKIQNKLTDLEILALLIAALSHDLDHRGVNNSYIQRSEHPLAQLYCHSIMEHHHFDQCLMILNSPGNQILSGLSIEEYKTTLKIIKQAILATDLALYIKRRGEFFELIRKNQFNLEDPHQKELFLAMLMTACDLSAITKPWPIQQRIAELVATEFFDQGDRERKELNIEPTDLMNREKKNKIPSMQVGFIDAICLQLYEALTHVSEDCFPLLDGCRKNRQKWQALAEQQ

SEQ ID NO: 360 - protein, 326 aa, Artificial Sequence
  Description of Artificial Sequence: Synthetic Destabilizing Domain (DD)
EETRELQSLAAAVVPSAQTLKITDFSFSDFELSDLETALCTIRMFTDLNLAQNFQMKHEVLCRWILSVKKNYRKNVAYHNWRHAFNTAQCMFAALKAGKIQNKLTDLEILALLIAALSHDLDHRGVNNSYIQRSEHPLAQLYCHSIMEHHHFDQCLMILNSPGNQILSGLSIEEYKTTLKIIKQAILATDLALYIKRRGEFFELIRKNQFNLEDPHQKELFLAMLMTACDLSAITKPWPIQQRIAELVATEFFDQGDRERKELNIEPTDLMNREKKNKIPSMQVGFIDAICLQLYEALTHVSEDCFPLLDGCRKNRQKWQALAEQQ

SEQ ID NO: 361 - protein, 326 aa, Artificial Sequence
  Description of Artificial Sequence: Synthetic Destabilizing Domain (DD)
EETRELQSLAAAVVPSAQTLKITDFSFSDFELSDLETALCTIRMFTDLNLVQNFQMKHEVLCRWVLSVKKNYRKNVAYHNWRHAFNTAQCMFAALKAGKIQNKLTDLEILALLIAALSHDLDHRGVNNSYIQRSEHPLAQLYCHSIMEHHHFDQCLMILNSPGNQILSGLSIEEYKTTLKIIKQAILATDLALYIKRRGEFFELIRKNQFNLEDPHQKELFLAMLMTACDLSAITKPWPIQQRIAELVATEFFDQGDRERKELNIEPTDLMNREKKNKIPSMQVGFIDAICLQLYEALTHVSEDCFPLLDGCRKNRQKWQALAEQQ

SEQ ID NO: 362 - protein, 326 aa, Artificial Sequence
  Description of Artificial Sequence: Synthetic Destabilizing Domain (DD)
EETRELQSLAAAVVPSAQTLKITDFSFSDFELSDLETALCTIRMFTDLNLVQNFQMKHEVLCRWILSVKKNYRKNVAYHNWRHAFNTAQCMFAALKAGKIQNKLTDLEILALLVAALSHDLDHRGVNNSYIQRSEHPLAQLYCHSIMEHHHFDQCLMILNSPGNQILSGLSIEEYKTTLKIIKQAILATDLALYIKRRGEFFELIRKNQFNLEDPHQKELFLAMLMTACDLSAITKPWPIQQRIAELVATEFFDQGDRERKELNIEPTDLMNREKKNKIPSMQVGFIDAICLQLYEALTHVSEDCFPLLDGCRKNRQKWQALAEQQ

SEQ ID NO: 363 - protein, 326 aa, Artificial Sequence
  Description of Artificial Sequence: Synthetic Destabilizing Domain (DD)
EETRELQSLAAAVVPSAQTLKITDFSFSDFELSDLETALCTIRMFTDLNLVQNFQMKHEVLCRWILSVKKNYRKNVAYHNWRHAFNTAQCMFAALKAGKIQNKLTDLEILALLIAALSHDLDHRGVNNPYIQRSEHPLAQLYCHSIMEHHHFDQCLMILNSPGNQILSGLSIEEYKTTLKIIKQAILATDLALYIKRRGEFFELIRKNQFNLEDPHQKELFLAMLMTACDLSAITKPWPIQQRIAELVATEFFDQGDRERKELNIEPTDLMNREKKNKIPSMQVGFIDAICLQLYEALTHVSEDCFPLLDGCRKNRQKWQALAEQQ

SEQ ID NO: 364 - protein, 326 aa, Artificial Sequence
  Description of Artificial Sequence: Synthetic Destabilizing Domain (DD)
EETRELQSLAAAVVPSAQTLKITDFSFSDFELSDLETALCTIRMFTDLNLVQNFQMKHEVLCRWILSVKKNYRKNVAYHNWRHAFNTAQCMFAALKAGKIQNKLTDLEILALLIAALSHDLDHRGVNNSYIQRSEHPLAQPYCHSIMEHHHFDQCLMILNSPGNQILSGLSIEEYKTTLKIIKQAILATDLALYIKRRGEFFELIRKNQFNLEDPHQKELFLAMLMTACDLSAITKPWPIQQRIAELVATEFFDQGDRERKELNIEPTDLMNREKKNKIPSMQVGFIDAICLQLYEALTHVSEDCFPLLDGCRKNRQKWQALAEQQ

SEQ ID NO: 365 - protein, 326 aa, Artificial Sequence
  Description of Artificial Sequence: Synthetic Destabilizing Domain (DD)
EETRELQSLAAAVVPSAQTLKITDFSFSDFELSDLETALCTIRMFTDLNLVQNFQMKHEVLCRWILSVKKNYRKNVAYHNWRHAFNTAQCMFAALKAGKIQNKLTDLEILALLIAALSHDLDHRGVNNSYIQRSEHPLAQLYCHSIMEHHHFDQCLMILNSPGNQILSGLSIEEYKATLKIIKQAILATDLALYIKRRGEFFELIRKNQFNLEDPHQKELFLAMLMTACDLSAITKPWPIQQRIAELVATEFFDQGDRERKELNIEPTDLMNREKKNKIPSMQVGFIDAICLQLYEALTHVSEDCFPLLDGCRKNRQKWQALAEQQ

SEQ ID NO: 366 - protein, 326 aa, Artificial Sequence
  Description of Artificial Sequence: Synthetic Destabilizing Domain (DD)
EETRELQSLAAAVVPSAQTLKITDFSFSDFELSDLETALCTIRMFTDLNLVQNFQMKHEVLCRWILSVKKNYRKNVAYHNWRHAFNTAQCMFAALKAGKIQNKLTDLEILALLIAALSHDLDHRGVNNSYIQRSEHPLAQLYCHSIMEHHHFDQCLMILNSPGNQILSGLSIEEYKTTLKIIKQAILATDLALYIKRRGEFFELIRKNQLNLEDPHQKELFLAMLMTACDLSAITKPWPIQQRIAELVATEFFDQGDRERKELNIEPTDLMNREKKNKIPSMQVGFIDAICLQLYEALTHVSEDCFPLLDGCRKNRQKWQALAEQQ

SEQ ID NO: 367 - protein, 326 aa, Artificial Sequence
  Description of Artificial Sequence: Synthetic Destabilizing Domain (DD)
EETRELQSLAAAVVPSAQTLKITDFSFSDFELSDLETALCTIRMFTDLNLVQNFQMKHEVLCRWILSVKKNYRKNVAYHNWRHAFNTAQCMFAALKAGKIQNKLTDLEILALLIAALSHDLDHRGVNNSYIQRSEHPLAQLYCHSIMEHHHFDQCLMILNSPGNQILSGLSIEEYKTTLKIIKQAILATDLALYIKRRGEFFELIRKNQFNSEDPHQKELFLAMLMTACDLSAITKPWPIQQRIAELVATEFFDQGDRERKELNIEPTDLMNREKKNKIPSMQVGFIDAICLQLYEALTHVSEDCFPLLDGCRKNRQKWQALAEQQ

SEQ ID NO: 368 - protein, 326 aa, Artificial Sequence
  Description of Artificial Sequence: Synthetic Destabilizing Domain (DD)
EETRELQSLAAAVVPSAQTLKITDFSFSDFELSDLETALCTIRMFTDLNLVQNFQMKHEVLCRWILSVKKNYRKNVAYHNWRHAFNTAQCMFAALKAGKIQNKLTDLEILALLIAALSHDLDHRGVNNSYIQRSEHPLAQLYCHSIMEHHHFDQCLMILNSPGNQILSGLSIEEYKTTLKIIKQAILATDLALYIKRRGEFFELIRKNQFNLEDPHQKELLLAMLMTACDLSAITKPWPIQQRIAELVATEFFDQGDRERKELNIEPTDLMNREKKNKIPSMQVGFIDAICLQLYEALTHVSEDCFPLLDGCRKNRQKWQALAEQQ

SEQ ID NO: 369 - protein, 326 aa, Artificial Sequence
  Description of Artificial Sequence: Synthetic Destabilizing Domain (DD)
EETRELQSLAAAVVPSAQTLKITDFSFSDFELSDLETALCTIRMFTDLNLVQNFQMKHEVLCRWILSVKKNYRKNVAYHNWRHAFNTAQCMFAALKAGKIQNKLTDLEILALLIAALSHDLDHRGVNNSYIQRSEHPLAQLYCHSIMEHHHFDQCLMILNSPGNQILSGLSIEEYKTTLKIIKQAILATDLALYIKRRGEFFELIRKNQFNLEDPHQKELFLAMLMTACDLSAITKPWPIQQRIAELVATEFFDQGDRERKELNIEPTDPMNREKKNKIPSMQVGFIDAICLQLYEALTHVSEDCFPLLDGCRKNRQKWQALAEQQ

SEQ ID NO: 370 - protein, 326 aa, Artificial Sequence
  Description of Artificial Sequence: Synthetic Destabilizing Domain (DD)
EETRELQSLAAAVVPSAQTLKITDFSFSDFELSDLETALCTIRMFTDLNLVQNFQMKHEVLCRWILSVKKNYRKNVAYHNWRHAFNTAQCMFAALKAGKIQNKLTDLEILALLIAALSHDLDHRGVNNSYIQRSEHPLAQLYCHSIMEHHHFDQCLMILNSPGNQILSGLSIEEYKTTLKIIKQAILATDLALYIKRRGEFFELIRKNQFNLEDPHQKELFLAMLMTACDLSAITKPWPIQQRIAELVATEFFDQGDRERKELNIEPTDLMNREKKNKIPSTQVGFIDAICLQLYEALTHVSEDCFPLLDGCRKNRQKWQALAEQQ

SEQ ID NO: 371 - protein, 326 aa, Artificial Sequence
  Description of Artificial Sequence: Synthetic Destabilizing Domain (DD)
EETRELQSLAAAVVPSAQTLKITDFSFSDFELSDLETALCTIRMFTDLNLVQNFQMKHEVLCRWILSVKKNYRKNVAYHNWRHAFNTAQCMFAALKAGKIQNKLTDLEILALLIAALSHDLDHRGVNNSYIQRSEHPLAQLYCHSIMEHHHFDQCLMILNSPGNQILSGLSIEEYKTTLKIIKQAILATDLALYIKRRGEFFELIRKNQFNLEDPHQKELFLAMLMTACDLSAITKPWPIQQRIAELVATEFFDQGDRERKELNIEPTDLMNREKKNKIPSMQVGFIDAICLQLYEALTHVSEDCSPLLDGCRKNRQKWQALAEQQ

SEQ ID NO: 372 - protein, 326 aa, Artificial Sequence
  Description of Artificial Sequence: Synthetic Destabilizing Domain (DD)
EETRELQSLAAAVVPSAQTLKITDFSFSDFELSDLETALCTIRMFTDLNLVQNFQMKHEVLCRWILSVKKNYRKNVAYHNWRHAFNTAQCMFAALKAGKIQNKLTDLEILALLIAALSHDLDHRGVNNSYIQRSEHPLAQLYCHSIMEHHHFDQCLMILNSPGNQILSGLSIEEYKTTLKIIKQAILATDLALYIKRGGEFFELIRKNQFNLEDPHQKELFLAMLMTACDLSAITKPWPIQQRIAELVATEFFDQGDRERKELNIEPTDLMNREKKNKIPSMQVGFIDAICLQLYEALTHVSEDCFPLLDGCRKNRQKWQALAEQQ

SEQ ID NO: 373 - DNA, 978 bp, Artificial Sequence
  Description of Artificial Sequence: Synthetic Destabilizing Domain (DD)
gaagaaacaagagagctacagtcgttagcggctgctgtggtgccatctgcccagacccttaaaattactgactttagcttcagtgactttgagctgtctgatctggaaacagcactgtgtacaattcggatgtttactgacctcaaccttgtgcagaacttccagatgaaacatgaggttctttgcagatggattttaagtgttaagaagaattatcggaagaatgttgcctatcataattggagacatgcctttaatacagctcagtgcatgtttgctgctctaaaagcaggcaaaattcagaacaagctgactgacctggagatacttgcattgctgattgctgcactaagccacgatttggatcaccgtggtgtgaataactcttacatacagcgaagtgaacatccacttgcccagctttactgccattcaatcatggaacaccatcattttgaccagtgcctgatgattcttaatagtccaggcaatcagattctcagtggcctctccattgaagaatataagaccacgttgaaaataatcaagcaagctattttagctacagacctagcactgtacattaagaggggcggagaattttttgaacttataagaaaaaatcaattcaatttggaagatcctcatcaaaaggagttgtttttggcaatgctgatgacagcttgtgatctttctgcaattacaaaaccctggcctattcaacaacggatagcagaacttgtagcaactgaattttttgatcaaggagacagagagagaaaagaactcaacatagaacccactgatctaatgaacagggagaagaaaaacaaaatcccaagtatgcaagttgggttcatagatgccatctgcttgcaactgtatgaggccctgacccacgtgtcagaggactgtttccctttgctagatggctgcagaaagaacaggcagaaatggcaggcccttgcagaacagcag

SEQ ID NO: 374 - DNA, 978 bp, Artificial Sequence
  Description of Artificial Sequence: Synthetic Destabilizing Domain (DD)
gaagaaacaagagagctacagtcgttagcggctgctgtggtgccatctgcccagacccttaaaattactgactttagcttcagtgactttgagctgtctgatctggaaacagcactgtgtacaattcggatgtttactgacctcaaccttgtgcagaacttccagatgaaacatgaggttctttgcagatggattttaagtgttaagaagaattatcggaagaatgttgcctatcataattggagacatgcctttaatacagctcagtgcatgtttgctgctctaaaagcaggcaaaattcagaacaagctgactgacctggagatacttgcattgctgattgctgcactaagccacgatttggatcaccgtggtgtgaataactcttacatacagcgaagtgaacatccacttgcccagctttactgccattcaatcatggaacaccatcattttgaccagtgcctgatgattcttaatagtccaggcaatcagattctcagtggcctctccattgaagaatataagaccacgttgaaaataatcaagcaagctattttagctacagacctagcactgtacattaagaggggaggagaattttttgaacttataagaaaaaatcaattcaatttggaagatcctcatcaaaaggagttgtttttggcaatgctgatgacagcttgtgatctttctgcaattacaaaaccctggcctattcaacaacggatagcagaacttgtagcaactgaattttttgatcaaggagacagagagagaaaagaactcaacatagaacccactgatctaatgaacagggagaagaaaaacaaaatcccaagtatgcaagttgggttcatagatgccatctgcttgcaactgtatgaggccctgacccacgtgtcagaggactgtttccctttgctagatggctgcagaaagaacaggcagaaatggcaggcccttgcagaacagcag

SEQ ID NO: 375 - protein, 326 aa, Artificial Sequence
  Description of Artificial Sequence: Synthetic Destabilizing Domain (DD)
EETRELQSLAAAVVPSAQTLKITDFSFSDFELSDLETALCTIRMFTDLNLVQNFQMKHEVLCRWILSVKKNYRKNVAYHNWRHAFNTAQCMFAALKAGKIQNKLTDLEILALLIAALSHDLDHRGVNNSYIQRSEHPLAQLYCHSIMEHHHFDQCLMILNSPGNQILSGLSIEEYKTTLKIIKQAILATDLALYIKRAGEFFELIRKNQFNLEDPHQKELFLAMLMTACDLSAITKPWPIQQRIAELVATEFFDQGDRERKELNIEPTDLMNREKKNKIPSMQVGFIDAICLQLYEALTHVSEDCFPLLDGCRKNRQKWQALAEQQ

SEQ ID NO: 376 - DNA, 978 bp, Artificial Sequence
  Description of Artificial Sequence: Synthetic Destabilizing Domain (DD)
gaagaaacaagagagctacagtcgttagcggctgctgtggtgccatctgcccagacccttaaaattactgactttagcttcagtgactttgagctgtctgatctggaaacagcactgtgtacaattcggatgtttactgacctcaaccttgtgcagaacttccagatgaaacatgaggttctttgcagatggattttaagtgttaagaagaattatcggaagaatgttgcctatcataattggagacatgcctttaatacagctcagtgcatgtttgctgctctaaaagcaggcaaaattcagaacaagctgactgacctggagatacttgcattgctgattgctgcactaagccacgatttggatcaccgtggtgtgaataactcttacatacagcgaagtgaacatccacttgcccagctttactgccattcaatcatggaacaccatcattttgaccagtgcctgatgattcttaatagtccaggcaatcagattctcagtggcctctccattgaagaatataagaccacgttgaaaataatcaagcaagctattttagctacagacctagcactgtacattaagagggcgggagaattttttgaacttataagaaaaaatcaattcaatttggaagatcctcatcaaaaggagttgtttttggcaatgctgatgacagcttgtgatctttctgcaattacaaaaccctggcctattcaacaacggatagcagaacttgtagcaactgaattttttgatcaaggagacagagagagaaaagaactcaacatagaacccactgatctaatgaacagggagaagaaaaacaaaatcccaagtatgcaagttgggttcatagatgccatctgcttgcaactgtatgaggccctgacccacgtgtcagaggactgtttccctttgctagatggctgcagaaagaacaggcagaaatggcaggcccttgcagaacagcag

SEQ ID NO: 377 - DNA, 978 bp, Artificial Sequence
  Description of Artificial Sequence: Synthetic Destabilizing Domain (DD)
gaagaaacaagagagctacagtcgttagcggctgctgtggtgccatctgcccagacccttaaaattactgactttagcttcagtgactttgagctgtctgatctggaaacagcactgtgtacaattcggatgtttactgacctcaaccttgtgcagaacttccagatgaaacatgaggttctttgcagatggattttaagtgttaagaagaattatcggaagaatgttgcctatcataattggagacatgcctttaatacagctcagtgcatgtttgctgctctaaaagcaggcaaaattcagaacaagctgactgacctggagatacttgcattgctgattgctgcactaagccacgatttggatcaccgtggtgtgaataactcttacatacagcgaagtgaacatccacttgcccagctttactgccattcaatcatggaacaccatcattttgaccagtgcctgatgattcttaatagtccaggcaatcagattctcagtggcctctccattgaagaatataagaccacgttgaaaataatcaagcaagctattttagctacagacctagcactgtacattaagagggcaggagaattttttgaacttataagaaaaaatcaattcaatttggaagatcctcatcaaaaggagttgtttttggcaatgctgatgacagcttgtgatctttctgcaattacaaaaccctggcctattcaacaacggatagcagaacttgtagcaactgaattttttgatcaaggagacagagagagaaaagaactcaacatagaacccactgatctaatgaacagggagaagaaaaacaaaatcccaagtatgcaagttgggttcatagatgccatctgcttgcaactgtatgaggccctgacccacgtgtcagaggactgtttccctttgctagatggctgcagaaagaacaggcagaaatggcaggcccttgcagaacagcag

SEQ ID NO: 378 - protein, 326 aa, Artificial Sequence
  Description of Artificial Sequence: Synthetic Destabilizing Domain (DD)
EETRELQSLAAAVVPSAQTLKITDFSFSDFELSDLETALCTIRMFTDLNLVQNFQMKHEVLCRWILSVKKNYRKNVAYHNWRHAFNTAQCMFAALKAGKIQNKLTDLEILALLIAALSHDLDHRGVNNSYIQRSEHPLAQLYCHSIMEHHHFDQCLMILNSPGNQILSGLSIEEYKTTLKIIKQAILATDLALYIKRVGEFFELIRKNQFNLEDPHQKELFLAMLMTACDLSAITKPWPIQQRIAELVATEFFDQGDRERKELNIEPTDLMNREKKNKIPSMQVGFIDAICLQLYEALTHVSEDCFPLLDGCRKNRQKWQALAEQQ

SEQ ID NO: 379 - DNA, 978 bp, Artificial Sequence
  Description of Artificial Sequence: Synthetic Destabilizing Domain (DD)
gaagaaacaagagagctacagtcgttagcggctgctgtggtgccatctgcccagacccttaaaattactgactttagcttcagtgactttgagctgtctgatctggaaacagcactgtgtacaattcggatgtttactgacctcaaccttgtgcagaacttccagatgaaacatgaggttctttgcagatggattttaagtgttaagaagaattatcggaagaatgttgcctatcataattggagacatgcctttaatacagctcagtgcatgtttgctgctctaaaagcaggcaaaattcagaacaagctgactgacctggagatacttgcattgctgattgctgcactaagccacgatttggatcaccgtggtgtgaataactcttacatacagcgaagtgaacatccacttgcccagctttactgccattcaatcatggaacaccatcattttgaccagtgcctgatgattcttaatagtccaggcaatcagattctcagtggcctctccattgaagaatataagaccacgttgaaaataatcaagcaagctattttagctacagacctagcactgtacattaagagggtgggagaattttttgaacttataagaaaaaatcaattcaatttggaagatcctcatcaaaaggagttgtttttggcaatgctgatgacagcttgtgatctttctgcaattacaaaaccctggcctattcaacaacggatagcagaacttgtagcaactgaattttttgatcaaggagacagagagagaaaagaactcaacatagaacccactgatctaatgaacagggagaagaaaaacaaaatcccaagtatgcaagttgggttcatagatgccatctgcttgcaactgtatgaggccctgacccacgtgtcagaggactgtttccctttgctagatggctgcagaaagaacaggcagaaatggcaggcccttgcagaacagcag

SEQ ID NO: 380 - DNA, 978 bp, Artificial Sequence
  Description of Artificial Sequence: Synthetic Destabilizing Domain (DD)
gaagaaacaagagagctacagtcgttagcggctgctgtggtgccatctgcccagacccttaaaattactgactttagcttcagtgactttgagctgtctgatctggaaacagcactgtgtacaattcggatgtttactgacctcaaccttgtgcagaacttccagatgaaacatgaggttctttgcagatggattttaagtgttaagaagaattatcggaagaatgttgcctatcataattggagacatgcctttaatacagctcagtgcatgtttgctgctctaaaagcaggcaaaattcagaacaagctgactgacctggagatacttgcattgctgattgctgcactaagccacgatttggatcaccgtggtgtgaataactcttacatacagcgaagtgaacatccacttgcccagctttactgccattcaatcatggaacaccatcattttgaccagtgcctgatgattcttaatagtccaggcaatcagattctcagtggcctctccattgaagaatataagaccacgttgaaaataatcaagcaagctattttagctacagacctagcactgtacattaagagggtaggagaattttttgaacttataagaaaaaatcaattcaatttggaagatcctcatcaaaaggagttgtttttggcaatgctgatgacagcttgtgatctttctgcaattacaaaaccctggcctattcaacaacggatagcagaacttgtagcaactgaattttttgatcaaggagacagagagagaaaagaactcaacatagaacccactgatctaatgaacagggagaagaaaaacaaaatcccaagtatgcaagttgggttcatagatgccatctgcttgcaactgtatgaggccctgacccacgtgtcagaggactgtttccctttgctagatggctgcagaaagaacaggcagaaatggcaggcccttgcagaacagcag

SEQ ID NO: 381 - protein, 326 aa, Artificial Sequence
  Description of Artificial Sequence: Synthetic Destabilizing Domain (DD)
EETRELQSLAAAVVPSAQTLKITDFSFSDFELSDLETALCTIRMFTDLNLVQNFQMKHEVLCRWILSVKKNYRKNVAYHNWRHAFNTAQCMFAALKAGKIQNKLTDLEILALLIAALSHDLDHRGVNNSYIQRSEHPLAQLYCHSIMEHHHFDQCLMILNSPGNQILSGLSIEEYKTTLKIIKQAILATDLALYIKRIGEFFELIRKNQFNLEDPHQKELFLAMLMTACDLSAITKPWPIQQRIAELVATEFFDQGDRERKELNIEPTDLMNREKKNKIPSMQVGFIDAICLQLYEALTHVSEDCFPLLDGCRKNRQKWQALAEQQ

SEQ ID NO: 382 - DNA, 978 bp, Artificial Sequence
  Description of Artificial Sequence: Synthetic Destabilizing Domain (DD)
gaagaaacaagagagctacagtcgttagcggctgctgtggtgccatctgcccagacccttaaaattactgactttagcttcagtgactttgagctgtctgatctggaaacagcactgtgtacaattcggatgtttactgacctcaaccttgtgcagaacttccagatgaaacatgaggttctttgcagatggattttaagtgttaagaagaattatcggaagaatgttgcctatcataattggagacatgcctttaatacagctcagtgcatgtttgctgctctaaaagcaggcaaaattcagaacaagctgactgacctggagatacttgcattgctgattgctgcactaagccacgatttggatcaccgtggtgtgaataactcttacatacagcgaagtgaacatccacttgcccagctttactgccattcaatcatggaacaccatcattttgaccagtgcctgatgattcttaatagtccaggcaatcagattctcagtggcctctccattgaagaatataagaccacgttgaaaataatcaagcaagctattttagctacagacctagcactgtacattaagaggattggagaattttttgaacttataagaaaaaatcaattcaatttggaagatcctcatcaaaaggagttgtttttggcaatgctgatgacagcttgtgatctttctgcaattacaaaaccctggcctattcaacaacggatagcagaacttgtagcaactgaattttttgatcaaggagacagagagagaaaagaactcaacatagaacccactgatctaatgaacagggagaagaaaaacaaaatcccaagtatgcaagttgggttcatagatgccatctgcttgcaactgtatgaggccctgacccacgtgtcagaggactgtttccctttgctagatggctgcagaaagaacaggcagaaatggcaggcccttgcagaacagcag

SEQ ID NO: 383 - DNA, 978 bp, Artificial Sequence
  Description of Artificial Sequence: Synthetic Destabilizing Domain (DD)
gaagaaacaagagagctacagtcgttagcggctgctgtggtgccatctgcccagacccttaaaattactgactttagcttcagtgactttgagctgtctgatctggaaacagcactgtgtacaattcggatgtttactgacctcaaccttgtgcagaacttccagatgaaacatgaggttctttgcagatggattttaagtgttaagaagaattatcggaagaatgttgcctatcataattggagacatgcctttaatacagctcagtgcatgtttgctgctctaaaagcaggcaaaattcagaacaagctgactgacctggagatacttgcattgctgattgctgcactaagccacgatttggatcaccgtggtgtgaataactcttacatacagcgaagtgaacatccacttgcccagctttactgccattcaatcatggaacaccatcattttgaccagtgcctgatgattcttaatagtccaggcaatcagattctcagtggcctctccattgaagaatataagaccacgttgaaaataatcaagcaagctattttagctacagacctagcactgtacattaagaggataggagaattttttgaacttataagaaaaaatcaattcaatttggaagatcctcatcaaaaggagttgtttttggcaatgctgatgacagcttgtgatctttctgcaattacaaaaccctggcctattcaacaacggatagcagaacttgtagcaactgaattttttgatcaaggagacagagagagaaaagaactcaacatagaacccactgatctaatgaacagggagaagaaaaacaaaatcccaagtatgcaagttgggttcatagatgccatctgcttgcaactgtatgaggccctgacccacgtgtcagaggactgtttccctttgctagatggctgcagaaagaacaggcagaaatggcaggcccttgcagaacagcag

SEQ ID NO: 384 - protein, 326 aa, Artificial Sequence
  Description of Artificial Sequence: Synthetic Destabilizing Domain (DD)
EETRELQSLAAAVVPSAQTLKITDFSFSDFELSDLETALCTIRMFTDLNLVQNFQMKHEVLCRWILSVKKNYRKNVAYHNWRHAFNTAQCMFAALKAGKIQNKLTDLEILALLIAALSHDLDHRGVNNSYIQRSEHPLAQLYCHSIMEHHHFDQCLMILNSPGNQILSGLSIEEYKTTLKIIKQAILATDLALYIKRPGEFFELIRKNQFNLEDPHQKELFLAMLMTACDLSAITKPWPIQQRIAELVATEFFDQGDRERKELNIEPTDLMNREKKNKIPSMQVGFIDAICLQLYEALTHVSEDCFPLLDGCRKNRQKWQALAEQQ

SEQ ID NO: 385 - DNA, 978 bp, Artificial Sequence
  Description of Artificial Sequence: Synthetic Destabilizing Domain (DD)
gaagaaacaagagagctacagtcgttagcggctgctgtggtgccatctgcccagacccttaaaattactgactttagcttcagtgactttgagctgtctgatctggaaacagcactgtgtacaattcggatgtttactgacctcaaccttgtgcagaacttccagatgaaacatgaggttctttgcagatggattttaagtgttaagaagaattatcggaagaatgttgcctatcataattggagacatgcctttaatacagctcagtgcatgtttgctgctctaaaagcaggcaaaattcagaacaagctgactgacctggagatacttgcattgctgattgctgcactaagccacgatttggatcaccgtggtgtgaataactcttacatacagcgaagtgaacatccacttgcccagctttactgccattcaatcatggaacaccatcattttgaccagtgcctgatgattcttaatagtccaggcaatcagattctcagtggcctctccattgaagaatataagaccacgttgaaaataatcaagcaagctattttagctacagacctagcactgtacattaagaggccgggagaattttttgaacttataagaaaaaatcaattcaatttggaagatcctcatcaaaaggagttgtttttggcaatgctgatgacagcttgtgatctttctgcaattacaaaaccctggcctattcaacaacggatagcagaacttgtagcaactgaattttttgatcaaggagacagagagagaaaagaactcaacatagaacccactgatctaatgaacagggagaagaaaaacaaaatcccaagtatgcaagttgggttcatagatgccatctgcttgcaactgtatgaggccctgacccacgtgtcagaggactgtttccctttgctagatggctgcagaaagaacaggcagaaatggcaggcccttgcagaacagcag

SEQ ID NO: 386 - DNA, 978 bp, Artificial Sequence
  Description of Artificial Sequence: Synthetic Destabilizing Domain (DD)
gaagaaacaagagagctacagtcgttagcggctgctgtggtgccatctgcccagacccttaaaattactgactttagcttcagtgactttgagctgtctgatctggaaacagcactgtgtacaattcggatgtttactgacctcaaccttgtgcagaacttccagatgaaacatgaggttctttgcagatggattttaagtgttaagaagaattatcggaagaatgttgcctatcataattggagacatgcctttaatacagctcagtgcatgtttgctgctctaaaagcaggcaaaattcagaacaagctgactgacctggagatacttgcattgctgattgctgcactaagccacgatttggatcaccgtggtgtgaataactcttacatacagcgaagtgaacatccacttgcccagctttactgccattcaatcatggaacaccatcattttgaccagtgcctgatgattcttaatagtccaggcaatcagattctcagtggcctctccattgaagaatataagaccacgttgaaaataatcaagcaagctattttagctacagacctagcactgtacattaagaggccaggagaattttttgaacttataagaaaaaatcaattcaatttggaagatcctcatcaaaaggagttgtttttggcaatgctgatgacagcttgtgatctttctgcaattacaaaaccctggcctattcaacaacggatagcagaacttgtagcaactgaattttttgatcaaggagacagagagagaaaagaactcaacatagaacccactgatctaatgaacagggagaagaaaaacaaaatcccaagtatgcaagttgggttcatagatgccatctgcttgcaactgtatgaggccctgacccacgtgtcagaggactgtttccctttgctagatggctgcagaaagaacaggcagaaatggcaggcccttgcagaacagcag

SEQ ID NO: 387 - protein, 326 aa, Artificial Sequence
  Description of Artificial Sequence: Synthetic Destabilizing Domain (DD)
EETRELQSLAAAVVPSAQTLKITDFSFSDFELSDLETALCTIRMFTDLNLVQNFQMKHEVLCRWILSVKKNYRKNVAYHNWRHAFNTAQCMFAALKAGKIQNKLTDLEILALLIAALSHDLDHRGVNNSYIQRSEHPLAQLYCHSIMEHHHFDQCLMILNSPGNQILSGLSIEEYKTTLKIIKQAILATDLALYIKRFGEFFELIRKNQFNLEDPHQKELFLAMLMTACDLSAITKPWPIQQRIAELVATEFFDQGDRERKELNIEPTDLMNREKKNKIPSMQVGFIDAICLQLYEALTHVSEDCFPLLDGCRKNRQKWQALAEQQ

SEQ ID NO: 388 - DNA, 978 bp, Artificial Sequence
  Description of Artificial Sequence: Synthetic Destabilizing Domain (DD)
gaagaaacaagagagctacagtcgttagcggctgctgtggtgccatctgcccagacccttaaaattactgactttagcttcagtgactttgagctgtctgatctggaaacagcactgtgtacaattcggatgtttactgacctcaaccttgtgcagaacttccagatgaaacatgaggttctttgcagatggattttaagtgttaagaagaattatcggaagaatgttgcctatcataattggagacatgcctttaatacagctcagtgcatgtttgctgctctaaaagcaggcaaaattcagaacaagctgactgacctggagatacttgcattgctgattgctgcactaagccacgatttggatcaccgtggtgtgaataactcttacatacagcgaagtgaacatccacttgcccagctttactgccattcaatcatggaacaccatcattttgaccagtgcctgatgattcttaatagtccaggcaatcagattctcagtggcctctccattgaagaatataagaccacgttgaaaataatcaagcaagctattttagctacagacctagcactgtacattaagaggtttggagaattttttgaacttataagaaaaaatcaattcaatttggaagatcctcatcaaaaggagttgtttttggcaatgctgatgacagcttgtgatctttctgcaattacaaaaccctggcctattcaacaacggatagcagaacttgtagcaactgaattttttgatcaaggagacagagagagaaaagaactcaacatagaacccactgatctaatgaacagggagaagaaaaacaaaatcccaagtatgcaagttgggttcatagatgccatctgcttgcaactgtatgaggccctgacccacgtgtcagaggactgtttccctttgctagatggctgcagaaagaacaggcagaaatggcaggcccttgcagaacagcag

SEQ ID NO: 389 - protein, 326 aa, Artificial Sequence
  Description of Artificial Sequence: Synthetic Destabilizing Domain (DD)
EETRELQSLAAAVVPSAQTLKITDFSFSDFELSDLETALCTIRMFTDLNLVQNFQMKHEVLCRWILSVKKNYRKNVAYHNWRHAFNTAQCMFAALKAGKIQNKLTDLEILALLIAALSHDLDHRGVNNSYIQRSEHPLAQLYCHSIMEHHHFDQCLMILNSPGNQILSGLSIEEYKTTLKIIKQAILATDLALYIKRWGEFFELIRKNQFNLEDPHQKELFLAMLMTACDLSAITKPWPIQQRIAELVATEFFDQGDRERKELNIEPTDLMNREKKNKIPSMQVGFIDAICLQLYEALTHVSEDCFPLLDGCRKNRQKWQALAEQQ

SEQ ID NO: 390 - DNA, 978 bp, Artificial Sequence
  Description of Artificial Sequence: Synthetic Destabilizing Domain (DD)
gaagaaacaagagagctacagtcgttagcggctgctgtggtgccatctgcccagacccttaaaattactgactttagcttcagtgactttgagctgtctgatctggaaacagcactgtgtacaattcggatgtttactgacctcaaccttgtgcagaacttccagatgaaacatgaggttctttgcagatggattttaagtgttaagaagaattatcggaagaatgttgcctatcataattggagacatgcctttaatacagctcagtgcatgtttgctgctctaaaagcaggcaaaattcagaacaagctgactgacctggagatacttgcattgctgattgctgcactaagccacgatttggatcaccgtggtgtgaataactcttacatacagcgaagtgaacatccacttgcccagctttactgccattcaatcatggaacaccatcattttgaccagtgcctgatgattcttaatagtccaggcaatcagattctcagtggcctctccattgaagaatataagaccacgttgaaaataatcaagcaagctattttagctacagacctagcactgtacattaagaggtggggagaattttttgaacttataagaaaaaatcaattcaatttggaagatcctcatcaaaaggagttgtttttggcaatgctgatgacagcttgtgatctttctgcaattacaaaaccctggcctattcaacaacggatagcagaacttgtagcaactgaattttttgatcaaggagacagagagagaaaagaactcaacatagaacccactgatctaatgaacagggagaagaaaaacaaaatcccaagtatgcaagttgggttcatagatgccatctgcttgcaactgtatgaggccctgacccacgtgtcagaggactgtttccctttgctagatggctgcagaaagaacaggcagaaatggcaggcccttgcagaacagcag

SEQ ID NO: 391 - protein, 326 aa, Artificial Sequence
  Description of Artificial Sequence: Synthetic Destabilizing Domain (DD)
EETRELQSLAAAVVPSAQTLKITDFSFSDFELSDLETALCTIRMFTDLNLVQNFQMKHEVLCRWILSVKKNYRKNVAYHNWRHAFNTAQCMFAALKAGKIQNKLTDLEILALLIAALSHDLDHRGVNNSYIQRSEHPLAQLYCHSIMEHHHFDQCLMILNSPGNQILSGLSIEEYKTTLKIIKQAILATDLALYIKRYGEFFELIRKNQFNLEDPHQKELFLAMLMTACDLSAITKPWPIQQRIAELVATEFFDQGDRERKELNIEPTDLMNREKKNKIPSMQVGFIDAICLQLYEALTHVSEDCFPLLDGCRKNRQKWQALAEQQ

SEQ ID NO: 392 - DNA, 978 bp, Artificial Sequence
  Description of Artificial Sequence: Synthetic Destabilizing Domain (DD)
gaagaaacaagagagctacagtcgttagcggctgctgtggtgccatctgcccagacccttaaaattactgactttagcttcagtgactttgagctgtctgatctggaaacagcactgtgtacaattcggatgtttactgacctcaaccttgtgcagaacttccagatgaaacatgaggttctttgcagatggattttaagtgttaagaagaattatcggaagaatgttgcctatcataattggagacatgcctttaatacagctcagtgcatgtttgctgctctaaaagcaggcaaaattcagaacaagctgactgacctggagatacttgcattgctgattgctgcactaagccacgatttggatcaccgtggtgtgaataactcttacatacagcgaagtgaacatccacttgcccagctttactgccattcaatcatggaacaccatcattttgaccagtgcctgatgattcttaatagtccaggcaatcagattctcagtggcctctccattgaagaatataagaccacgttgaaaataatcaagcaagctattttagctacagacctagcactgtacattaagaggtatggagaattttttgaacttataagaaaaaatcaattcaatttggaagatcctcatcaaaaggagttgtttttggcaatgctgatgacagcttgtgatctttctgcaattacaaaaccctggcctattcaacaacggatagcagaacttgtagcaactgaattttttgatcaaggagacagagagagaaaagaactcaacatagaacccactgatctaatgaacagggagaagaaaaacaaaatcccaagtatgcaagttgggttcatagatgccatctgcttgcaactgtatgaggccctgacccacgtgtcagaggactgtttccctttgctagatggctgcagaaagaacaggcagaaatggcaggcccttgcagaacagcag

SEQ ID NO: 393 - DNA, 978 bp, Artificial Sequence
  Description of Artificial Sequence: Synthetic Destabilizing Domain (DD)
gaagaaacaagagagctacagtcgttagcggctgctgtggtgccatctgcccagacccttaaaattactgactttagcttcagtgactttgagctgtctgatctggaaacagcactgtgtacaattcggatgtttactgacctcaaccttgtgcagaacttccagatgaaacatgaggttctttgcagatggattttaagtgttaagaagaattatcggaagaatgttgcctatcataattggagacatgcctttaatacagctcagtgcatgtttgctgctctaaaagcaggcaaaattcagaacaagctgactgacctggagatacttgcattgctgattgctgcactaagccacgatttggatcaccgtggtgtgaataactcttacatacagcgaagtgaacatccacttgcccagctttactgccattcaatcatggaacaccatcattttgaccagtgcctgatgattcttaatagtccaggcaatcagattctcagtggcctctccattgaagaatataagaccacgttgaaaataatcaagcaagctattttagctacagacctagcactgtacattaagaggtacggagaattttttgaacttataagaaaaaatcaattcaatttggaagatcctcatcaaaaggagttgtttttggcaatgctgatgacagcttgtgatctttctgcaattacaaaaccctggcctattcaacaacggatagcagaacttgtagcaactgaattttttgatcaaggagacagagagagaaaagaactcaacatagaacccactgatctaatgaacagggagaagaaaaacaaaatcccaagtatgcaagttgggttcatagatgccatctgcttgcaactgtatgaggccctgacccacgtgtcagaggactgtttccctttgctagatggctgcagaaagaacaggcagaaatggcaggcccttgcagaacagcag

SEQ ID NO: 394 - protein, 326 aa, Artificial Sequence
  Description of Artificial Sequence: Synthetic Destabilizing Domain (DD)
EETRELQSLAAAVVPSAQTLKITDFSFSDFELSDLETALCTIRMFTDLNLVQNFQMKHEVLCRWILSVKKNYRKNVAYHNWRHAFNTAQCMFAALKAGKIQNKLTDLEILALLIAALSHDLDHRGVNNSYIQRSEHPLAQLYCHSIMEHHHFDQCLMILNSPGNQILSGLSIEEYKTTLKIIKQAILATDLALYIKRHGEFFELIRKNQFNLEDPHQKELFLAMLMTACDLSAITKPWPIQQRIAELVATEFFDQGDRERKELNIEPTDLMNREKKNKIPSMQVGFIDAICLQLYEALTHVSEDCFPLLDGCRKNRQKWQALAEQQ

SEQ ID NO: 395 - DNA, 978 bp, Artificial Sequence
  Description of Artificial Sequence: Synthetic Destabilizing Domain (DD)
gaagaaacaagagagctacagtcgttagcggctgctgtggtgccatctgcccagacccttaaaattactgactttagcttcagtgactttgagctgtctgatctggaaacagcactgtgtacaattcggatgtttactgacctcaaccttgtgcagaacttccagatgaaacatgaggttctttgcagatggattttaagtgttaagaagaattatcggaagaatgttgcctatcataattggagacatgcctttaatacagctcagtgcatgtttgctgctctaaaagcaggcaaaattcagaacaagctgactgacctggagatacttgcattgctgattgctgcactaagccacgatttggatcaccgtggtgtgaataactcttacatacagcgaagtgaacatccacttgcccagctttactgccattcaatcatggaacaccatcattttgaccagtgcctgatgattcttaatagtccaggcaatcagattctcagtggcctctccattgaagaatataagaccacgttgaaaataatcaagcaagctattttagctacagacctagcactgtacattaagaggcatggagaattttttgaacttataagaaaaaatcaattcaatttggaagatcctcatcaaaaggagttgtttttggcaatgctgatgacagcttgtgatctttctgcaattacaaaaccctggcctattcaacaacggatagcagaacttgtagcaactgaattttttgatcaaggagacagagagagaaaagaactcaacatagaacccactgatctaatgaacagggagaagaaaaacaaaatcccaagtatgcaagttgggttcatagatgccatctgcttgcaactgtatgaggccctgacccacgtgtcagaggactgtttccctttgctagatggctgcagaaagaacaggcagaaatggcaggcccttgcagaacagcag

SEQ ID NO: 396 - DNA, 978 bp, Artificial Sequence; identical to SEQ ID NO: 395
  Description of Artificial Sequence: Synthetic Destabilizing Domain (DD)

SEQ ID NO: 397 - protein, 326 aa, Artificial Sequence
  Description of Artificial Sequence: Synthetic Destabilizing Domain (DD)
EETRELQSLAAAVVPSAQTLKITDFSFSDFELSDLETALCTIRMFTDLNLVQNFQMKHEVLCRWILSVKKNYRKNVAYHNWRHAFNTAQCMFAALKAGKIQNKLTDLEILALLIAALSHDLDHRGVNNSYIQRSEHPLAQLYCHSIMEHHHFDQCLMILNSPGNQILSGLSIEEYKTTLKIIKQAILATDLALYIKRSGEFFELIRKNQFNLEDPHQKELFLAMLMTACDLSAITKPWPIQQRIAELVATEFFDQGDRERKELNIEPTDLMNREKKNKIPSMQVGFIDAICLQLYEALTHVSEDCFPLLDGCRKNRQKWQALAEQQ

SEQ ID NO: 398 - DNA, 978 bp, Artificial Sequence
  Description of Artificial Sequence: Synthetic Destabilizing Domain (DD)
gaagaaacaagagagctacagtcgttagcggctgctgtggtgccatctgcccagacccttaaaattactgactttagcttcagtgactttgagctgtctgatctggaaacagcactgtgtacaattcggatgtttactgacctcaaccttgtgcagaacttccagatgaaacatgaggttctttgcagatggattttaagtgttaagaagaattatcggaagaatgttgcctatcataattggagacatgcctttaatacagctcagtgcatgtttgctgctctaaaagcaggcaaaattcagaacaagctgactgacctggagatacttgcattgctgattgctgcactaagccacgatttggatcaccgtggtgtgaataactcttacatacagcgaagtgaacatccacttgcccagctttactgccattcaatcatggaacaccatcattttgaccagtgcctgatgattcttaatagtccaggcaatcagattctcagtggcctctccattgaagaatataagaccacgttgaaaataatcaagcaagctattttagctacagacctagcactgtacattaagaggagcggagaattttttgaacttataagaaaaaatcaattcaatttggaagatcctcatcaaaaggagttgtttttggcaatgctgatgacagcttgtgatctttctgcaattacaaaaccctggcctattcaacaacggatagcagaacttgtagcaactgaattttttgatcaaggagacagagagagaaaagaactcaacatagaacccactgatctaatgaacagggagaagaaaaacaaaatcccaagtatgcaagttgggttcatagatgccatctgcttgcaactgtatgaggccctgacccacgtgtcagaggactgtttccctttgctagatggctgcagaaagaacaggcagaaatggcaggcccttgcagaacagcag

SEQ ID NO: 399 - DNA, 978 bp, Artificial Sequence
  Description of Artificial Sequence: Synthetic Destabilizing Domain (DD)
gaagaaacaagagagctacagtcgttagcggctgctgtggtgccatctgcccagacccttaaaattactgactttagcttcagtgactttgagctgtctgatctggaaacagcactgtgtacaattcggatgtttactgacctcaaccttgtgcagaacttccagatgaaacatgaggttctttgcagatggattttaagtgttaagaagaattatcggaagaatgttgcctatcataattggagacatgcctttaatacagctcagtgcatgtttgctgctctaaaagcaggcaaaattcagaacaagctgactgacctggagatacttgcattgctgattgctgcactaagccacgatttggatcaccgtggtgtgaataactcttacatacagcgaagtgaacatccacttgcccagctttactgccattcaatcatggaacaccatcattttgaccagtgcctgatgattcttaatagtccaggcaatcagattctcagtggcctctccattgaagaatataagaccacgttgaaaataatcaagcaagctattttagctacagacctagcactgtacattaagaggtcaggagaattttttgaacttataagaaaaaatcaattcaatttggaagatcctcatcaaaaggagttgtttttggcaatgctgatgacagcttgtgatctttctgcaattacaaaaccctggcctattcaacaacggatagcagaacttgtagcaactgaattttttgatcaaggagacagagagagaaaagaactcaacatagaacccactgatctaatgaacagggagaagaaaaacaaaatcccaagtatgcaagttgggttcatagatgccatctgcttgcaactgtatgaggccctgacccacgtgtcagaggactgtttccctttgctagatggctgcagaaagaacaggcagaaatggcaggcccttgcagaacagcag

SEQ ID NO: 400 - protein, 326 aa, Artificial Sequence
  Description of Artificial Sequence: Synthetic Destabilizing Domain (DD)
EETRELQSLAAAVVPSAQTLKITDFSFSDFELSDLETALCTIRMFTDLNLVQNFQMKHEVLCRWILSVKKNYRKNVAYHNWRHAFNTAQCMFAALKAGKIQNKLTDLEILALLIAALSHDLDHRGVNNSYIQRSEHPLAQLYCHSIMEHHHFDQCLMILNSPGNQILSGLSIEEYKTTLKIIKQAILATDLALYIKRTGEFFELIRKNQFNLEDPHQKELFLAMLMTACDLSAITKPWPIQQRIAELVATEFFDQGDRERKELNIEPTDLMNREKKNKIPSMQVGFIDAICLQLYEALTHVSEDCFPLLDGCRKNRQKWQALAEQQ

SEQ ID NO: 401 - DNA, 978 bp, Artificial Sequence
  Description of Artificial Sequence: Synthetic Destabilizing Domain (DD)
gaagaaacaagagagctacagtcgttagcggctgctgtggtgccatctgcccagacccttaaaattactgactttagcttcagtgactttgagctgtctgatctggaaacagcactgtgtacaattcggatgtttactgacctcaaccttgtgcagaacttccagatgaaacatgaggttctttgcagatggattttaagtgttaagaagaattatcggaagaatgttgcctatcataattggagacatgcctttaatacagctcagtgcatgtttgctgctctaaaagcaggcaaaattcagaacaagctgactgacctggagatacttgcattgctgattgctgcactaagccacgatttggatcaccgtggtgtgaataactcttacatacagcgaagtgaacatccacttgcccagctttactgccattcaatcatggaacaccatcattttgaccagtgcctgatgattcttaatagtccaggcaatcagattctcagtggcctctccattgaagaatataagaccacgttgaaaataatcaagcaagctattttagctacagacctagcactgtacattaagaggaccggagaattttttgaacttataagaaaaaatcaattcaatttggaagatcctcatcaaaaggagttgtttttggcaatgctgatgacagcttgtgatctttctgcaattacaaaaccctggcctattcaacaacggatagcagaacttgtagcaactgaattttttgatcaaggagacagagagagaaaagaactcaacatagaacccactgatctaatgaacagggagaagaaaaacaaaatcccaagtatgcaagttgggttcatagatgccatctgcttgcaactgtatgaggccctgacccacgtgtcagaggactgtttccctttgctagatggctgcagaaagaacaggcagaaatggcaggcccttgcagaacagcag

SEQ ID NO: 402 - DNA, 978 bp, Artificial Sequence
  Description of Artificial Sequence: Synthetic Destabilizing Domain (DD)
gaagaaacaagagagctacagtcgttagcggctgctgtggtgccatctgcccagacccttaaaattactgactttagcttcagtgactttgagctgtctgatctggaaacagcactgtgtacaattcggatgtttactgacctcaaccttgtgcagaacttccagatgaaacatgaggttctttgcagatggattttaagtgttaagaagaattatcggaagaatgttgcctatcataattggagacatgcctttaatacagctcagtgcatgtttgctgctctaaaagcaggcaaaattcagaacaagctgactgacctggagatacttgcattgctgattgctgcactaagccacgatttggatcaccgtggtgtgaataactcttacatacagcgaagtgaacatccacttgcccagctttactgccattcaatcatggaacaccatcattttgaccagtgcctgatgattcttaatagtccaggcaatcagattctcagtggcctctccattgaagaatataagaccacgttgaaaataatcaagcaagctattttagctacagacctagcactgtacattaagaggacgggagaattttttgaacttataagaaaaaatcaattcaatttggaagatcctcatcaaaaggagttgtttttggcaatgctgatgacagcttgtgatctttctgcaattacaaaaccctggcctattcaacaacggatagcagaacttgtagcaactgaattttttgatcaaggagacagagagagaaaagaactcaacatagaacccactgatctaatgaacagggagaagaaaaacaaaatcccaagtatgcaagttgggttcatagatgccatctgcttgcaactgtatgaggccctgacccacgtgtcagaggactgtttccctttgctagatggctgcagaaagaacaggcagaaatggcaggcccttgcagaacagcag

SEQ ID NO: 403 - protein, 326 aa, Artificial Sequence
  Description of Artificial Sequence: Synthetic Destabilizing Domain (DD)
EETRELQSLAAAVVPSAQTLKITDFSFSDFELSDLETALCTIRMFTDLNLVQNFQMKHEVLCRWILSVKKNYRKNVAYHNWRHAFNTAQCMFAALKAGKIQNKLTDLEILALLIAALSHDLDHRGVNNSYIQRSEHPLAQLYCHSIMEHHHFDQCLMILNSPGNQILSGLSIEEYKTTLKIIKQAILATDLALYIKRDGEFFELIRKNQFNLEDPHQKELFLAMLMTACDLSAITKPWPIQQRIAELVATEFFDQGDRERKELNIEPTDLMNREKKNKIPSMQVGFIDAICLQLYEALTHVSEDCFPLLDGCRKNRQKWQALAEQQ

SEQ ID NO: 404 - DNA, 978 bp, Artificial Sequence
  Description of Artificial Sequence: Synthetic Destabilizing Domain (DD)
gaagaaacaagagagctacagtcgttagcggctgctgtggtgccatctgcccagacccttaaaattactgactttagcttcagtgactttgagctgtctgatctggaaacagcactgtgtacaattcggatgtttactgacctcaaccttgtgcagaacttccagatgaaacatgaggttctttgcagatggattttaagtgttaagaagaattatcggaagaatgttgcctatcataattggagacatgcctttaatacagctcagtgcatgtttgctgctctaaaagcaggcaaaattcagaacaagctgactgacctggagatacttgcattgctgattgctgcactaagccacgatttggatcaccgtggtgtgaataactcttacatacagcgaagtgaacatccacttgcccagctttactgccattcaatcatggaacaccatcattttgaccagtgcctgatgattcttaatagtccaggcaatcagattctcagtggcctctccattgaagaatataagaccacgttgaaaataatcaagcaagctattttagctacagacctagcactgtacattaagagggatggagaattttttgaacttataagaaaaaatcaattcaatttggaagatcctcatcaaaaggagttgtttttggcaatgctgatgacagcttgtgatctttctgcaattacaaaaccctggcctattcaacaacggatagcagaacttgtagcaactgaattttttgatcaaggagacagagagagaaaagaactcaacatagaacccactgatctaatgaacagggagaagaaaaacaaaatcccaagtatgcaagttgggttcatagatgccatctgcttgcaactgtatgaggccctgacccacgtgtcagaggactgtttccctttgctagatggctgcagaaagaacaggcagaaatggcaggcccttgcagaacagcag

SEQ ID NO: 405 - DNA, 978 bp, Artificial Sequence
  Description of Artificial Sequence: Synthetic Destabilizing Domain (DD)
gaagaaacaagagagctacagtcgttagcggctgctgtggtgccatctgcccagacccttaaaattactgactttagcttcagtgactttgagctgtctgatctggaaacagcactgtgtacaattcggatgtttactgacctcaaccttgtgcagaacttccagatgaaacatgaggttctttgcagatggattttaagtgttaagaagaattatcggaagaatgttgcctatcataattggagacatgcctttaatacagctcagtgcatgtttgctgctctaaaagcaggcaaaattcagaacaagctgactgacctggagatacttgcattgctgattgctgcactaagccacgatttggatcaccgtggtgtgaataactcttacatacagcgaagtgaacatccacttgcccagctttactgccattcaatcatggaacaccatcattttgaccagtgcctgatgattcttaatagtccaggcaatcagattctcagtggcctctccattgaagaatataagaccacgttgaaaataatcaagcaagctattttagctacagacctagcactgtacattaagagggacggagaattttttgaacttataagaaaaaatcaattcaatttggaagatcctcatcaaaaggagttgtttttggcaatgctgatgacagcttgtgatctttctgcaattacaaaaccctggcctattcaacaacggatagcagaacttgtagcaactgaattttttgatcaaggagacagagagagaaaagaactcaacatagaacccactgatctaatgaacagggagaagaaaaacaaaatcccaagtatgcaagttgggttcatagatgccatctgcttgcaactgtatgaggccctgacccacgtgtcagaggactgtttccctttgctagatggctgcagaaagaacaggcagaaatggcaggcccttgcagaacagcag

SEQ ID NO: 406 - protein, 326 aa, Artificial Sequence
  Description of Artificial Sequence: Synthetic Destabilizing Domain (DD)
EETRELQSLAAAVVPSAQTLKITDFSFSDFELSDLETALCTIRMFTDLNLVQNFQMKHEVLCRWILSVKKNYRKNVAYHNWRHAFNTAQCMFAALKAGKIQNKLTDLEILALLIAALSHDLDHRGVNNSYIQRSEHPLAQLYCHSIMEHHHFDQCLMILNSPGNQILSGLSIEEYKTTLKIIKQAILATDLALYIKREGEFFELIRKNQFNLEDPHQKELFLAMLMTACDLSAITKPWPIQQRIAELVATEFFDQGDRERKELNIEPTDLMNREKKNKIPSMQVGFIDAICLQLYEALTHVSEDCFPLLDGCRKNRQKWQALAEQQ

SEQ ID NO: 407 - DNA, 978 bp, Artificial Sequence
  Description of Artificial Sequence: Synthetic Destabilizing Domain (DD)
gaagaaacaagagagctacagtcgttagcggctgctgtggtgccatctgcccagacccttaaaattactgactttagcttcagtgactttgagctgtctgatctggaaacagcactgtgtacaattcggatgtttactgacctcaaccttgtgcagaacttccagatgaaacatgaggttctttgcagatggattttaagtgttaagaagaattatcggaagaatgttgcctatcataattggagacatgcctttaatacagctcagtgcatgtttgctgctctaaaagcaggcaaaattcagaacaagctgactgacctggagatacttgcattgctgattgctgcactaagccacgatttggatcaccgtggtgtgaataactcttacatacagcgaagtgaacatccacttgcccagctttactgccattcaatcatggaacaccatcattttgaccagtgcctgatgattcttaatagtccaggcaatcagattctcagtggcctctccattgaagaatataagaccacgttgaaaataatcaagcaagctattttagctacagacctagcactgtacattaagagggaaggagaattttttgaacttataagaaaaaatcaattcaatttggaagatcctcatcaaaaggagttgtttttggcaatgctgatgacagcttgtgatctttctgcaattacaaaaccctggcctattcaacaacggatagcagaacttgtagcaactgaattttttgatcaaggagacagagagagaaaagaactcaacatagaacccactgatctaatgaacagggagaagaaaaacaaaatcccaagtatgcaagttgggttcatagatgccatctgcttgcaactgtatgaggccctgacccacgtgtcagaggactgtttccctttgctagatggctgcagaaagaacaggcagaaatggcaggcccttgcagaacagcag

SEQ ID NO: 408 - DNA, 978 bp, Artificial Sequence
  Description of Artificial Sequence: Synthetic Destabilizing Domain (DD)
gaagaaacaagagagctacagtcgttagcggctgctgtggtgccatctgcccagacccttaaaattactgactttagcttcagtgactttgagctgtctgatctggaaacagcactgtgtacaattcggatgtttactgacctcaaccttgtgcagaacttccagatgaaacatgaggttctttgcagatggattttaagtgttaagaagaattatcggaagaatgttgcctatcataattggagacatgcctttaatacagctcagtgcatgtttgctgctctaaaagcaggcaaaattcagaacaagctgactgacctggagatacttgcattgctgattgctgcactaagccacgatttggatcaccgtggtgtgaataactcttacatacagcgaagtgaacatccacttgcccagctttactgccattcaatcatggaacaccatcattttgaccagtgcctgatgattcttaatagtccaggcaatcagattctcagtggcctctccattgaagaatataagaccacgttgaaaataatcaagcaagctattttagctacagacctagcactgtacattaagagggagggagaattttttgaacttataagaaaaaatcaattcaatttggaagatcctcatcaaaaggagttgtttttggcaatgctgatgacagcttgtgatctttctgcaattacaaaaccctggcctattcaacaacggatagcagaacttgtagcaactgaattttttgatcaaggagacagagagagaaaagaactcaacatagaacccactgatctaatgaacagggagaagaaaaacaaaatcccaagtatgcaagttgggttcatagatgccatctgcttgcaactgtatgaggccctgacccacgtgtcagaggactgtttccctttgctagatggctgcagaaagaacaggcagaaatggcaggcccttgcagaacagcag

SEQ ID NO: 409 - protein, 326 aa, Artificial Sequence
  Description of Artificial Sequence: Synthetic Destabilizing Domain (DD)
EETRELQSLAAAVVPSAQTLKITDFSFSDFELSDLETALCTIRMFTDLNLVQNFQMKHEVLCRWILSVKKNYRKNVAYHNWRHAFNTAQCMFAALKAGKIQNKLTDLEILALLIAALSHDLDHRGVNNSYIQRSEHPLAQLYCHSIMEHHHFDQCLMILNSPGNQILSGLSIEEYKTTLKIIKQAILATDLALYIKRQGEFFELIRKNQFNLEDPHQKELFLAMLMTACDLSAITKPWPIQQRIAELVATEFFDQGDRERKELNIEPTDLMNREKKNKIPSMQVGFIDAICLQLYEALTHVSEDCFPLLDGCRKNRQKWQALAEQQ

SEQ ID NO: 410 - DNA, 978 bp, Artificial Sequence
  Description of Artificial Sequence: Synthetic Destabilizing Domain (DD)
gaagaaacaagagagctacagtcgttagcggctgctgtggtgccatctgcccagacccttaaaattactgactttagcttcagtgactttgagctgtctgatctggaaacagcactgtgtacaattcggatgtttactgacctcaaccttgtgcagaacttccagatgaaacatgaggttctttgcagatggattttaagtgttaagaagaattatcggaagaatgttgcctatcataattggagacatgcctttaatacagctcagtgcatgtttgctgctctaaaagcaggcaaaattcagaacaagctgactgacctggagatacttgcattgctgattgctgcactaagccacgatttggatcaccgtggtgtgaataactcttacatacagcgaagtgaacatccacttgcccagctttactgccattcaatcatggaacaccatcattttgaccagtgcctgatgattcttaatagtccaggcaatcagattctcagtggcctctccattgaagaatataagaccacgttgaaaataatcaagcaagctattttagctacagacctagcactgtacattaagaggcagggagaattttttgaacttataagaaaaaatcaattcaatttggaagatcctcatcaaaaggagttgtttttggcaatgctgatgacagcttgtgatctttctgcaattacaaaaccctggcctattcaacaacggatagcagaacttgtagcaactgaattttttgatcaaggagacagagagagaaaagaactcaacatagaacccactgatctaatgaacagggagaagaaaaacaaaatcccaagtatgcaagttgggttcatagatgccatctgcttgcaactgtatgaggccctgacccacgtgtcagaggactgtttccctttgctagatggctgcagaaagaacaggcagaaatggcaggcccttgcagaacagcag

SEQ ID NO: 411 - DNA, 978 bp, Artificial Sequence
  Description of Artificial Sequence: Synthetic Destabilizing Domain (DD)
gaagaaacaagagagctacagtcgttagcggctgctgtggtgccatctgcccagacccttaaaattactgactttagcttcagtgactttgagctgtctgatctggaaacagcactgtgtacaattcggatgtttactgacctcaaccttgtgcagaacttccagatgaaacatgaggttctttgcagatggattttaagtgttaagaagaattatcggaagaatgttgcctatcataattggagacatgcctttaatacagctcagtgcatgtttgctgctctaaaagcaggcaaaattcagaacaagctgactgacctggagatacttgcattgctgattgctgcactaagccacgatttggatcaccgtggtgtgaataactcttacatacagcgaagtgaacatccacttgcccagctttactgccattcaatcatggaacaccatcattttgaccagtgcctgatgattcttaatagtccaggcaatcagattctcagtggcctctccattgaagaatataagaccacgttgaaaataatcaagcaagctattttagctacagacctagcactgtacattaagaggcaaggagaattttttgaacttataagaaaaaatcaattcaatttggaagatcctcatcaaaaggagttgtttttggcaatgctgatgacagcttgtgatctttctgcaattacaaaaccctggcctattcaacaacggatagcagaacttgtagcaactgaattttttgatcaaggagacagagagagaaaagaactcaacatagaacccactgatctaatgaacagggagaagaaaaacaaaatcccaagtatgcaagttgggttcatagatgccatctgcttgcaactgtatgaggccctgacccacgtgtcagaggactgtttccctttgctagatggctgcagaaagaacaggcagaaatggcaggcccttgcagaacagcag

SEQ ID NO: 412 - protein, 326 aa, Artificial Sequence
  Description of Artificial Sequence: Synthetic Destabilizing Domain (DD)
EETRELQSLAAAVVPSAQTLKITDFSFSDFELSDLETALCTIRMFTDLNLVQNFQMKHEVLCRWILSVKKNYRKNVAYHNWRHAFNTAQCMFAALKAGKIQNKLTDLEILALLIAALSHDLDHRGVNNSYIQRSEHPLAQLYCHSIMEHHHFDQCLMILNSPGNQILSGLSIEEYKTTLKIIKQAILATDLALYIKRNGEFFELIRKNQFNLEDPHQKELFLAMLMTACDLSAITKPWPIQQRIAELVATEFFDQGDRERKELNIEPTDLMNREKKNKIPSMQVGFIDAICLQLYEALTHVSEDCFPLLDGCRKNRQKWQALAEQQ

SEQ ID NO: 413 - DNA, 978 bp, Artificial Sequence
  Description of Artificial Sequence: Synthetic Destabilizing Domain (DD)
gaagaaacaagagagctacagtcgttagcggctgctgtggtgccatctgcccagacccttaaaattactgactttagcttcagtgactttgagctgtctgatctggaaacagcactgtgtacaattcggatgtttactgacctcaaccttgtgcagaacttccagatgaaacatgaggttctttgcagatggattttaagtgttaagaagaattatcggaagaatgttgcctatcataattggagacatgcctttaatacagctcagtgcatgtttgctgctctaaaagcaggcaaaattcagaacaagctgactgacctggagatacttgcattgctgattgctgcactaagccacgatttggatcaccgtggtgtgaataactcttacatacagcgaagtgaacatccacttgcccagctttactgccattcaatcatggaacaccatcattttgaccagtgcctgatgattcttaatagtccaggcaatcagattctcagtggcctctccattgaagaatataagaccacgttgaaaataatcaagcaagctattttagctacagacctagcactgtacattaagaggaacggagaattttttgaacttataagaaaaaatcaattcaatttggaagatcctcatcaaaaggagttgtttttggcaatgctgatgacagcttgtgatctttctgcaattacaaaaccctggcctattcaacaacggatagcagaacttgtagcaactgaattttttgatcaaggagacagagagagaaaagaactcaacatagaacccactgatctaatgaacagggagaagaaaaacaaaatcccaagtatgcaagttgggttcatagatgccatctgcttgcaactgtatgaggccctgacccacgtgtcagaggactgtttccctttgctagatggctgcagaaagaacaggcagaaatggcaggcccttgcagaacagcag

SEQ ID NO: 414 - DNA, 978 bp, Artificial Sequence
  Description of Artificial Sequence: Synthetic Destabilizing Domain (DD)
gaagaaacaagagagctacagtcgttagcggctgctgtggtgccatctgcccagacccttaaaattactgactttagcttcagtgactttgagctgtctgatctggaaacagcactgtgtacaattcggatgtttactgacctcaaccttgtgcagaacttccagatgaaacatgaggttctttgcagatggattttaagtgttaagaagaattatcggaagaatgttgcctatcataattggagacatgcctttaatacagctcagtgcatgtttgctgctctaaaagcaggcaaaattcagaacaagctgactgacctggagatacttgcattgctgattgctgcactaagccacgatttggatcaccgtggtgtgaataactcttacatacagcgaagtgaacatccacttgcccagctttactgccattcaatcatggaacaccatcattttgaccagtgcctgatgattcttaatagtccaggcaatcagattctcagtggcctctccattgaagaatataagaccacgttgaaaataatcaagcaagctattttagctacagacctagcactgtacattaagaggaatggagaattttttgaacttataagaaaaaatcaattcaatttggaagatcctcatcaaaaggagttgtttttggcaatgctgatgacagcttgtgatctttctgcaattacaaaaccctggcctattcaacaacggatagcagaacttgtagcaactgaattttttgatcaaggagacagagagagaaaagaactcaacatagaacccactgatctaatgaacagggagaagaaaaacaaaatcccaagtatgcaagttgggttcatagatgccatctgcttgcaactgtatgaggccctgacccacgtgtcagaggactgtttccctttgctagatggctgcagaaagaacaggcagaaatggcaggcccttgcagaacagcag

SEQ ID NO: 415 - protein, 326 aa, Artificial Sequence
  Description of Artificial Sequence: Synthetic Destabilizing Domain (DD)
EETRELQSLAAAVVPSAQTLKITDFSFSDFELSDLETALCTIRMFTDLNLVQNFQMKHEVLCRWILSVKKNYRKNVAYHNWRHAFNTAQCMFAALKAGKIQNKLTDLEILALLIAALSHDLDHRGVNNSYIQRSEHPLAQLYCHSIMEHHHFDQCLMILNSPGNQILSGLSIEEYKTTLKIIKQAILATDLALYIKRMGEFFELIRKNQFNLEDPHQKELFLAMLMTACDLSAITKPWPIQQRIAELVATEFFDQGDRERKELNIEPTDLMNREKKNKIPSMQVGFIDAICLQLYEALTHVSEDCFPLLDGCRKNRQKWQALAEQQ

SEQ ID NO: 416 - DNA, 978 bp, Artificial Sequence
  Description of Artificial Sequence: Synthetic Destabilizing Domain (DD)
gaagaaacaagagagctacagtcgttagcggctgctgtggtgccatctgcccagacccttaaaattactgactttagcttcagtgactttgagctgtctgatctggaaacagcactgtgtacaattcggatgtttactgacctcaaccttgtgcagaacttccagatgaaacatgaggttctttgcagatggattttaagtgttaagaagaattatcggaagaatgttgcctatcataattggagacatgcctttaatacagctcagtgcatgtttgctgctctaaaagcaggcaaaattcagaacaagctgactgacctggagatacttgcattgctgattgctgcactaagccacgatttggatcaccgtggtgtgaataactcttacatacagcgaagtgaacatccacttgcccagctttactgccattcaatcatggaacaccatcattttgaccagtgcctgatgattcttaatagtccaggcaatcagattctcagtggcctctccattgaagaatataagaccacgttgaaaataatcaagcaagctattttagctacagacctagcactgtacattaagaggatgggagaattttttgaacttataagaaaaaatcaattcaatttggaagatcctcatcaaaaggagttgtttttggcaatgctgatgacagcttgtgatctttctgcaattacaaaaccctggcctattcaacaacggatagcagaacttgtagcaactgaattttttgatcaaggagacagagagagaaaagaactcaacatagaacccactgatctaatgaacagggagaagaaaaacaaaatcccaagtatgcaagttgggttcatagatgccatctgcttgcaactgtatgaggccctgacccacgtgtcagaggactgtttccctttgctagatggctgcagaaagaacaggcagaaatggcaggcccttgcagaacagcag

SEQ ID NO: 417 - protein, 326 aa, Artificial Sequence
  Description of Artificial Sequence: Synthetic Destabilizing Domain (DD)
EETRELQSLAAAVVPSAQTLKITDFSFSDFELSDLETALCTIRMFTDLNLVQNFQMKHEVLCRWILSVKKNYRKNVAYHNWRHAFNTAQCMFAALKAGKIQNKLTDLEILALLIAALSHDLDHRGVNNSYIQRSEHPLAQLYCHSIMEHHHFDQCLMILNSPGNQILSGLSIEEYKTTLKIIKQAILATDLALYIKRCGEFFELIRKNQFNLEDPHQKELFLAMLMTACDLSAITKPWPIQQRIAELVATEFFDQGDRERKELNIEPTDLMNREKKNKIPSMQVGFIDAICLQLYEALTHVSEDCFPLLDGCRKNRQKWQALAEQQ

SEQ ID NO: 418 - DNA, 978 bp, Artificial Sequence
  Description of Artificial Sequence: Synthetic Destabilizing Domain (DD)
gaagaaacaagagagctacagtcgttagcggctgctgtggtgccatctgcccagacccttaaaattactgactttagcttcagtgactttgagctgtctgatctggaaacagcactgtgtacaattcggatgtttactgacctcaaccttgtgcagaacttccagatgaaacatgaggttctttgcagatggattttaagtgttaagaagaattatcggaagaatgttgcctatcataattggagacatgcctttaatacagctcagtgcatgtttgctgctctaaaagcaggcaaaattcagaacaagctgactgacctggagatacttgcattgctgattgctgcactaagccacgatttggatcaccgtggtgtgaataactcttacatacagcgaagtgaacatccacttgcccagctttactgccattcaatcatggaacaccatcattttgaccagtgcctgatgattcttaatagtccaggcaatcagattctcagtggcctctccattgaagaatataagaccacgttgaaaataatcaagcaagctattttagctacagacctagcactgtacattaagaggtgcggagaattttttgaacttataagaaaaaatcaattcaatttggaagatcctcatcaaaaggagttgtttttggcaatgctgatgacagcttgtgatctttctgcaattacaaaaccctggcctattcaacaacggatagcagaacttgtagcaactgaattttttgatcaaggagacagagagagaaaagaactcaacatagaacccactgatctaatgaacagggagaagaaaaacaaaatcccaagtatgcaagttgggttcatagatgccatctgcttgcaactgtatgaggccctgacccacgtgtcagaggactgtttccctttgctagatggctgcagaaagaacaggcagaaatggcaggcccttgcagaacagcag

SEQ ID NO: 419 - DNA, 978 bp, Artificial Sequence
  Description of Artificial Sequence: Synthetic Destabilizing Domain (DD)
gaagaaacaagagagctacagtcgttagcggctgctgtggtgccatctgcccagacccttaaaattactgactttagcttcagtgactttgagctgtctgatctggaaacagcactgtgtacaattcggatgtttactgacctcaaccttgtgcagaacttccagatgaaacatgaggttctttgcagatggattttaagtgttaagaagaattatcggaagaatgttgcctatcataattggagacatgcctttaatacagctcagtgcatgtttgctgctctaaaagcaggcaaaattcagaacaagctgactgacctggagatacttgcattgctgattgctgcactaagccacgatttggatcaccgtggtgtgaataactcttacatacagcgaagtgaacatccacttgcccagctttactgccattcaatcatggaacaccatcattttgaccagtgcctgatgattcttaatagtccaggcaatcagattctcagtggcctctccattgaagaatataagaccacgttgaaaataatcaagcaagctattttagctacagacctagcactgtacattaagaggtgtggagaattttttgaacttataagaaaaaatcaattcaatttggaagatcctcatcaaaaggagttgtttttggcaatgctgatgacagcttgtgatctttctgcaattacaaaaccctggcctattcaacaacggatagcagaacttgtagcaactgaattttttgatcaaggagacagagagagaaaagaactcaacatagaacccactgatctaatgaacagggagaagaaaaacaaaatcccaagtatgcaagttgggttcatagatgccatctgcttgcaactgtatgaggccctgacccacgtgtcagaggactgtttccctttgctagatggctgcagaaagaacaggcagaaatggcaggcccttgcagaacagcag

SEQ ID NO: 420 - protein, 326 aa, Artificial Sequence
  Description of Artificial Sequence: Synthetic Destabilizing Domain (DD)
EETRELQSLAAAVVPSAQTLKITDFSFSDFELSDLETALCTIRMFTDLNLVQNFQMKHEVLCRWILSVKKNYRKNVAYHNWRHAFNTAQCMFAALKAGKIQNKLTDLEILALLIAALSHDLDHRGVNNSYIQRSEHPLAQLYCHSIMEHHHFDQCLMILNSPGNQILSGLSIEEYKTTLKIIKQAILATDLALYIKRKGEFFELIRKNQFNLEDPHQKELFLAMLMTACDLSAITKPWPIQQRIAELVATEFFDQGDRERKELNIEPTDLMNREKKNKIPSMQVGFIDAICLQLYEALTHVSEDCFPLLDGCRKNRQKWQALAEQQ

SEQ ID NO: 421 - DNA, 978 bp, Artificial Sequence
  Description of Artificial Sequence: Synthetic Destabilizing Domain (DD)
gaagaaacaagagagctacagtcgttagcggctgctgtggtgccatctgcccagacccttaaaattactgactttagcttcagtgactttgagctgtctgatctggaaacagcactgtgtacaattcggatgtttactgacctcaaccttgtgcagaacttccagatgaaacatgaggttctttgcagatggattttaagtgttaagaagaattatcggaagaatgttgcctatcataattggagacatgcctttaatacagctcagtgcatgtttgctgctctaaaagcaggcaaaattcagaacaagctgactgacctggagatacttgcattgctgattgctgcactaagccacgatttggatcaccgtggtgtgaataactcttacatacagcgaagtgaacatccacttgcccagctttactgccattcaatcatggaacaccatcattttgaccagtgcctgatgattcttaatagtccaggcaatcagattctcagtggcctctccattgaagaatataagaccacgttgaaaataatcaagcaagctattttagctacagacctagcactgtacattaagaggaaaggagaattttttgaacttataagaaaaaatcaattcaatttggaagatcctcatcaaaaggagttgtttttggcaatgctgatgacagcttgtgatctttctgcaattacaaaaccctggcctattcaacaacggatagcagaacttgtagcaactgaattttttgatcaaggagacagagagagaaaagaactcaacatagaacccactgatctaatgaacagggagaagaaaaacaaaatcccaagtatgcaagttgggttcatagatgccatctgcttgcaactgtatgaggccctgacccacgtgtcagaggactgtttccctttgctagatggctgcagaaagaacaggcagaaatggcaggcccttgcagaacagcag

SEQ ID NO: 422 - protein, 326 aa, Artificial Sequence
  Description of Artificial Sequence: Synthetic Destabilizing Domain (DD)
EETRELQSLAAAVVPSAQTLKITDFSFSDFELSDLETALCTIRMFTDLNLVQNFQMKHEVLCRWILSVKKNYRKNVAYHNWRHAFNTAQCMFAALKAGKIQNKLTDLEILALLIAALSADLDHRGVNNSYIQRSEHPLAQLYCHSIMEHHHFDQCLMILNSPGNQILSGLSIEEYKTTLKIIKQAILATDLALYIKRRGEFFELIRKNQFNLEDPHQKELFLAMLMTACDLSAITKPWPIQQRIAELVATEFFDQGDRERKELNIEPTDLMNREKKNKIPSMQVGFIDAICLQLYEALTHVSEDCFPLLDGCRKNRQKWQALAEQQ

SEQ ID NO: 423 - DNA, 978 bp, Artificial Sequence
  Description of Artificial Sequence: Synthetic Destabilizing Domain (DD)
gaagaaacaagagagctacagtcgttagcggctgctgtggtgccatctgcccagacccttaaaattactgactttagcttcagtgactttgagctgtctgatctggaaacagcactgtgtacaattcggatgtttactgacctcaaccttgtgcagaacttccagatgaaacatgaggttctttgcagatggattttaagtgttaagaagaattatcggaagaatgttgcctatcataattggagacatgcctttaatacagctcagtgcatgtttgctgctctaaaagcaggcaaaattcagaacaagctgactgacctggagatacttgcattgctgattgctgcactaagcgccgatttggatcaccgtggtgtgaataactcttacatacagcgaagtgaacatccacttgcccagctttactgccattcaatcatggaacaccatcattttgaccagtgcctgatgattcttaatagtccaggcaatcagattctcagtggcctctccattgaagaatataagaccacgttgaaaataatcaagcaagctattttagctacagacctagcactgtacattaagaggcgaggagaattttttgaacttataagaaaaaatcaattcaatttggaagatcctcatcaaaaggagttgtttttggcaatgctgatgacagcttgtgatctttctgcaattacaaaaccctggcctattcaacaacggatagcagaacttgtagcaactgaattttttgatcaaggagacagagagagaaaagaactcaacatagaacccactgatctaatgaacagggagaagaaaaacaaaatcccaagtatgcaagttgggttcatagatgccatctgcttgcaactgtatgaggccctgacccacgtgtcagaggactgtttccctttgctagatggctgcagaaagaacaggcagaaatggcaggcccttgcagaacagcag

SEQ ID NO: 424 - protein, 326 aa, Artificial Sequence
  Description of Artificial Sequence: Synthetic Destabilizing Domain (DD)
EETRELQSLAAAVVPSAQTLKITDFSFSDFELSDLETALCTIRMFTDLNLVQNFQMKHEVLCRWILSVKKNYRKNVAYHNWRHAFNTAQCMFAALKAGKIQNKLTDLEILALLIAALSHDLDHRGVNNSYIQRSEHPLAQLYCHSIMEHHHFDQCLMILNSPGNQILSGLSIEEYKTTLKIIKQAILATDLALYIKRRGEFFELIRKNQFNLEDPHQKELFLAMLMTACALSAITKPWPIQQRIAELVATEFFDQGDRERKELNIEPTDLMNREKKNKIPSMQVGFIDAICLQLYEALTHVSEDCFPLLDGCRKNRQKWQALAEQQ

SEQ ID NO: 425 - DNA, 978 bp, Artificial Sequence
  Description of Artificial Sequence: Synthetic Destabilizing Domain (DD)
gaagaaacaagagagctacagtcgttagcggctgctgtggtgccatctgcccagacccttaaaattactgactttagcttcagtgactttgagctgtctgatctggaaacagcactgtgtacaattcggatgtttactgacctcaaccttgtgcagaacttccagatgaaacatgaggttctttgcagatggattttaagtgttaagaagaattatcggaagaatgttgcctatcataattggagacatgcctttaatacagctcagtgcatgtttgctgctctaaaagcaggcaaaattcagaacaagctgactgacctggagatacttgcattgctgattgctgcactaagccacgatttggatcaccgtggtgtgaataactcttacatacagcgaagtgaacatccacttgcccagctttactgccattcaatcatggaacaccatcattttgaccagtgcctgatgattcttaatagtccaggcaatcagattctcagtggcctctccattgaagaatataagaccacgttgaaaataatcaagcaagctattttagctacagacctagcactgtacattaagaggcgaggagaattttttgaacttataagaaaaaatcaattcaatttggaagatcctcatcaaaaggagttgtttttggcaatgctgatgacagcttgtgccctttctgcaattacaaaaccctggcctattcaacaacggatagcagaacttgtagcaactgaattttttgatcaaggagacagagagagaaaagaactcaacatagaacccactgatctaatgaacagggagaagaaaaacaaaatcccaagtatgcaagttgggttcatagatgccatctgcttgcaactgtatgaggccctgacccacgtgtcagaggactgtttccctttgctagatggctgcagaaagaacaggcagaaatggcaggcccttgcagaacagcag

SEQ ID NO: 426 - protein, 326 aa, Artificial Sequence
  Description of Artificial Sequence: Synthetic Destabilizing Domain (DD)
EETRELQSLAAAVVPSAQTLKITDFSFSDFELSDLETALCTIRMFTDLNLVQNFQMKHEVLCRWILSVKKNYRKNVAYHNWRHAFNTAQCMFAALKAGKIQNKLTDLEILALLIAALSHDLDHHGVNNSYIQRSEHPLAQLYCHSIMEHHHFDQCLMILNSPGNQILSGLSIEEYKTTLKIIKQAILATDLALYIKRRGEFFELIRKNQFNLEDPHQKELFLAMLMTACDLSAITKPWPIQQRIAELVATEFFDQGDRERKELNIEPTDLMNREKKNKIPSMQVGFIDAICLQLYEALTHVSEDCFPLLDGCRKNRQKWQALAEQQ

SEQ ID NO: 427 - DNA, 978 bp, Artificial Sequence
  Description of Artificial Sequence: Synthetic Destabilizing Domain (DD)
gaagaaacaagagagctacagtcgttagcggctgctgtggtgccatctgcccagacccttaaaattactgactttagcttcagtgactttgagctgtctgatctggaaacagcactgtgtacaattcggatgtttactgacctcaaccttgtgcagaacttccagatgaaacatgaggttctttgcagatggattttaagtgttaagaagaattatcggaagaatgttgcctatcataattggagacatgcctttaatacagctcagtgcatgtttgctgctctaaaagcaggcaaaattcagaacaagctgactgacctggagatacttgcattgctgattgctgcactaagccacgatttggatcaccatggtgtgaataactcttacatacagcgaagtgaacatccacttgcccagctttactgccattcaatcatggaacaccatcattttgaccagtgcctgatgattcttaatagtccaggcaatcagattctcagtggcctctccattgaagaatataagaccacgttgaaaataatcaagcaagctattttagctacagacctagcactgtacattaagaggcgaggagaattttttgaacttataagaaaaaatcaattcaatttggaagatcctcatcaaaaggagttgtttttggcaatgctgatgacagcttgtgatctttctgcaattacaaaaccctggcctattcaacaacggatagcagaacttgtagcaactgaattttttgatcaaggagacagagagagaaaagaactcaacatagaacccactgatctaatgaacagggagaagaaaaacaaaatcccaagtatgcaagttgggttcatagatgccatctgcttgcaactgtatgaggccctgacccacgtgtcagaggactgtttccctttgctagatggctgcagaaagaacaggcagaaatggcaggcccttgcagaacagcag

SEQ ID NO: 428 - protein, 326 aa, Artificial Sequence
  Description of Artificial Sequence: Synthetic Destabilizing Domain (DD)
EETRELQSLAAAVVPSAQTLKITDFSFSDFELSDLETALCTIRMFTDLNLVQNFQMKHEVLCRWILSVKKNYRKNVAYHNWRHAFNTAQCMFAALKAGKIQNKLTDLEILALLIAALSHDLDHRGVNNSYIHRSEHPLAQLYCHSIMEHHHFDQCLMILNSPGNQILSGLSIEEYKTTLKIIKQAILATDLALYIKRRGEFFELIRKNQFNLEDPHQKELFLAMLMTACDLSAITKPWPIQQRIAELVATEFFDQGDRERKELNIEPTDLMNREKKNKIPSMQVGFIDAICLQLYEALTHVSEDCFPLLDGCRKNRQKWQALAEQQ

SEQ ID NO: 429 - DNA, 978 bp, Artificial Sequence
  Description of Artificial Sequence: Synthetic Destabilizing Domain (DD)
gaagaaacaagagagctacagtcgttagcggctgctgtggtgccatctgcccagacccttaaaattactgactttagcttcagtgactttgagctgtctgatctggaaacagcactgtgtacaattcggatgtttactgacctcaaccttgtgcagaacttccagatgaaacatgaggttctttgcagatggattttaagtgttaagaagaattatcggaagaatgttgcctatcataattggagacatgcctttaatacagctcagtgcatgtttgctgctctaaaagcaggcaaaattcagaacaagctgactgacctggagatacttgcattgctgattgctgcactaagccacgatttggatcaccgtggtgtgaataactcttacatacatcgaagtgaacatccacttgcccagctttactgccattcaatcatggaacaccatcattttgaccagtgcctgatgattcttaatagtccaggcaatcagattctcagtggcctctccattgaagaatataagaccacgttgaaaataatcaagcaagctattttagctacagacctagcactgtacattaagaggcgaggagaattttttgaacttataagaaaaaatcaattcaatttggaagatcctcatcaaaaggagttgtttttggcaatgctgatgacagcttgtgatctttctgcaattacaaaaccctggcctattcaacaacggatagcagaacttgtagcaactgaattttttgatcaaggagacagagagagaaaagaactcaacatagaacccactgatctaatgaacagggagaagaaaaacaaaatcccaagtatgcaagttgggttcatagatgccatctgcttgcaactgtatgaggccctgacccacgtgtcagaggactgtttccctttgctagatggctgcagaaagaacaggcagaaatggcaggcccttgcagaacagcag

SEQ ID NO: 430 - protein, 326 aa, Artificial Sequence
  Description of Artificial Sequence: Synthetic Destabilizing Domain (DD)
EETRELQSLAAAVVPSAQTLKITDFSFSDFELSDLETALCTIRMFTDLNLVQNFQMKHEVLCRWILSVKKNYRKNVAYHNWRHAFNTAQCMFAALKAGKIQNKLTDLEILALLIAALSHDLDHRGVNNSYIQRSEHPLAQLYCHSIMEHHHFDQCLMILNSPGNQILSGLSIEEYKTTLKIIKQAILATDLALYIKRRGEFFELIRKNQFNLEDPHQKELFLAMLMTACDLSAITKPWPIQQRIAEPVATEFFDQGDRERKELNIEPTDLMNREKKNKIPSMQVGFIDAICLQLYEALTHVSEDCFPLLDGCRKNRQKWQALAEQQ

SEQ ID NO: 431 - DNA, 978 bp, Artificial Sequence
  Description of Artificial Sequence: Synthetic Destabilizing Domain (DD)
gaagaaacaagagagctacagtcgttagcggctgctgtggtgccatctgcccagacccttaaaattactgactttagcttcagtgactttgagctgtctgatctggaaacagcactgtgtacaattcggatgtttactgacctcaaccttgtgcagaacttccagatgaaacatgaggttctttgcagatggattttaagtgttaagaagaattatcggaagaatgttgcctatcataattggagacatgcctttaatacagctcagtgcatgtttgctgctctaaaagcaggcaaaattcagaacaagctgactgacctggagatacttgcattgctgattgctgcactaagccacgatttggatcaccgtggtgtgaataactcttacatacagcgaagtgaacatccacttgcccagctttactgccattcaatcatggaacaccatcattttgaccagtgcctgatgattcttaatagtccaggcaatcagattctcagtggcctctccattgaagaatataagaccacgttgaaaataatcaagcaagctattttagctacagacctagcactgtacattaagaggcgaggagaattttttgaacttataagaaaaaatcaattcaatttggaagatcctcatcaaaaggagttgtttttggcaatgctgatgacagcttgtgatctttctgcaattacaaaaccctggcctattcaacaacggatagcagaacctgtagcaactgaattttttgatcaaggagacagagagagaaaagaactcaacatagaacccactgatctaatgaacagggagaagaaaaacaaaatcccaagtatgcaagttgggttcatagatgccatctgcttgcaactgtatgaggccctgacccacgtgtcagaggactgtttccctttgctagatggctgcagaaagaacaggcagaaatggcaggcccttgcagaacagcag

SEQ ID NO: 432 - protein, 326 aa, Artificial Sequence
  Description of Artificial Sequence: Synthetic Destabilizing Domain (DD)
EETRELQSLAAAVVPSAQTLKITDFSFSDFELSDLETALCTIRMFTDLNLVQNFQMKHEVLCRWILSVKKNYRKNVAYHNWRHAFNTAQCMFAALKAGKIQNKLTDLEILALLIAALSHDLDHRGVNNSYIQRSEHPLAQLYCHSIMEHHHFDQCLMILNSPGNQILSGLSIEEYKTTLKIIKQAILATDLALYIKRRGEFFELIRKNQFNLEDPHQKELFLAMLMTACDLSEITKPWPIQQRIAELVATEFFDQGDRERKELNIEPTDLMNREKKNKIPSMQVGFIDAICLQLYEALTHVSEDCFPLLDGCRKNRQKWQALAEQQ

SEQ ID NO: 433 - DNA, 978 bp, Artificial Sequence
  Description of Artificial Sequence: Synthetic Destabilizing Domain (DD)
gaagaaacaagagagctacagtcgttagcggctgctgtggtgccatctgcccagacccttaaaattactgactttagcttcagtgactttgagctgtctgatctggaaacagcactgtgtacaattcggatgtttactgacctcaaccttgtgcagaacttccagatgaaacatgaggttctttgcagatggattttaagtgttaagaagaattatcggaagaatgttgcctatcataattggagacatgcctttaatacagctcagtgcatgtttgctgctctaaaagcaggcaaaattcagaacaagctgactgacctggagatacttgcattgctgattgctgcactaagccacgatttggatcaccgtggtgtgaataactcttacatacagcgaagtgaacatccacttgcccagctttactgccattcaatcatggaacaccatcattttgaccagtgcctgatgattcttaatagtccaggcaatcagattctcagtggcctctccattgaagaatataagaccacgttgaaaataatcaagcaagctattttagctacagacctagcactgtacattaagaggcgaggagaattttttgaacttataagaaaaaatcaattcaatttggaagatcctcatcaaaaggagttgtttttggcaatgctgatgacagcttgtgatctttctgaaattacaaaaccctggcctattcaacaacggatagcagaacttgtagcaactgaattttttgatcaaggagacagagagagaaaagaactcaacatagaacccactgatctaatgaacagggagaagaaaaacaaaatcccaagtatgcaagttgggttcatagatgccatctgcttgcaactgtatgaggccctgacccacgtgtcagaggactgtttccctttgctagatggctgcagaaagaacaggcagaaatggcaggcccttgcagaacagcag

SEQ ID NO: 434 - protein, 326 aa, Artificial Sequence
  Description of Artificial Sequence: Synthetic Destabilizing Domain (DD)
EETRELQSLAAAVVPSAQTLKITDFSFSDFELSDLETALCTIRMFTDLNLVQNFQMKHEVLCRWILSVKKNYRKNVAYHNWRHAFNTAQCMFAALKAGKIQNKLTDLEILALLIAALSHDLDHRGVNNSYIQRSEHPLAQLYCHSIMEHHHFDQCLMILNSPGNQILSGLSIEEYKTTLKIIKQAILATDLALYIKRRGEFFELIRKNLFNLEDPHQKELFLAMLMTACDLSAITKPWPIQQRIAELVATEFFDQGDRERKELNIEPTDLMNREKKNKIPSMQVGFIDAICLQLYEALTHVSEDCFPLLDGCRKNRQKWQALAEQQ

SEQ ID NO: 435 - DNA, 978 bp, Artificial Sequence
  Description of Artificial Sequence: Synthetic Destabilizing Domain (DD)
gaagaaacaagagagctacagtcgttagcggctgctgtggtgccatctgcccagacccttaaaattactgactttagtttcagtgactttgagctgtctgatttggaaacagcactgtgtacaattcggatgtttactgacctcaaccttgtgcagaacttccagatgaaacatgaggttctttgcagatggattttaagtgttaagaagaattatcggaagaatgttgcctatcataattggagacatgcctttaatacagctcagtgcatgtttgctgctctaaaagcaggcaaaattcagaacaagctgactgacctggagatacttgcattgctgattgctgcactaagccacgatttggatcaccgtggtgtgaataactcttacatacagcgaagtgaacatccacttgcccagctttactgccattcaatcatggaacaccatcattttgaccagtgcctgatgattcttaatagtccaggcaatcagattctcagtggcctctccattgaagaatataagaccacgttgaaaataatcaagcaagctattttagctacagacctagcactgtacattaagaggcgaggagaattttttgaacttataagaaaaaatctattcaatttggaagatcctcatcaaaaggagttgtttttggcaatgctgatgacagcttgtgatctttctgcaattacaaaaccctggcctattcaacaacggatagcagaacttgtagcaactgaattttttgatcaaggagacagagagagaaaagaactcaacatagaacccactgatctaatgaacagggagaagaaaaacaaaatcccaagtatgcaagttgggttcatagatgccatctgcttgcaactgtatgaggccctgacccacgtgtcagaggactgtttccctttgctagatggctgcagaaagaacaggcagaaatggcaggcccttgcagaacagcag

SEQ ID NO: 436 - protein, 326 aa, Artificial Sequence
  Description of Artificial Sequence: Synthetic Destabilizing Domain (DD)
EETRELQSLAAAVVPSAQTLKITDFSFSDFELSDLETALCTIRMFTDLNLVQNFQMKHEILCRWILSVKKNYRKNVAYHNWRHAFNTAQCMFAALKAGKIQNKLTDLEILALLIAALSHDLDHRGVNNSYIQRSEHPLAQLYCHSIMEHHHFDQCLMILNSPGNQILSGLSIEEYKTTLKIIKQAILATDLALYIKRRGEFFELIRKNQFNLEDPHQKELFLAMLMTACDLSAITKPWPIQQRIAELVATEFFDQGDRERKELNIEPTDLMNREKKNKIPSMQVGFIDAICLQLYEALTHVSEDCFPLLDGCRKNRQKWQALAEQQ

SEQ ID NO: 437 - DNA, 978 bp, Artificial Sequence
  Description of Artificial Sequence: Synthetic Destabilizing Domain (DD)
gaagaaacaagagagctacagtcgttagcggctgctgtggtgccatctgcccagacccttaaaattactgactttagcttcagtgactttgagctgtctgatctggaaacagcactgtgtacaattcggatgtttactgatctcaaccttgtgcagaacttccagatgaaacatgagattctttgcagatggattttaagtgttaagaagaattatcggaagaatgttgcctatcataattggagacatgcctttaatacagctcagtgcatgtttgctgctctaaaagcaggcaaaattcagaacaagctgactgacctggagatacttgcattgctgattgctgcactaagccacgatttggatcaccgtggtgtgaataactcttacatacagcgaagtgaacatccacttgcccagctttactgccattcaatcatggaacaccatcattttgaccagtgcctgatgattcttaatagtccaggcaatcagattctcagtggcctctccattgaagaatataagaccacgttgaaaataatcaagcaagctattttagctacagacctagcactgtacattaagaggcgaggagaattttttgaacttataagaaaaaatcaattcaatttggaagatcctcatcaaaaggagttgtttttggcaatgctgatgacagcttgtgatctttctgcaattacaaaaccctggcctattcaacaacggatagcagaacttgtagcaactgaattttttgatcaaggagacagagagagaaaagaactcaacatagaacccactgatctaatgaacagggagaagaaaaacaaaatcccaagtatgcaagttgggttcatagatgccatctgcttgcaactgtatgaggccctgacccacgtgtcagaggactgtttccctttgctagatggctgcagaaagaacaggcagaaatggcaggcccttgcagaacagcag

SEQ ID NO: 438 - protein, 326 aa, Artificial Sequence
  Description of Artificial Sequence: Synthetic Destabilizing Domain (DD)
EETRELQSLAAAVVPSAQTLKITDFSFSDFELSDLETALCTIRMFTDLNLVQNFQMKREVLCRWILSVKKNYRKNVAYHNWRHAFNTAQCMFAALKAGKIQNKLTDLEILALLIAALSHDLDHRGVNNSYIQRSEHPLAQLYCHSIMEHHHFDQCLMILNSPGNQILSGLSIEEYKTTLKIIKQAILATDLALYIKRRGEFFELIRKNQFNLEDPHQKELFLAMLMTACDLSAITKPWPIQQRIAELVATEFFDQGDRERKELNIEPTDLMNREKKNKIPSMQVGFIDAICLQLYEALTHVSEDCFPLLDGCRKNRQKWQALAEQQ

SEQ ID NO: 439 - DNA, 978 bp, Artificial Sequence
  Description of Artificial Sequence: Synthetic Destabilizing Domain (DD)
gaagaaacaagagagctacagtcgttagcggctgctgtggtgccatctgcccagacccttaaaattactgactttagcttcagtgactttgagctgtctgatctagaaacagcactgtgtacaattcggatgtttactgacctcaaccttgtgcagaacttccagatgaaacgtgaggttctttgcagatggattttaagtgttaagaagaattatcggaagaatgttgcctatcataattggagacatgcctttaatacagctcagtgcatgtttgctgctctaaaagcaggcaaaattcagaacaagctgactgacctggagatacttgcattgctgattgctgcactaagccacgatttggatcaccgtggtgtgaataactcttacatacagcgaagtgaacatccacttgcccagctttactgccattcaatcatggaacaccatcattttgaccagtgcctgatgattcttaatagtccaggcaatcagattctcagtggcctctccattgaagaatataagaccacgttgaaaataatcaagcaagctattttagctacagacctagcactgtacattaagaggcgaggagaattttttgaacttataagaaaaaatcaattcaatttggaagatcctcatcaaaaggagttgtttttggcaatgctgatgacagcttgtgatctttctgcaattacaaaaccctggcctattcaacaacggatagcagaacttgtagcaactgaattttttgatcaaggagacagagagagaaaagaactcaacatagaacccactgatctaatgaacagggagaagaaaaacaaaatcccaagtatgcaagttgggttcatagatgccatctgcttgcaactgtatgaggccctgacccacgtgtcagaggactgtttccctttgctagatggctgcagaaagaacaggcagaaatggcaggcccttgcagaacagcag

SEQ ID NO: 440 - protein, 326 aa, Artificial Sequence
  Description of Artificial Sequence: Synthetic Destabilizing Domain (DD)
EETRELQSLAAAVVPSAQTLKITDFSFSDFELSDLETALCTIRMFTDLNLVQNFQMKHEVLCRWILSVKKNYRKNVAYHNWRHAFNTAQCMFAALKAGKIQNKLTDLEILALLIAALSHDLDHRGVNNSYIQRSEHPLAQLYCHSIMEHHHFDQCLMILNSPGNQILSGLSIEEYKTTLKIIKQAILATDLALYIKRRGEFFELIRKNQFNLEDPHQKELFLAMLMTACDLSAITKPWPIQQRIAELVATEFFDQGDRERKELNIEPTDLMNREKKNKIPSMQVGFIDAICLQLYEALTHVSEDCFPLLDGCRKNRQKWQALAVQQ

SEQ ID NO: 441 - DNA, 978 bp, Artificial Sequence
  Description of Artificial Sequence: Synthetic Destabilizing Domain (DD)
gaagaaacaagagagctacagtcgttagcggctgctgtggtgccatctgcccagacccttaaaattactgactttagcttcagtgactttgagctgtctgatctggaaacagcactgtgtacaattcggatgtttactgacctcaaccttgtgcagaacttccagatgaaacatgaggttctttgcagatggattttaagtgttaagaagaattatcggaagaatgttgcctatcataattggagacatgcctttaatacagctcagtgcatgtttgctgctctaaaagcaggcaaaattcagaacaagctgactgacctggagatacttgcattgctgattgctgcactaagccacgatttggatcaccgtggtgtgaataactcttacatacagcgaagtgaacatccacttgcccagctttactgccattcaatcatggaacaccatcattttgaccagtgcctgatgattcttaatagtccaggcaatcagattctcagtggcctctccattgaagaatataagaccacgttgaaaataatcaagcaagctattttagctacagacctagcactgtacattaagaggcgaggagaattttttgaacttataagaaaaaatcaattcaatttggaagatcctcatcaaaaggagttgtttttggcaatgctgatgacagcttgtgatctttctgcaattacaaaaccctggcctattcaacaacggatagcagaacttgtagcaactgaattttttgatcaaggagacagagagagaaaagaactcaacatagaacccactgatctaatgaacagggagaagaaaaacaaaatcccaagtatgcaagttgggttcatagatgccatctgcttgcaactgtatgaggccctgacccacgtgtcagaggactgtttccctttgctagatggctgcagaaagaacaggcagaaatggcaggcccttgcagtacagcag

SEQ ID NO: 442 - protein, 326 aa, Artificial Sequence
  Description of Artificial Sequence: Synthetic Destabilizing Domain (DD)
EETRELQSLAAAVVPSAQTLKITDFSFSDFELSDLETALCTIRMFTDLNLVQNFQMKHEVLCRWILSVKKNYRKNVAYHNWRHAFNTAQCMFAALKAGKIQNKLTDLEILALLIAALSHDLDHRGVNNSYIQRSEHPLAQLYCHSIMEHHHFDQCLMILNSPGNQILSGLSIEEYKTTLKIIKQAILATDLALYIKRRGEFFELIRKNQFNLEDPHQKELFLAMLMTACDLSAITKPWPIQQRIAELVAIEFFDQGDRERKELNIEPTDLMNREKKNKIPSMQVGFIDAICLQLYEALTHVSEDCFPLLDGCRKNRQKWQALAEQQ

SEQ ID NO: 443 - DNA, 978 bp, Artificial Sequence
  Description of Artificial Sequence: Synthetic Destabilizing Domain (DD)
gaagaaacaagagagctacagtcgttagcggctgctgtggtgccatctgcccagacccttaaaattactgactttagcttcagtgactttgagctgtctgatctggaaacagcactgtgtacaattcggatgtttactgacctcaaccttgtgcagaacttccagatgaaacatgaggttctttgcagatggattttaagtgttaagaagaattatcggaagaatgttgcctatcataattggagacatgcctttaatacagctcagtgcatgttcgctgctctaaaagcaggcaaaattcagaacaagctgactgacctggagatacttgcattgctgattgctgcactaagccacgatttggatcaccgtggtgtgaataactcttacatacagcgaagtgaacatccacttgcccagctttactgccattcaatcatggaacaccatcattttgaccagtgcctgatgattcttaatagtccaggcaatcagattctcagtggcctctccattgaagaatataagaccacgttgaaaataatcaagcaagctattttagctacagacctagcactgtacattaagaggcgaggagaattttttgaacttataagaaaaaatcaattcaatttggaagatcctcatcaaaaggagttgtttttggcaatgctgatgacagcttgtgatctttctgcaattacaaaaccctggcctattcaacaacggatagcagaacttgtagcaattgaattttttgatcaaggagacagagagagaaaagaactcaacatagaacccactgatctaatgaacagggagaagaaaaacaaaatcccaagtatgcaagttgggttcatagatgccatctgcttgcaactgtatgaggccctgacccacgtgtcagaggactgtttccctttgctagatggctgcagaaagaacaggcagaaatggcaggcccttgcagaacagcag

SEQ ID NO: 444 - protein, 326 aa, Artificial Sequence
  Description of Artificial Sequence: Synthetic Destabilizing Domain (DD)
EETRELQSLAAAVVPSAQTLKITDFSFSDFELSDLETALCTIRMFTDLNLVQNFQMKHEVLCRWILSVKKNYRKNVAYHNWRHAFNTAQCMFAALKAGKIQNKLTDLEILALLIAALSHDLDHRGVNNSYIQRSEHPLAQLYCHSIMEHHHFDQCLMILNSPGNQILSGLSIEEYKTTLKIIKQAILATDLALYIKRRGEFGELIRKNQFNLEDPHQKELFLAMLMTACDLSAITKPWPIQQRIAELVATEFFDQGDRERKELNIEPTDLMNREKKNKIPSMQVGFIDAICLQLYEALTHVSEDCFPLLDGCRKNRQKWQALAEQQ

SEQ ID NO: 445 - DNA, 978 bp, Artificial Sequence
  Description of Artificial Sequence: Synthetic Destabilizing Domain (DD)
gaagaaacaagagagctacagtcgttagcggctgctgtggtgccatctgcccagacccttaaaattactgactttagcttcagtgactttgagctgtctgatctggaaacagcactgtgtacaattcggatgtttactgacctcaaccttgtgcagaacttccagatgaaacatgaggttctttgcagatggattttaagtgttaagaagaattatcggaagaatgttgcctatcataattggagacatgcctttaatacagctcagtgcatgtttgctgctctaaaagcaggcaaaattcagaacaagctgactgacctggagatacttgcattgctgattgctgcactaagccacgatttggatcaccgtggtgtgaataactcttacatacagcgaagtgaacatccacttgcccagctttactgccattcaatcatggaacaccatcattttgaccagtgcctgatgattcttaatagtccaggcaatcagattctcagtggcctctccattgaagaatataagaccacgttgaaaataatcaagcaagctattttagctacagacctagcactgtacattaagaggcgaggagaatttggcgaacttataagaaaaaatcaattcaatttggaagatcctcatcaaaaggagttgtttttggcaatgctgatgacagcttgtgatctttctgcaattacaaaaccctggcctattcaacaacggatagcagaacttgtagcaactgaattttttgatcaaggagacagagagagaaaagaactcaacatagaacccactgatctaatgaacagggagaagaaaaacaaaatcccaagtatgcaagttgggttcatagatgccatctgcttgcaactgtatgaggccctgacccacgtgtcagaggactgtttccctttgctagatggctgcagaaagaacaggcagaaatggcaggcccttgcagaacagcag

SEQ ID NO: 446 - protein, 326 aa, Artificial Sequence
  Description of Artificial Sequence: Synthetic Destabilizing Domain (DD)
EETRELQSLAAAVVPSAQTLKITDFSFSDFELSDLETALCTIRMFTDLNLVQNFQMKHEVLCRWILSVKKNYRKNVAYHNWRHAFNTAQCMFAALKAGKIQNKLTDLEILALLIAALSHDLDHRGVNNSYIQRSEHPLAQLYCHSIMEHHHFDQCLMILNSPGNQILSGLSIEEYKTTLKIIKQAILATDLALYIKRRGEFLELIRKNQFNLEDPHQKELFLAMLMTACDLSAITKPWPIQQRIAELVATEFFDQGDRERKELNIEPTDLMNREKKNKIPSMQVGFIDAICLQLYEALTHVSEDCFPLLDGCRKNRQKWQALAEQQ

SEQ ID NO: 447 - DNA, 978 bp, Artificial Sequence
  Description of Artificial Sequence: Synthetic Destabilizing Domain (DD)
gaagaaacaagagagctacagtcgttagcggctgctgtggtgccatctgcccagacccttaaaattactgactttagcttcagtgactttgagctgtctgatctggaaacagcactgtgtacaattcggatgtttactgacctcaaccttgtgcagaacttccagatgaaacatgaggttctttgcagatggattttaagtgttaagaagaattatcggaagaatgttgcctatcataattggagacatgcctttaatacagctcagtgcatgtttgctgctctaaaagcaggcaaaattcagaacaagctgactgacctggagatacttgcattgctgattgctgcactaagccacgatttggatcaccgtggtgtgaataactcttacatacagcgaagtgaacatccacttgcccagctttactgccattcaatcatggaacaccatcattttgaccagtgcctgatgattcttaatagtccaggcaatcagattctcagtggcctctccattgaagaatataagaccacgttgaaaataatcaagcaagctattttagctacagacctagcactgtacattaagaggcgaggagaatttctggaacttataagaaaaaatcaattcaatttggaagatcctcatcaaaaggagttgtttttggcaatgctgatgacagcttgtgatctttctgcaattacaaaaccctggcctattcaacaacggatagcagaacttgtagcaactgaattttttgatcaaggagacagagagagaaaagaactcaacatagaacccactgatctaatgaacagggagaagaaaaacaaaatcccaagtatgcaagttgggttcatagatgccatctgcttgcaactgtatgaggccctgacccacgtgtcagaggactgtttccctttgctagatggctgcagaaagaacaggcagaaatggcaggcccttgcagaacagcag

SEQ ID NO: 448 - protein, 326 aa, Artificial Sequence
  Description of Artificial Sequence: Synthetic Destabilizing Domain (DD)
EETRELQSLAAAVVPSAQTLKITDFSFSDFELSDLETALCTIRMFTDLNLVQNFQMKHEVLCRWILSVKKNYRKNVAYHNWRHAFNTAQCMFAALKAGKIQNKLTDLEILALLIAALSHDLDHRGVNNSYIQRSEHPLAQLYCHSIMEHHHFDQCLMILNSPGNQILSGLSIEEYKTTLKIIKQAILATDLALYIKRRGEFMELIRKNQFNLEDPHQKELFLAMLMTACDLSAITKPWPIQQRIAELVATEFFDQGDRERKELNIEPTDLMNREKKNKIPSMQVGFIDAICLQLYEALTHVSEDCFPLLDGCRKNRQKWQALAEQQ

SEQ ID NO: 449 - DNA, 978 bp, Artificial Sequence
  Description of Artificial Sequence: Synthetic Destabilizing Domain (DD)
gaagaaacaagagagctacagtcgttagcggctgctgtggtgccatctgcccagacccttaaaattactgactttagcttcagtgactttgagctgtctgatctggaaacagcactgtgtacaattcggatgtttactgacctcaaccttgtgcagaacttccagatgaaacatgaggttctttgcagatggattttaagtgttaagaagaattatcggaagaatgttgcctatcataattggagacatgcctttaatacagctcagtgcatgtttgctgctctaaaagcaggcaaaattcagaacaagctgactgacctggagatacttgcattgctgattgctgcactaagccacgatttggatcaccgtggtgtgaataactcttacatacagcgaagtgaacatccacttgcccagctttactgccattcaatcatggaacaccatcattttgaccagtgcctgatgattcttaatagtccaggcaatcagattctcagtggcctctccattgaagaatataagaccacgttgaaaataatcaagcaagctattttagctacagacctagcactgtacattaagaggcgaggagaatttatggaacttataagaaaaaatcaattcaatttggaagatcctcatcaaaaggagttgtttttggcaatgctgatgacagcttgtgatctttctgcaattacaaaaccctggcctattcaacaacggatagcagaacttgtagcaactgaattttttgatcaaggagacagagagagaaaagaactcaacatagaacccactgatctaatgaacagggagaagaaaaacaaaatcccaagtatgcaagttgggttcatagatgccatctgcttgcaactgtatgaggccctgacccacgtgtcagaggactgtttccctttgctagatggctgcagaaagaacaggcagaaatggcaggcccttgcagaacagcag

SEQ ID NO: 450 - protein, 326 aa, Artificial Sequence
  Description of Artificial Sequence: Synthetic Destabilizing Domain (DD)
EETRELQSLAAAVVPSAQTLKITDFSFSDFELSDLETALCTIRMFTDLNLVQNFQMKHEVLCRWILSVKKNYRKNVAYHNWRHAFNTAQCMFAALKAGKIQNKLTDLEILALLIAALSHDLDHRGVNNSYIQRSEHPLAQLYCHSIMEHHHFDQCLMILNSPGNQILSGLSIEEYKTTLKIIKQAILATDLALYIKRRGEFRELIRKNQFNLEDPHQKELFLAMLMTACDLSAITKPWPIQQRIAELVATEFFDQGDRERKELNIEPTDLMNREKKNKIPSMQVGFIDAICLQLYEALTHVSEDCFPLLDGCRKNRQKWQALAEQQ

SEQ ID NO: 451 - DNA, 978 bp, Artificial Sequence
  Description of Artificial Sequence: Synthetic Destabilizing Domain (DD)
gaagaaacaagagagctacagtcgttagcggctgctgtggtgccatctgcccagacccttaaaattactgactttagcttcagtgactttgagctgtctgatctggaaacagcactgtgtacaattcggatgtttactgacctcaaccttgtgcagaacttccagatgaaacatgaggttctttgcagatggattttaagtgttaagaagaattatcggaagaatgttgcctatcataattggagacatgcctttaatacagctcagtgcatgtttgctgctctaaaagcaggcaaaattcagaacaagctgactgacctggagatacttgcattgctgattgctgcactaagccacgatttggatcaccgtggtgtgaataactcttacatacagcgaagtgaacatccacttgcccagctttactgccattcaatcatggaacaccatcattttgaccagtgcctgatgattcttaatagtccaggcaatcagattctcagtggcctctccattgaagaatataagaccacgttgaaaataatcaagcaagctattttagctacagacctagcactgtacattaagaggcgaggagaatttcgtgaacttataagaaaaaatcaattcaatttggaagatcctcatcaaaaggagttgtttttggcaatgctgatgacagcttgtgatctttctgcaattacaaaaccctggcctattcaacaacggatagcagaacttgtagcaactgaattttttgatcaaggagacagagagagaaaagaactcaacatagaacccactgatctaatgaacagggagaagaaaaacaaaatcccaagtatgcaagttgggttcatagatgccatctgcttgcaactgtatgaggccctgacccacgtgtcagaggactgtttccctttgctagatggctgcagaaagaacaggcagaaatggcaggcccttgcagaacagcag

SEQ ID NO: 452 - protein, 326 aa, Artificial Sequence
  Description of Artificial Sequence: Synthetic Destabilizing Domain (DD)
EETRELQSLAAAVVPSAQTLKITDFSFSDFELSDLETALCTIRMFTDLNLVQNFQMKHEVLCRWILSVKKNYRKNVAYHNWRHAFNTAQCMFAALKAGKIQNKLTDLEILALLIAALSHDLDHRGVNNSYIQRSEHPLAQLYCHSIMEHHHFDQCLMILNSPGNQILSGLSIEEYKTTLKIIKQAILATDLALYIKRRGEFWELIRKNQFNLEDPHQKELFLAMLMTACDLSAITKPWPIQQRIAELVATEFFDQGDRERKELNIEPTDLMNREKKNKIPSMQVGFIDAICLQLYEALTHVSEDCFPLLDGCRKNRQKWQALAEQQ

SEQ ID NO: 453 - DNA, 978 bp, Artificial Sequence
  Description of Artificial Sequence: Synthetic Destabilizing Domain (DD)
gaagaaacaagagagctacagtcgttagcggctgctgtggtgccatctgcccagacccttaaaattactgactttagcttcagtgactttgagctgtctgatctggaaacagcactgtgtacaattcggatgtttactgacctcaaccttgtgcagaacttccagatgaaacatgaggttctttgcagatggattttaagtgttaagaagaattatcggaagaatgttgcctatcataattggagacatgcctttaatacagctcagtgcatgtttgctgctctaaaagcaggcaaaattcagaacaagctgactgacctggagatacttgcattgctgattgctgcactaagccacgatttggatcaccgtggtgtgaataactcttacatacagcgaagtgaacatccacttgcccagctttactgccattcaatcatggaacaccatcattttgaccagtgcctgatgattcttaatagtccaggcaatcagattctcagtggcctctccattgaagaatataagaccacgttgaaaataatcaagcaagctattttagctacagacctagcactgtacattaagaggcgaggagaattttgggaacttataagaaaaaatcaattcaatttggaagatcctcatcaaaaggagttgtttttggcaatgctgatgacagcttgtgatctttctgcaattacaaaaccctggcctattcaacaacggatagcagaacttgtagcaactgaattttttgatcaaggagacagagagagaaaagaactcaacatagaacccactgatctaatgaacagggagaagaaaaacaaaatcccaagtatgcaagttgggttcatagatgccatctgcttgcaactgtatgaggccctgacccacgtgtcagaggactgtttccctttgctagatggctgcagaaagaacaggcagaaatggcaggcccttgcagaacagcag

SEQ ID NO: 454 - protein, 326 aa, Artificial Sequence
  Description of Artificial Sequence: Synthetic Destabilizing Domain (DD)
EETRELQSLAAAVVPSAQTLKITDFSFSDFELSDLETALCTIRMFTDLNLVQNFQMKHEVLCRWILSVKKNYRKNVAYHNWRHAFNTAQCMFAALKAGKIQNKLTDLEILALLIAALSHDLDHRGVNNSYIQRSEHPLAQLYCHSIMEHHHFDQCLMILNSPGNQILSGLSIEEYKTTLKIIKQAILATDLALYIKRRGEFKELIRKNQFNLEDPHQKELFLAMLMTACDLSAITKPWPIQQRIAELVATEFFDQGDRERKELNIEPTDLMNREKKNKIPSMQVGFIDAICLQLYEALTHVSEDCFPLLDGCRKNRQKWQALAEQQ

SEQ ID NO: 455 - DNA, 978 bp, Artificial Sequence
  Description of Artificial Sequence: Synthetic Destabilizing Domain (DD)
gaagaaacaagagagctacagtcgttagcggctgctgtggtgccatctgcccagacccttaaaattactgactttagcttcagtgactttgagctgtctgatctggaaacagcactgtgtacaattcggatgtttactgacctcaaccttgtgcagaacttccagatgaaacatgaggttctttgcagatggattttaagtgttaagaagaattatcggaagaatgttgcctatcataattggagacatgcctttaatacagctcagtgcatgtttgctgctctaaaagcaggcaaaattcagaacaagctgactgacctggagatacttgcattgctgattgctgcactaagccacgatttggatcaccgtggtgtgaataactcttacatacagcgaagtgaacatccacttgcccagctttactgccattcaatcatggaacaccatcattttgaccagtgcctgatgattcttaatagtccaggcaatcagattctcagtggcctctccattgaagaatataagaccacgttgaaaataatcaagcaagctattttagctacagacctagcactgtacattaagaggcgaggagaatttaaagaacttataagaaaaaatcaattcaatttggaagatcctcatcaaaaggagttgtttttggcaatgctgatgacagcttgtgatctttctgcaattacaaaaccctggcctattcaacaacggatagcagaacttgtagcaactgaattttttgatcaaggagacagagagagaaaagaactcaacatagaacccactgatctaatgaacagggagaagaaaaacaaaatcccaagtatgcaagttgggttcatagatgccatctgcttgcaactgtatgaggccctgacccacgtgtcagaggactgtttccctttgctagatggctgcagaaagaacaggcagaaatggcaggcccttgcagaacagcag

SEQ ID NO: 456 - protein, 326 aa, Artificial Sequence
  Description of Artificial Sequence: Synthetic Destabilizing Domain (DD)
EETRELQSLAAAVVPSAQTLKITDFSFSDFELSDLETALCTIRMFTDLNLVQNFQMKHEVLCRWILSVKKNYRKNVAYHNWRHAFNTAQCMFAALKAGKIQNKLTDLEILALLIAALSHDLDHRGVNNSYIQRSEHPLAQLYCHSIMEHHHFDQCLMILNSPGNQILSGLSIEEYKTTLKIIKQAILATDLALYIKRRGEFQELIRKNQFNLEDPHQKELFLAMLMTACDLSAITKPWPIQQRIAELVATEFFDQGDRERKELNIEPTDLMNREKKNKIPSMQVGFIDAICLQLYEALTHVSEDCFPLLDGCRKNRQKWQALAEQQ

SEQ ID NO: 457 - DNA, 978 bp, Artificial Sequence
  Description of Artificial Sequence: Synthetic Destabilizing Domain (DD)
gaagaaacaagagagctacagtcgttagcggctgctgtggtgccatctgcccagacccttaaaattactgactttagcttcagtgactttgagctgtctgatctggaaacagcactgtgtacaattcggatgtttactgacctcaaccttgtgcagaacttccagatgaaacatgaggttctttgcagatggattttaagtgttaagaagaattatcggaagaatgttgcctatcataattggagacatgcctttaatacagctcagtgcatgtttgctgctctaaaagcaggcaaaattcagaacaagctgactgacctggagatacttgcattgctgattgctgcactaagccacgatttggatcaccgtggtgtgaataactcttacatacagcgaagtgaacatccacttgcccagctttactgccattcaatcatggaacaccatcattttgaccagtgcctgatgattcttaatagtccaggcaatcagattctcagtggcctctccattgaagaatataagaccacgttgaaaataatcaagcaagctattttagctacagacctagcactgtacattaagaggcgaggagaatttcaggaacttataagaaaaaatcaattcaatttggaagatcctcatcaaaaggagttgtttttggcaatgctgatgacagcttgtgatctttctgcaattacaaaaccctggcctattcaacaacggatagcagaacttgtagcaactgaattttttgatcaaggagacagagagagaaaagaactcaacatagaacccactgatctaatgaacagggagaagaaaaacaaaatcccaagtatgcaagttgggttcatagatgccatctgcttgcaactgtatgaggccctgacccacgtgtcagaggactgtttccctttgctagatggctgcagaaagaacaggcagaaatggcaggcccttgcagaacagcag

SEQ ID NO: 458 - protein, 326 aa, Artificial Sequence
  Description of Artificial Sequence: Synthetic Destabilizing Domain (DD)
EETRELQSLAAAVVPSAQTLKITDFSFSDFELSDLETALCTIRMFTDLNLVQNFQMKHEVLCRWILSVKKNYRKNVAYHNWRHAFNTAQCMFAALKAGKIQNKLTDLEILALLIAALSHDLDHRGVNNSYIQRSEHPLAQLYCHSIMEHHHFDQCLMILNSPGNQILSGLSIEEYKTTLKIIKQAILATDLALYIKRRGEFEELIRKNQFNLEDPHQKELFLAMLMTACDLSAITKPWPIQQRIAELVATEFFDQGDRERKELNIEPTDLMNREKKNKIPSMQVGFIDAICLQLYEALTHVSEDCFPLLDGCRKNRQKWQALAEQQ

SEQ ID NO: 459 - DNA, 978 bp, Artificial Sequence
  Description of Artificial Sequence: Synthetic Destabilizing Domain (DD)
gaagaaacaagagagctacagtcgttagcggctgctgtggtgccatctgcccagacccttaaaattactgactttagcttcagtgactttgagctgtctgatctggaaacagcactgtgtacaattcggatgtttactgacctcaaccttgtgcagaacttccagatgaaacatgaggttctttgcagatggattttaagtgttaagaagaattatcggaagaatgttgcctatcataattggagacatgcctttaatacagctcagtgcatgtttgctgctctaaaagcaggcaaaattcagaacaagctgactgacctggagatacttgcattgctgattgctgcactaagccacgatttggatcaccgtggtgtgaataactcttacatacagcgaagtgaacatccacttgcccagctttactgccattcaatcatggaacaccatcattttgaccagtgcctgatgattcttaatagtccaggcaatcagattctcagtggcctctccattgaagaatataagaccacgttgaaaataatcaagcaagctattttagctacagacctagcactgtacattaagaggcgaggagaatttgaagaacttataagaaaaaatcaattcaatttggaagatcctcatcaaaaggagttgtttttggcaatgctgatgacagcttgtgatctttctgcaattacaaaaccctggcctattcaacaacggatagcagaacttgtagcaactgaattttttgatcaaggagacagagagagaaaagaactcaacatagaacccactgatctaatgaacagggagaagaaaaacaaaatcccaagtatgcaagttgggttcatagatgccatctgcttgcaactgtatgaggccctgacccacgtgtcagaggactgtttccctttgctagatggctgcagaaagaacaggcagaaatggcaggcccttgcagaacagcag

SEQ ID NO: 460 - protein, 326 aa, Artificial Sequence
  Description of Artificial Sequence: Synthetic Destabilizing Domain (DD)
EETRELQSLAAAVVPSAQTLKITDFSFSDFELSDLETALCTIRMFTDLNLVQNFQMKHEVLCRWILSVKKNYRKNVAYHNWRHAFNTAQCMFAALKAGKIQNKLTDLEILALLIAALSHDLDHRGVNNSYIQRSEHPLAQLYCHSIMEHHHFDQCLMILNSPGNQILSGLSIEEYKTTLKIIKQAILATDLALYIKRRGEFSELIRKNQFNLEDPHQKELFLAMLMTACDLSAITKPWPIQQRIAELVATEFFDQGDRERKELNIEPTDLMNREKKNKIPSMQVGFIDAICLQLYEALTHVSEDCFPLLDGCRKNRQKWQALAEQQ

SEQ ID NO: 461 - DNA, 978 bp, Artificial Sequence
  Description of Artificial Sequence: Synthetic Destabilizing Domain (DD)
gaagaaacaagagagctacagtcgttagcggctgctgtggtgccatctgcccagacccttaaaattactgactttagcttcagtgactttgagctgtctgatctggaaacagcactgtgtacaattcggatgtttactgacctcaaccttgtgcagaacttccagatgaaacatgaggttctttgcagatggattttaagtgttaagaagaattatcggaagaatgttgcctatcataattggagacatgcctttaatacagctcagtgcatgtttgctgctctaaaagcaggcaaaattcagaacaagctgactgacctggagatacttgcattgctgattgctgcactaagccacgatttggatcaccgtggtgtgaataactcttacatacagcgaagtgaacatccacttgcccagctttactgccattcaatcatggaacaccatcattttgaccagtgcctgatgattcttaatagtccaggcaatcagattctcagtggcctctccattgaagaatataagaccacgttgaaaataatcaagcaagctattttagctacagacctagcactgtacattaagaggcgaggagaatttagcgaacttataagaaaaaatcaattcaatttggaagatcctcatcaaaaggagttgtttttggcaatgctgatgacagcttgtgatctttctgcaattacaaaaccctggcctattcaacaacggatagcagaacttgtagcaactgaattttttgatcaaggagacagagagagaaaagaactcaacatagaacccactgatctaatgaacagggagaagaaaaacaaaatcccaagtatgcaagttgggttcatagatgccatctgcttgcaactgtatgaggccctgacccacgtgtcagaggactgtttccctttgctagatggctgcagaaagaacaggcagaaatggcaggcccttgcagaacagcag

SEQ ID NO: 462 - protein, 326 aa, Artificial Sequence
  Description of Artificial Sequence: Synthetic Destabilizing Domain (DD)
EETRELQSLAAAVVPSAQTLKITDFSFSDFELSDLETALCTIRMFTDLNLVQNFQMKHEVLCRWILSVKKNYRKNVAYHNWRHAFNTAQCMFAALKAGKIQNKLTDLEILALLIAALSHDLDHRGVNNSYIQRSEHPLAQLYCHSIMEHHHFDQCLMILNSPGNQILSGLSIEEYKTTLKIIKQAILATDLALYIKRRGEFPELIRKNQFNLEDPHQKELFLAMLMTACDLSAITKPWPIQQRIAELVATEFFDQGDRERKELNIEPTDLMNREKKNKIPSMQVGFIDAICLQLYEALTHVSEDCFPLLDGCRKNRQKWQALAEQQ

SEQ ID NO: 463 - DNA, 978 bp, Artificial Sequence
  Description of Artificial Sequence: Synthetic Destabilizing Domain (DD)
gaagaaacaagagagctacagtcgttagcggctgctgtggtgccatctgcccagacccttaaaattactgactttagcttcagtgactttgagctgtctgatctggaaacagcactgtgtacaattcggatgtttactgacctcaaccttgtgcagaacttccagatgaaacatgaggttctttgcagatggattttaagtgttaagaagaattatcggaagaatgttgcctatcataattggagacatgcctttaatacagctcagtgcatgtttgctgctctaaaagcaggcaaaattcagaacaagctgactgacctggagatacttgcattgctgattgctgcactaagccacgatttggatcaccgtggtgtgaataactcttacatacagcgaagtgaacatccacttgcccagctttactgccattcaatcatggaacaccatcattttgaccagtgcctgatgattcttaatagtccaggcaatcagattctcagtggcctctccattgaagaatataagaccacgttgaaaataatcaagcaagctattttagctacagacctagcactgtacattaagaggcgaggagaatttccggaacttataagaaaaaatcaattcaatttggaagatcctcatcaaaaggagttgtttttggcaatgctgatgacagcttgtgatctttctgcaattacaaaaccctggcctattcaacaacggatagcagaacttgtagcaactgaattttttgatcaaggagacagagagagaaaagaactcaacatagaacccactgatctaatgaacagggagaagaaaaacaaaatcccaagtatgcaagttgggttcatagatgccatctgcttgcaactgtatgaggccctgacccacgtgtcagaggactgtttccctttgctagatggctgcagaaagaacaggcagaaatggcaggcccttgcagaacagcag

SEQ ID NO: 464 - protein, 326 aa, Artificial Sequence
  Description of Artificial Sequence: Synthetic Destabilizing Domain (DD)
EETRELQSLAAAVVPSAQTLKITDFSFSDFELSDLETALCTIRMFTDLNLVQNFQMKHEVLCRWILSVKKNYRKNVAYHNWRHAFNTAQCMFAALKAGKIQNKLTDLEILALLIAALSHDLDHRGVNNSYIQRSEHPLAQLYCHSIMEHHHFDQCLMILNSPGNQILSGLSIEEYKTTLKIIKQAILATDLALYIKRRGEFVELIRKNQFNLEDPHQKELFLAMLMTACDLSAITKPWPIQQRIAELVATEFFDQGDRERKELNIEPTDLMNREKKNKIPSMQVGFIDAICLQLYEALTHVSEDCFPLLDGCRKNRQKWQALAEQQ

SEQ ID NO: 465 - DNA, 978 bp, Artificial Sequence
  Description of Artificial Sequence: Synthetic Destabilizing Domain (DD)
gaagaaacaagagagctacagtcgttagcggctgctgtggtgccatctgcccagacccttaaaattactgactttagcttcagtgactttgagctgtctgatctggaaacagcactgtgtacaattcggatgtttactgacctcaaccttgtgcagaacttccagatgaaacatgaggttctttgcagatggattttaagtgttaagaagaattatcggaagaatgttgcctatcataattggagacatgcctttaatacagctcagtgcatgtttgctgctctaaaagcaggcaaaattcagaacaagctgactgacctggagatacttgcattgctgattgctgcactaagccacgatttggatcaccgtggtgtgaataactcttacatacagcgaagtgaacatccacttgcccagctttactgccattcaatcatggaacaccatcattttgaccagtgcctgatgattcttaatagtccaggcaatcagattctcagtggcctctccattgaagaatataagaccacgttgaaaataatcaagcaagctattttagctacagacctagcactgtacattaagaggcgaggagaatttgtggaacttataagaaaaaatcaattcaatttggaagatcctcatcaaaaggagttgtttttggcaatgctgatgacagcttgtgatctttctgcaattacaaaaccctggcctattcaacaacggatagcagaacttgtagcaactgaattttttgatcaaggagacagagagagaaaagaactcaacatagaacccactgatctaatgaacagggagaagaaaaacaaaatcccaagtatgcaagttgggttcatagatgccatctgcttgcaactgtatgaggccctgacccacgtgtcagaggactgtttccctttgctagatggctgcagaaagaacaggcagaaatggcaggcccttgcagaacagcag

SEQ ID NO: 466 - protein, 326 aa, Artificial Sequence
  Description of Artificial Sequence: Synthetic Destabilizing Domain (DD)
EETRELQSLAAAVVPSAQTLKITDFSFSDFELSDLETALCTIRMFTDLNLVQNFQMKHEVLCRWILSVKKNYRKNVAYHNWRHAFNTAQCMFAALKAGKIQNKLTDLEILALLIAALSHDLDHRGVNNSYIQRSEHPLAQLYCHSIMEHHHFDQCLMILNSPGNQILSGLSIEEYKTTLKIIKQAILATDLALYIKRRGEFIELIRKNQFNLEDPHQKELFLAMLMTACDLSAITKPWPIQQRIAELVATEFFDQGDRERKELNIEPTDLMNREKKNKIPSMQVGFIDAICLQLYEALTHVSEDCFPLLDGCRKNRQKWQALAEQQ

SEQ ID NO: 467 - DNA, 978 bp, Artificial Sequence
  Description of Artificial Sequence: Synthetic Destabilizing Domain (DD)
gaagaaacaagagagctacagtcgttagcggctgctgtggtgccatctgcccagacccttaaaattactgactttagcttcagtgactttgagctgtctgatctggaaacagcactgtgtacaattcggatgtttactgacctcaaccttgtgcagaacttccagatgaaacatgaggttctttgcagatggattttaagtgttaagaagaattatcggaagaatgttgcctatcataattggagacatgcctttaatacagctcagtgcatgtttgctgctctaaaagcaggcaaaattcagaacaagctgactgacctggagatacttgcattgctgattgctgcactaagccacgatttggatcaccgtggtgtgaataactcttacatacagcgaagtgaacatccacttgcccagctttactgccattcaatcatggaacaccatcattttgaccagtgcctgatgattcttaatagtccaggcaatcagattctcagtggcctctccattgaagaatataagaccacgttgaaaataatcaagcaagctattttagctacagacctagcactgtacattaagaggcgaggagaatttattgaacttataagaaaaaatcaattcaatttggaagatcctcatcaaaaggagttgtttttggcaatgctgatgacagcttgtgatctttctgcaattacaaaaccctggcctattcaacaacggatagcagaacttgtagcaactgaattttttgatcaaggagacagagagagaaaagaactcaacatagaacccactgatctaatgaacagggagaagaaaaacaaaatcccaagtatgcaagttgggttcatagatgccatctgcttgcaactgtatgaggccctgacccacgtgtcagaggactgtttccctttgctagatggctgcagaaagaacaggcagaaatggcaggcccttgcagaacagcag

SEQ ID NO: 468 - protein, 326 aa, Artificial Sequence
  Description of Artificial Sequence: Synthetic Destabilizing Domain (DD)
EETRELQSLAAAVVPSAQTLKITDFSFSDFELSDLETALCTIRMFTDLNLVQNFQMKHEVLCRWILSVKKNYRKNVAYHNWRHAFNTAQCMFAALKAGKIQNKLTDLEILALLIAALSHDLDHRGVNNSYIQRSEHPLAQLYCHSIMEHHHFDQCLMILNSPGNQILSGLSIEEYKTTLKIIKQAILATDLALYIKRRGEFCELIRKNQFNLEDPHQKELFLAMLMTACDLSAITKPWPIQQRIAELVATEFFDQGDRERKELNIEPTDLMNREKKNKIPSMQVGFIDAICLQLYEALTHVSEDCFPLLDGCRKNRQKWQALAEQQ

SEQ ID NO: 469 - DNA, 978 bp, Artificial Sequence
  Description of Artificial Sequence: Synthetic Destabilizing Domain (DD)
gaagaaacaagagagctacagtcgttagcggctgctgtggtgccatctgcccagacccttaaaattactgactttagcttcagtgactttgagctgtctgatctggaaacagcactgtgtacaattcggatgtttactgacctcaaccttgtgcagaacttccagatgaaacatgaggttctttgcagatggattttaagtgttaagaagaattatcggaagaatgttgcctatcataattggagacatgcctttaatacagctcagtgcatgtttgctgctctaaaagcaggcaaaattcagaacaagctgactgacctggagatacttgcattgctgattgctgcactaagccacgatttggatcaccgtggtgtgaataactcttacatacagcgaagtgaacatccacttgcccagctttactgccattcaatcatggaacaccatcattttgaccagtgcctgatgattcttaatagtccaggcaatcagattctcagtggcctctccattgaagaatataagaccacgttgaaaataatcaagcaagctattttagctacagacctagcactgtacattaagaggcgaggagaattttgcgaacttataagaaaaaatcaattcaatttggaagatcctcatcaaaaggagttgtttttggcaatgctgatgacagcttgtgatctttctgcaattacaaaaccctggcctattcaacaacggatagcagaacttgtagcaactgaattttttgatcaaggagacagagagagaaaagaactcaacatagaacccactgatctaatgaacagggagaagaaaaacaaaatcccaagtatgcaagttgggttcatagatgccatctgcttgcaactgtatgaggccctgacccacgtgtcagaggactgtttccctttgctagatggctgcagaaagaacaggcagaaatggcaggcccttgcagaacagcag

SEQ ID NO: 470 - protein, 326 aa, Artificial Sequence
  Description of Artificial Sequence: Synthetic Destabilizing Domain (DD)
EETRELQSLAAAVVPSAQTLKITDFSFSDFELSDLETALCTIRMFTDLNLVQNFQMKHEVLCRWILSVKKNYRKNVAYHNWRHAFNTAQCMFAALKAGKIQNKLTDLEILALLIAALSHDLDHRGVNNSYIQRSEHPLAQLYCHSIMEHHHFDQCLMILNSPGNQILSGLSIEEYKTTLKIIKQAILATDLALYIKRRGEFYELIRKNQFNLEDPHQKELFLAMLMTACDLSAITKPWPIQQRIAELVATEFFDQGDRERKELNIEPTDLMNREKKNKIPSMQVGFIDAICLQLYEALTHVSEDCFPLLDGCRKNRQKWQALAEQQ

SEQ ID NO: 471 - DNA, 978 bp, Artificial Sequence
  Description of Artificial Sequence: Synthetic Destabilizing Domain (DD)
gaagaaacaagagagctacagtcgttagcggctgctgtggtgccatctgcccagacccttaaaattactgactttagcttcagtgactttgagctgtctgatctggaaacagcactgtgtacaattcggatgtttactgacctcaaccttgtgcagaacttccagatgaaacatgaggttctttgcagatggattttaagtgttaagaagaattatcggaagaatgttgcctatcataattggagacatgcctttaatacagctcagtgcatgtttgctgctctaaaagcaggcaaaattcagaacaagctgactgacctggagatacttgcattgctgattgctgcactaagccacgatttggatcaccgtggtgtgaataactcttacatacagcgaagtgaacatccacttgcccagctttactgccattcaatcatggaacaccatcattttgaccagtgcctgatgattcttaatagtccaggcaatcagattctcagtggcctctccattgaagaatataagaccacgttgaaaataatcaagcaagctattttagctacagacctagcactgtacattaagaggcgaggagaattttatgaacttataagaaaaaatcaattcaatttggaagatcctcatcaaaaggagttgtttttggcaatgctgatgacagcttgtgatctttctgcaattacaaaaccctggcctattcaacaacggatagcagaacttgtagcaactgaattttttgatcaaggagacagagagagaaaagaactcaacatagaacccactgatctaatgaacagggagaagaaaaacaaaatcccaagtatgcaagttgggttcatagatgccatctgcttgcaactgtatgaggccctgacccacgtgtcagaggactgtttccctttgctagatggctgcagaaagaacaggcagaaatggcaggcccttgcagaacagcag

SEQ ID NO: 472 - protein, 326 aa, Artificial Sequence
  Description of Artificial Sequence: Synthetic Destabilizing Domain (DD)
EETRELQSLAAAVVPSAQTLKITDFSFSDFELSDLETALCTIRMFTDLNLVQNFQMKHEVLCRWILSVKKNYRKNVAYHNWRHAFNTAQCMFAALKAGKIQNKLTDLEILALLIAALSHDLDHRGVNNSYIQRSEHPLAQLYCHSIMEHHHFDQCLMILNSPGNQILSGLSIEEYKTTLKIIKQAILATDLALYIKRRGEFHELIRKNQFNLEDPHQKELFLAMLMTACDLSAITKPWPIQQRIAELVATEFFDQGDRERKELNIEPTDLMNREKKNKIPSMQVGFIDAICLQLYEALTHVSEDCFPLLDGCRKNRQKWQALAEQQ

SEQ ID NO: 473 - DNA, 978 bp, Artificial Sequence
  Description of Artificial Sequence: Synthetic Destabilizing Domain (DD)
gaagaaacaagagagctacagtcgttagcggctgctgtggtgccatctgcccagacccttaaaattactgactttagcttcagtgactttgagctgtctgatctggaaacagcactgtgtacaattcggatgtttactgacctcaaccttgtgcagaacttccagatgaaacatgaggttctttgcagatggattttaagtgttaagaagaattatcggaagaatgttgcctatcataattggagacatgcctttaatacagctcagtgcatgtttgctgctctaaaagcaggcaaaattcagaacaagctgactgacctggagatacttgcattgctgattgctgcactaagccacgatttggatcaccgtggtgtgaataactcttacatacagcgaagtgaacatccacttgcccagctttactgccattcaatcatggaacaccatcattttgaccagtgcctgatgattcttaatagtccaggcaatcagattctcagtggcctctccattgaagaatataagaccacgttgaaaataatcaagcaagctattttagctacagacctagcactgtacattaagaggcgaggagaatttcatgaacttataagaaaaaatcaattcaatttggaagatcctcatcaaaaggagttgtttttggcaatgctgatgacagcttgtgatctttctgcaattacaaaaccctggcctattcaacaacggatagcagaacttgtagcaactgaattttttgatcaaggagacagagagagaaaagaactcaacatagaacccactgatctaatgaacagggagaagaaaaacaaaatcccaagtatgcaagttgggttcatagatgccatctgcttgcaactgtatgaggccctgacccacgtgtcagaggactgtttccctttgctagatggctgcagaaagaacaggcagaaatggcaggcccttgcagaacagcag

SEQ ID NO: 474 - protein, 326 aa, Artificial Sequence
  Description of Artificial Sequence: Synthetic Destabilizing Domain (DD)
EETRELQSLAAAVVPSAQTLKITDFSFSDFELSDLETALCTIRMFTDLNLVQNFQMKHEVLCRWILSVKKNYRKNVAYHNWRHAFNTAQCMFAALKAGKIQNKLTDLEILALLIAALSHDLDHRGVNNSYIQRSEHPLAQLYCHSIMEHHHFDQCLMILNSPGNQILSGLSIEEYKTTLKIIKQAILATDLALYIKRRGEFNELIRKNQFNLEDPHQKELFLAMLMTACDLSAITKPWPIQQRIAELVATEFFDQGDRERKELNIEPTDLMNREKKNKIPSMQVGFIDAICLQLYEALTHVSEDCFPLLDGCRKNRQKWQALAEQQ

SEQ ID NO: 475 - DNA, 978 bp, Artificial Sequence
  Description of Artificial Sequence: Synthetic Destabilizing Domain (DD)
gaagaaacaagagagctacagtcgttagcggctgctgtggtgccatctgcccagacccttaaaattactgactttagcttcagtgactttgagctgtctgatctggaaacagcactgtgtacaattcggatgtttactgacctcaaccttgtgcagaacttccagatgaaacatgaggttctttgcagatggattttaagtgttaagaagaattatcggaagaatgttgcctatcataattggagacatgcctttaatacagctcagtgcatgtttgctgctctaaaagcaggcaaaattcagaacaagctgactgacctggagatacttgcattgctgattgctgcactaagccacgatttggatcaccgtggtgtgaataactcttacatacagcgaagtgaacatccacttgcccagctttactgccattcaatcatggaacaccatcattttgaccagtgcctgatgattcttaatagtccaggcaatcagattctcagtggcctctccattgaagaatataagaccacgttgaaaataatcaagcaagctattttagctacagacctagcactgtacattaagaggcgaggagaatttaacgaacttataagaaaaaatcaattcaatttggaagatcctcatcaaaaggagttgtttttggcaatgctgatgacagcttgtgatctttctgcaattacaaaaccctggcctattcaacaacggatagcagaacttgtagcaactgaattttttgatcaaggagacagagagagaaaagaactcaacatagaacccactgatctaatgaacagggagaagaaaaacaaaatcccaagtatgcaagttgggttcatagatgccatctgcttgcaactgtatgaggccctgacccacgtgtcagaggactgtttccctttgctagatggctgcagaaagaacaggcagaaatggcaggcccttgcagaacagcag

SEQ ID NO: 476 - protein, 326 aa, Artificial Sequence
  Description of Artificial Sequence: Synthetic Destabilizing Domain (DD)
EETRELQSLAAAVVPSAQTLKITDFSFSDFELSDLETALCTIRMFTDLNLVQNFQMKHEVLCRWILSVKKNYRKNVAYHNWRHAFNTAQCMFAALKAGKIQNKLTDLEILALLIAALSHDLDHRGVNNSYIQRSEHPLAQLYCHSIMEHHHFDQCLMILNSPGNQILSGLSIEEYKTTLKIIKQAILATDLALYIKRRGEFDELIRKNQFNLEDPHQKELFLAMLMTACDLSAITKPWPIQQRIAELVATEFFDQGDRERKELNIEPTDLMNREKKNKIPSMQVGFIDAICLQLYEALTHVSEDCFPLLDGCRKNRQKWQALAEQQ

SEQ ID NO: 477 - DNA, 978 bp, Artificial Sequence
  Description of Artificial Sequence: Synthetic Destabilizing Domain (DD)
gaagaaacaagagagctacagtcgttagcggctgctgtggtgccatctgcccagacccttaaaattactgactttagcttcagtgactttgagctgtctgatctggaaacagcactgtgtacaattcggatgtttactgacctcaaccttgtgcagaacttccagatgaaacatgaggttctttgcagatggattttaagtgttaagaagaattatcggaagaatgttgcctatcataattggagacatgcctttaatacagctcagtgcatgtttgctgctctaaaagcaggcaaaattcagaacaagctgactgacctggagatacttgcattgctgattgctgcactaagccacgatttggatcaccgtggtgtgaataactcttacatacagcgaagtgaacatccacttgcccagctttactgccattcaatcatggaacaccatcattttgaccagtgcctgatgattcttaatagtccaggcaatcagattctcagtggcctctccattgaagaatataagaccacgttgaaaataatcaagcaagctattttagctacagacctagcactgtacattaagaggcgaggagaatttgatgaacttataagaaaaaatcaattcaatttggaagatcctcatcaaaaggagttgtttttggcaatgctgatgacagcttgtgatctttctgcaattacaaaaccctggcctattcaacaacggatagcagaacttgtagcaactgaattttttgatcaaggagacagagagagaaaagaactcaacatagaacccactgatctaatgaacagggagaagaaaaacaaaatcccaagtatgcaagttgggttcatagatgccatctgcttgcaactgtatgaggccctgacccacgtgtcagaggactgtttccctttgctagatggctgcagaaagaacaggcagaaatggcaggcccttgcagaacagcag

SEQ ID NO: 478 - protein, 326 aa, Artificial Sequence
  Description of Artificial Sequence: Synthetic Destabilizing Domain (DD)
EETRELQSLAAAVVPSAQTLKITDFSFSDFELSDLETALCTIRMFTDLNLVQNFQMKHEVLCRWILSVKKNYRKNVAYHNWRHAFNTAQCMFAALKAGKIQNKLTDLEILALLIAALSHDLDHRGVNNSYIQRSEHPLAQLYCHSIMEHHHFDQCLMILNSPGNQILSGLSIEEYKTTLKIIKQAILATDLALYIKRRGEFTELIRKNQFNLEDPHQKELFLAMLMTACDLSAITKPWPIQQRIAELVATEFFDQGDRERKELNIEPTDLMNREKKNKIPSMQVGFIDAICLQLYEALTHVSEDCFPLLDGCRKNRQKWQALAEQQ

SEQ ID NO: 479 - DNA, 978 bp, Artificial Sequence
  Description of Artificial Sequence: Synthetic Destabilizing Domain (DD)
gaagaaacaagagagctacagtcgttagcggctgctgtggtgccatctgcccagacccttaaaattactgactttagcttcagtgactttgagctgtctgatctggaaacagcactgtgtacaattcggatgtttactgacctcaaccttgtgcagaacttccagatgaaacatgaggttctttgcagatggattttaagtgttaagaagaattatcggaagaatgttgcctatcataattggagacatgcctttaatacagctcagtgcatgtttgctgctctaaaagcaggcaaaattcagaacaagctgactgacctggagatacttgcattgctgattgctgcactaagccacgatttggatcaccgtggtgtgaataactcttacatacagcgaagtgaacatccacttgcccagctttactgccattcaatcatggaacaccatcattttgaccagtgcctgatgattcttaatagtccaggcaatcagattctcagtggcctctccattgaagaatataagaccacgttgaaaataatcaagcaagctattttagctacagacctagcactgtacattaagaggcgaggagaatttaccgaacttataagaaaaaatcaattcaatttggaagatcctcatcaaaaggagttgtttttggcaatgctgatgacagcttgtgatctttctgcaattacaaaaccctggcctattcaacaacggatagcagaacttgtagcaactgaattttttgatcaaggagacagagagagaaaagaactcaacatagaacccactgatctaatgaacagggagaagaaaaacaaaatcccaagtatgcaagttgggttcatagatgccatctgcttgcaactgtatgaggccctgacccacgtgtcagaggactgtttccctttgctagatggctgcagaaagaacaggcagaaatggcaggcccttgcagaacagcag

SEQ ID NO: 480 - protein, 326 aa, Artificial Sequence
  Description of Artificial Sequence: Synthetic Destabilizing Domain (DD)
EETRELQSLAAAVVPSAQTLKITDFSFSDFELSDLETALCTIRMFTDLNLVQNFQMKHEVLCRWILSVKKNYRKNVAYHNWRHAFNTAQCMFAALKAGKIQNKLTDLEILALLIAALSHDLDHRGVNNSYIQRSEHPLAQLYCHSSMEHHHFDQCLMILNSPGNQILSGLSIEEYKTTLKIIKQAILATDLALYIKRRGEFFELIRKNQFNLEDPHQKELFLAMLMTACDLSAITKPWPIQQRIAELVATEFFDQGDRERKELNIEPTDLMNREKKNKIPSMQVGFIDAICLQLYEALTHVSEDCFPLLDGCRKNRQKWQALAEQQ

SEQ ID NO: 481 - DNA, 978 bp, Artificial Sequence
  Description of Artificial Sequence: Synthetic Destabilizing Domain (DD)
gaagaaacaagagagctacagtcgttagcggctgctgtggtgccatctgcccagacccttaaaattactgactttagcttcagtgactttgagctgtctgatctggaaacagcactgtgtacaattcggatgtttactgacctcaaccttgtgcagaacttccagatgaaacatgaggttctttgcagatggattttaagtgttaagaagaattatcggaagaatgttgcctatcataattggagacatgcctttaatacagctcagtgcatgtttgctgctctaaaagcaggcaaaattcagaacaagctgactgacctggagatacttgcattgctgattgctgcactaagccacgatttggatcaccgtggtgtgaataactcttacatacagcgaagtgaacatccacttgcccagctttactgccattcaagcatggaacaccaccattttgaccagtgcctgatgattcttaatagtccaggcaatcagattctcagtggcctctccattgaagaatataagaccacgttgaaaataatcaagcaagctattttagctacagacctagcactgtacattaagaggcgaggagaattttttgaacttataagaaaaaatcaattcaatttggaagatcctcatcaaaaggagttgtttttggcaatgctgatgacagcttgtgatctttctgcaattacaaaaccctggcctattcaacaacggatagcagaacttgtagcaactgaattttttgatcaaggagacagagagagaaaagaactcaacatagaacccactgatctaatgaacagggagaagaaaaacaaaatcccaagtatgcaagttgggttcatagatgccatctgcttgcaactgtatgaggccctgacccacgtgtcagaggactgtttccctttgctagatggctgcagaaagaacaggcagaaatggcaggcccttgcagaacagcag

SEQ ID NO: 482 - protein, 326 aa, Artificial Sequence
  Description of Artificial Sequence: Synthetic Destabilizing Domain (DD)
EETRELQSLAAAVVPSAQTLKITDFSFSDFELSDLETALCTIRMFTDLNLVQNFQMKHEVLCRWILSVKKNYRKNVTYHNWRHAFNTAQCMFAALKAGKIQNKLTDLEILALLIAALSHDLDHRGVNNSYIQRSEHPLAQLYCHSIMEHHHFDQCLMILNSPGNQILSGLSIEEYKTTLKIIKQAILATDLALYIKRRGEFFELIRKNQFNLEDPHQKELFLAMLMTACDLSAITKPWPIQQRIAELVATEFFDQGDRERKELNIEPTDLMNREKKNKIPSMQVGFIDAICLQLYEALTHVSEDCFPLLDGCRKNRQKWQALAEQQ

SEQ ID NO: 483 - DNA, 978 bp, Artificial Sequence
  Description of Artificial Sequence: Synthetic Destabilizing Domain (DD)
gaagaaacaagagaactacagtcgttagcggctgctgtggtgccatctgcccagacccttaaaattactgactttagcttcagtgactttgagctgtctgatctggaaacagcactgtgtacaattcggatgtttactgacctcaaccttgtgcagaacttccagatgaaacatgaggttctttgcagatggattttaagtgttaagaagaattatcggaagaatgttacctatcataattggagacatgcctttaatacagctcagtgcatgtttgctgctctaaaagcaggcaaaattcagaacaagctgactgacctggagatacttgcattgctgattgctgcactaagccacgatttggatcaccgtggtgtgaataactcttacatacagcgaagtgaacatccacttgcccagctttactgccattcaatcatggaacaccatcattttgaccagtgcctgatgattcttaatagtccaggcaatcagattctcagtggcctctccattgaagaatataagaccacgttgaaaataatcaagcaagctattttagctacagacctagcactgtacattaagaggcgaggagaattttttgaacttataagaaaaaatcaattcaatttggaagatcctcatcaaaaggagttgtttttggcaatgctgatgacagcttgtgatctttctgcaattacaaaaccctggcctattcaacaacggatagcagaacttgtagcaactgaattttttgatcaaggagacagagagagaaaagaactcaacatagaacccactgatctaatgaacagggagaagaaaaacaaaatcccaagtatgcaagttgggttcatagatgccatctgcttgcaactgtatgaggccctgacccacgtgtcagaggactgtttccctttgctagatggctgcagaaagaacaggcagaaatggcaggcccttgcagaacagcag

SEQ ID NO: 484 - protein, 326 aa, Artificial Sequence
  Description of Artificial Sequence: Synthetic Destabilizing Domain (DD)
EETRELQSLAAAVVPSAQTLKITDFSFSDFELSDLETALCTIRMFTDLNLVQNFQMKHEVLCRWILSVKKNYRKNVAYHNWRHAFNTAQCMFAALKAGKIQNKLTDLEILALLIAALSHDLDHRGVNNSYIQRSEHPLAQLYCHSIMEHHHFDQCLMILNSPGNQILSGLSIEEYKTTLKIIKQAILATDLALYIKRRGEFFELIRKNQFNLEDPHQKELFLAMLMTACDLSANTKPWPIQQRIAELVATEFFDQGDRERKELNIEPTDLMNREKKNKIPSMQVGFIDAICLQLYEALTHVSEDCFPLLDGCRKNRQKWQALAEQQ

SEQ ID NO: 485 - DNA, 978 bp, Artificial Sequence
  Description of Artificial Sequence: Synthetic Destabilizing Domain (DD)
gaagaaacaagagagctacagtcgttagcggctgctgtggtgccatctgcccagacccttaaaattactgactttagcttcagtgactttgagctgtctgatctggaaacagcactgtgtacaattcggatgtttactgacctcaaccttgtgcagaacttccagatgaaacatgaggttctttgcagatggattttaagtgttaagaagaattatcggaagaatgttgcctatcataattggagacatgcctttaatacagctcagtgcatgtttgctgctctaaaagcaggcaaaattcagaacaagctgactgacctggagatacttgcattgctgattgctgcactaagccacgatttggatcaccgtggtgtgaataactcttacatacagcgaagtgaacatccacttgcccagctttactgccattcaatcatggaacaccatcattttgaccagtgcctgatgattcttaatagtccaggcaatcagattctcagtggcctctccattgaagaatataagaccacgttgaaaataatcaagcaagctattttagctacagacctagcactgtacattaagaggcgaggagaattttttgaacttataagaaaaaatcaattcaatttggaagatcctcatcaaaaggagttgtttttggcaatgctgatgacagcttgtgatctttctgcaaatacaaaaccctggcctattcaacaacggatagcagaacttgtagcaactgaattttttgatcaaggagacagagagagaaaagaactcaacatagaacccactgatctaatgaacagggagaagaaaaacaaaatcccaagtatgcaagttgggttcatagatgccatctgcttgcaactgtatgaggccctgacccacgtgtcagaggactgtttccctttgctagatggctgcagaaagaacaggcagaaatggcaggcccttgcagaacagcag

SEQ ID NO: 486 - protein, 326 aa, Artificial Sequence
  Description of Artificial Sequence: Synthetic Destabilizing Domain (DD)
EETRELQSLAAAVVPSAQTLKITDFSFSDFELSDLETALCTIRMFTDLNLVQNFQMKHEVLCRWILSVKKNYWKNVAYHNWRHAFNTAQCMFAALKAGKIQNKLTDLEILALLIAALSHDLDHRGVNNSYIQRSEHPLAQLYCHSIMEHHHFDQCLMILNSPGNQILSGLSIEEYKTTLKIIKQAILATDLALYIKRRGEFFELIRKNQFNLEDPHQKELFLAMLMTACDLSAITKPWPIQQRIAELVATEFFDQGDRERKELNIEPTDLMNREKKNKIPSMQVGFIDAICLQLYEALTHVSEDCFPLLDGCRKNRQKWQALAEQQ

SEQ ID NO: 487 - DNA, 978 bp, Artificial Sequence
  Description of Artificial Sequence: Synthetic Destabilizing Domain (DD)
gaagaaacaagagagctacagtcgttagcggctgctgtggtgccatctgcccagacccttaaaattactgactttagcttcagtgactttgagctgtctgatctggaaacagcactgtgtacaattcggatgtttactgacctcaaccttgtgcagaacttccagatgaaacatgaggttctttgcagatggattttaagtgttaagaagaattattggaagaatgttgcctatcataattggagacatgcctttaatacagctcagtgcatgtttgctgctctaaaagcaggcaaaattcagaacaagctgactgacctggagatacttgcattgctgattgctgcactaagccacgatttggatcaccgtggtgtgaataactcttacatacagcgaagtgaacatccacttgcccagctttactgccattcaatcatggaacaccatcattttgaccagtgcctgatgattcttaatagtccaggcaatcagattctcagtggcctctccattgaagaatataagaccacgttgaaaataatcaagcaagctattttagctacagacctagcactgtacattaagaggcgaggagaattttttgaacttataagaaaaaatcaattcaatttggaagatcctcatcaaaaggagttgtttttggcaatgctgatgacagcttgtgatctttctgcaattacaaaaccctggcctattcaacaacggatagcagaacttgtagcaactgaattttttgatcaaggagacagagagagaaaagaactcaacatagaacccacagatctaatgaacagggagaagaaaaacaaaatcccaagtatgcaagttgggttcatagatgccatctgcttgcaactgtatgaggccctgacccacgtgtcagaggactgtttccctttgctagatggctgcagaaagaacaggcagaaatggcaggcccttgcagaacagcag

SEQ ID NO: 488 - protein, 326 aa, Artificial Sequence
  Description of Artificial Sequence: Synthetic Destabilizing Domain (DD)
EETRELQSLAAAVVPSAQTLKITDFSFSDFELSDLETALCTIRMFTDLNLVQNFQMKHEVLCRWILSVKKNYRKNVAYHNWRHAFSTAQCMFAALKAGKIQNKLTDLEILALLIAALSHDLDHRGVNNSYIQRSEHPLAQLYCHSIMEHHHFDQCLMILNSPGNQILSGLSIEEYKTTLKIIKQAILATDLALYIKRRGEFFELIRKNQFNLEDPHQKELFLAMLMTACDLSAITKPWPIQQRIAELVATEFFDQGDRERKELNIEPTDLMNREKKNKIPSMQVGFIDAICLQLYEALTHVSEDCFPLLDGCRKNRQKWQALAEQQ

SEQ ID NO: 489 - DNA, 978 bp, Artificial Sequence
  Description of Artificial Sequence: Synthetic Destabilizing Domain (DD)
gaagaaacaagagagctacagtcgttagcggctgctgtggtgccatctgcccagacccttaaaattactgactttagcttcagtgactttgagctgtctgatctggaaacagcactgtgtacaattcggatgtttactgacctcaaccttgtgcagaacttccagatgaaacatgaggttctttgcagatggattttaagtgttaagaagaattatcggaagaatgttgcctatcataattggagacatgcctttagtacagctcagtgcatgtttgctgctctaaaagcaggcaaaattcagaacaagctgactgacctggagatacttgcattgctgattgctgcactaagccacgatttggatcaccgtggtgtgaataactcttacatacagcgaagtgaacatccacttgcccagctttactgccattcaatcatggaacaccatcattttgaccagtgcctgatgattcttaatagtccaggcaatcagattctcagtggcctctccattgaagaatataagaccacgttgaaaataatcaagcaagctattttagctacagacctagcactgtacattaagaggcgaggagaattttttgaacttataagaaaaaatcaattcaatttggaagatcctcatcaaaaggagttgtttttggcaatgctgatgacagcttgtgatctttctgcaattacaaaaccctggcctattcaacaacggatagcagaacttgtagcaactgaattttttgatcaaggagacagagagagaaaagaactcaacatagaacccactgatctaatgaacagggagaagaaaaacaaaatcccaagtatgcaagttgggttcatagatgccatctgcttgcaactgtatgaggccctgacccacgtgtcagaggactgtttccctttgctagatggctgcagaaagaacaggcagaaatggcaggcccttgcagaacagcag

SEQ ID NO: 490 - protein, 326 aa, Artificial Sequence
  Description of Artificial Sequence: Synthetic Destabilizing Domain (DD)
EETRELQSLAAAVVPSAQTLKITDFSFSDFELSDLETALYTIRMFTDLNLVQNFQMKHEVLCRWILSVKKNYRKNVAYHNWRHAFNTAQCMFAALKAGKIQNKLTDLEILALLIAALSHDLDHRGVNNSYIQRSEHPLAQLYCHSIMEHHHFDQCLMILNSPGNQILSGLSIEEYKTTLKIIKQAILATDLALYIKRRGEFFELIRKNQFNLEDPHQKELFLAMLMTACDLSAITKPWPIQQRIAELVATEFFDQGDRERKELNIEPTDLMNREKKNKIPSMQVGFIDAICLQLYEALTHVSEDCFPLLDGCRKNRQKWQALAEQQ

SEQ ID NO: 491 - DNA, 978 bp, Artificial Sequence
  Description of Artificial Sequence: Synthetic Destabilizing Domain (DD)
gaagaaacaagagagctacagtcgttagcggctgctgtggtgccatctgcccagacccttaaaattactgactttagcttcagtgactttgagctgtctgatctggaaacagcactgtatacaattcggatgtttactgacctcaaccttgtgcagaacttccagatgaaacatgaggttctttgcagatggattttaagtgttaagaagaattatcggaagaatgttgcctatcataattggagacatgcctttaatacagctcagtgcatgtttgctgctctaaaagcaggcaaaattcagaacaagctgactgacctggagatacttgcattgctgattgctgcactaagccacgatttggatcaccgtggtgtgaataactcttacatacagcgaagtgaacatccacttgcccagctttactgccattcaatcatggaacaccatcattttgaccagtgcctgatgattcttaatagtccaggcaatcagattctcagtggcctctccattgaagaatataagaccacgttgaaaataatcaagcaagctattttagctacagacctagcactgtacattaagaggcgaggagaattttttgaacttataagaaaaaatcaattcaatttggaagatcctcatcaaaaggagttgtttttggcaatgctgatgacagcttgtgatctttctgcaattacaaaaccctggcctattcaacaacggatagcagaacttgtagcaactgaattttttgatcaaggagacagagagagaaaagaactcaacatagaacccactgatctaatgaacagggagaagaaaaacaaaatcccaagtatgcaagttgggttcatagatgccatctgcttgcaactgtatgaggccctgacccacgtgtcagaggactgtttccctttgctagatggctgcagaaagaacaggcagaaatggcaggcccttgcagaacagcag

SEQ ID NO: 492 - protein, 326 aa, Artificial Sequence
  Description of Artificial Sequence: Synthetic Destabilizing Domain (DD)
EETRELQSLAAAVVPSAQTLKITDFSFSDFELSDLETALCTIRMFTDLNLVQNFQMKHEVLCRWILSVKKNYRKNVAYRNWRHAFNTAQCMFAALKAGKIQNKLTDLEILALLIAALSHDLDHRGVNNSYIQRSEHPLAQLYCHSIMEHHHFDQCLMILNSPGNQILSGLSIEEYKTTLKIIKQAILATDLALYIKRRGEFFELIRKNQFNLEDPHQKELFLAMLMTACDLSAITKPWPIQQRIAELVATEFFDQGDRERKELNIEPTDLMNREKKNKIPSMQVGFIDAICLQLYEALTHVSEDCFPLLDGCRKNRQKWQALAEQQ

SEQ ID NO: 493 - DNA, 978 bp, Artificial Sequence
  Description of Artificial Sequence: Synthetic Destabilizing Domain (DD)
gaagaaacaagagagctacagtcgttagcggctgctgtggtgccatctgcccagacccttaaaattactgactttagcttcagtgactttgagctgtctgatctggaaacagcactgtgtacaattcggatgtttactgacctcaaccttgtgcagaacttccagatgaaacatgaggttctttgcagatggattttaagtgttaagaagaattatcggaagaatgttgcctatcgtaattggagacatgcctttaatacagctcagtgcatgtttgctgctctaaaagcaggcaaaattcagaacaagctgactgacctggagatacttgcattgctgattgctgcactaagccacgatttggatcaccgtggtgtgaataactcttacatacagcgaagtgaacatccacttgcccagctttactgccattcaatcatggaacaccatcattttgaccagtgcctgatgattcttaatagtccaggcaatcagattctcagtggcctctccattgaagaatataagaccacgttgaaaataatcaagcaagctattttagctacagacctagcactgtacattaagaggcgaggggaattttttgaacttataagaaaaaatcaattcaatttggaagatcctcatcaaaaggagttgtttttggcaatgctgatgacagcttgtgatctttctgcaattacaaaaccctggcctattcaacaacggatagcagaacttgtagcaactgaattttttgatcaaggagacagagagagaaaagaactcaacatagaacccactgatctaatgaacagggagaagaaaaacaaaatcccaagtatgcaagttgggttcatagatgccatctgcttgcaactgtatgaggccctgacccacgtgtcagaggactgtttccctttgctagatggctgcagaaagaacaggcagaaatggcaggcccttgcagaacagcag

SEQ ID NO: 494 - protein, 326 aa, Artificial Sequence
  Description of Artificial Sequence: Synthetic Destabilizing Domain (DD)
EETRELQSLAAAVVPSAQTLKITDFSFSDFELSDLETALCTIRMFTDLNLVQNFQMKHEVLCRWILSVKKNYRKNVAYHNWRHAFNTAQCMFAALKAGKIQNKLTDLEILALLIAALSHDLDHRGVNNSYIQRSEHPLAQLYCHSIMEHHHFDQCLMILNSPGNQILSGLSIEEYKTTLKIIKQAILATDLALYIKRRGEFFELIRKNQFNLEDPHQKELFLAMLMTACDLSAITKPWPIQQRIAELVATEFFDQGDRERNELNIEPTDLMNREKKNKIPSMQVGFIDAICLQLYEALTHVSEDCFPLLDGCRKNRQKWQALAEQQ

SEQ ID NO: 495 - DNA, 978 bp, Artificial Sequence
  Description of Artificial Sequence: Synthetic Destabilizing Domain (DD)
gaagaaacaagagagctacagtcgttagcggctgctgtggtgccatctgcccagacccttaaaattactgactttagcttcagtgactttgagctgtctgatctggaaacagcactgtgtacaattcggatgtttactgacctcaaccttgtgcagaacttccagatgaaacatgaggttctttgcagatggattttaagtgttaagaagaattatcggaagaatgttgcctatcataattggagacatgcctttaatacagctcagtgcatgtttgctgctctaaaagcaggcaaaattcagaacaagctgactgacctggagatacttgcattgctgattgctgcactaagccacgatttggatcaccgtggtgtgaataactcttacatacagcgaagtgaacatccacttgcccagctttactgccattcaatcatggaacaccatcattttgaccagtgcctgatgattcttaatagtccaggcaatcagattctcagtggcctctccattgaagaatataagaccacgttgaaaataatcaagcaagctattttagctacagacctagcactgtacattaagaggcgaggagaattttttgaacttataagaaaaaatcaattcaatttggaagatcctcatcaaaaggagttgtttttggcaatgctgatgacagcttgtgatctttctgcaattacaaaaccctggcctattcaacaacggatagcagaacttgtagcaactgaattttttgatcaaggagacagagagagaaacgaactcaacatagaacccactgatctaatgaacagggagaagaaaaacaaaatcccaagtatgcaagttgggttcatagatgccatctgcttgcaactgtatgaggccctgacccacgtgtcagaggactgtttccctttgctagatggctgcagaaagaacaggcagaaatggcaggcccttgcagaacagcag

SEQ ID NO: 496 - protein, 326 aa, Artificial Sequence
  Description of Artificial Sequence: Synthetic Destabilizing Domain (DD)
EETRELQSLAAAVVPSAQTLKITDFSFSDFELSDLETALCTIRMFTDLNLVQNFQMKHEVLCRWILSVKKDYRKNVAYHNWRHAFNTAQCMFAALKAGKIQNKLTDLEILALLIAALSHDLDHRGVNNSYIQRSEHPLAQLYCHSIMEHHHFDQCLMILNSPGNQILSGLSIEEYKTTLKIIKQAILATDLALYIKRRGEFFELIRKNQFNLEDPHQKELFLAMLMTACDLSAITKPWPIQQRIAELVATEFFDQGDRERKELNIEPTDLMNREKKNKIPSMQVGFIDAICLQLYEALTHVSEDCFPLLDGCRKNRQKWQALAEQQ

SEQ ID NO: 497 - DNA, 978 bp, Artificial Sequence
  Description of Artificial Sequence: Synthetic Destabilizing Domain (DD)
gaagaaacaagagagctacagtcgttagcggctgctgtggtgccatctgcccagacccttaaaattactgactttagcttcagtgactttgagctgtctgatctggaaacagcactgtgtacaattcggatgtttactgacctcaaccttgtgcagaacttccagatgaaacatgaggttctttgcagatggattttaagtgttaagaaggattatcggaagaatgttgcctatcataattggagacatgcctttaatacagctcagtgcatgtttgctgctctaaaagcaggcaaaattcagaacaagctgactgacctggagatacttgcattgctgattgctgcactaagccacgatttggatcaccgtggtgtgaataactcttacatacagcgaagtgaacatccacttgcccagctttactgccattcaatcatggaacaccatcattttgaccagtgcctgatgattcttaatagtccaggcaatcagattctcagtggcctctccattgaagaatataagaccacgttgaaaataatcaagcaagctattttagctacagacctagcactgtacattaagaggcgaggagaattttttgaacttataagaaaaaatcaattcaatttggaagatcctcatcaaaaggagttgtttttggcaatgctgatgacagcttgtgatctttctgcaattacaaaaccctggcctattcaacaacggatagcagaacttgtagcaactgaattttttgatcaaggagacagagagagaaaagaactcaacatagaacccactgatctaatgaacagggagaagaaaaacaaaatcccaagtatgcaagttgggttcatagatgccatctgcttgcaactgtatgaggccctgacccacgtgtcagaggactgtttccctttgctagatggctgcagaaagaacaggcagaaatggcaggcccttgcagaacagcag

SEQ ID NO: 498 - protein, 326 aa, Artificial Sequence
  Description of Artificial Sequence: Synthetic Destabilizing Domain (DD)
EETRELQSLAAAVVPSAQTLKITDFSFSDFELSDLETALCTIRMFTDLNLVQNFQMKHEVLCRWILSVKKNYRKNVAYHNWRHAFNTAQCMFAALKAGKIQNKLTDLEILALLIAALSHDLDHRGVNNSYIQRSEHPLAQLYCHSIMEHHHFDQCLMILNSPGNQILSGLSIEEYKTTLKIIKQAILATDLALYIKRRGEFFELIRKNQFNLEDPHQKELFLAMLMTACDLSAITKPWPIQQRIAELVATEFFDQGDRERKELNLEPTDLMNREKKNKIPSMQVGFIDAICLQLYEALTHVSEDCFPLLDGCRKNRQKWQALAEQQ

SEQ ID NO: 499 - DNA, 978 bp, Artificial Sequence
  Description of Artificial Sequence: Synthetic Destabilizing Domain (DD)
gaagaaacaagagagctacagtcgttagcggctgctgtggtgccatctgcccagacccttaaaattactgactttagcttcagtgactttgagctgtctgatctggaaacagcactgtgtacaattcggatgtttactgacctcaaccttgtgcagaacttccagatgaaacatgaggttctttgcagatggattttaagtgttaagaagaattatcggaagaatgttgcctatcataattggagacatgcctttaatacagctcagtgcatgtttgctgctctaaaagcaggcaaaattcagaacaagctgactgacctggagatacttgcattgctgattgctgcactaagccacgatttggatcaccgtggtgtgaataactcttacatacagcgaagtgaacatccacttgcccagctttactgccattcaatcatggaacaccatcattttgaccagtgcctgatgattcttaatagtccaggcaatcagattctcagtggcctctccattgaagaatataagaccacgttgaaaataatcaagcaagctattttagctacagacctagcactgtacattaagaggcgaggagaattttttgaacttataagaaaaaatcaattcaatttggaagatcctcatcaaaaggagttgtttttggcaatgctgatgacagcttgtgatctttctgcaattacaaaaccctggcctattcaacaacggatagcagaacttgtagcaactgaattttttgatcaaggagacagagagagaaaagaactcaacttagaacccactgatctaatgaacagggagaagaaaaacaaaatcccaagtatgcaagttgggttcatagatgccatctgcttgcaactgtatgaggccctgacccacgtgtcagaggactgtttccctttgctagatggctgcagaaagaacaggcagaaatggcaggcccttgcagaacagcag

SEQ ID NO: 500 - protein, 326 aa, Artificial Sequence
  Description of Artificial Sequence: Synthetic Destabilizing Domain (DD)
EETRELQSLAAAVVPSAQTLKITDFSFSDFELSDLETALCTIRMFTDLNLVQNFQMKHEVLCRWILSVKKNYQKNVAYHNWRHAFNTAQCMFAALKAGKIQNKLTDLEILALLIAALSHDLDHRGVNNSYIQRSEHPLAQLYCHSIMEHHHFDQCLMILNSPGNQILSGLSIEEYKTTLKIIKQAILATDLALYIKRRGEFFELIRKNQFNLEDPHQKELFLAMLMTACDLSAITKPWPIQQRIAELVATEFFDQGDRERKELNIEPTDLMNREKKNKIPSMQVGFIDAICLQLYEALTHVSEDCFPLLDGCRKNRQKWQALAEQQ

SEQ ID NO: 501 - DNA, 978 bp, Artificial Sequence
  Description of Artificial Sequence: Synthetic Destabilizing Domain (DD)
gaagaaacaagagagctacagtcgttagcggctgctgtggtgccatctgcccagacccttaaaattactgactttagcttcagtgactttgagctgtctgatctggaaacagcactgtgtacaattcggatgtttactgacctcaaccttgtgcagaacttccagatgaaacatgaggttctttgcagatggattttaagtgttaagaagaattatcagaagaatgttgcctatcataattggagacatgcctttaatacagctcagtgcatgtttgctgctctaaaagcaggcaaaattcagaacaagctgactgacctggagatacttgcattgctgattgctgcactaagccacgatttggatcaccgtggtgtgaataactcttacatacagcgaagtgaacatccacttgcccagctttactgccattcaatcatggaacaccatcattttgaccagtgcctgatgattcttaatagtccaggcaatcagattctcagtggcctctccattgaagaatataagaccacgttgaaaataatcaagcaagctattttagctacagacctagcactgtacattaagaggcgaggagaattttttgaacttataagaaaaaatcaattcaatttggaagatcctcatcaaaaggagttgtttttggcaatgctgatgacagcttgtgatctttctgcaattacaaaaccctggcctattcaacaacggatagcagaacttgtagcaactgaattttttgatcaaggagacagagagagaaaagaactcaacatagaacccactgatctaatgaacagggagaagaaaaacaaaatcccaagtatgcaagttgggttcatagatgccatctgcttgcaactgtatgaggccctgacccacgtgtcagaggactgtttccctttgctagatggctgcagaaagaacaggcagaaatggcaggcccttgcagaacagcag

SEQ ID NO: 502 - protein, 326 aa, Artificial Sequence
  Description of Artificial Sequence: Synthetic Destabilizing Domain (DD)
EETRELQSLAAAVVPSAQTLKITDFSFSDFELSDLETALCTIRMFTDLNLVQNFQMKHEVLCRWILSVKKNYRKNVAYHNWRHAFNTAQCMFAALKAGKIQNKLTDLEILALLIAALSHDLDHRGVNNSYIQRSEHPLAQLYCHSIMAHHHFDQCLMILNSPGNQILSGLSIEEYKTTLKIIKQAILATDLALYIKRRGEFFELIRKNQFNLEDPHQKELFLAMLMTACDLSAITKPWPIQQRIAELVATEFFDQGDRERKELNIEPTDLMNREKKNKIPSMQVGFIDAICLQLYEALTHVSEDCFPLLDGCRKNRQKWQALAEQQ

SEQ ID NO: 503 - DNA, 978 bp, Artificial Sequence
  Description of Artificial Sequence: Synthetic Destabilizing Domain (DD)
gaagaaacaagagagctacagtcgttagcggctgctgtggtgccatctgcccagacccttaaaattactgactttagcttcagtgactttgagctgtctgatctggaaacagcactgtgtacaattcggatgtttactgacctcaaccttgtgcagaacttccagatgaaacatgaggttctttgcagatggattttaagtgttaagaagaattatcggaagaatgttgcctatcataattggagacatgcctttaatacagctcagtgcatgtttgctgctctaaaagcaggcaaaattcagaacaagctgactgacctggagatacttgcattgctgattgctgcactaagccacgatttggatcaccgtggtgtgaataactcttacatacagcgaagtgaacatccacttgcccagctttactgccattcaatcatggcccaccatcattttgaccagtgcctgatgattcttaatagtccaggcaatcagattctcagtggcctctccattgaagaatataagaccacgttgaaaataatcaagcaagctattttagctacagacctagcactgtacattaagaggcgaggagaattttttgaacttataagaaaaaatcaattcaatttggaagatcctcatcaaaaggagttgtttttggcaatgctgatgacagcttgtgatctttctgcaattacaaaaccctggcctattcaacaacggatagcagaacttgtagcaactgaattttttgatcaaggagacagagagagaaaagaactcaacatagaacccactgatctaatgaacagggagaagaaaaacaaaatcccaagtatgcaagttgggttcatagatgccatctgcttgcaactgtatgaggccctgacccacgtgtcagaggactgtttccctttgctagatggctgcagaaagaacaggcagaaatggcaggcccttgcagaacagcag

SEQ ID NO: 504 - protein, 326 aa, Artificial Sequence
  Description of Artificial Sequence: Synthetic Destabilizing Domain (DD)
EETRELQSLAAAVVPSAQTLKITDFSFSDFELSDLETALCTIRMFTDLNLVQNFQMKHEVLCRWILSVKKNYRKNVAYHNWRHAFNTAQCMFAALKAGKIQNKLTDLEILALLIAALSHDLDHRGVNNSYIQRSEHPLAQLYCHSIMEHHHFDQCLMILNSPGNQILSGLSIEEYKTTLKIIKQAILATALALYIKRRGEFFELIRKNQFNLEDPHQKELFLAMLMTACDLSAITKPWPIQQRIAELVATEFFDQGDRERKELNIEPTDLMNREKKNKIPSMQVGFIDAICLQLYEALTHVSEDCFPLLDGCRKNRQKWQALAEQQ

SEQ ID NO: 505 - DNA, 978 bp, Artificial Sequence
  Description of Artificial Sequence: Synthetic Destabilizing Domain (DD)
gaagaaacaagagagctacagtcgttagcggctgctgtggtgccatctgcccagacccttaaaattactgactttagcttcagtgactttgagctgtctgatctggaaacagcactgtgtacaattcggatgtttactgacctcaaccttgtgcagaacttccagatgaaacatgaggttctttgcagatggattttaagtgttaagaagaattatcggaagaatgttgcctatcataattggagacatgcctttaatacagctcagtgcatgtttgctgctctaaaagcaggcaaaattcagaacaagctgactgacctggagatacttgcattgctgattgctgcactaagccacgatttggatcaccgtggtgtgaataactcttacatacagcgaagtgaacatccacttgcccagctttactgccattcaatcatggaacaccatcattttgaccagtgcctgatgattcttaatagtccaggcaatcagattctcagtggcctctccattgaagaatataagaccacgttgaaaataatcaagcaagctattttagctacagccctagcactgtacattaagaggcgaggagaattttttgaacttataagaaaaaatcaattcaatttggaagatcctcatcaaaaggagttgtttttggcaatgctgatgacagcttgtgatctttctgcaattacaaaaccctggcctattcaacaacggatagcagaacttgtagcaactgaattttttgatcaaggagacagagagagaaaagaactcaacatagaacccactgatctaatgaacagggagaagaaaaacaaaatcccaagtatgcaagttgggttcatagatgccatctgcttgcaactgtatgaggccctgacccacgtgtcagaggactgtttccctttgctagatggctgcagaaagaacaggcagaaatggcaggcccttgcagaacagcag

SEQ ID NO: 506 - protein, 271 aa, Artificial Sequence
  Description of Artificial Sequence: Synthetic Destabilizing Domain (DD)
MKHEVLCRWILSVKKNYRKNVAYHNWRHAFNTAQCMFAALKAGKIQNKLTDLEILALLIAALSHDLDHRGVNNSYIQRSEHPLAQLYCHSIMEHHHFDQCLMILNSPGNQILSGLSIEEYKTTLKIIKQAILATDLALYIKRLGEFFELIRKNQFNLEDPHQKELFLAMLMTACDLSAITKPWPIQQRIAELVATEFFDQGDRERKELNIEPTDLMNREKKNKIPSMQVGFIDAICLQLYEALTHVSEDCFPLLDGCRKNRQKWQALAEQQ

SEQ ID NO: 507 - DNA, 813 bp, Artificial Sequence
  Description of Artificial Sequence: Synthetic Destabilizing Domain (DD)
atgaaacatgaggttctttgcagatggattttaagtgttaagaagaattatcggaagaatgttgcctatcataattggagacatgcctttaatacagctcagtgcatgtttgctgctctaaaagcaggcaaaattcagaacaagctgactgacctggagatacttgcattgctgattgctgcactaagccacgatttggatcaccgtggtgtgaataactcttacatacagcgaagtgaacatccacttgcccagctttactgccattcaatcatggaacaccatcattttgaccagtgcctgatgattcttaatagtccaggcaatcagattctcagtggcctctccattgaagaatataagaccacgttgaaaataatcaagcaagctattttagctacagacctagcactgtacattaagcggctaggagaattttttgaacttataagaaaaaatcaattcaatttggaagatcctcatcaaaaggagttgtttttggcaatgctgatgacagcttgtgatctttctgcaattacaaaaccctggcctattcaacaacggatagcagaacttgtagcaactgaattttttgatcaaggagacagagagagaaaagaactcaacatagaacccactgatctaatgaacagggagaagaaaaacaaaatcccaagtatgcaagttgggttcatagatgccatctgcttgcaactgtatgaggccctgacccacgtgtcagaggactgtttccctttgctagatggctgcagaaagaacaggcagaaatggcaggcccttgcagaacagcag

SEQ ID NO: 508 - protein, 294 aa, Artificial Sequence
  Description of Artificial Sequence: Synthetic Destabilizing Domain (DD)
SDLETALCTIRMFTDLNLVQNFQMKHEVLCRWILSVKKNYRKNVAYHNWRHAFNTAQCMFAALKAGKIQNKLTDLEILALLIAALSHDLDHRGVNNSYIQRSEHPLAQLYCHSIMEHHHFDQCLMILNSPGNQILSGLSIEEYKTTLKIIKQAILATDLALYIKRLGEFFELIRKNQFNLEDPHQKELFLAMLMTACDLSAITKPWPIQQRIAELVATEFFDQGDRERKELNIEPTDLMNREKKNKIPSMQVGFIDAICLQLYEALTHVSEDCFPLLDGCRKNRQKWQALAEQQ

SEQ ID NO: 509 - DNA, 882 bp, Artificial Sequence
  Description of Artificial Sequence: Synthetic Destabilizing Domain (DD)
agtgatctggaaacagcactgtgtacaattcggatgtttactgacctcaaccttgtgcagaacttccagatgaaacatgaggttctttgcagatggattttaagtgttaagaagaattatcggaagaatgttgcctatcataattggagacatgcctttaatacagctcagtgcatgtttgctgctctaaaagcaggcaaaattcagaacaagctgactgacctggagatacttgcattgctgattgctgcactaagccacgatttggatcaccgtggtgtgaataactcttacatacagcgaagtgaacatccacttgcccagctttactgccattcaatcatggaacaccatcattttgaccagtgcctgatgattcttaatagtccaggcaatcagattctcagtggcctctccattgaagaatataagaccacgttgaaaataatcaagcaagctattttagctacagacctagcactgtacattaagcggctaggagaattttttgaacttataagaaaaaatcaattcaatttggaagatcctcatcaaaaggagttgtttttggcaatgctgatgacagcttgtgatctttctgcaattacaaaaccctggcctattcaacaacggatagcagaacttgtagcaactgaattttttgatcaaggagacagagagagaaaagaactcaacatagaacccactgatctaatgaacagggagaagaaaaacaaaatcccaagtatgcaagttgggttcatagatgccatctgcttgcaactgtatgaggccctgacccacgtgtcagaggactgtttccctttgctagatggctgcagaaagaacaggcagaaatggcaggcccttgcagaacagcag

SEQ ID NO: 510 - protein, 247 aa, Artificial Sequence
  Description of Artificial Sequence: Synthetic Destabilizing Domain (DD)
MKHEVLCRWILSVKKNYRKNVAYHNWRHAFNTAQCMFAALKAGKIQNKLTDLEILALLIAALSHDLDHRGVNNSYIQRSEHPLAQLYCHSIMEHHHFDQCLMILNSPGNQILSGLSIEEYKTTLKIIKQAILATDLALYIKRGGEFFELIRKNQFNLEDPHQKELFLAMLMTACDLSAITKPWPIQQRIAELVATEFFDQGDRERKELNIEPTDLMNREKKNKIPSMQVGFIDAICLQLYEALTHVS

SEQ ID NO: 511 - DNA, 741 bp, Artificial Sequence
  Description of Artificial Sequence: Synthetic Destabilizing Domain (DD)
atgaaacatgaggttctttgcagatggattttaagtgttaagaagaattatcggaagaatgttgcctatcataattggagacatgcctttaatacagctcagtgcatgtttgctgctctaaaagcaggcaaaattcagaacaagctgactgacctggagatacttgcattgctgattgctgcactaagccacgatttggatcaccgtggtgtgaataactcttacatacagcgaagtgaacatccacttgcccagctttactgccattcaatcatggaacaccatcattttgaccagtgcctgatgattcttaatagtccaggcaatcagattctcagtggcctctccattgaagaatataagaccacgttgaaaataatcaagcaagctattttagctacagacctagcactgtacattaagcggggcggagaattttttgaacttataagaaaaaatcaattcaatttggaagatcctcatcaaaaggagttgtttttggcaatgctgatgacagcttgtgatctttctgcaattacaaaaccctggcctattcaacaacggatagcagaacttgtagcaactgaattttttgatcaaggagacagagagagaaaagaactcaacatagaacccactgatctaatgaacagggagaagaaaaacaaaatcccaagtatgcaagttgggttcatagatgccatctgcttgcaactgtatgaggccctgacccacgtgtca

SEQ ID NO: 512 - protein, 247 aa, Artificial Sequence
  Description of Artificial Sequence: Synthetic Destabilizing Domain (DD)
MKHEVLCRWILSVKKNYRKNVAYHNWRHAFNTAQCMFAALKAGKIQNKLTDLEILALLIAALSHDLDHRGVNNSYIQRSEHPLAQLYCHSIMEHHHFDQCLMILNSPGNQILSGLSIEEYKTTLKIIKQAILATDLALYIKRAGEFFELIRKNQFNLEDPHQKELFLAMLMTACDLSAITKPWPIQQRIAELVATEFFDQGDRERKELNIEPTDLMNREKKNKIPSMQVGFIDAICLQLYEALTHVS

SEQ ID NO: 513 - DNA, 741 bp, Artificial Sequence
  Description of Artificial Sequence: Synthetic Destabilizing Domain (DD)
atgaaacatgaggttctttgcagatggattttaagtgttaagaagaattatcggaagaatgttgcctatcataattggagacatgcctttaatacagctcagtgcatgtttgctgctctaaaagcaggcaaaattcagaacaagctgactgacctggagatacttgcattgctgattgctgcactaagccacgatttggatcaccgtggtgtgaataactcttacatacagcgaagtgaacatccacttgcccagctttactgccattcaatcatggaacaccatcattttgaccagtgcctgatgattcttaatagtccaggcaatcagattctcagtggcctctccattgaagaatataagaccacgttgaaaataatcaagcaagctattttagctacagacctagcactgtacattaagcgggccggagaattttttgaacttataagaaaaaatcaattcaatttggaagatcctcatcaaaaggagttgtttttggcaatgctgatgacagcttgtgatctttctgcaattacaaaaccctggcctattcaacaacggatagcagaacttgtagcaactgaattttttgatcaaggagacagagagagaaaagaactcaacatagaacccactgatctaatgaacagggagaagaaaaacaaaatcccaagtatgcaagttgggttcatagatgccatctgcttgcaactgtatgaggccctgacccacgtgtca

SEQ ID NO: 514 - protein, 247 aa, Artificial Sequence
  Description of Artificial Sequence: Synthetic Destabilizing Domain (DD)
MKHEVLCRWILSVKKNYRKNVAYHNWRHAFNTAQCMFAALKAGKIQNKLTDLEILALLIAALSHDLDHRGVNNSYIQRSEHPLAQLYCHSIMEHHHFDQCLMILNSPGNQILSGLSIEEYKTTLKIIKQAILATDLALYIKRVGEFFELIRKNQFNLEDPHQKELFLAMLMTACDLSAITKPWPIQQRIAELVATEFFDQGDRERKELNIEPTDLMNREKKNKIPSMQVGFIDAICLQLYEALTHVS

SEQ ID NO: 515 - DNA, 741 bp, Artificial Sequence
  Description of Artificial Sequence: Synthetic Destabilizing Domain (DD)
atgaaacatgaggttctttgcagatggattttaagtgttaagaagaattatcggaagaatgttgcctatcataattggagacatgcctttaatacagctcagtgcatgtttgctgctctaaaagcaggcaaaattcagaacaagctgactgacctggagatacttgcattgctgattgctgcactaagccacgatttggatcaccgtggtgtgaataactcttacatacagcgaagtgaacatccacttgcccagctttactgccattcaatcatggaacaccatcattttgaccagtgcctgatgattcttaatagtccaggcaatcagattctcagtggcctctccattgaagaatataagaccacgttgaaaataatcaagcaagctattttagctacagacctagcactgtacattaagcgggtgggagaattttttgaacttataagaaaaaatcaattcaatttggaagatcctcatcaaaaggagttgtttttggcaatgctgatgacagcttgtgatctttctgcaattacaaaaccctggcctattcaacaacggatagcagaacttgtagcaactgaattttttgatcaaggagacagagagagaaaagaactcaacatagaacccactgatctaatgaacagggagaagaaaaacaaaatcccaagtatgcaagttgggttcatagatgccatctgcttgcaactgtatgaggccctgacccacgtgtca

SEQ ID NO: 516 - protein, 247 aa, Artificial Sequence
  Description of Artificial Sequence: Synthetic Destabilizing Domain (DD)
MKHEVLCRWILSVKKNYRKNVAYHNWRHAFNTAQCMFAALKAGKIQNKLTDLEILALLIAALSHDLDHRGVNNSYIQRSEHPLAQLYCHSIMEHHHFDQCLMILNSPGNQILSGLSIEEYKTTLKIIKQAILATDLALYIKRIGEFFELIRKNQFNLEDPHQKELFLAMLMTACDLSAITKPWPIQQRIAELVATEFFDQGDRERKELNIEPTDLMNREKKNKIPSMQVGFIDAICLQLYEALTHVS

SEQ ID NO: 517 - DNA, 741 bp, Artificial Sequence
  Description of Artificial Sequence: Synthetic Destabilizing Domain (DD)
atgaaacatgaggttctttgcagatggattttaagtgttaagaagaattatcggaagaatgttgcctatcataattggagacatgcctttaatacagctcagtgcatgtttgctgctctaaaagcaggcaaaattcagaacaagctgactgacctggagatacttgcattgctgattgctgcactaagccacgatttggatcaccgtggtgtgaataactcttacatacagcgaagtgaacatccacttgcccagctttactgccattcaatcatggaacaccatcattttgaccagtgcctgatgattcttaatagtccaggcaatcagattctcagtggcctctccattgaagaatataagaccacgttgaaaataatcaagcaagctattttagctacagacctagcactgtacattaagcggatcggagaattttttgaacttataagaaaaaatcaattcaatttggaagatcctcatcaaaaggagttgtttttggcaatgctgatgacagcttgtgatctttctgcaattacaaaaccctggcctattcaacaacggatagcagaacttgtagcaactgaattttttgatcaaggagacagagagagaaaagaactcaacatagaacccactgatctaatgaacagggagaagaaaaacaaaatcccaagtatgcaagttgggttcatagatgccatctgcttgcaactgtatgaggccctgacccacgtgtca

SEQ ID NO: 518 - protein, 247 aa, Artificial Sequence
  Description of Artificial Sequence: Synthetic Destabilizing Domain (DD)
MKHEVLCRWILSVKKNYRKNVAYHNWRHAFNTAQCMFAALKAGKIQNKLTDLEILALLIAALSHDLDHRGVNNSYIQRSEHPLAQLYCHSIMEHHHFDQCLMILNSPGNQILSGLSIEEYKTTLKIIKQAILATDLALYIKRPGEFFELIRKNQFNLEDPHQKELFLAMLMTACDLSAITKPWPIQQRIAELVATEFFDQGDRERKELNIEPTDLMNREKKNKIPSMQVGFIDAICLQLYEALTHVS

SEQ ID NO: 519 - DNA, 741 bp, Artificial Sequence
  Description of Artificial Sequence: Synthetic Destabilizing Domain (DD)
atgaaacatgaggttctttgcagatggattttaagtgttaagaagaattatcggaagaatgttgcctatcataattggagacatgcctttaatacagctcagtgcatgtttgctgctctaaaagcaggcaaaattcagaacaagctgactgacctggagatacttgcattgctgattgctgcactaagccacgatttggatcaccgtggtgtgaataactcttacatacagcgaagtgaacatccacttgcccagctttactgccattcaatcatggaacaccatcattttgaccagtgcctgatgattcttaatagtccaggcaatcagattctcagtggcctctccattgaagaatataagaccacgttgaaaataatcaagcaagctattttagctacagacctagcactgtacattaagcggcccggagaattttttgaacttataagaaaaaatcaattcaatttggaagatcctcatcaaaaggagttgtttttggcaatgctgatgacagcttgtgatctttctgcaattacaaaaccctggcctattcaacaacggatagcagaacttgtagcaactgaattttttgatcaaggagacagagagagaaaagaactcaacatagaacccactgatctaatgaacagggagaagaaaaacaaaatcccaagtatgcaagttgggttcatagatgccatctgcttgcaactgtatgaggccctgacccacgtgtca

SEQ ID NO: 520 - protein, 247 aa, Artificial Sequence
  Description of Artificial Sequence: Synthetic Destabilizing Domain (DD)
MKHEVLCRWILSVKKNYRKNVAYHNWRHAFNTAQCMFAALKAGKIQNKLTDLEILALLIAALSHDLDHRGVNNSYIQRSEHPLAQLYCHSIMEHHHFDQCLMILNSPGNQILSGLSIEEYKTTLKIIKQAILATDLALYIKRFGEFFELIRKNQFNLEDPHQKELFLAMLMTACDLSAITKPWPIQQRIAELVATEFFDQGDRERKELNIEPTDLMNREKKNKIPSMQVGFIDAICLQLYEALTHVS

SEQ ID NO: 521 - DNA, 741 bp, Artificial Sequence
  Description of Artificial Sequence: Synthetic Destabilizing Domain (DD)
atgaaacatgaggttctttgcagatggattttaagtgttaagaagaattatcggaagaatgttgcctatcataattggagacatgcctttaatacagctcagtgcatgtttgctgctctaaaagcaggcaaaattcagaacaagctgactgacctggagatacttgcattgctgattgctgcactaagccacgatttggatcaccgtggtgtgaataactcttacatacagcgaagtgaacatccacttgcccagctttactgccattcaatcatggaacaccatcattttgaccagtgcctgatgattcttaatagtccaggcaatcagattctcagtggcctctccattgaagaatataagaccacgttgaaaataatcaagcaagctattttagctacagacctagcactgtacattaagcggttcggagaattttttgaacttataagaaaaaatcaattcaatttggaagatcctcatcaaaaggagttgtttttggcaatgctgatgacagcttgtgatctttctgcaattacaaaaccctggcctattcaacaacggatagcagaacttgtagcaactgaattttttgatcaaggagacagagagagaaaagaactcaacatagaacccactgatctaatgaacagggagaagaaaaacaaaatcccaagtatgcaagttgggttcatagatgccatctgcttgcaactgtatgaggccctgacccacgtgtca

SEQ ID NO: 522 - protein, 247 aa, Artificial Sequence
  Description of Artificial Sequence: Synthetic Destabilizing Domain (DD)
MKHEVLCRWILSVKKNYRKNVAYHNWRHAFNTAQCMFAALKAGKIQNKLTDLEILALLIAALSHDLDHRGVNNSYIQRSEHPLAQLYCHSIMEHHHFDQCLMILNSPGNQILSGLSIEEYKTTLKIIKQAILATDLALYIKRWGEFFELIRKNQFNLEDPHQKELFLAMLMTACDLSAITKPWPIQQRIAELVATEFFDQGDRERKELNIEPTDLMNREKKNKIPSMQVGFIDAICLQLYEALTHVS

SEQ ID NO: 523 - DNA, 741 bp, Artificial Sequence
  Description of Artificial Sequence: Synthetic Destabilizing Domain (DD)
atgaaacatgaggttctttgcagatggattttaagtgttaagaagaattatcggaagaatgttgcctatcataattggagacatgcctttaatacagctcagtgcatgtttgctgctctaaaagcaggcaaaattcagaacaagctgactgacctggagatacttgcattgctgattgctgcactaagccacgatttggatcaccgtggtgtgaataactcttacatacagcgaagtgaacatccacttgcccagctttactgccattcaatcatggaacaccatcattttgaccagtgcctgatgattcttaatagtccaggcaatcagattctcagtggcctctccattgaagaatataagaccacgttgaaaataatcaagcaagctattttagctacagacctagcactgtacattaagcggtggggagaattttttgaacttataagaaaaaatcaattcaatttggaagatcctcatcaaaaggagttgtttttggcaatgctgatgacagcttgtgatctttctgcaattacaaaaccctggcctattcaacaacggatagcagaacttgtagcaactgaattttttgatcaaggagacagagagagaaaagaactcaacatagaacccactgatctaatgaacagggagaagaaaaacaaaatcccaagtatgcaagttgggttcatagatgccatctgcttgcaactgtatgaggccctgacccacgtgtca

SEQ ID NO: 524 - protein, 247 aa, Artificial Sequence
  Description of Artificial Sequence: Synthetic Destabilizing Domain (DD)
MKHEVLCRWILSVKKNYRKNVAYHNWRHAFNTAQCMFAALKAGKIQNKLTDLEILALLIAALSHDLDHRGVNNSYIQRSEHPLAQLYCHSIMEHHHFDQCLMILNSPGNQILSGLSIEEYKTTLKIIKQAILATDLALYIKRYGEFFELIRKNQFNLEDPHQKELFLAMLMTACDLSAITKPWPIQQRIAELVATEFFDQGDRERKELNIEPTDLMNREKKNKIPSMQVGFIDAICLQLYEALTHVS

SEQ ID NO: 525 - DNA, 741 bp, Artificial Sequence
  Description of Artificial Sequence: Synthetic Destabilizing Domain (DD)
atgaaacatgaggttctttgcagatggattttaagtgttaagaagaattatcggaagaatgttgcctatcataattggagacatgcctttaatacagctcagtgcatgtttgctgctctaaaagcaggcaaaattcagaacaagctgactgacctggagatacttgcattgctgattgctgcactaagccacgatttggatcaccgtggtgtgaataactcttacatacagcgaagtgaacatccacttgcccagctttactgccattcaatcatggaacaccatcattttgaccagtgcctgatgattcttaatagtccaggcaatcagattctcagtggcctctccattgaagaatataagaccacgttgaaaataatcaagcaagctattttagctacagacctagcactgtacattaagcggtacggagaattttttgaacttataagaaaaaatcaattcaatttggaagatcctcatcaaaaggagttgtttttggcaatgctgatgacagcttgtgatctttctgcaattacaaaaccctggcctattcaacaacggatagcagaacttgtagcaactgaattttttgatcaaggagacagagagagaaaagaactcaacatagaacccactgatctaatgaacagggagaagaaaaacaaaatcccaagtatgcaagttgggttcatagatgccatctgcttgcaactgtatgaggccctgacccacgtgtca

SEQ ID NO: 526 - protein, 247 aa, Artificial Sequence
  Description of Artificial Sequence: Synthetic Destabilizing Domain (DD)
MKHEVLCRWILSVKKNYRKNVAYHNWRHAFNTAQCMFAALKAGKIQNKLTDLEILALLIAALSHDLDHRGVNNSYIQRSEHPLAQLYCHSIMEHHHFDQCLMILNSPGNQILSGLSIEEYKTTLKIIKQAILATDLALYIKRHGEFFELIRKNQFNLEDPHQKELFLAMLMTACDLSAITKPWPIQQRIAELVATEFFDQGDRERKELNIEPTDLMNREKKNKIPSMQVGFIDAICLQLYEALTHVS

SEQ ID NO: 527 - DNA, 741 bp, Artificial Sequence
  Description of Artificial Sequence: Synthetic Destabilizing Domain (DD)
atgaaacatgaggttctttgcagatggattttaagtgttaagaagaattatcggaagaatgttgcctatcataattggagacatgcctttaatacagctcagtgcatgtttgctgctctaaaagcaggcaaaattcagaacaagctgactgacctggagatacttgcattgctgattgctgcactaagccacgatttggatcaccgtggtgtgaataactcttacatacagcgaagtgaacatccacttgcccagctttactgccattcaatcatggaacaccatcattttgaccagtgcctgatgattcttaatagtccaggcaatcagattctcagtggcctctccattgaagaatataagaccacgttgaaaataatcaagcaagctattttagctacagacctagcactgtacattaagcggcacggagaattttttgaacttataagaaaaaatcaattcaatttggaagatcctcatcaaaaggagttgtttttggcaatgctgatgacagcttgtgatctttctgcaattacaaaaccctggcctattcaacaacggatagcagaacttgtagcaactgaattttttgatcaaggagacagagagagaaaagaactcaacatagaacccactgatctaatgaacagggagaagaaaaacaaaatcccaagtatgcaagttgggttcatagatgccatctgcttgcaactgtatgaggccctgacccacgtgtca

SEQ ID NO: 528 - protein, 247 aa, Artificial Sequence
  Description of Artificial Sequence: Synthetic Destabilizing Domain (DD)
MKHEVLCRWILSVKKNYRKNVAYHNWRHAFNTAQCMFAALKAGKIQNKLTDLEILALLIAALSHDLDHRGVNNSYIQRSEHPLAQLYCHSIMEHHHFDQCLMILNSPGNQILSGLSIEEYKTTLKIIKQAILATDLALYIKRSGEFFELIRKNQFNLEDPHQKELFLAMLMTACDLSAITKPWPIQQRIAELVATEFFDQGDRERKELNIEPTDLMNREKKNKIPSMQVGFIDAICLQLYEALTHVS

SEQ ID NO: 529 - DNA, 741 bp, Artificial Sequence
  Description of Artificial Sequence: Synthetic Destabilizing Domain (DD)
atgaaacatgaggttctttgcagatggattttaagtgttaagaagaattatcggaagaatgttgcctatcataattggagacatgcctttaatacagctcagtgcatgtttgctgctctaaaagcaggcaaaattcagaacaagctgactgacctggagatacttgcattgctgattgctgcactaagccacgatttggatcaccgtggtgtgaataactcttacatacagcgaagtgaacatccacttgcccagctttactgccattcaatcatggaacaccatcattttgaccagtgcctgatgattcttaatagtccaggcaatcagattctcagtggcctctccattgaagaatataagaccacgttgaaaataatcaagcaagctattttagctacagacctagcactgtacattaagcggagcggagaattttttgaacttataagaaaaaatcaattcaatttggaagatcctcatcaaaaggagttgtttttggcaatgctgatgacagcttgtgatctttctgcaattacaaaaccctggcctattcaacaacggatagcagaacttgtagcaactgaattttttgatcaaggagacagagagagaaaagaactcaacatagaacccactgatctaatgaacagggagaagaaaaacaaaatcccaagtatgcaagttgggttcatagatgccatctgcttgcaactgtatgaggccctgacccacgtgtca

SEQ ID NO: 530 - protein, 247 aa, Artificial Sequence
  Description of Artificial Sequence: Synthetic Destabilizing Domain (DD)
MKHEVLCRWILSVKKNYRKNVAYHNWRHAFNTAQCMFAALKAGKIQNKLTDLEILALLIAALSHDLDHRGVNNSYIQRSEHPLAQLYCHSIMEHHHFDQCLMILNSPGNQILSGLSIEEYKTTLKIIKQAILATDLALYIKRTGEFFELIRKNQFNLEDPHQKELFLAMLMTACDLSAITKPWPIQQRIAELVATEFFDQGDRERKELNIEPTDLMNREKKNKIPSMQVGFIDAICLQLYEALTHVS

SEQ ID NO: 531 - DNA, 741 bp, Artificial Sequence
  Description of Artificial Sequence: Synthetic Destabilizing Domain (DD)
atgaaacatgaggttctttgcagatggattttaagtgttaagaagaattatcggaagaatgttgcctatcataattggagacatgcctttaatacagctcagtgcatgtttgctgctctaaaagcaggcaaaattcagaacaagctgactgacctggagatacttgcattgctgattgctgcactaagccacgatttggatcaccgtggtgtgaataactcttacatacagcgaagtgaacatccacttgcccagctttactgccattcaatcatggaacaccatcattttgaccagtgcctgatgattcttaatagtccaggcaatcagattctcagtggcctctccattgaagaatataagaccacgttgaaaataatcaagcaagctattttagctacagacctagcactgtacattaagcggaccggagaattttttgaacttataagaaaaaatcaattcaatttggaagatcctcatcaaaaggagttgtttttggcaatgctgatgacagcttgtgatctttctgcaattacaaaaccctggcctattcaacaacggatagcagaacttgtagcaactgaattttttgatcaaggagacagagagagaaaagaactcaacatagaacccactgatctaatgaacagggagaagaaaaacaaaatcccaagtatgcaagttgggttcatagatgccatctgcttgcaactgtatgaggccctgacccacgtgtca

SEQ ID NO: 532 - protein, 247 aa, Artificial Sequence
  Description of Artificial Sequence: Synthetic Destabilizing Domain (DD)
MKHEVLCRWILSVKKNYRKNVAYHNWRHAFNTAQCMFAALKAGKIQNKLTDLEILALLIAALSHDLDHRGVNNSYIQRSEHPLAQLYCHSIMEHHHFDQCLMILNSPGNQILSGLSIEEYKTTLKIIKQAILATDLALYIKRDGEFFELIRKNQFNLEDPHQKELFLAMLMTACDLSAITKPWPIQQRIAELVATEFFDQGDRERKELNIEPTDLMNREKKNKIPSMQVGFIDAICLQLYEALTHVS

SEQ ID NO: 533 - DNA, 741 bp, Artificial Sequence
  Description of Artificial Sequence: Synthetic Destabilizing Domain (DD)
atgaaacatgaggttctttgcagatggattttaagtgttaagaagaattatcggaagaatgttgcctatcataattggagacatgcctttaatacagctcagtgcatgtttgctgctctaaaagcaggcaaaattcagaacaagctgactgacctggagatacttgcattgctgattgctgcactaagccacgatttggatcaccgtggtgtgaataactcttacatacagcgaagtgaacatccacttgcccagctttactgccattcaatcatggaacaccatcattttgaccagtgcctgatgattcttaatagtccaggcaatcagattctcagtggcctctccattgaagaatataagaccacgttgaaaataatcaagcaagctattttagctacagacctagcactgtacattaagcgggacggagaattttttgaacttataagaaaaaatcaattcaatttggaagatcctcatcaaaaggagttgtttttggcaatgctgatgacagcttgtgatctttctgcaattacaaaaccctggcctattcaacaacggatagcagaacttgtagcaactgaattttttgatcaaggagacagagagagaaaagaactcaacatagaacccactgatctaatgaacagggagaagaaaaacaaaatcccaagtatgcaagttgggttcatagatgccatctgcttgcaactgtatgaggccctgacccacgtgtca

SEQ ID NO: 534 - protein, 247 aa, Artificial Sequence
  Description of Artificial Sequence: Synthetic Destabilizing Domain (DD)
MKHEVLCRWILSVKKNYRKNVAYHNWRHAFNTAQCMFAALKAGKIQNKLTDLEILALLIAALSHDLDHRGVNNSYIQRSEHPLAQLYCHSIMEHHHFDQCLMILNSPGNQILSGLSIEEYKTTLKIIKQAILATDLALYIKREGEFFELIRKNQFNLEDPHQKELFLAMLMTACDLSAITKPWPIQQRIAELVATEFFDQGDRERKELNIEPTDLMNREKKNKIPSMQVGFIDAICLQLYEALTHVS

SEQ ID NO: 535 - DNA, 741 bp, Artificial Sequence
  Description of Artificial Sequence: Synthetic Destabilizing Domain (DD)
atgaaacatgaggttctttgcagatggattttaagtgttaagaagaattatcggaagaatgttgcctatcataattggagacatgcctttaatacagctcagtgcatgtttgctgctctaaaagcaggcaaaattcagaacaagctgactgacctggagatacttgcattgctgattgctgcactaagccacgatttggatcaccgtggtgtgaataactcttacatacagcgaagtgaacatccacttgcccagctttactgccattcaatcatggaacaccatcattttgaccagtgcctgatgattcttaatagtccaggcaatcagattctcagtggcctctccattgaagaatataagaccacgttgaaaataatcaagcaagctattttagctacagacctagcactgtacattaagcgggagggagaattttttgaacttataagaaaaaatcaattcaatttggaagatcctcatcaaaaggagttgtttttggcaatgctgatgacagcttgtgatctttctgcaattacaaaaccctggcctattcaacaacggatagcagaacttgtagcaactgaattttttgatcaaggagacagagagagaaaagaactcaacatagaacccactgatctaatgaacagggagaagaaaaacaaaatcccaagtatgcaagttgggttcatagatgccatctgcttgcaactgtatgaggccctgacccacgtgtca

SEQ ID NO: 536 - protein, 247 aa, Artificial Sequence
  Description of Artificial Sequence: Synthetic Destabilizing Domain (DD)
MKHEVLCRWILSVKKNYRKNVAYHNWRHAFNTAQCMFAALKAGKIQNKLTDLEILALLIAALSHDLDHRGVNNSYIQRSEHPLAQLYCHSIMEHHHFDQCLMILNSPGNQILSGLSIEEYKTTLKIIKQAILATDLALYIKRQGEFFELIRKNQFNLEDPHQKELFLAMLMTACDLSAITKPWPIQQRIAELVATEFFDQGDRERKELNIEPTDLMNREKKNKIPSMQVGFIDAICLQLYEALTHVS

SEQ ID NO: 537 - DNA, 741 bp, Artificial Sequence
  Description of Artificial Sequence: Synthetic Destabilizing Domain (DD)
atgaaacatgaggttctttgcagatggattttaagtgttaagaagaattatcggaagaatgttgcctatcataattggagacatgcctttaatacagctcagtgcatgtttgctgctctaaaagcaggcaaaattcagaacaagctgactgacctggagatacttgcattgctgattgctgcactaagccacgatttggatcaccgtggtgtgaataactcttacatacagcgaagtgaacatccacttgcccagctttactgccattcaatcatggaacaccatcattttgaccagtgcctgatgattcttaatagtccaggcaatcagattctcagtggcctctccattgaagaatataagaccacgttgaaaataatcaagcaagctattttagctacagacctagcactgtacattaagcggcagggagaattttttgaacttataagaaaaaatcaattcaatttggaagatcctcatcaaaaggagttgtttttggcaatgctgatgacagcttgtgatctttctgcaattacaaaaccctggcctattcaacaacggatagcagaacttgtagcaactgaattttttgatcaaggagacagagagagaaaagaactcaacatagaacccactgatctaatgaacagggagaagaaaaacaaaatcccaagtatgcaagttgggttcatagatgccatctgcttgcaactgtatgaggccctgacccacgtgtca

SEQ ID NO: 538 - protein, 247 aa, Artificial Sequence
  Description of Artificial Sequence: Synthetic Destabilizing Domain (DD)
MKHEVLCRWILSVKKNYRKNVAYHNWRHAFNTAQCMFAALKAGKIQNKLTDLEILALLIAALSHDLDHRGVNNSYIQRSEHPLAQLYCHSIMEHHHFDQCLMILNSPGNQILSGLSIEEYKTTLKIIKQAILATDLALYIKRNGEFFELIRKNQFNLEDPHQKELFLAMLMTACDLSAITKPWPIQQRIAELVATEFFDQGDRERKELNIEPTDLMNREKKNKIPSMQVGFIDAICLQLYEALTHVS

SEQ ID NO: 539 - DNA, 741 bp, Artificial Sequence
  Description of Artificial Sequence: Synthetic Destabilizing Domain (DD)
atgaaacatgaggttctttgcagatggattttaagtgttaagaagaattatcggaagaatgttgcctatcataattggagacatgcctttaatacagctcagtgcatgtttgctgctctaaaagcaggcaaaattcagaacaagctgactgacctggagatacttgcattgctgattgctgcactaagccacgatttggatcaccgtggtgtgaataactcttacatacagcgaagtgaacatccacttgcccagctttactgccattcaatcatggaacaccatcattttgaccagtgcctgatgattcttaatagtccaggcaatcagattctcagtggcctctccattgaagaatataagaccacgttgaaaataatcaagcaagctattttagctacagacctagcactgtacattaagcggaacggagaattttttgaacttataagaaaaaatcaattcaatttggaagatcctcatcaaaaggagttgtttttggcaatgctgatgacagcttgtgatctttctgcaattacaaaaccctggcctattcaacaacggatagcagaacttgtagcaactgaattttttgatcaaggagacagagagagaaaagaactcaacatagaacccactgatctaatgaacagggagaagaaaaacaaaatcccaagtatgcaagttgggttcatagatgccatctgcttgcaactgtatgaggccctgacccacgtgtca

SEQ ID NO: 540 - protein, 247 aa, Artificial Sequence
  Description of Artificial Sequence: Synthetic Destabilizing Domain (DD)
MKHEVLCRWILSVKKNYRKNVAYHNWRHAFNTAQCMFAALKAGKIQNKLTDLEILALLIAALSHDLDHRGVNNSYIQRSEHPLAQLYCHSIMEHHHFDQCLMILNSPGNQILSGLSIEEYKTTLKIIKQAILATDLALYIKRMGEFFELIRKNQFNLEDPHQKELFLAMLMTACDLSAITKPWPIQQRIAELVATEFFDQGDRERKELNIEPTDLMNREKKNKIPSMQVGFIDAICLQLYEALTHVS

SEQ ID NO: 541 - DNA, 741 bp, Artificial Sequence
  Description of Artificial Sequence: Synthetic Destabilizing Domain (DD)
atgaaacatgaggttctttgcagatggattttaagtgttaagaagaattatcggaagaatgttgcctatcataattggagacatgcctttaatacagctcagtgcatgtttgctgctctaaaagcaggcaaaattcagaacaagctgactgacctggagatacttgcattgctgattgctgcactaagccacgatttggatcaccgtggtgtgaataactcttacatacagcgaagtgaacatccacttgcccagctttactgccattcaatcatggaacaccatcattttgaccagtgcctgatgattcttaatagtccaggcaatcagattctcagtggcctctccattgaagaatataagaccacgttgaaaataatcaagcaagctattttagctacagacctagcactgtacattaagcggatgggagaattttttgaacttataagaaaaaatcaattcaatttggaagatcctcatcaaaaggagttgtttttggcaatgctgatgacagcttgtgatctttctgcaattacaaaaccctggcctattcaacaacggatagcagaacttgtagcaactgaattttttgatcaaggagacagagagagaaaagaactcaacatagaacccactgatctaatgaacagggagaagaaaaacaaaatcccaagtatgcaagttgggttcatagatgccatctgcttgcaactgtatgaggccctgacccacgtgtca

SEQ ID NO: 542 - protein, 247 aa, Artificial Sequence
  Description of Artificial Sequence: Synthetic Destabilizing Domain (DD)
MKHEVLCRWILSVKKNYRKNVAYHNWRHAFNTAQCMFAALKAGKIQNKLTDLEILALLIAALSHDLDHRGVNNSYIQRSEHPLAQLYCHSIMEHHHFDQCLMILNSPGNQILSGLSIEEYKTTLKIIKQAILATDLALYIKRCGEFFELIRKNQFNLEDPHQKELFLAMLMTACDLSAITKPWPIQQRIAELVATEFFDQGDRERKELNIEPTDLMNREKKNKIPSMQVGFIDAICLQLYEALTHVS

SEQ ID NO: 543 - DNA, 741 bp, Artificial Sequence
  Description of Artificial Sequence: Synthetic Destabilizing Domain (DD)
atgaaacatgaggttctttgcagatggattttaagtgttaagaagaattatcggaagaatgttgcctatcataattggagacatgcctttaatacagctcagtgcatgtttgctgctctaaaagcaggcaaaattcagaacaagctgactgacctggagatacttgcattgctgattgctgcactaagccacgatttggatcaccgtggtgtgaataactcttacatacagcgaagtgaacatccacttgcccagctttactgccattcaatcatggaacaccatcattttgaccagtgcctgatgattcttaatagtccaggcaatcagattctcagtggcctctccattgaagaatataagaccacgttgaaaataatcaagcaagctattttagctacagacctagcactgtacattaagcggtgcggagaattttttgaacttataagaaaaaatcaattcaatttggaagatcctcatcaaaaggagttgtttttggcaatgctgatgacagcttgtgatctttctgcaattacaaaaccctggcctattcaacaacggatagcagaacttgtagcaactgaattttttgatcaaggagacagagagagaaaagaactcaacatagaacccactgatctaatgaacagggagaagaaaaacaaaatcccaagtatgcaagttgggttcatagatgccatctgcttgcaactgtatgaggccctgacccacgtgtca

SEQ ID NO: 544 - protein, 247 aa, Artificial Sequence
  Description of Artificial Sequence: Synthetic Destabilizing Domain (DD)
MKHEVLCRWILSVKKNYRKNVAYHNWRHAFNTAQCMFAALKAGKIQNKLTDLEILALLIAALSHDLDHRGVNNSYIQRSEHPLAQLYCHSIMEHHHFDQCLMILNSPGNQILSGLSIEEYKTTLKIIKQAILATDLALYIKRKGEFFELIRKNQFNLEDPHQKELFLAMLMTACDLSAITKPWPIQQRIAELVATEFFDQGDRERKELNIEPTDLMNREKKNKIPSMQVGFIDAICLQLYEALTHVS

SEQ ID NO: 545 - DNA, 741 bp, Artificial Sequence
  Description of Artificial Sequence: Synthetic Destabilizing Domain (DD)
atgaaacatgaggttctttgcagatggattttaagtgttaagaagaattatcggaagaatgttgcctatcataattggagacatgcctttaatacagctcagtgcatgtttgctgctctaaaagcaggcaaaattcagaacaagctgactgacctggagatacttgcattgctgattgctgcactaagccacgatttggatcaccgtggtgtgaataactcttacatacagcgaagtgaacatccacttgcccagctttactgccattcaatcatggaacaccatcattttgaccagtgcctgatgattcttaatagtccaggcaatcagattctcagtggcctctccattgaagaatataagaccacgttgaaaataatcaagcaagctattttagctacagacctagcactgtacattaagcggaagggagaattttttgaacttataagaaaaaatcaattcaatttggaagatcctcatcaaaaggagttgtttttggcaatgctgatgacagcttgtgatctttctgcaattacaaaaccctggcctattcaacaacggatagcagaacttgtagcaactgaattttttgatcaaggagacagagagagaaaagaactcaacatagaacccactgatctaatgaacagggagaagaaaaacaaaatcccaagtatgcaagttgggttcatagatgccatctgcttgcaactgtatgaggccctgacccacgtgtca

SEQ ID NO: 546 - protein, 247 aa, Artificial Sequence
  Description of Artificial Sequence: Synthetic Destabilizing Domain (DD)
MKHEVLCRWILSVKKNYRKNVAYHNWRHAFNTAQCMFAALKAGKIQNKLTDLEILALLIAALSHDLDHRGVNNSYIQRSEHPLAQLYCHSIMEHHHFDQCLMILNSPGNQILSGLSIEEYKTTLKIIKQAILATDLALYIKRLGEFFELIRKNQFNLEDPHQKELFLAMLMTACDLSAITKPWPIQQRIAELVATEFFDQGDRERKELNIEPTDLMNREKKNKIPSMQVGFIDAICLQLYEALTHVS

SEQ ID NO: 547 - DNA, 741 bp, Artificial Sequence
  Description of Artificial Sequence: Synthetic Destabilizing Domain (DD)
atgaaacatgaggttctttgcagatggattttaagtgttaagaagaattatcggaagaatgttgcctatcataattggagacatgcctttaatacagctcagtgcatgtttgctgctctaaaagcaggcaaaattcagaacaagctgactgacctggagatacttgcattgctgattgctgcactaagccacgatttggatcaccgtggtgtgaataactcttacatacagcgaagtgaacatccacttgcccagctttactgccattcaatcatggaacaccatcattttgaccagtgcctgatgattcttaatagtccaggcaatcagattctcagtggcctctccattgaagaatataagaccacgttgaaaataatcaagcaagctattttagctacagacctagcactgtacattaagcggctaggagaattttttgaacttataagaaaaaatcaattcaatttggaagatcctcatcaaaaggagttgtttttggcaatgctgatgacagcttgtgatctttctgcaattacaaaaccctggcctattcaacaacggatagcagaacttgtagcaactgaattttttgatcaaggagacagagagagaaaagaactcaacatagaacccactgatctaatgaacagggagaagaaaaacaaaatcccaagtatgcaagttgggttcatagatgccatctgcttgcaactgtatgaggccctgacccacgtgtca

SEQ ID NO: 548 - protein, 302 aa, Artificial Sequence
  Description of Artificial Sequence: Synthetic Destabilizing Domain (DD)
EETRELQSLAAAVVPSAQTLKITDFSFSDFELSDLETALCTIRMFTDLNLVQNFQMKHEVLCRWILSVKKNYRKNVAYHNWRHAFNTAQCMFAALKAGKIQNKLTDLEILALLIAALSHDLDHRGVNNSYIQRSEHPLAQLYCHSIMEHHHFDQCLMILNSPGNQILSGLSIEEYKTTLKIIKQAILATDLALYIKRLGEFFELIRKNQFNLEDPHQKELFLAMLMTACDLSAITKPWPIQQRIAELVATEFFDQGDRERKELNIEPTDLMNREKKNKIPSMQVGFIDAICLQLYEALTHVS

SEQ ID NO: 549 - DNA, 906 bp, Artificial Sequence
  Description of Artificial Sequence: Synthetic Destabilizing Domain (DD)
gaagaaacaagagagctacagtcgttagcggctgctgtggtgccatctgcccagacccttaaaattactgactttagcttcagtgactttgagctgtctgatctggaaacagcactgtgtacaattcggatgtttactgacctcaaccttgtgcagaacttccagatgaaacatgaggttctttgcagatggattttaagtgttaagaagaattatcggaagaatgttgcctatcataattggagacatgcctttaatacagctcagtgcatgtttgctgctctaaaagcaggcaaaattcagaacaagctgactgacctggagatacttgcattgctgattgctgcactaagccacgatttggatcaccgtggtgtgaataactcttacatacagcgaagtgaacatccacttgcccagctttactgccattcaatcatggaacaccatcattttgaccagtgcctgatgattcttaatagtccaggcaatcagattctcagtggcctctccattgaagaatataagaccacgttgaaaataatcaagcaagctattttagctacagacctagcactgtacattaagcggctaggagaattttttgaacttataagaaaaaatcaattcaatttggaagatcctcatcaaaaggagttgtttttggcaatgctgatgacagcttgtgatctttctgcaattacaaaaccctggcctattcaacaacggatagcagaacttgtagcaactgaattttttgatcaaggagacagagagagaaaagaactcaacatagaacccactgatctaatgaacagggagaagaaaaacaaaatcccaagtatgcaagttgggttcatagatgccatctgcttgcaactgtatgaggccctgacccacgtgtca

SEQ ID NO: 550 - protein, 326 aa, Artificial Sequence
  Description of Artificial Sequence: Synthetic Destabilizing Domain (DD)
EETRELQSLAAAVVPSAQTLKITDFSFSDFELSDLETALCTIRMFTDLNLVQNFQMKHEVLCRWILSVKKNYRKNVAFHNWRHAFNTAQCMFAALKAGKIQNKLTDLEILALLIAALSHDLDHRGVNNSYIQRSEHPLAQLYCHSIMEHHHFDQCLMILNSPGNQILSGLSIEEYKTTLKIIKQAILATDLALYIKRLGEFFELIRKNQFNLEDPHQKELFLAMLMTACDLSAITKPWPIQQRIAELVATEFFDQGDRERKELNIEPTDLMNREKKNKIPSMQVGFIDAICLQLYEALTHVSEDCFPLLDGCRKNRQKWQALAEQQ

SEQ ID NO: 551 - DNA, 978 bp, Artificial Sequence
  Description of Artificial Sequence: Synthetic Destabilizing Domain (DD)
gaagaaacaagagagctacagtcgttagcggctgctgtggtgccatctgcccagacccttaaaattactgactttagcttcagtgactttgagctgtctgatctggaaacagcactgtgtacaattcggatgtttactgacctcaaccttgtgcagaacttccagatgaaacatgaggttctttgcagatggattttaagtgttaagaagaattatcggaagaatgttgcctttcataattggagacatgcctttaatacagctcagtgcatgtttgctgctctaaaagcaggcaaaattcagaacaagctgactgacctggagatacttgcattgctgattgctgcactaagccacgatttggatcaccgtggtgtgaataactcttacatacagcgaagtgaacatccacttgcccagctttactgccattcaatcatggaacaccatcattttgaccagtgcctgatgattcttaatagtccaggcaatcagattctcagtggcctctccattgaagaatataagaccacgttgaaaataatcaagcaagctattttagctacagacctagcactgtacattaagaggctaggagaattttttgaacttataagaaaaaatcaattcaatttggaagatcctcatcaaaaggagttgtttttggcaatgctgatgacagcttgtgatctttctgcaattacaaaaccctggcctattcaacaacggatagcagaacttgtagcaactgaattttttgatcaaggagacagagagagaaaagaactcaacatagaacccactgatctaatgaacagggagaagaaaaacaaaatcccaagtatgcaagttgggttcatagatgccatctgcttgcaactgtatgaggccctgacccacgtgtcagaggactgtttccctttgctagatggctgcagaaagaacaggcagaaatggcaggcccttgcagaacagcag

SEQ ID NO: 552 - protein, 326 aa, Artificial Sequence
  Description of Artificial Sequence: Synthetic Destabilizing Domain (DD)
EETRELQSLAAAVVPSAQTLKITDFSFSDFELSDLETALCTIRMFTDLNLVQNFQMKHEVLCRWILSVKKNYRKNVAWHNWRHAFNTAQCMFAALKAGKIQNKLTDLEILALLIAALSHDLDHRGVNNSYIQRSEHPLAQLYCHSIMEHHHFDQCLMILNSPGNQILSGLSIEEYKTTLKIIKQAILATDLALYIKRLGEFFELIRKNQFNLEDPHQKELFLAMLMTACDLSAITKPWPIQQRIAELVATEFFDQGDRERKELNIEPTDLMNREKKNKIPSMQVGFIDAICLQLYEALTHVSEDCFPLLDGCRKNRQKWQALAEQQ

SEQ ID NO: 553 - DNA, 978 bp, Artificial Sequence
  Description of Artificial Sequence: Synthetic Destabilizing Domain (DD)
gaagaaacaagagagctacagtcgttagcggctgctgtggtgccatctgcccagacccttaaaattactgactttagcttcagtgactttgagctgtctgatctggaaacagcactgtgtacaattcggatgtttactgacctcaaccttgtgcagaacttccagatgaaacatgaggttctttgcagatggattttaagtgttaagaagaattatcggaagaatgttgcctggcataattggagacatgcctttaatacagctcagtgcatgtttgctgctctaaaagcaggcaaaattcagaacaagctgactgacctggagatacttgcattgctgattgctgcactaagccacgatttggatcaccgtggtgtgaataactcttacatacagcgaagtgaacatccacttgcccagctttactgccattcaatcatggaacaccatcattttgaccagtgcctgatgattcttaatagtccaggcaatcagattctcagtggcctctccattgaagaatataagaccacgttgaaaataatcaagcaagctattttagctacagacctagcactgtacattaagaggctaggagaattttttgaacttataagaaaaaatcaattcaatttggaagatcctcatcaaaaggagttgtttttggcaatgctgatgacagcttgtgatctttctgcaattacaaaaccctggcctattcaacaacggatagcagaacttgtagcaactgaattttttgatcaaggagacagagagagaaaagaactcaacatagaacccactgatctaatgaacagggagaagaaaaacaaaatcccaagtatgcaagttgggttcatagatgccatctgcttgcaactgtatgaggccctgacccacgtgtcagaggactgtttccctttgctagatggctgcagaaagaacaggcagaaatggcaggcccttgcagaacagcag

SEQ ID NO: 554 - protein, 326 aa, Artificial Sequence
  Description of Artificial Sequence: Synthetic Destabilizing Domain (DD)
EETRELQSLAAAVVPSAQTLKITDFSFSDFELSDLETALCTIRMFTDLNLVQNFQMKHEVLCRWILSVKKNYRKNVAAHNWRHAFNTAQCMFAALKAGKIQNKLTDLEILALLIAALSHDLDHRGVNNSYIQRSEHPLAQLYCHSIMEHHHFDQCLMILNSPGNQILSGLSIEEYKTTLKIIKQAILATDLALYIKRLGEFFELIRKNQFNLEDPHQKELFLAMLMTACDLSAITKPWPIQQRIAELVATEFFDQGDRERKELNIEPTDLMNREKKNKIPSMQVGFIDAICLQLYEALTHVSEDCFPLLDGCRKNRQKWQALAEQQ

SEQ ID NO: 555 - DNA, 978 bp, Artificial Sequence
  Description of Artificial Sequence: Synthetic Destabilizing Domain (DD)
gaagaaacaagagagctacagtcgttagcggctgctgtggtgccatctgcccagacccttaaaattactgactttagcttcagtgactttgagctgtctgatctggaaacagcactgtgtacaattcggatgtttactgacctcaaccttgtgcagaacttccagatgaaacatgaggttctttgcagatggattttaagtgttaagaagaattatcggaagaatgttgccgctcataattggagacatgcctttaatacagctcagtgcatgtttgctgctctaaaagcaggcaaaattcagaacaagctgactgacctggagatacttgcattgctgattgctgcactaagccacgatttggatcaccgtggtgtgaataactcttacatacagcgaagtgaacatccacttgcccagctttactgccattcaatcatggaacaccatcattttgaccagtgcctgatgattcttaatagtccaggcaatcagattctcagtggcctctccattgaagaatataagaccacgttgaaaataatcaagcaagctattttagctacagacctagcactgtacattaagaggctaggagaattttttgaacttataagaaaaaatcaattcaatttggaagatcctcatcaaaaggagttgtttttggcaatgctgatgacagcttgtgatctttctgcaattacaaaaccctggcctattcaacaacggatagcagaacttgtagcaactgaattttttgatcaaggagacagagagagaaaagaactcaacatagaacccactgatctaatgaacagggagaagaaaaacaaaatcccaagtatgcaagttgggttcatagatgccatctgcttgcaactgtatgaggccctgacccacgtgtcagaggactgtttccctttgctagatggctgcagaaagaacaggcagaaatggcaggcccttgcagaacagcag

SEQ ID NO: 556 - protein, 326 aa, Artificial Sequence
  Description of Artificial Sequence: Synthetic Destabilizing Domain (DD)
EETRELQSLAAAVVPSAQTLKITDFSFSDFELSDLETALCTIRMFTDLNLVQNFQMKHEVLCRWILSVKKNYRKNVAYHNWRHAFNTAQCMFAALKAGKIQNKLTDLEILALLIAALSHDLDHRGVNNSYIQRSEHPLAQLYCHSIMEHHHFDQCLMILNSPGNQILSGLSIEEYKTTLKIIKQAILATDLALYIKRRGEFAELIRKNQFNLEDPHQKELFLAMLMTACNLSAITKPWPIQQRIAELVATEFFDQGDRERKELNIEPTDLMNREKKNKIPSMQVGFIDAICLQLYEALTHVSEDCFPLLDGCRKNRQKWQALAEQQ

SEQ ID NO: 557 - DNA, 978 bp, Artificial Sequence
  Description of Artificial Sequence: Synthetic Destabilizing Domain (DD)
gaagaaacaagagagctacagtcgttagcggctgctgtggtgccatctgcccagacccttaaaattactgactttagcttcagtgactttgagctgtctgatctggaaacagcactgtgtacaattcggatgtttactgacctcaaccttgtgcagaacttccagatgaaacatgaggttctttgcagatggattttaagtgttaagaagaattatcggaagaatgttgcctatcataattggagacatgcctttaatacagctcagtgcatgtttgctgctctaaaagcaggcaaaattcagaacaagctgactgacctggagatacttgcattgctgattgctgcactaagccacgatttggatcaccgtggtgtgaataactcttacatacagcgaagtgaacatccacttgcccagctttactgccattcaatcatggaacaccatcattttgaccagtgcctgatgattcttaatagtccaggcaatcagattctcagtggcctctccattgaagaatataagaccacgttgaaaataatcaagcaagctattttagctacagacctagcactgtacattaagaggcgaggagaatttgctgaacttataagaaaaaatcaattcaatttggaagatcctcatcaaaaggagttgtttttggcaatgctgatgacagcttgtaatctttctgcaattacaaaaccctggcctattcaacaacggatagcagaacttgtagcaactgaattttttgatcaaggagacagagagagaaaagaactcaacatagaacccactgatctaatgaacagggagaagaaaaacaaaatcccaagtatgcaagttgggttcatagatgccatctgcttgcaactgtatgaggccctgacccacgtgtcagaggactgtttccctttgctagatggctgcagaaagaacaggcagaaatggcaggcccttgcagaacagcag

SEQ ID NO: 558 - protein, 326 aa, Artificial Sequence
  Description of Artificial Sequence: Synthetic Destabilizing Domain (DD)
EETRELQSLAAAVVPSAQTLKITDFSFSDFELSDLETALCTIRMFTDLNLVQNFQMKHEVLCRWILSVKKNYRKNVAYHNWRHAFNTAQCMFAALKAGKIQNKLTDLEILALLIAALSHDLDHRGVNNSYIQRSEHPLAQLYCHSIMEHHHFDQCLMILNSPGNQILSGLSIEEYKTTLKIIKQAILATDLALYIKRLGEFFELIRKNQFNLEDPHQKELFLAMLMTACNLSAITKPWPIQQRIAELVATEFFDQGDRERKELNIEPTDLMNREKKNKIPSMQVGFIDAICLQLYEALTHVSEDCFPLLDGCRKNRQKWQALAEQQ

SEQ ID NO: 559 - DNA, 978 bp, Artificial Sequence
  Description of Artificial Sequence: Synthetic Destabilizing Domain (DD)
gaagaaacaagagagctacagtcgttagcggctgctgtggtgccatctgcccagacccttaaaattactgactttagcttcagtgactttgagctgtctgatctggaaacagcactgtgtacaattcggatgtttactgacctcaaccttgtgcagaacttccagatgaaacatgaggttctttgcagatggattttaagtgttaagaagaattatcggaagaatgttgcctatcataattggagacatgcctttaatacagctcagtgcatgtttgctgctctaaaagcaggcaaaattcagaacaagctgactgacctggagatacttgcattgctgattgctgcactaagccacgatttggatcaccgtggtgtgaataactcttacatacagcgaagtgaacatccacttgcccagctttactgccattcaatcatggaacaccatcattttgaccagtgcctgatgattcttaatagtccaggcaatcagattctcagtggcctctccattgaagaatataagaccacgttgaaaataatcaagcaagctattttagctacagacctagcactgtacattaagaggctaggagaattttttgaacttataagaaaaaatcaattcaatttggaagatcctcatcaaaaggagttgtttttggcaatgctgatgacagcttgtaatctttctgcaattacaaaaccctggcctattcaacaacggatagcagaacttgtagcaactgaattttttgatcaaggagacagagagagaaaagaactcaacatagaacccactgatctaatgaacagggagaagaaaaacaaaatcccaagtatgcaagttgggttcatagatgccatctgcttgcaactgtatgaggccctgacccacgtgtcagaggactgtttccctttgctagatggctgcagaaagaacaggcagaaatggcaggcccttgcagaacagcag

SEQ ID NO: 560 - protein, 326 aa, Artificial Sequence
  Description of Artificial Sequence: Synthetic Destabilizing Domain (DD)
EETRELQSLAAAVVPSAQTLKITDFSFSDFELSDLETALCTIRMFTDLNLVQNFQMKHEVLCRWILSVKKNYRKNVAYHNWRHAFNTAQCMFAALKAGKIQNKLTDLEILALLIAALSHDLDHRGVNNSYIQRSEHPLAQLYCHSIMEHHHFDQCLMILNSPGNQILSGLSIEEYKTTLKIIKQAILATDLALYIKRLGEFAELIRKNQFNLEDPHQKELFLAMLMTACDLSAITKPWPIQQRIAELVATEFFDQGDRERKELNIEPTDLMNREKKNKIPSMQVGFIDAICLQLYEALTHVSEDCFPLLDGCRKNRQKWQALAEQQ

SEQ ID NO: 561 - DNA, 978 bp, Artificial Sequence
  Description of Artificial Sequence: Synthetic Destabilizing Domain (DD)
gaagaaacaagagagctacagtcgttagcggctgctgtggtgccatctgcccagacccttaaaattactgactttagcttcagtgactttgagctgtctgatctggaaacagcactgtgtacaattcggatgtttactgacctcaaccttgtgcagaacttccagatgaaacatgaggttctttgcagatggattttaagtgttaagaagaattatcggaagaatgttgcctatcataattggagacatgcctttaatacagctcagtgcatgtttgctgctctaaaagcaggcaaaattcagaacaagctgactgacctggagatacttgcattgctgattgctgcactaagccacgatttggatcaccgtggtgtgaataactcttacatacagcgaagtgaacatccacttgcccagctttactgccattcaatcatggaacaccatcattttgaccagtgcctgatgattcttaatagtccaggcaatcagattctcagtggcctctccattgaagaatataagaccacgttgaaaataatcaagcaagctattttagctacagacctagcactgtacattaagaggctaggagaatttgctgaacttataagaaaaaatcaattcaatttggaagatcctcatcaaaaggagttgtttttggcaatgctgatgacagcttgtgatctttctgcaattacaaaaccctggcctattcaacaacggatagcagaacttgtagcaactgaattttttgatcaaggagacagagagagaaaagaactcaacatagaacccactgatctaatgaacagggagaagaaaaacaaaatcccaagtatgcaagttgggttcatagatgccatctgcttgcaactgtatgaggccctgacccacgtgtcagaggactgtttccctttgctagatggctgcagaaagaacaggcagaaatggcaggcccttgcagaacagcag

SEQ ID NO: 562 - DNA, 978 bp, Artificial Sequence
  Description of Artificial Sequence: Synthetic Destabilizing Domain (DD)
gaagaaacaagagagctacagtcgttagcggctgctgtggtgccatctgcccagacccttaaaattactgactttagcttcagtgactttgagctgtctgatctggaaacagcactgtgtacaattcggatgtttactgacctcaaccttgtgcagaacttccagatgaaacatgaggttctttgcagatggattttaagtgttaagaagaattatcggaagaatgttgcctatcataattggagacatgcctttaatacagctcagtgcatgtttgctgctctaaaagcaggcaaaattcagaacaagctgactgacctggagatacttgcattgctgattgctgcactaagccacgatttggatcaccgtggtgtgaataactcttacatacagcgaagtgaacatccacttgcccagctttactgccattcaatcatggaacaccatcattttgaccagtgcctgatgattcttaatagtccaggcaatcagattctcagtggcctctccattgaagaatataagaccacgttgaaaataatcaagcaagctattttagctacagacctagcactgtacattaagaggctaggagaatttgctgaacttataagaaaaaatcaattcaatttggaagatcctcatcaaaaggagttgtttttggcaatgctgatgacagcttgtgatctttctgcaattacaaaaccctggcctattcaacaacggatagcagaacttgtagcaactgaattttttgatcaaggagacagagagagaaaagaactcaacatagaacccactgatctaatgaacagggagaagaaaaacaaaatcccaagtatgcaagttgggttcatagatgccatctgcttgcaactgtatgaggccctgacccacgtgtcagaggactgtttccctttgctagatggctgcaggaagaacaggcagaaatggcaggcccttgcagaacagcag

SEQ ID NO: 563 - protein, 326 aa, Artificial Sequence
  Description of Artificial Sequence: Synthetic Destabilizing Domain (DD)
EETRELQSLAAAVVPSAQTLKITDFSFSDFELSDLETALCTIRMFTDLNLVQNFQMKHEVLCRWILSVKKNYRKNVAYHNWRHAFNTAQCMFAALKAGKIQNKLTDLEILALLIAALSADLDHRGVNNSYIQRSEHPLAQLYCHSIMEHHHFDQCLMILNSPGNQILSGLSIEEYKTTLKIIKQAILATDLALYIKRLGEFFELIRKNQFNLEDPHQKELFLAMLMTACDLSAITKPWPIQQRIAELVATEFFDQGDRERKELNIEPTDLMNREKKNKIPSMQVGFIDAICLQLYEALTHVSEDCFPLLDGCRKNRQKWQALAEQQ

SEQ ID NO: 564 - DNA, 978 bp, Artificial Sequence
  Description of Artificial Sequence: Synthetic Destabilizing Domain (DD)
gaagaaacaagagagctacagtcgttagcggctgctgtggtgccatctgcccagacccttaaaattactgactttagcttcagtgactttgagctgtctgatctggaaacagcactgtgtacaattcggatgtttactgacctcaaccttgtgcagaacttccagatgaaacatgaggttctttgcagatggattttaagtgttaagaagaattatcggaagaatgttgcctatcataattggagacatgcctttaatacagctcagtgcatgtttgctgctctaaaagcaggcaaaattcagaacaagctgactgacctggagatacttgcattgctgattgctgcactaagcgccgatttggatcaccgtggtgtgaataactcttacatacagcgaagtgaacatccacttgcccagctttactgccattcaatcatggaacaccatcattttgaccagtgcctgatgattcttaatagtccaggcaatcagattctcagtggcctctccattgaagaatataagaccacgttgaaaataatcaagcaagctattttagctacagacctagcactgtacattaagaggctaggagaattttttgaacttataagaaaaaatcaattcaatttggaagatcctcatcaaaaggagttgtttttggcaatgctgatgacagcttgtgatctttctgcaattacaaaaccctggcctattcaacaacggatagcagaacttgtagcaactgaattttttgatcaaggagacagagagagaaaagaactcaacatagaacccactgatctaatgaacagggagaagaaaaacaaaatcccaagtatgcaagttgggttcatagatgccatctgcttgcaactgtatgaggccctgacccacgtgtcagaggactgtttccctttgctagatggctgcagaaagaacaggcagaaatggcaggcccttgcagaacagcag

SEQ ID NO: 565 - protein, 326 aa, Artificial Sequence
  Description of Artificial Sequence: Synthetic Destabilizing Domain (DD)
EETRELQSLAAAVVPSAQTLKITDFSFSDFELSDLETALCTIRMFTDLNLVQNFQMKHEVLCRWILSVKKNYRKNVAYHNWRHAFNTAQCMFAALKAGKIQNKLTDLEILALLIAALSHDLDHRGVNNSYIQRSEHPLAQLYCHSIMEHHHFDQCLMILNSPGNQILSGLSIEEYKTTLKIIKQAILATDLALYIKRLGEFFELIRKNQFNLEDPHQKELFLAMLMTACALSAITKPWPIQQRIAELVATEFFDQGDRERKELNIEPTDLMNREKKNKIPSMQVGFIDAICLQLYEALTHVSEDCFPLLDGCRKNRQKWQALAEQQ

SEQ ID NO: 566 - DNA, 978 bp, Artificial Sequence
  Description of Artificial Sequence: Synthetic Destabilizing Domain (DD)
gaagaaacaagagagctacagtcgttagcggctgctgtggtgccatctgcccagacccttaaaattactgactttagcttcagtgactttgagctgtctgatctggaaacagcactgtgtacaattcggatgtttactgacctcaaccttgtgcagaacttccagatgaaacatgaggttctttgcagatggattttaagtgttaagaagaattatcggaagaatgttgcctatcataattggagacatgcctttaatacagctcagtgcatgtttgctgctctaaaagcaggcaaaattcagaacaagctgactgacctggagatacttgcattgctgattgctgcactaagccacgatttggatcaccgtggtgtgaataactcttacatacagcgaagtgaacatccacttgcccagctttactgccattcaatcatggaacaccatcattttgaccagtgcctgatgattcttaatagtccaggcaatcagattctcagtggcctctccattgaagaatataagaccacgttgaaaataatcaagcaagctattttagctacagacctagcactgtacattaagaggctaggagaattttttgaacttataagaaaaaatcaattcaatttggaagatcctcatcaaaaggagttgtttttggcaatgctgatgacagcttgtgccctttctgcaattacaaaaccctggcctattcaacaacggatagcagaacttgtagcaactgaattttttgatcaaggagacagagagagaaaagaactcaacatagaacccactgatctaatgaacagggagaagaaaaacaaaatcccaagtatgcaagttgggttcatagatgccatctgcttgcaactgtatgaggccctgacccacgtgtcagaggactgtttccctttgctagatggctgcagaaagaacaggcagaaatggcaggcccttgcagaacagcag

SEQ ID NO: 567 - protein, 326 aa, Artificial Sequence
  Description of Artificial Sequence: Synthetic Destabilizing Domain (DD)
EETRELQSLAAAVVPSAQTLKITDFSFSDFELSDLETAMCTIRMFTDLNLVQNFQMKHEVLCRWILSVKKNYRKNVAYHNWRHAFNTAQCMFAALKAGKIQNKLTDLEILALLIAALSHDLDHRGVNNSYIQRSEHPLAQLYCHSIMEHHHFDQCLMILNSPGNQILSGLSIEEYKTTLKIIKQAILATDLALYIKRRGELFELIRKNQFNLEDPHQKELFLAMLMTACDLSAITKPWPIQQRIAELVATEFFDQGDRERKELNIEPTDLMNREKKNKIPSMQVGFIDAICLQLYEALTHVSEDCFPLLDGCRKNRQKWQALAEQQ

SEQ ID NO: 568 - DNA, 978 bp, Artificial Sequence
  Description of Artificial Sequence: Synthetic Destabilizing Domain (DD)
gaagaaacaagagagctacagtcgttagcggctgctgtggtgccatctgcccagacccttaaaattactgactttagcttcagtgactttgagctgtctgatctggaaacagcaatgtgtacaattcggatgtttactgacctcaaccttgtgcagaacttccagatgaaacatgaggttctttgcagatggattttaagtgttaagaagaattatcggaagaatgttgcctatcataattggagacatgcctttaatacagctcagtgcatgtttgctgctctaaaagcaggcaaaattcagaacaagctgactgacctggagatacttgcattgctgattgctgcactaagccacgatttggatcaccgtggtgtgaataactcttacatacagcgaagtgaacatccacttgcccagctttactgccattcaatcatggaacaccatcattttgaccagtgcctgatgattcttaatagtccaggcaatcagattctcagtggcctctccattgaagaatataagaccacgttgaaaataatcaagcaagctattttagctacagacctagcactgtacattaagaggcgaggagaattgtttgaacttataagaaaaaatcaattcaatttggaagatcctcatcaaaaggagttgtttttggcaatgctgatgacagcttgtgatctttctgcaattacaaaaccctggcctattcaacaacggatagcagaacttgtagcaactgaattttttgatcaaggagacagagagagaaaagaactcaacatagaacccactgatctaatgaacagggagaagaaaaacaaaatcccaagtatgcaagttgggttcatagatgccatctgcttgcaactgtatgaggccctgacccacgtgtcagaggactgtttccctttgctagatggctgcagaaagaacaggcagaaatggcaggcccttgcagaacagcag

SEQ ID NO: 569 - protein, 326 aa, Artificial Sequence
  Description of Artificial Sequence: Synthetic Destabilizing Domain (DD)
EETRELQSLAAAVVPSAQTLKITDFSFSDFELSDLETALCTIRMFTDLNLVQNFQMKHEVLCRWILSVKKNYRKNVAYHNWRHAFNTAQCMFAALKAGKIQNKLTDLEILALLIAALSHDLDHRGVNNSYIQRSEHPLAQLYCHSIMEHHHFDQCLMILNSPGNQILSGLSIEEHKTTLKIIKQAILATDLALYIKRRGEFFELIRKNQFNLEDPHQKELFLAMLMTACDLSAITKPWPIQQRIAELVATEFVDQGDRERKELNIEPTDLMNREKKNKIPSMQVGFIDAICLQLYEALTHVSEDCFPLLDGCRKNRQKWQALAEQQ

SEQ ID NO: 570 - DNA, 978 bp, Artificial Sequence
  Description of Artificial Sequence: Synthetic Destabilizing Domain (DD)
gaagaaacaagagagctacagtcgttagcggctgctgtggtgccatctgcccagacccttaaaattactgactttagcttcagtgactttgagctgtctgatctggaaacagcactgtgtacaattcggatgtttactgacctcaaccttgtgcagaacttccagatgaaacatgaggttctttgcagatggattttaagtgttaagaagaattatcggaagaatgttgcctatcataattggagacatgcctttaatacagctcagtgcatgtttgctgctctaaaagcaggcaaaattcagaacaagctgactgacctggagatacttgcattgctgattgctgcactaagccacgatttggatcaccgtggtgtgaataactcttacatacagcgaagtgaacatccacttgcccagctttactgccattcaatcatggaacaccatcattttgaccagtgcctgatgattcttaatagtccaggcaatcagattctcagtggcctctccattgaagaacataagaccacgttgaaaataatcaagcaagctattttagctacagacctagcactgtacattaagaggcgaggagaattttttgaacttataagaaaaaatcaattcaatttggaagatcctcatcaaaaggagttgtttttggcaatgctgatgacagcttgtgatctttctgcaattacaaaaccctggcctattcaacaacggatagcagaacttgtagcaactgaatttgttgatcaaggagacagagagagaaaagaactcaacatagaacccactgatctaatgaacagggagaagaaaaacaaaatcccaagtatgcaagttgggttcatagatgccatctgcttgcaactgtatgaggccctgacccacgtgtcagaggactgtttccctttgctagatggctgcagaaagaacaggcagaaatggcaggcccttgcagaacagcag

SEQ ID NO: 571 - protein, 326 aa, Artificial Sequence
  Description of Artificial Sequence: Synthetic Destabilizing Domain (DD)
EETRELQSLAAAVVPSAQTLKITDFSFSDFELSDLETALCTIRMFTDLNLVQNFQMKHEVLCRWILSVKKYYRKNVAYHNWRHAFNTAQCMFAALKAGKIQNKLTDLEILALLIAALSHDLDHRGVNNSYIQRSEHPLAQLYCHSIMEHHHFDQCLMILNSPGNQILSGLSIEEYKTTLKKIKQAILATDLALYIKRRGEFFELIRKNQFNLEDPHQKELFLAMLMTACDLSAITKPWPIQQRIAELVATEFFDQGDRERKELNIEPTDLMNREKKNKIPSMQVGFIDAICLQLYEALTHVSEDCFPLLDGCRKNRQKWQALAEQQ

SEQ ID NO: 572 - DNA, 978 bp, Artificial Sequence
  Description of Artificial Sequence: Synthetic Destabilizing Domain (DD)
gaagaaacaagagagctacagtcgttagcggctgctgtggtgccatctgcccagacccttaaaattactgactttagcttcagtgactttgagctgtctgatctggaaacagcactgtgtacaattcggatgtttactgacctcaaccttgtgcagaacttccagatgaaacatgaggttctttgcagatggattttaagtgttaagaagtattatcggaagaatgttgcctatcataattggagacatgcctttaatacagctcagtgcatgtttgctgctctaaaagcaggcaaaattcagaacaagctgactgacctggagatacttgcattgctgattgctgcactaagccacgatttggatcaccgtggtgtgaataactcttacatacagcgaagtgaacatccacttgcccagctttactgccattcaatcatggaacaccatcattttgaccagtgcctgatgattcttaatagtccaggcaatcagattctcagtggcctctccattgaagaatataagaccacgttgaaaaaaatcaagcaagctattttagctacagacctagcactgtacattaagaggcgaggagaattttttgaacttataagaaaaaatcaattcaatttggaagatcctcatcaaaaggagttgtttttggcaatgctgatgacagcttgtgatctttctgcaattacaaaaccctggcctattcaacaacggatagcagaacttgtagcaactgaattttttgatcaaggagacagagagagaaaagaactcaacatagaacccactgatctaatgaacagggagaagaaaaacaaaatcccaagtatgcaagttgggttcatagatgccatctgcttgcaactgtatgaggccctgacccacgtgtcagaggactgtttccctttgctagatggctgcagaaagaacaggcagaaatggcaggcccttgcagaacagcag

SEQ ID NO: 573 - protein, 326 aa, Artificial Sequence
  Description of Artificial Sequence: Synthetic Destabilizing Domain (DD)
EETRELQSLAAAVVPSAQTLKITDFSFSDFELSDLETALCTIRMFTDLNLVQNFQMKHEVLCRWILSVKKNYRKNVAYHNWRHAFNTAQCMFAALKAGKIQNKLTDLEILALLIAALSHDLDHRGVNNSYIQRSEHPLAQLYCHSIMEHHHFDQCLMILNSPGNQFLSGLSIEEYKTTLKIIKQAILATDLALYIKRRGEFFELIRKNQFNLEDPHQKELFLAMLMTACDLSAITKPWPIQQRIAELVATEFFDQGDRERKGLNIEPTDLMNREKKNKIPSMQVGFIDAICLQLYEALTHVSEDCFPLLDGCRKNRQKWQALAEQQ

SEQ ID NO: 574 - DNA, 978 bp, Artificial Sequence
  Description of Artificial Sequence: Synthetic Destabilizing Domain (DD)
gaagaaacaagagagctacagtcgttagcggctgctgtggtgccatctgcccagacccttaaaattactgactttagcttcagtgactttgagctgtctgatctggaaacagcactgtgtacaattcggatgtttactgacctcaaccttgtgcagaacttccagatgaaacatgaggttctttgcagatggattttaagtgttaagaagaattatcggaagaatgttgcctatcataattggagacatgcctttaatacagctcagtgcatgtttgctgctctaaaagcaggcaaaattcagaacaagctgactgacctggagatacttgcattgctgattgctgcactaagccacgatttggatcaccgtggtgtgaataactcttacatacagcgaagtgaacatccacttgcccagctttactgccattcaatcatggaacaccatcattttgaccagtgcctgatgattcttaatagtccaggcaatcagtttctcagtggcctctccattgaagaatataagaccacgttgaaaataatcaagcaagctattttagctacagacctagcactgtacattaagaggcgaggagaattttttgaacttataagaaaaaatcaattcaatttggaagatcctcatcaaaaggagttgttcttggcaatgctgatgacagcttgtgatctttctgcaattacaaaaccctggcctattcaacaacggatagcagaacttgtagcaactgaattttttgatcaaggagacagagagagaaaaggactcaacatagaacccactgatctaatgaacagggagaagaaaaacaaaatcccaagtatgcaagttgggttcatagatgccatctgcttgcaactgtatgaggccctgacccacgtgtcagaggactgtttccctttgctagatggctgcagaaagaacaggcagaaatggcaggcccttgcagaacagcag

SEQ ID NO: 575 - protein, 326 aa, Artificial Sequence
  Description of Artificial Sequence: Synthetic Destabilizing Domain (DD)
EETRELQSLAAAVVPSAQTLKITDFSFSDFELSDLETALCTIRMFTDLNLVQNFQMKHEVLCRWILSVKKNYRKNVAYHNWRHAFNTAQCMFAALKAGKIQNKLTDLEILALLIAALSHDLDHRGVNNSYIQRSEHPLAQLYCHSIMEHHHFDQCLMILNSPGNQILSGLSIEEYKTTLKIIKQAILATGLALYIKRRGEFFELIRKNQFNLEDPHQKELFLAMLMTACDLSAITKPWPIQQRIAELVATEFFDQGDRERKELNIEPTDLMNREKKNKIPSMQVGFIDAICLQLYEALTHVSEDCFPLLDGCRNNRQKWQALAEQQ

SEQ ID NO: 576 - DNA, 978 bp, Artificial Sequence
  Description of Artificial Sequence: Synthetic Destabilizing Domain (DD)
gaagaaacaagagagctacagtcgttagcggctgctgtggtgccatctgcccagacccttaaaattactgactttagcttcagtgactttgagctgtctgatctggaaacagcactgtgtacaattcggatgtttactgacctcaaccttgtgcagaacttccagatgaaacatgaggttctttgcagatggattttaagtgttaagaagaattatcggaagaatgttgcctatcataattggagacatgcctttaatacagctcagtgcatgtttgctgctctaaaagcaggcaaaattcagaacaagctgactgacctggagatacttgcattgctgattgctgcactaagccacgatttggatcaccgtggtgtgaataactcttacatacagcgaagtgaacatccacttgcccagctttactgccattcaatcatggaacaccatcattttgaccagtgcctgatgattcttaatagtccaggcaatcagattctcagtggcctctccattgaagaatataagaccacgttgaaaataatcaagcaagctattttagctacaggcctagcactgtacattaagaggcgaggagaattttttgaacttataagaaaaaatcaattcaatttggaagatcctcatcaaaaggagttgtttttggcaatgctgatgacagcttgtgatctttctgcaattacaaaaccctggcctattcaacaacggatagcagaacttgtagcaactgaattttttgatcaaggagacagagagagaaaagaactcaacatagaacccactgatctaatgaacagggagaagaaaaacaaaatcccaagtatgcaagttgggttcatagatgccatctgcttgcaactgtatgaggccctgacccacgtgtcagaggactgtttccctttgctagatggctgcagaaataacaggcagaaatggcaggcccttgcagaacagcag

SEQ ID NO: 577 - protein, 326 aa, Artificial Sequence
  Description of Artificial Sequence: Synthetic Destabilizing Domain (DD)
EETRELQSLAAAVVPSAQTLKSTDFSFSDFELSDLETALCTIRMFTDLNLVQNFQMKHEVLCRWILSVKKNYRKNVAYHNWRHAFNTAQCMFAALKAGKIQNKLTDLEILALLIAALSHDLDHRGVNNSYIQRSEHPLAQLYCHSIMEHHHFDQCLMILNSPGNQILSGLSIEEYKTTLKIIKQAILATDLALYIKRRGEFFELIRKNQFNLEDPHQKELFLAMLMTACDLSAITKPWPIQQRIAELVATEFFDQGDRERKDLNIEPTDLMNREKKNKIPSMQVGFIDAICLQLYEALTHVSEDCFPLLDGCRKNRQKWQALAEQQ

SEQ ID NO: 578 - DNA, 978 bp, Artificial Sequence
  Description of Artificial Sequence: Synthetic Destabilizing Domain (DD)
gaagaaacaagagagctacagtcgttagcggctgctgtggtgccatctgcccagacccttaaaagtactgactttagcttcagtgactttgagctgtctgatctggaaacagcactgtgtacaattcggatgtttactgacctcaaccttgtgcagaacttccagatgaaacatgaggttctttgcagatggattttaagtgttaagaagaattatcggaagaatgttgcctatcataattggagacatgcctttaatacagctcagtgcatgtttgctgctctaaaagcaggcaaaattcagaacaagctgactgacctggagatacttgcattgctgattgctgcactaagccacgatttggatcaccgtggtgtgaataactcatacatacagcgaagtgaacatccacttgcccagctttactgccattcaatcatggaacaccatcattttgaccagtgcctgatgattcttaatagtccaggcaatcagattctcagtggcctctccattgaagaatataagaccacgttgaaaataatcaagcaagctattttagctacagacctagcactgtacattaagaggcgaggagaattttttgaacttataagaaaaaatcaattcaatttggaagatcctcatcaaaaggagttgtttttggcaatgctgatgacagcttgtgatctttctgcaattacaaaaccctggcctattcaacaacggatagcagaacttgtagcaactgaattttttgatcaaggagacagagagagaaaagatctcaacatagaacccactgatctaatgaacagggagaagaaaaacaaaatcccaagtatgcaagttgggttcatagatgccatctgcttgcaactgtatgaggccctgacccacgtgtcagaggactgtttccctttgctagatggctgcagaaagaacaggcagaaatggcaggcccttgcagaacagcag

SEQ ID NO: 579 - protein, 326 aa, Artificial Sequence
  Description of Artificial Sequence: Synthetic Destabilizing Domain (DD)
EETRELQSLAAAVVPSAQTLKITDFSFSDFELSDMETALCTIRMFTDLNLVQNFQMKHEVLCRWILSVKKNYRKNVAYHNWRHAFNTAQCMFAALKAGKIQNKLTDLEILALLIAALSHDLDHRGVNNSYIQRSEHPLAQLYCHSIMEHHHFDQCLMILNSPGNQILSGLSIEEYKTTLKIIKQAILATDLALYIKRRGEFFELIRKNQFNLEDPHQKELFLAMLMTACDLSAITKPWPIQQRIAELVATEFFDQGDRERKELNIEPTDLMNREKKNKIPSMQVGFIDAICLQLYEALSHVSEDCFPLLDGCRKNRQKWQALAEQQ

SEQ ID NO: 580 - DNA, 978 bp, Artificial Sequence
  Description of Artificial Sequence: Synthetic Destabilizing Domain (DD)
gaagaaacaagagagctacagtcgttagcggctgctgtggtgccatctgcccagacccttaaaattactgactttagcttcagtgactttgagctgtctgatatggaaacagcactgtgtacaattcggatgtttactgacctcaaccttgtgcagaacttccagatgaaacatgaggttctttgcagatggattttaagtgttaagaagaattatcggaagaatgttgcctatcataattggagacatgcctttaatacagctcagtgcatgtttgctgctctaaaagcaggcaaaattcagaacaagctgactgacctggagatacttgcattgctgattgctgcactaagccacgatttggatcaccgtggtgtgaataactcttacatacagcgaagtgaacatccacttgcccagctttactgccattcaatcatggaacaccatcattttgaccagtgcctgatgattcttaatagtccaggcaatcagattctcagtggcctctccattgaagaatataagaccacgttgaaaataatcaagcaagctattttagctacagacctagcactgtacattaagaggcgaggagaattttttgaacttataagaaaaaatcaattcaatttggaagatcctcatcaaaaggagttgtttttggcaatgctgatgacagcttgtgatctttctgcaattacaaaaccctggcctattcaacaacggatagcagaacttgtagcaactgaattttttgatcaaggagacagagagagaaaagaactcaacatagaacccactgatctaatgaacagggagaagaaaaacaaaatcccaagtatgcaagttgggttcatagatgccatctgcttgcaactgtatgaggccctgagccacgtgtcagaggactgtttccctttgctagatggctgcagaaagaacaggcagaaatggcaggcccttgcagaacagcag

SEQ ID NO: 581 - protein, 326 aa, Artificial Sequence
  Description of Artificial Sequence: Synthetic Destabilizing Domain (DD)
EETRELQSLAAAVMPSAQTLKITDFSFSDFELSDLETALCTIRMFTDLNLVQNFQMKHEVLCRWILSVKKNYRKNVAYHNWRHAFNTAQCMFAALKAGKIQNKLTDLEILALLIAALSHDLDHRGVNNSYIQRSEHPLAQLYCHSIMEHHHFDQCLMILNSPGNQILSGLSIEEYKTTLKIIKQAILATDLALYIKRRGEFFELIRKNQFNLEDPHQKELFLAMLMTACDLSAITKPWPIQQRIAELVATEFFDQGDRERKELNIEPTNLMNREKKNKIPSMQVGFIDAICLQLYEALTHVSEDCFPLLDGCRKNRQKWQALAEQQ

SEQ ID NO: 582 - DNA, 978 bp, Artificial Sequence
  Description of Artificial Sequence: Synthetic Destabilizing Domain (DD)
gaagaaacaagagagctacagtcgttagcggctgctgtgatgccatctgcccagacccttaaaattactgactttagcttcagtgactttgagctgtctgatctggaaacagcactgtgtacaattcggatgtttactgacctcaaccttgtgcagaacttccagatgaaacatgaggttctttgcagatggattttaagtgttaagaagaattatcggaagaatgttgcctatcataattggagacatgcctttaatacagctcagtgcatgtttgctgctctaaaagcaggcaaaattcagaacaagctgactgacctggagatacttgcattgctgattgctgcactaagccacgatttggatcaccgtggtgtgaataactcttacatacagcgaagtgaacatccacttgcccagctttactgccattcaatcatggaacaccatcattttgaccagtgcctgatgattcttaatagtccaggcaatcagattctcagtggcctctccattgaagaatataagaccacgttgaaaataatcaagcaagctattttagctacagacctagcactgtacattaagaggcgaggagaattttttgaacttataagaaaaaatcaattcaatttggaagatcctcatcaaaaggagttgtttttggcaatgctgatgacagcttgtgatctttctgcaattacaaaaccctggcctattcaacaacggatagcagaacttgtagcaactgaattttttgatcaaggagacagagagagaaaagaactcaacatagaacccactaatctaatgaacagggagaagaaaaacaaaatcccaagtatgcaagttgggttcatagatgccatctgcttgcaactgtatgaggccctgacccacgtgtcagaggactgtttccctttgctagatggctgcagaaagaacaggcagaaatggcaggcccttgcagaacagcag

SEQ ID NO: 583 - protein, 326 aa, Artificial Sequence
  Description of Artificial Sequence: Synthetic Destabilizing Domain (DD)
EETRELQSLAAAVVPSAQTLKITDFSFSDFELSDLETALCTIRMFTDLNLVQNFQMKHEVLCRWILSVKKNYRKNVAYHNWRHAFNTAQCMFAALKAGKIQNKLTDLEILALLIAALSHDLDHRAVNNSYIQRSEHPLAQLYCHSIMEHHHFDQCLMILNSPGNQILSGLSIEEYKTTLKIIKQAILATDLALYIKRRGEFFELIRKNQFNLEDPHQKELFLAMLMTACDLSAITKPWPIQQRIAELVAIEFFDQGDRERKELNIEPTDLMNREKKNKIPSMQVGFIDAICLQLYEALTHVSEDCFPLLDGCRKNRQKWQALAEQQ

SEQ ID NO: 584 - DNA, 978 bp, Artificial Sequence
  Description of Artificial Sequence: Synthetic Destabilizing Domain (DD)
gaagaaacaagagagctacagtcgttagcggctgctgtggtgccatctgcccagacccttaaaattactgactttagcttcagtgactttgagctgtctgatctggaaacagcactgtgtacaattcggatgtttactgacctcaaccttgtgcagaacttccagatgaaacatgaggttctttgcagatggattttaagtgttaagaagaattatcggaagaatgttgcctatcataattggagacatgcctttaatacagctcagtgcatgtttgctgctctaaaagcaggcaaaattcagaacaagctgactgacctggagatacttgcattgctgattgctgcactaagccacgatttggatcaccgtgctgtgaataactcttacatacagcgaagtgaacatccacttgcccagctttactgccattcaatcatggaacaccatcattttgaccagtgcctgatgattcttaatagtccaggcaatcagattctcagtggcctctccattgaagaatataagaccacgttgaaaataatcaagcaagctattttagctacagacctagcactgtacattaagaggcgaggagaattttttgaacttataagaaaaaatcaattcaatttggaagatcctcatcaaaaggagttgtttttggcaatgctgatgacagcttgtgatctttctgcaattacaaaaccctggcctattcaacaacggatagcagaacttgtagcaattgaattttttgatcaaggagacagagagagaaaagaactcaacatagaacccactgatctaatgaacagggagaagaaaaacaaaatcccaagtatgcaagttgggttcatagatgccatctgcttgcaactgtatgaggccctgacccacgtgtcagaggactgtttccctttgctagatggctgcagaaagaacaggcagaaatggcaggcccttgcagaacagcag

SEQ ID NO: 585 - protein, 326 aa, Artificial Sequence
  Description of Artificial Sequence: Synthetic Destabilizing Domain (DD)
EETRELQSLAAAVVPSAQTLKITDFSFSDFELSDLETALCTIRMFTDLNLVQNFQMKHEVLCRWILSVKKNYRKNVAYHNWRLAFNTAQCMFAALKAGKIQNKLTDLEILALLIAALSHDLDHRGVNNSYIQRSEHPLAQLYCHSIMEHHHFDQCLMILNSPGNQILSGLSIEEYKTTLKIIKQAILVTDLALYIKRRGEFFELIRKNQFNLEDPHQKELFLAMLMTACDLSAITKPWPIQQRIAELVATEFFDQGDRERKELNIEPTDLMNREKKNKIPSMQVGFIDAICLQLYEALTHVSEDCFPLLDGCRKNRQKWQALAEQQ

SEQ ID NO: 586 - DNA, 978 bp, Artificial Sequence
  Description of Artificial Sequence: Synthetic Destabilizing Domain (DD)
gaagaaacaagagagctacagtcgttagcggctgctgtggtgccatctgcccagacccttaaaattactgactttagcttcagtgactttgagctgtctgatctggaaacagcactgtgtacaattcggatgtttactgacctcaaccttgtgcagaacttccagatgaaacatgaggttctttgcagatggattttaagtgttaagaagaattatcggaagaatgttgcctatcataattggagacttgcctttaatacagctcagtgcatgtttgctgctctaaaagcaggcaaaattcagaacaagctgactgacctggagatacttgcattgctgattgctgcactaagccacgatttggatcaccgtggtgtgaataactcttacatacagcgaagtgaacatccacttgcccagctttactgccattcaatcatggaacaccatcattttgaccagtgcctgatgattcttaatagtccaggcaatcagattctcagtggcctctccattgaagaatataagaccacgttgaaaataatcaagcaagctattttagttacagacctagcactgtacattaagaggcgaggagaattttttgaacttataagaaaaaatcaattcaatttggaagatcctcatcaaaaggagttgtttttggcaatgctgatgacagcttgtgatctttctgcaattacaaaaccctggcctattcaacaacggatagcagaacttgtagcaactgaattttttgatcaaggagacagagagagaaaagaactcaacatagaacccactgatctaatgaacagggagaagaaaaacaaaatcccaagtatgcaagttgggttcatagatgccatctgcttgcaactgtatgaggccctgacccacgtgtcagaggactgtttccctttgctagatggctgcagaaagaacaggcagaaatggcaggcccttgcagaacagcag

SEQ ID NO: 587 - protein, 326 aa, Artificial Sequence
  Description of Artificial Sequence: Synthetic Destabilizing Domain (DD)
EETRELQSLAAAVVPSAQTLKITDFSFSDFELSDLETALCTIRMFTDLNLVQNFQMKHEVLCRWILSVKKNYRKYVAYHNWRHAFNTAQCMFAALKAGKIQNKLTDLEILALLIAALSHDLDHRGVNNSYIQRSEHPLAQLYCHSIMEHHHFDQCLMILNSPGNQILSGLSIEEYKTTLKIIKQAILATDLALYIKRRGEFFELIRKNQFNLEDPHQKELFLAMLMTACDLSAITKPWPIQQRIAELVATEFFDQGDRERKELNLEPTDLMNREKKNKIPSMQVGFIDAICLQLYEALTHVSEDCFPLLDGCRKNRQKWQALAEQQ

SEQ ID NO: 588 - DNA, 978 bp, Artificial Sequence
  Description of Artificial Sequence: Synthetic Destabilizing Domain (DD)
gaagaaacaagagagctacagtcgttagcggctgctgtggtgccatctgcccagacccttaaaattactgactttagcttcagtgactttgagctgtctgatctggaaacagcactgtgtacaattcggatgtttactgacctcaaccttgtgcagaacttccagatgaaacatgaggttctttgcagatggattttaagtgttaagaagaattatcggaagtatgttgcctatcataattggagacatgcctttaatacagctcagtgcatgtttgctgctctaaaagcaggcaaaattcagaacaagctgactgacctggagatacttgcattgctgattgctgcactaagccacgatttggatcaccgtggtgtgaataactcttacatacagcgaagtgaacatccacttgcccagctttactgccattcaatcatggaacaccatcattttgaccagtgcctgatgattcttaatagtccaggcaatcagattctcagtggcctctccattgaagaatataagaccacgttgaaaataatcaagcaagctattttagctacagacctagcactgtacattaagaggcgaggagaattttttgaacttataagaaaaaatcaattcaatttggaagatcctcatcaaaaggagttgtttttggcaatgctgatgacagcttgtgatctttctgcaattacaaaaccctggcctattcaacaacggatagcagaacttgtagcaactgaattttttgatcaaggagacagagagagaaaagaactcaacttagaacccactgatctaatgaacagggagaagaaaaacaaaatcccaagtatgcaagttgggttcatagatgccatctgcttgcaactgtatgaggccctgacccacgtgtcagaggactgtttccctttgctagatggctgcagaaagaacaggcagaaatggcaggcccttgcagaacagcag

SEQ ID NO: 589 - protein, 326 aa, Artificial Sequence
  Description of Artificial Sequence: Synthetic Destabilizing Domain (DD)
EETRELQSLAAAVVPSAQTLKITDFSFSDFELSDLETALCTIRMFTDLNLVQNFQMKHEVLCRWILSVKKNYRKNVAYHNWRHAFNTAQCMFAALKAGKIQNKLTDLEILALLIAALSHDLDHRGVNNSYIQRSEHPLAQLYCHSIMEHHHFDQCLMILNSPGNQILSGLSIEEYKTTLKIIKQAILATDLALYIKRRGEFFELIRKNQFNLEDPHQKELFLAMLMTACDLSAITQPWPIQQRIAELVATEFFDQGDRERKELNIEPTDLMNREKKNKIPSMQVGFIDAICLQLYEALTHVSEDCFPLLDGCRNNRQKWQALAEQQ

SEQ ID NO: 590 - DNA, 978 bp, Artificial Sequence
  Description of Artificial Sequence: Synthetic Destabilizing Domain (DD)
gaagaaacaagagagctacagtcgttagcggctgctgtggtgccatctgcccagacccttaaaattactgactttagcttcagtgactttgagctgtctgatctggaaacagcactgtgtacaattcggatgtttactgacctcaaccttgtgcagaacttccagatgaaacatgaggttctttgcagatggattttaagtgttaagaagaattatcggaagaatgttgcctatcataattggagacatgcctttaatacagctcagtgcatgtttgctgctctaaaagcaggcaaaattcagaacaagctgactgacctggagatacttgcattgctgattgctgcactaagccacgatttggatcaccgtggtgtgaataactcttacatacagcgaagtgaacatccacttgcccagctttactgccattcaatcatggaacaccatcattttgaccagtgcctgatgattcttaatagtccaggcaatcagattctcagtggcctctccattgaagaatataagaccacgttgaaaataatcaagcaagctattttagctacagacctagcactgtacattaagaggcgaggagaattttttgaacttataagaaaaaatcaattcaatttggaagatcctcatcaaaaggagttgtttttggcaatgctgatgacagcttgtgatctttctgcaattacacaaccctggcctattcaacaacggatagcagaacttgtagcaactgaattttttgatcaaggagacagagagagaaaagaactcaacatagaacccactgatctaatgaacagggagaagaaaaacaaaatcccaagtatgcaagttgggttcatagatgccatctgcttgcaactgtatgaggccctgacccacgtgtcagaggactgtttccctttgctagatggctgcagaaataacaggcagaaatggcaggcccttgcagaacagcag

SEQ ID NO: 591 - protein, 326 aa, Artificial Sequence
  Description of Artificial Sequence: Synthetic Destabilizing Domain (DD)
EETRELQSLAAAVMPSAQTLKITDFSFSDFELSDLETALCTIRMFTDLNLVQNFQMKHEVLCRWILSVKKNYRKNVAYHNWRHAFNTAQCMFAALKAGKIQNKLTDLEILALLIAALSHDLDHRGVNNSYIQRSEHPLAQLYCHSIMEHHHFDQCLMILNSPGNQILSGLSIEEYKTTLKIIKQAILATDLALYIKRRGEFFELIRKNQFNLEDPHQKELFLAMLMTACDLSAITKPWPIQQRIAELVATEFFDQGDRERKELNIEPTDLMNREKKNKIPSMQVGIIDAICLQLYEALTHVSEDCFPLLDGCRKNRQKWQALAEQQ

SEQ ID NO: 592 - DNA, 978 bp, Artificial Sequence
  Description of Artificial Sequence: Synthetic Destabilizing Domain (DD)
gaagaaacaagagagctacagtcgttagcggctgctgtgatgccatctgcccagacccttaaaattactgactttagcttcagtgactttgagctgtctgatctggaaacagcactgtgtacaattcggatgtttactgacctcaaccttgtgcagaacttccagatgaaacatgaggttctttgcagatggattttaagtgttaagaagaattatcggaagaatgttgcctatcataattggagacatgcctttaatacagctcagtgcatgtttgctgctctaaaagcaggcaaaattcagaacaagctgactgacctggagatacttgcattgctgattgctgcactaagccacgatttggatcaccgtggtgtgaataactcttacatacagcgaagtgaacatccacttgcccagctttactgccattcaatcatggaacaccatcattttgaccagtgcctgatgattcttaatagtccaggcaatcagattctcagtggcctctccattgaagaatataagaccacgttgaaaataatcaagcaagctattttagctacagacctagcactgtacattaagaggcgaggagaattttttgaacttataagaaaaaatcaattcaatttggaagatcctcatcaaaaggagttgtttttggcaatgctgatgacagcttgtgatctttctgcaattacaaaaccctggcctattcaacaacggatagcagaacttgtagcaactgaattttttgatcaaggagacagagagagaaaagaactcaacatagaacccactgatctaatgaacagggagaagaaaaacaaaatcccaagtatgcaagttgggatcatagatgccatctgcttgcaactgtatgaggccctgacccacgtgtcagaggactgtttccctttgctagatggctgcagaaagaacaggcagaaatggcaggcccttgcagaacagcag

SEQ ID NO: 593 - protein, 326 aa, Artificial Sequence
  Description of Artificial Sequence: Synthetic Destabilizing Domain (DD)
EETRELQSLAAAVVPFAQTRKITDFSFSDFELSDLETALCTIRMFTDLNLVQNFQMKHEVLCRWILSVKKNYRKNVAYHNWRHAFNTAQCMFAALKAGKIQNKLTDLEILALLIAALSHDLDHRGVNNSYIQRSEHPLAQLYCHSIMEHHHFDQCLMILNSPGNQILSGLSIEEYKTTLKIIKQAILATDLALYIKRRGEFFELIRKNQFNLEDPHQKELFLAMLMTACDLSAITKPWPIQQRIAELVATEFFDQGDRERKELNIEPTDLMNREKKNKIPSMQVGFIDAICLQLYEALTHVSEDCFPLLDGCRKNRQKWQALAEQQ

SEQ ID NO: 594 - DNA, 978 bp, Artificial Sequence
  Description of Artificial Sequence: Synthetic Destabilizing Domain (DD)
gaagaaacaagagagctacagtcgttagcggctgctgtggtgccatttgcccagacccgtaaaattactgactttagcttcagtgactttgagctgtctgatctggaaacagcactgtgtacaattcggatgtttactgacctcaaccttgtgcagaacttccagatgaaacatgaggttctttgcagatggattttaagtgttaagaagaattatcggaagaatgttgcctatcataattggagacatgcctttaatacagctcagtgcatgtttgctgctctaaaagcaggcaaaattcagaacaagctgactgacctggagatacttgcattgctgattgctgcactaagccacgatttggatcaccgtggtgtgaataactcttacatacagcgaagtgaacatccacttgcccagctttactgccattcaatcatggaacaccatcattttgaccagtgcctgatgattcttaatagtccaggcaatcagattctcagtggcctctccattgaagaatataagaccacgttgaaaataatcaagcaagctattttagctacagacctagcactgtacattaagaggcgaggagaattttttgaacttataagaaaaaatcaattcaatttggaagatcctcatcaaaaggagttgtttttggcaatgctgatgacagcttgtgatctttctgcaattacaaaaccctggcctattcaacaacggatagcagaacttgtagcaactgaattttttgatcaaggagacagagagagaaaagaactcaacatagaacccactgatctaatgaacagggagaagaaaaacaaaatcccaagtatgcaagttgggttcatagatgccatctgcttgcaactgtatgaggccctgacccacgtgtcagaggactgtttccctttgctagatggctgcagaaagaacaggcagaaatggcaggcccttgcagaacagcag

SEQ ID NO: 595 - protein, 326 aa, Artificial Sequence
  Description of Artificial Sequence: Synthetic Destabilizing Domain (DD)
EETRELQSLAAAVVPSAQTLKITDFSFSDFELSDLETALCTIRMFTDLNLVQNFQMKHEVLCRWILSVKKNYRKNVAYHNWRHAFNTAQCMFAALKAGKIQNKLTDLEILALLIAALSHDLDHRGVNNSYIQRSEHPLAQLYCHSIMEHHHFDQCLMILNSPGNQILSGLSIEEYKTTLKIIKQAILATGLALYIKRRGEFFELIRKNQFNLEDPHQKELFLAMLMTACGLSAITKPWPIQQRIAELVATEFFDQGDRERKELNIEPTDLMNREKKNKIPSMQVGFIDAICLQLYEALTHVSEDCFPLLDGCRKNRQKWQALAEQQ

SEQ ID NO: 596 - DNA, 978 bp, Artificial Sequence
  Description of Artificial Sequence: Synthetic Destabilizing Domain (DD)
gaagaaacaagagagctacagtcgttagcggctgctgtggtgccatctgcccagacccttaaaattactgactttagcttcagtgactttgagctgtctgatctggaaacagcactgtgtacaattcggatgtttactgacctcaaccttgtgcagaacttccagatgaaacatgaggttctttgcagatggattttaagtgttaagaagaattatcggaagaatgttgcctatcataattggagacatgcctttaatacagctcagtgcatgtttgctgctctaaaagcaggcaaaattcagaacaagctgactgacctggagatacttgcattgctgattgctgcactaagccacgatttggatcaccgtggtgtgaataactcttacatacagcgaagtgaacatccacttgcccagctttactgccattcaatcatggaacaccatcattttgaccagtgcctgatgattcttaatagtccaggcaatcagattctcagtggcctctccattgaagaatataagaccacgttgaaaataatcaagcaagctattttagctacaggcctagcactgtacattaagaggcgaggagaattttttgaacttataagaaaaaatcaattcaatttggaagatcctcatcaaaaggagttgtttttggcaatgctgatgacagcttgtggcctttctgcaattacaaaaccctggcctattcaacaacggatagcagaacttgtagcaactgaattttttgatcaaggagacagagagagaaaagaactcaacatagaacccactgatctaatgaacagggagaagaaaaacaaaatcccaagtatgcaagttgggttcatagatgccatctgcttgcaactgtatgaggccctgacccacgtgtcagaggactgtttccctttgctagatggctgcagaaagaacaggcagaaatggcaggcccttgcagaacagcag

SEQ ID NO: 597 - protein, 326 aa, Artificial Sequence
  Description of Artificial Sequence: Synthetic Destabilizing Domain (DD)
EETRELQSLAAAVVPSAQTLKITDFSFSDFELSDLETALCTIRMFTDLNLVQNFQMKHEVLCRWILSVKKNYRKNVAYHNWRHAFNTAQCMFAALKAGKIQNKLTDLEILALLIAALSHDLDHRGVNNSYIQRSEHPLAQLYCHSIMEHHHFDQCLMILNSPGNQILSGLSIEEYKTTLKIIKQAILATDLALLIKRRGEFFELIRKNQFNLEDPHQKELFLAMLMTACNLSAITKPWPIQQRIAELVATEFFDQGDRERKELNIEPTDLMNREKKNKIPSMQVGFIDAICLQLYEALTHVSEDCFPLLDGCRKNRQKWQALAEQQ

SEQ ID NO: 598 - DNA, 978 bp, Artificial Sequence
  Description of Artificial Sequence: Synthetic Destabilizing Domain (DD)
gaagaaacaagagagctacagtcgttagcggctgctgtggtgccatctgcccagacccttaaaattactgactttagcttcagtgactttgagctgtctgatctggaaacagcactgtgtacaattcggatgtttactgacctcaaccttgtgcagaacttccagatgaaacatgaggttctttgcagatggattttaagtgttaagaagaattatcggaagaatgttgcctatcataattggagacatgcctttaatacagctcagtgcatgtttgctgctctaaaagcaggcaaaattcagaacaagctgactgacctggagatacttgcattgctgattgctgcactaagccacgatttggatcaccgtggtgtgaataactcttacatacagcgaagtgaacatccacttgcccagctttactgccattcaatcatggaacaccatcattttgaccagtgcctgatgattcttaatagtccaggcaatcagattctcagtggcctctccattgaagaatataagaccacgttgaaaataatcaagcaagctattttagctacagacctagcactgctcattaagaggcgaggagaattttttgaacttataagaaaaaatcaattcaatttggaagatcctcatcaaaaggagttgtttttggcaatgctgatgacagcttgtaatctttctgcaattacaaaaccctggcctattcaacaacggatagcagaacttgtagcaactgaattttttgatcaaggagacagagagagaaaagaactcaacatagaacccactgatctaatgaacagggagaagaaaaacaaaatcccaagtatgcaagttgggttcatagatgccatctgcttgcaactgtatgaggccctgacccacgtgtcagaggactgtttccctttgctagatggctgcagaaagaacaggcagaaatggcaggcccttgcagaacagcag

SEQ ID NO: 599 - protein, 326 aa, Artificial Sequence
  Description of Artificial Sequence: Synthetic Destabilizing Domain (DD)
EETRELQSLAAAVVPSAQTLKITDFSFSDFELSDLETALCTIRMFTDLNLVQNFQMKHEVLCRWILSVKKNYRKNVAYHNWRHAFNTAQCMFAALKAGKIQNKLTDLEILALLIAALSHDLDHRGVNNSYIQRSEHPLAQLYCHSIMAHHHFDQCLMILNSPGNQILSGLSIEEYKTTLKIIKQAILATDLALYIKRLGEFFELIRKNQFNLEDPHQKELFLAMLMTACDLSAITKPWPIQQRIAELVATEFFDQGDRERKELNIEPTDLMNREKKNKIPSMQVGFIDAICLQLYEALTHVSEDCFPLLDGCRKNRQKWQALAEQQ

SEQ ID NO: 600 - DNA, 978 bp, Artificial Sequence
  Description of Artificial Sequence: Synthetic Destabilizing Domain (DD)
gaagaaacaagagagctacagtcgttagcggctgctgtggtgccatctgcccagacccttaaaattactgactttagcttcagtgactttgagctgtctgatctggaaacagcactgtgtacaattcggatgtttactgacctcaaccttgtgcagaacttccagatgaaacatgaggttctttgcagatggattttaagtgttaagaagaattatcggaagaatgttgcctatcataattggagacatgcctttaatacagctcagtgcatgtttgctgctctaaaagcaggcaaaattcagaacaagctgactgacctggagatacttgcattgctgattgctgcactaagccacgatttggatcaccgtggtgtgaataactcttacatacagcgaagtgaacatccacttgcccagctttactgccattcaatcatggcccaccatcattttgaccagtgcctgatgattcttaatagtccaggcaatcagattctcagtggcctctccattgaagaatataagaccacgttgaaaataatcaagcaagctattttagctacagacctagcactgtacattaagaggctaggagaattttttgaacttataagaaaaaatcaattcaatttggaagatcctcatcaaaaggagttgtttttggcaatgctgatgacagcttgtgatctttctgcaattacaaaaccctggcctattcaacaacggatagcagaacttgtagcaactgaattttttgatcaaggagacagagagagaaaagaactcaacatagaacccactgatctaatgaacagggagaagaaaaacaaaatcccaagtatgcaagttgggttcatagatgccatctgcttgcaactgtatgaggccctgacccacgtgtcagaggactgtttccctttgctagatggctgcagaaagaacaggcagaaatggcaggcccttgcagaacagcag

SEQ ID NO: 601 - protein, 326 aa, Artificial Sequence
  Description of Artificial Sequence: Synthetic Destabilizing Domain (DD)
EETRELQSLAAAVVPSAQTLKITDFSFSDFELSDLETALCTIRMFTDLNLVQNFQMKHEVLCRWILSVKKNYRKNVAYHNWRHAFNTAQCMFAALKAGKIQNKLTDLEILALLIAALSHDLDHRGVNNSYIQRSEHPLAQLYCHSIMEHHHFDQCLMILNSPGNQILSGLSIEEYKTTLKIIKQAILATALALYIKRLGEFFELIRKNQFNLEDPHQKELFLAMLMTACDLSAITKPWPIQQRIAELVATEFFDQGDRERKELNIEPTDLMNREKKNKIPSMQVGFIDAICLQLYEALTHVSEDCFPLLDGCRKNRQKWQALAEQQ

SEQ ID NO: 602 - DNA, 978 bp, Artificial Sequence
  Description of Artificial Sequence: Synthetic Destabilizing Domain (DD)
gaagaaacaagagagctacagtcgttagcggctgctgtggtgccatctgcccagacccttaaaattactgactttagcttcagtgactttgagctgtctgatctggaaacagcactgtgtacaattcggatgtttactgacctcaaccttgtgcagaacttccagatgaaacatgaggttctttgcagatggattttaagtgttaagaagaattatcggaagaatgttgcctatcataattggagacatgcctttaatacagctcagtgcatgtttgctgctctaaaagcaggcaaaattcagaacaagctgactgacctggagatacttgcattgctgattgctgcactaagccacgatttggatcaccgtggtgtgaataactcttacatacagcgaagtgaacatccacttgcccagctttactgccattcaatcatggaacaccatcattttgaccagtgcctgatgattcttaatagtccaggcaatcagattctcagtggcctctccattgaagaatataagaccacgttgaaaataatcaagcaagctattttagctacagccctagcactgtacattaagaggctaggagaattttttgaacttataagaaaaaatcaattcaatttggaagatcctcatcaaaaggagttgtttttggcaatgctgatgacagcttgtgatctttctgcaattacaaaaccctggcctattcaacaacggatagcagaacttgtagcaactgaattttttgatcaaggagacagagagagaaaagaactcaacatagaacccactgatctaatgaacagggagaagaaaaacaaaatcccaagtatgcaagttgggttcatagatgccatctgcttgcaactgtatgaggccctgacccacgtgtcagaggactgtttccctttgctagatggctgcagaaagaacaggcagaaatggcaggcccttgcagaacagcag

SEQ ID NO: 603 - protein, 326 aa, Artificial Sequence
  Description of Artificial Sequence: Synthetic Destabilizing Domain (DD)
EETRELQSLAAAVVPSAQTLKITDFSFGDFELSDLETALCTIRMFTDLNLVQNFQMKHEVLCRWILSVKKNYRKNVAYHNWRHAFNTAQCMFAALKAGKIQNKLTDLEILALLIAALSHDLDHRGVNNSYIQRSEHPLAQLYCHSIMEHHHFDQCLMILNSPGNQILSGLSIEEYKTTLKIIKQAILATDLAPYIKRRGEFFELIRKNQFNLEDPHQKELFLAMLMTACDLSAITKPWPIQQRIAELVATEFFDQGDRERKELNIEPTDLMNREKKNKIPSMQVGFIDAICLQLYEALTHVSEDCFPLLDGCTKNRQKWQALAEQQ

SEQ ID NO: 604 - DNA, 978 bp, Artificial Sequence
  Description of Artificial Sequence: Synthetic Destabilizing Domain (DD)
gaagaaacaagagagctacagtcgttagcggctgctgtggtgccatctgcccagacccttaaaattactgactttagcttcggtgactttgagctgtctgatctggaaacagcactgtgtacaattcggatgtttactgacctcaaccttgtgcagaacttccagatgaaacatgaggttctttgcagatggattttaagtgttaagaagaattatcggaagaatgttgcctatcataattggagacatgcctttaatacagctcagtgcatgtttgctgctctaaaagcaggcaaaattcagaacaagctgactgacctggagatacttgcattgctgattgctgcactaagccacgatttggatcaccgtggtgtgaataactcttacatacagcgaagtgaacatccacttgcccagctttactgccattcaatcatggaacaccatcattttgaccagtgcctgatgattcttaatagtccaggcaatcagattctcagtggcctctccattgaagaatataagaccacgttgaaaataatcaagcaagctattttagctacagacctagcaccgtacattaagaggcgaggagaattttttgaacttataagaaaaaatcaattcaatttggaagatcctcatcaaaaggagttgtttttggcaatgctgatgacagcttgtgatctttctgcaattacaaaaccctggcctattcaacaacggatagcagaacttgtagcaactgaattttttgatcaaggagacagagagagaaaagaactcaacatagaacccactgatctaatgaacagggagaagaaaaacaaaatcccaagtatgcaagttgggttcatagatgccatctgcttgcaactgtatgaggccctgacccacgtgtcagaggactgtttccctttgctagatggctgcacaaagaacaggcagaaatggcaggcccttgcagaacagcag

SEQ ID NO: 605 - protein, 326 aa, Artificial Sequence
  Description of Artificial Sequence: Synthetic Destabilizing Domain (DD)
EETRELQSLAAAVVPSAQTLKITDFSFSDFELSDLESALCTIRMFTDLNLMQNFQMKHEVLCRWILSVKKNYRKNVAYHNWRHAFNTAQCMFAALKAGKIQNKLTDLEILALLIAALSHDLDHRGVNNSYIQRSEHPLAQLYCHSIMEHHHFDQCLMILNSPGNQILSGLSIEEYKTTLKIIKQAILASDLALYIKRRGEFFELIRKNQFNLEDPHQKELFLAMLMTACDLSAITKPWPIQQRIAELVATEFFDQGDRERKELNIEPTDLMNREKKNKIPSMQVGFIDAICLQLYEALTHVSEDCFPLLDGCRKNRQKWQALAEQQ

SEQ ID NO: 606 - DNA, 978 bp, Artificial Sequence
  Description of Artificial Sequence: Synthetic Destabilizing Domain (DD)
gaagaaacaagagagctacagtcgttagcggctgctgtggtgccatctgcccagacccttaaaattactgactttagcttcagtgactttgagctgtctgatctggaatcagcactgtgtacaattcggatgtttactgacctcaaccttatgcagaacttccagatgaaacatgaggttctttgcagatggattttaagtgttaagaagaattatcggaagaatgttgcctatcataattggagacatgcctttaatacagctcagtgcatgtttgctgctctaaaagcaggcaaaattcagaacaagctgactgacctggagatacttgcattgctgattgctgcactaagccacgatttggatcaccgtggtgtgaataactcttacatacagcgaagtgaacatccacttgcccagctttactgccattcaatcatggaacaccatcattttgaccagtgtctgatgattcttaatagtccaggcaatcagattctcagtggcctctccattgaagaatataagaccacgttgaaaataatcaagcaagctattttagcttcagacctagcactgtacattaagaggcgaggagaattttttgaacttataagaaaaaatcaattcaatttggaagatcctcatcaaaaggagttgtttttggcaatgctgatgacagcttgtgatctttctgcaattacaaaaccctggcctattcaacaacggatagcagaacttgtagcaactgaattttttgatcaaggagacagagagagaaaagaactcaacatagaacccactgatctaatgaacagggagaagaaaaacaaaatcccaagtatgcaagttgggttcatagatgccatctgcttgcaactgtatgaggccctgacccacgtgtcagaggactgtttccctttgctagatggctgcagaaagaacaggcagaaatggcaggcccttgcagaacagcag

SEQ ID NO: 607 - protein, 326 aa, Artificial Sequence
  Description of Artificial Sequence: Synthetic Destabilizing Domain (DD)
EETRELQSLAAAVVPSAQTLKITDFSFSDFELSDLETALCTIRMFTDLNLVQNFQMKHEVLCRWILSVKKNYRKNVAYHNWRHAFNTAQCMFAALKAGKIQNKLTDLEILALLIAALSHDLDHRGVNNSYIQRSEHPLAQLYCHSIMEHHHFDQCLMILNSPGNQILSGLSIEEYKTTLKIIKQAILVTDLALYIKRRGEFFELIRKNQFNLEDPHQKELLLAMLITACDLSAITKPWPIQQRIAELVATEFFDQGDRERKELNIEPTDLMNREKKNKIPSMQVGFIDAICLQLYEALTHVSEDCFPLLDGCRKNRQKWQALAEQQ

SEQ ID NO: 608 - DNA, 978 bp, Artificial Sequence
  Description of Artificial Sequence: Synthetic Destabilizing Domain (DD)
gaagaaacaagagagctacagtcgttagcggctgctgtggtgccatctgcccagacccttaaaattactgactttagcttcagtgactttgagctgtctgatctggaaacagcactgtgtacaattcggatgtttactgacctcaaccttgtgcagaacttccagatgaaacatgaggttctttgcagatggattttaagtgttaagaagaattatcggaagaatgttgcctatcataattggagacatgcctttaatacagctcagtgcatgtttgctgctctaaaagcaggcaaaattcagaacaagctgactgacctggagatacttgcattgctgattgctgcactaagccacgatttggatcaccgtggtgtgaataactcttacatacagcgaagtgaacatccacttgcccagctttactgccattcaatcatggaacaccatcattttgaccagtgcctgatgattcttaatagtccaggcaatcagattctcagtggcctctccattgaagaatataagaccacgttgaaaataatcaagcaagctattttagttacagacctagcactgtacattaagaggcgaggagaattttttgaacttataagaaaaaatcaattcaatttggaagatcctcatcaaaaggagttgttattggcaatgctgatcacagcttgtgatctttctgcaattacaaaaccctggcctattcaacaacggatagcagaacttgtagcaactgaattttttgatcaaggagacagagagagaaaagaactcaacatagaacccactgatctaatgaacagggagaagaaaaacaaaatcccaagtatgcaagttgggttcatagatgccatctgcttgcaactgtatgaggccctgacccacgtgtcagaggactgtttccctttgctagatggctgcagaaagaacaggcagaaatggcaggcccttgcagaacagcag

SEQ ID NO: 609 - protein, 326 aa, Artificial Sequence
  Description of Artificial Sequence: Synthetic Destabilizing Domain (DD)
EETRELQLLAAAVVPSAQTLKITDFSFSDFELSDLETALCTIRMFTDLNLVQNFQMKHEVLCRWILSVKKNYRKNVAYHNWRHAFNTAQCMFAALKAGKIQNKLTDLEILALLIAALSHDLDHRGVNNSYIQRSEHPLAQLYCHSIMEHHHFDQCLMILNSPGNQILSGLSIEVYKTTLKIIKQAILATDLALYIKRRGEFFELIRKNQFNLEDPHQKELFLAMLMTACDLSAITKPCPIQQRIAELVATEFFDQGDRERKELNIEPTDLMNREKKNKIPSMQVGFIDAICLQLYEALTHVSEDCFPLLDGCRKNRQKWQALAEQQ

SEQ ID NO: 610 - DNA, 978 bp, Artificial Sequence
  Description of Artificial Sequence: Synthetic Destabilizing Domain (DD)
gaagaaacaagagagctacagttgttagcggctgctgtggtgccatctgcccagacccttaaaattactgactttagcttcagtgactttgagctgtctgatctggaaacagcactgtgtacaattcggatgtttactgacctcaaccttgtgcagaacttccagatgaaacatgaggttctttgcagatggattttaagtgttaagaagaattatcggaagaatgttgcctatcataattggagacatgcctttaatacagctcagtgcatgtttgctgctctaaaagcaggcaaaattcagaacaagctgactgacctggagatacttgcactgctgattgctgcactaagccacgatttggatcaccgtggtgtgaataactcttacatacagcgaagtgaacatccacttgcccagctttactgccattcaatcatggaacaccatcattttgaccagtgcctgatgattcttaatagtccaggcaatcagattctcagtggcctctccattgaagtatataagaccacgttgaaaataatcaagcaagctattttagctacagacctagcactgtacattaagaggcgaggagaattttttgaacttataagaaaaaatcaattcaatttggaagatcctcatcaaaaggagttgtttttggcaatgctgatgacagcttgtgatctttctgcaattacaaaaccctgtcctattcaacaacggatagcagaacttgtagcaactgaattttttgatcaaggagacagagagagaaaagaactcaacatagaacccactgatctaatgaacagggagaagaaaaacaaaatcccaagtatgcaagttgggttcatagatgccatctgcttgcaactgtatgaggccctgacccacgtgtcagaggactgtttccctttgctagatggctgcagaaagaacaggcagaaatggcaggcccttgcagaacagcag

SEQ ID NO: 611 - protein, 326 aa, Artificial Sequence
  Description of Artificial Sequence: Synthetic Destabilizing Domain (DD)
EETRELQSLAAAVVPSAQTLKITDFSFSDFELSDLETALCTIRMFTDLNLVQNFQMKHEVLCRWILSVKKNYRKNVAYHNWRHAFNTAQCMFAALKAGKIQNKLTDLEILALLIAALSHDLDHRGVNNSYIQRSEHPLAQLYCHSIMEHHHFDQCLMILNSPGNQILSGLSIEEYKTMLKIIKQAILATDLALYIKRRGEFFELIRKNQFNLEDPHQKELFLAILMTACDLSAITKPWPIQQRIAELVATEFFDQGDRERKELNIEPTDLMNREKKNKIPSMQVGFIDAICLQLYEALTHVSEDCFPLLDGCRKNRQKWQALAERQ

SEQ ID NO: 612 - DNA, 978 bp, Artificial Sequence
  Description of Artificial Sequence: Synthetic Destabilizing Domain (DD)
gaagaaacaagagagctacagtcgttagcggctgctgtggtgccatctgcccagacccttaaaattactgactttagcttcagtgactttgagctgtctgatctggaaacagcactgtgtacaattcggatgtttactgacctcaaccttgtgcagaacttccagatgaaacatgaggttctttgcagatggattttaagtgttaagaagaattatcggaagaatgttgcctatcataattggagacatgcctttaatacagctcagtgcatgtttgctgctctaaaagcaggcaaaattcagaacaagctgactgacctggagatacttgcattgctgattgctgcactaagccacgatttggatcaccgtggtgtgaataactcttacatacagcgaagtgaacatccacttgcccagctttactgccattcaatcatggaacaccatcattttgaccagtgcctgatgattcttaatagtccaggcaatcagattctcagtggcctctccattgaagaatataagaccatgttgaaaataatcaagcaagctattttagctacagacctagcactgtacattaagaggcgaggagaattttttgaacttataagaaaaaatcaattcaatttggaagatcctcatcaaaaggagttgtttttggcaatactgatgacagcttgtgatctttctgcaattacaaaaccctggcctattcaacaacggatagcagaacttgtagcaactgaattttttgatcaaggagacagagagagaaaagaactcaacatagaacccactgatctaatgaacagggagaagaaaaacaaaatcccaagtatgcaagttgggttcatagatgccatctgcttgcaactgtatgaggccctgacccacgtgtcagaggactgtttccctttgctagatggctgcagaaagaacaggcagaaatggcaggcccttgcagaacggcag

SEQ ID NO: 613 - protein, 326 aa, Artificial Sequence
  Description of Artificial Sequence: Synthetic Destabilizing Domain (DD)
EETRELQSLAAAVVPSAQTLKITDFSFSDFELSDLETALCTIRMFTDLNLVQNFQMKHEVLCRWILSVKKNYRKNVAYLNWRHAFNTAQCMFAALKAGKIQNKLTDLEILALLIAALSHDLDHRGVNNSYIQRSEHPLAQLYCHSIMEHHHFDQCLMILNSPGNQILSGLSIEEYKTTLKIIKQAILATYLALYIKRRGEFFELIRKNQFNLEDPHQKELYLAMLMTACDLSAITKPWPIQQRIAELVATEFFDQGDRERKELNIEPTDLMNREKKNKIPSMQVGFIDAICLQLYEALTHVSEDCFPLLDGCRKNRQKWQALAEQQ

SEQ ID NO: 614 - DNA, 978 bp, Artificial Sequence
  Description of Artificial Sequence: Synthetic Destabilizing Domain (DD)
gaagaaacaagagagctacagtcgttagcggctgctgtggtgccatctgcccagacccttaaaattactgactttagcttcagtgactttgagctgtctgatctggaaacagcactgtgtacaattcggatgtttactgacctcaaccttgtgcagaacttccagatgaaacatgaggttctttgcagatggattttaagtgttaagaagaattatcggaagaatgttgcctatcttaattggagacatgcctttaatacagctcagtgcatgtttgctgctctaaaagcaggcaaaattcagaacaagctgactgacctggagatacttgcattgctgattgctgcactaagccacgatttggatcaccgtggtgtgaataactcttacatacagcgaagtgaacatccacttgcccagctttactgccattcaatcatggaacaccatcattttgaccagtgcctgatgattcttaatagtccaggcaatcagattctcagtggcctctccattgaagaatataagaccacgttgaaaataatcaagcaagctattttagctacatacctagcactgtacattaagaggcgaggagaattttttgaacttataagaaaaaatcaattcaatttggaagatcctcatcaaaaggagttgtatttggcaatgctgatgacagcttgtgatctttctgcaattacaaaaccctggcctattcaacaacggatagcagaacttgtagcaactgaattttttgatcaaggagacagagagagaaaagaactcaacatagaacccactgatctaatgaacagggagaagaaaaacaaaatcccaagtatgcaagttgggttcatagatgccatctgcttgcaactgtatgaggccctgacccacgtgtcagaggactgtttccctttgctagatggctgcagaaagaacaggcagaaatggcaggcccttgcagaacagcag

SEQ ID NO: 615 - protein, 326 aa, Artificial Sequence
  Description of Artificial Sequence: Synthetic Destabilizing Domain (DD)
EETRELQSLAAAVVPSAQTRKITDFSFSDFELSDLETALCTIRMFTDLNLVQNFEMKHEVLCRWILSVKKNYRKNVAYHNWRHAFNTAQCMFAALKAGKIQNKLTDLEILALLIAALSHDLDHRGVNNSYIQRSEHPLAQLYCHSIMEHHHFDQCLIILNSPGNQILSGLSIEEYKTTLKIIKQAILATDLALYIKRRGEFFELIRKNQFNLEDPHQKELFLAMLMTACDLSAITKPWPIQQRIAELVATEFFDQGDRERKELNIEPTDLMNREKKNKIPSMQVGFIDAICLQLYEALTHVSEDCFPLLDGCRKNRQKWQALAEQQ

SEQ ID NO: 616 - DNA, 978 bp, Artificial Sequence
  Description of Artificial Sequence: Synthetic Destabilizing Domain (DD)
gaagaaacaagagagctacagtcgttagcggctgctgtggtgccatctgcccagacccgtaaaattactgactttagcttcagtgactttgagctgtctgatctggaaacagcactgtgtacaattcggatgtttactgacctcaaccttgtgcagaacttcgagatgaaacatgaggttctttgcagatggattttaagtgttaagaagaattatcggaagaatgttgcctatcataattggagacatgcctttaatacagctcagtgcatgtttgctgctctaaaagcaggcaaaattcagaacaagctgactgacctggagatacttgcattgctgattgctgcactaagccacgatttggatcaccgtggtgtgaataactcttacatacagcgaagtgaacatccacttgcccagctttactgccattcaatcatggaacaccatcattttgaccagtgcctgatcattcttaatagtccaggcaatcagattctcagtggcctctccattgaagaatataagaccacgttgaaaataatcaagcaagctattttagctacagacctagcactgtacattaagaggcgaggagaattttttgaacttataagaaaaaatcaattcaatttggaagatcctcatcaaaaggagttgtttttggcaatgctgatgacagcttgtgatctttctgcaattacaaaaccctggcctattcaacaacggatagcagaacttgtagcaactgaattttttgatcaaggagacagagagagaaaagaactcaacatagaacccactgatctaatgaacagggagaagaaaaacaaaatcccaagtatgcaagttgggttcatagatgccatctgcttgcaactgtatgaggccctgacccacgtgtcagaggactgtttccctttgctagatggctgcagaaagaacaggcagaaatggcaggcccttgcagaacagcag

SEQ ID NO: 617 - protein, 326 aa, Artificial Sequence
  Description of Artificial Sequence: Synthetic Destabilizing Domain (DD)
EETRELQSLAAAVVPSAQTRKITDFSFSDFELSDLETALCTIRMFTDLNLVQNFEMKHEVLCRWILSVKKNYRKNVAYHNWRHAFNTAQCMFAALKAGKIQNKLTDLEILALLIAALSHDLDHRGVNNSYIQRSEHPLAQLYCHSIMEHHHFDQCLMILNSPGNQILSGLSIEEYKTTLKIIKQAILATDLALYIKRRGEFFELIRKNQFNLEDPHQKELFLAMLMTACDLSAITKPWPIQQRIAELVATEFFDQGDRERKELNIEPTDLMNREKKNKIPSMQVGFIDTICLQLYEALTHVSEDCFPLLDGCRKNRQKWQALAEQQ

SEQ ID NO: 618 - DNA, 978 bp, Artificial Sequence
  Description of Artificial Sequence: Synthetic Destabilizing Domain (DD)
gaagaaacaagagagctacagtcgttagcggctgctgtggtgccatctgcccagacccgtaaaattactgactttagcttcagtgactttgagctgtctgatctggaaacagcactgtgtacaattcggatgtttactgacctcaaccttgtgcagaacttcgagatgaaacatgaggttctttgcagatggattttaagtgttaagaagaattatcggaagaatgttgcctatcataattggagacatgcctttaatacagctcagtgcatgtttgctgctctaaaagcaggcaaaattcagaacaagctgactgacctggagatacttgcattgctgattgctgcactaagccacgatttggatcaccgtggtgtgaataactcttacatacagcgaagtgaacatccacttgcccagctttactgccattcaatcatggaacaccatcattttgaccagtgcctgatgattcttaatagtccaggcaatcagattctcagtggcctctccattgaagaatataagaccacgttgaaaataatcaagcaagctattttagctacagacctagcactgtacattaagaggcgaggagaattttttgaacttataagaaaaaatcaattcaatttggaagatcctcatcaaaaggagttgtttttggcaatgctgatgacagcttgtgatctttctgcaattacaaaaccctggcctattcaacaacggatagcagaacttgtagcaactgaattttttgatcaaggagacagagagagaaaagaactcaacatagaacccactgatctaatgaacagggagaagaaaaacaaaatcccaagtatgcaagttgggttcatagataccatctgcttgcaactgtatgaggccctgacccacgtgtcagaggactgtttccctttgctagatggctgcagaaagaacaggcagaaatggcaggcccttgcagaacagcag

SEQ ID NO: 619 - protein, 326 aa, Artificial Sequence
  Description of Artificial Sequence: Synthetic Destabilizing Domain (DD)
EETRELQSLAAAVVPSAQTLKITDFSLSDFELSDLETALCTIRMFTDLNLVQNFQMKHEVLCRWILSVKKNYRKNVAYHNWRHAFNTAQCMFAALKAGKIQNKLTDLEILALLIAALSHDLDHRAVNNSYIQRSEHPLAQLYCHSIMEHHHFDQCLMILNSPGNQILSGLSIEEYKTTLKIIKQAILATDLALYIKRRGEFFELIRKNQFNLEDPHQKELFLAMLMTACDLSAITKPWPIQQRIAELVAIEFFDQGDRERKELNIEPTDLMNREKKNKIPSMQVGFIDAICLQLYEALTHVSEDCFPLLDGCRKNRQKWQALAEQQ

SEQ ID NO: 620 - DNA, 978 bp, Artificial Sequence
  Description of Artificial Sequence: Synthetic Destabilizing Domain (DD)
gaagaaacaagagagctacagtcgttagcggctgctgtggtgccatctgcccagacccttaaaattactgactttagcttaagtgactttgagctgtctgatctggaaacagcactgtgtacaattcggatgtttactgacctcaaccttgtgcagaacttccagatgaaacatgaggttctttgcagatggattttaagtgttaagaagaattatcggaagaatgttgcctatcataattggagacatgcctttaatacagctcagtgcatgtttgctgctctaaaagcaggcaaaattcagaacaagctgactgacctggagatacttgcattgctgattgctgcactaagccacgatttggatcaccgtgctgtgaataactcttacatacagcgaagtgaacatccacttgcccagctttactgccattcaatcatggaacaccatcattttgaccagtgcctgatgattcttaatagtccaggcaatcagattctcagtggcctctccattgaagaatataagaccacgttgaaaataatcaagcaagctattttagctacagacctagcactgtacattaagaggcgaggagaattttttgaacttataagaaaaaatcaattcaatttggaagatcctcatcaaaaggagttgtttttggcaatgctgatgacagcttgtgatctttctgcaattacaaaaccctggcctattcaacaacggatagcagaacttgtagcaattgaattttttgatcaaggagacagagagagaaaagaactcaacatagaacccactgatctaatgaacagggagaagaaaaacaaaatcccaagtatgcaagttgggttcatagatgccatctgcttgcaactgtatgaggccctgacccacgtgtcagaggactgtttccctttgctagatggctgcagaaagaacaggcagaaatggcaggcccttgcagaacagcag

SEQ ID NO: 621 - protein, 326 aa, Artificial Sequence
  Description of Artificial Sequence: Synthetic Destabilizing Domain (DD)
EETRELQSLAAAVVPSAQTLKITDFSFSDFELSDLETALCTIRMFTDLNLVQNFQMKHEVLCRWILSVKKNYRKNVAYHNRRHAFNTAQCMFAALKAGKIQNKLTDLEILALLIAALSHDLDHRGVNNSYIQRSEHPLAQLYCHSIMEHHHFDQCLMILNSPGNQILSGLSIEEYKTTLKIIKQAILARDLALYIKRRGEFFELIRKNQFNLEDPHQKELFLAMLMTTCDLSAITKPWPIQQRIAELVATEFFDQGDRERKELNIEPTDLMNRGKKNKIPSMQVGFIDAICLQLYEALTHVSEDCFPLLDGCRKNRQKWQALAEQQ

SEQ ID NO: 622 - DNA, 978 bp, Artificial Sequence
  Description of Artificial Sequence: Synthetic Destabilizing Domain (DD)
gaagaaacaagagagctacagtcgttagcggctgctgtggtgccatctgcccagacccttaaaattactgactttagcttcagtgactttgagctgtctgatctggaaacagcactgtgtacaattcggatgtttactgacctcaaccttgtgcagaacttccagatgaaacatgaggttctttgcagatggattttaagtgttaagaagaattatcggaagaatgttgcctatcataatcggagacatgcctttaatacagctcagtgcatgtttgctgctctaaaagcaggcaaaattcagaacaagctgactgacctggagatacttgcattgctgattgctgcactaagccacgatttggatcaccgtggtgtgaataactcttacatacagcgaagtgaacatccacttgcccagctttactgccattcaatcatggaacaccatcattttgaccagtgcctgatgattcttaatagtccaggcaatcagattctcagtggcctctccattgaagaatataagaccacgttgaaaataatcaagcaagctattttagctagagacctagcactgtacattaagaggcgaggagaattttttgaacttataagaaaaaatcaattcaatttggaagatcctcatcaaaaggagttgtttttggcaatgctgatgacaacttgtgatctttctgcaattacaaaaccctggcctattcaacaacggatagcagaacttgtagcaactgaattttttgatcaaggagacagagagagaaaagaactcaacatagaacccactgatctaatgaacagggggaagaaaaacaaaatcccaagtatgcaagttgggttcatagatgccatctgcctgcaactgtatgaggccctgacccacgtgtcagaggactgtttccctttgctagatggctgcagaaagaacaggcagaaatggcaggcccttgcagaacagcag

SEQ ID NO: 623 - protein, 326 aa, Artificial Sequence
  Description of Artificial Sequence: Synthetic Destabilizing Domain (DD)
EETRELQSLAAAVVPSAQTRKITDFSFSDFELSDLETALCTIRMFTDLNLVPNFQMKHEVLCRWILSVKKNYRKNVAYHNWRHAFNTAQCMFAALKAGKIQNKLTDLEILALLIAALSHDLDHRGVNNSYIQRSEHPLAQLYCHSIMEHHHFDQCLMILNSPGNQILSGLSIEEYNTTLKIIKQAILATDLALYIERRGEFFELIRKNQFNLEDPHQKELFLAMLMTACDLSAITKPWPIQQRIAELVATEFFDQGDRERKELNIEPTDLMNREKKNKIPSMQVGFIDAICLQLYEALTHVSEDCFPLLDGCRKNRQKWQALAEQQ

SEQ ID NO: 624 - DNA, 978 bp, Artificial Sequence
  Description of Artificial Sequence: Synthetic Destabilizing Domain (DD)
gaagaaacaagagagctacagtcgttagcggctgctgtggtgccatctgcccagacccgtaaaattactgactttagcttcagtgactttgagctgtctgatctggaaacagcactgtgtacaattcggatgtttactgacctcaaccttgtgccgaacttccagatgaaacatgaggttctttgcagatggattttaagtgttaagaagaattatcggaagaatgttgcctatcataattggagacatgcctttaatacagctcagtgcatgtttgctgctctaaaagcaggcaaaattcagaacaagctgactgacctggagatacttgcattgctgattgctgcactaagccacgatttggatcaccgtggtgtgaataactcttacatacagcgaagcgaacatccacttgcccagctttactgccattcaatcatggaacaccatcattttgaccagtgcctgatgattcttaatagtccaggcaatcagattctcagtggcctctccattgaagaatataataccacgttgaaaataatcaagcaagctattttagctacagacctagcactgtacattgagaggcgaggagaattttttgaacttataagaaaaaatcaattcaatttggaagatcctcatcaaaaggagttgtttttggcaatgctgatgacagcttgtgatctttctgcaattacaaaaccctggcctattcaacaacggatagcagaacttgtagcaactgaattttttgatcaaggagacagagagagaaaagaactcaacatagaacccactgatctaatgaacagggagaagaaaaacaaaatcccaagtatgcaagttgggttcatagatgccatctgcttgcaactgtatgaggccctgacccacgtgtcagaggactgtttccctttgctagatggctgcagaaagaacaggcagaaatggcaggcccttgcagaacagcag

SEQ ID NO: 625 - protein, 326 aa, Artificial Sequence
  Description of Artificial Sequence: Synthetic Destabilizing Domain (DD)
EETRELQSLAAAVVPSAQTLKITDFSFSDFELSDLETALCTIRMFTDLNLVLNFQMKHEVLCRWILSVKKNYRKNVAYHNWRHAFNTAQCMFAALKAGKIQNKLTDLEILALLIAALSHDLDHRGVNNYYIQRSEHPLAQLYCHSIMEHHHFDQCLMILNSPGNQILSGLSIEEYKTTLKIIKQAILATDLALYIKRRGEFFELIRKNQFNLEDPHQKELFLAMLMTTCDLSAITKPWPIQQRIAELVATEFFDQGDRERKELNIEPTDLMNRGKKNKIPSMQVGFIDAICLQLYEALTHVSEDCFPLLDGCRKNRQKWQALAEQQ

SEQ ID NO: 626 - DNA, 978 bp, Artificial Sequence
  Description of Artificial Sequence: Synthetic Destabilizing Domain (DD)
gaagaaacaagagagctacagtcgttagcggctgctgtggtgccatctgcccagacccttaaaattactgactttagcttcagtgactttgagctgtctgatctggaaacagcactgtgtacaattcggatgtttactgacctcaaccttgtgctgaacttccagatgaaacatgaggttctttgcagatggattttaagtgttaagaagaattatcggaagaatgttgcctatcataattggagacatgcctttaatacagctcagtgcatgtttgctgctctaaaagcaggcaaaattcagaacaagctgactgacctggagatacttgcattgctgattgctgcactaagccacgatttggatcaccgtggtgtgaataactattacatacagcgaagtgaacatccacttgcccagctttactgccattcaatcatggaacaccatcattttgaccagtgcctgatgattcttaatagtccaggcaatcagattctcagtggcctctccattgaagaatataagaccacgttgaaaataatcaagcaagctattttagctacagacctagcactgtacattaagaggcgaggagaattttttgaacttataagaaaaaatcaattcaatttggaagatcctcatcaaaaggagttgtttttggcaatgctgatgacaacttgtgatctttctgcaattacaaaaccctggcctattcaacaacggatagcagaacttgtagcaactgaattttttgatcaaggagacagagagagaaaagaactcaacatagaacccactgatctaatgaacagggggaagaaaaacaaaatcccaagtatgcaagttgggttcatagatgccatctgcctgcaactgtatgaggccctgacccacgtgtcagaggactgtttccctttgctagatggctgcagaaagaacaggcagaaatggcaggcccttgcagaacagcag

SEQ ID NO: 627 - protein, 326 aa, Artificial Sequence
  Description of Artificial Sequence: Synthetic Destabilizing Domain (DD)
EETRELQSLAAAVVPSAQTLKITDFSFSDFELSDLEIALCTIRMFTDLNLVQNFQMKHEVLCRWILSVKRNYRKNVAYHNWRHAFNTAQCMFAALKAGKIQNKLTDLEILALLIAALSHDLDHRGVNNSYIQRSEHPLAQLYCHSIMEHHHFDQCLMILNSPGNQILSGLSNEEYKTTLKIIKQAILATDLALYIKRRGEFFELIRKNQFNLEDPHQKELFLAMLMTACDLSAITKPWPIQQRIAELVATEFFDQGDRERRELNIEPTDLMNREKKNKIPSMQVGFIDAICLQLYEALTHVSEDCFPLLDGCRKNRQKWQALAEQQ

SEQ ID NO: 628 - DNA, 978 bp, Artificial Sequence
  Description of Artificial Sequence: Synthetic Destabilizing Domain (DD)
gaagaaacaagagagctacagtcgttagcggctgctgtggtgccatctgcccagacccttaaaattactgactttagcttcagtgactttgagctgtctgatctggaaatagcactgtgtacaattcggatgtttactgacctcaaccttgtgcagaacttccagatgaaacatgaggttctttgcagatggattttaagtgttaagaggaattatcggaagaatgttgcctatcataattggagacatgcctttaatacagctcagtgcatgtttgctgctctaaaagcaggcaaaattcagaacaaactgactgacctggagatacttgcattgctgattgctgcactaagccacgatttggatcaccgtggtgtgaataactcttacatacagcgaagtgaacatccacttgcccagctttactgccattcaatcatggaacaccatcattttgaccagtgcctgatgattcttaatagtccaggcaatcagattctcagtggcctctccaatgaagaatataagaccacgttgaaaataatcaagcaagctattttagctacagacctagcactgtacattaagaggcgaggagaattttttgaacttataagaaaaaatcaattcaatttggaagatcctcatcaaaaggagttgtttttggcaatgctgatgacagcttgtgatctttctgcaattacaaaaccctggcctattcaacaacggatagcagaacttgtagcaactgaattttttgatcaaggagacagagagagaagagaactcaacatagaacccactgatctaatgaacagggagaagaaaaacaaaatcccaagtatgcaagttgggttcatagatgccatctgcttgcaactgtatgaggccctgacccacgtgtcagaggactgtttccctttgctagatggctgcagaaagaacaggcagaaatggcaggcccttgcagaacagcag

SEQ ID NO: 629 - protein, 326 aa, Artificial Sequence
  Description of Artificial Sequence: Synthetic Destabilizing Domain (DD)
EETRELQSLAAAVVPSAQTLKITDFSFSDIELSDLETALCTIRMFTDLNLVQNFQMKHEVLCRWILSVKKNYRKNVAYHNWRHAFNTAQCMFAALKAGKIQNKLTDLEILALLIAALSHDLDHRGVNYSYIQRSEHPLAQLYCHSIMEHHLFDQCLMIPNSPGNQILSGLSIEEYKTTLKIIKQAILATDLALYIKRRGEFIELIRKNQFNLEDPHQKELFLAMLMTACDLSAITKPWPIQQRIAELVATEFFDQGDRERKELNIEPTDLMNREKKNKIPSMQVGFIDAICLQLYEALTHVSEDCFPLLDGCRKNRQKWQALAEQQ

SEQ ID NO: 630 - DNA, 978 bp, Artificial Sequence
  Description of Artificial Sequence: Synthetic Destabilizing Domain (DD)
gaagaaacaagagagctacagtcgttagcggctgctgtggtgccatctgcccagacccttaaaattactgactttagcttcagtgacattgagctgtctgatctggaaacagcactgtgtacaattcggatgtttactgacctcaaccttgtgcagaacttccagatgaaacatgaggttctttgcagatggattttaagtgttaagaagaattatcggaagaatgttgcctatcataattggagacatgcctttaatacagctcagtgcatgtttgctgctctaaaagcaggcaaaattcagaacaagctgactgacctggagatacttgcattgctgattgctgcactaagccacgatttggatcaccgtggtgtgaattactcttacatacagcgaagtgaacatccacttgcccagctttactgccattcaatcatggaacaccatctttttgaccagtgcctgatgattcctaatagtccaggcaatcagattctcagtggcctctccattgaagaatataagaccacgttgaaaataatcaagcaagctattttagctacagacctagcactgtacattaagaggcgaggagaatttattgaacttataagaaaaaatcaattcaatttggaagatcctcatcaaaaggagttgtttttggcaatgctgatgacagcttgtgatctttctgcaattacaaaaccctggcctattcaacaacggatagcagaacttgtagcaactgaattttttgatcaaggagacagagagagaaaagaactcaacatagaacccactgatctaatgaacagggagaagaaaaacaaaatcccaagtatgcaagttgggttcatagatgccatctgcttgcaactgtatgaggccctgacccacgtgtcagaggactgtttccctttgctagatggctgcagaaagaacaggcagaaatggcaggcccttgcagaacagcag

SEQ ID NO: 631 - protein, 326 aa, Artificial Sequence
  Description of Artificial Sequence: Synthetic Destabilizing Domain (DD)
EETRELQSLAAAVVSSAQTLKITDFSFSDIELSDLETALCTIRMFTDLNLVQNFQMKHEVLCRWILSVKKNYRKNVAYHNWRHAFNTAQCMFAALKAGKIQNKLTDLEILALLIAALSHDLDHHGVNNSYIQRSEHPLAQLYCHSIMEHHHFDQCLMILNSPGNQILSGLSIEEYKTTLKIIKQAILATDLALYIKRRGEFFELIRKNQFNLEDPHQKELFLAMLMTACDLSAITKPWPIQQRITELVATEFFDQGDRERKELNIEPTDLMNREKKNKIPSMQVGFIDAICLQLYEALTHVSEDCFPLLDGCGKNRQKWQALAEQQ

SEQ ID NO: 632 - DNA, 978 bp, Artificial Sequence
  Description of Artificial Sequence: Synthetic Destabilizing Domain (DD)
gaagaaacaagagagctacagtcgttagcggctgctgtggtgtcatctgcccagacccttaaaattactgactttagcttcagtgacattgagctgtctgatctggagacagcactgtgtacaattcggatgtttactgacctcaaccttgtgcagaacttccagatgaaacatgaggttctttgcagatggattttaagtgttaagaagaattatcggaagaatgttgcctatcataattggagacatgcctttaatacagctcagtgcatgtttgctgctctaaaagcaggcaaaattcagaacaagctgactgacctggagatacttgcattgctgattgctgcactaagccacgatttggatcaccatggtgtgaataactcttacatacagcgaagtgaacatccacttgcccagctttactgccattcaatcatggaacaccatcattttgaccagtgcctgatgattcttaatagtccaggcaatcagattctcagtggcctctccattgaagaatataagaccacgttgaaaataatcaagcaagctattttagctacagacctagcactgtacattaagaggcgaggagaattttttgaacttataagaaaaaatcaattcaatttggaagatcctcatcaaaaggagttgtttttggcaatgctgatgacagcttgtgatctttctgcaattacaaaaccctggcctattcaacaacggataacagaacttgtagcaactgaattttttgatcaaggagacagagagagaaaagaactcaacatagaacccactgatctaatgaacagggagaagaaaaacaaaatcccaagtatgcaagttgggttcatagatgccatctgcttgcaactgtatgaggccctgacccacgtgtcagaggactgtttccctttgctagatggctgcggaaagaacaggcagaaatggcaggcccttgcagaacagcag

SEQ ID NO: 633 - protein, 245 aa, Artificial Sequence
  Description of Artificial Sequence: Synthetic Destabilizing Domain (DD)
SLALSLTADQMVSALLDAEPPILYSEYDPTRPFSEASMMGLLTNLADRELVHMINWAKRVPGFVDLALHDQVHLLECAWMEILMIGLVWRSMEHPGKLLFAPNLLLDRNQGKCVEGGVEIFDMLLATSSRFRMMNLQGEEFVCLKSIILLNSGVYTFLSSTLKSLEEKDHIHRVLDKITDTLIHLMAKAGLTLQQQHQRLAQLLLILSHIRHMSSKRMEHLYSMKCKNVVPLSDLLLEMLDAHRL

SEQ ID NO: 634 - DNA, 735 bp, Artificial Sequence
  Description of Artificial Sequence: Synthetic Destabilizing Domain (DD)
tcgttggcactttccctgactgccgaccagatggtgtccgcccttctggacgccgagcctccaattctgtactcggagtacgatccgactcgcccgttctccgaagccagcatgatgggcctgttgactaacctggcggaccgcgagttggtgcacatgattaactgggctaagcgggtgccgggcttcgtggacctggccctgcacgaccaagtgcacctcctggaatgcgcctggatggaaatcctcatgatcggcctcgtgtggagatccatggagcatcccggaaagctcctgtttgcacccaacctcctgcttgatcgcaaccagggaaaatgcgtggaagggggtgtcgagattttcgacatgctgctcgccacctcttcccggttccggatgatgaatctgcagggagaagagttcgtgtgtctgaagtcaatcatcctgctgaactccggggtctataccttcctgagctcgaccctcaagtcactggaggaaaaagaccacatccatcgcgtgctcgataagatcaccgacacccttatccatctcatggcgaaggctggactgaccctgcaacagcagcaccagaggctggcccagttgctgctgattctgagccacatccggcacatgtcgtccaagaggatggaacacctgtacagcatgaagtgcaagaacgtcgtgcctctgtccgatctgctcctggaaatgctggacgcgcacagactc

SEQ ID NO: 635 - DNA, 735 bp, Artificial Sequence
  Description of Artificial Sequence: Synthetic Destabilizing Domain (DD)
tcactggcgctcagccttactgccgaccaaatggtatcagctcttctggacgcagaacccccaattctttattccgagtacgaccccacacgcccgttcagtgaagcttccatgatgggcctccttacgaaccttgccgaccgggaactcgtgcacatgatcaattgggcgaagcgggtgccggggttcgtagatttggcacttcacgaccaagttcatctcttggaatgtgcttggatggagatattgatgatcggactcgtgtggaggtcaatggagcatcctggtaaacttcttttcgcacccaatctgctcttggatagaaatcagggtaagtgcgtcgagggtggcgttgaaatcttcgacatgctccttgcgacatccagccgattccgaatgatgaatcttcaaggagaggaatttgtctgtcttaagagcattatactcctcaatagtggagtttacaccttcttgtcctctacactgaaatcacttgaggaaaaagatcacatacatagggtgttggataaaatcacggatacactcatacatctgatggcaaaagcaggattgaccctgcaacagcagcaccaacgactggcccaactgctgttgatccttagccatatcagacacatgtctagcaaaaggatggaacatttgtacagcatgaaatgtaagaacgtagtgccactgtccgatttgttgctggaaatgctggacgctcatcggctc

SEQ ID NO: 636 - DNA, 735 bp, Artificial Sequence
  Description of Artificial Sequence: Synthetic Destabilizing Domain (DD)
tcactggcgctcagccttactgccgaccaaatggtatcagctcttctggacgcagaacccccaattctttattccgagtacgaccccacacgcccgttcagtgaagcttccatgatgggcctccttacgaaccttgccgaccgggaactcgtgcacatgatcaattgggcgaagcgggtgccggggttcgtagatttggcacttcacgaccaagttcatctcttggaatgtgcttggatggagatattgatgatcggactcgtgtggaggtcaatggagcatcctggtaaacttcttttcgcacccaatctgctcttggatagaaatcagggtaagtgcgtcgagggtggcgttgaaatcttcgacatgctccttgcgacatccagccgattccgaatgatgaatcttcaaggagaggaatttgtctgtcttaagagcattatactcctcaatagtggagtttacaccttcttgtcctctacactgaaatcacttgaggaaaaagatcacatacatagggtgttggataaaatcacggatacactcatacatctgatggcaaaagcaggattgaccctgcaacagcagcatcaacgactggcccaactgctgttgatccttagccatatcagacacatgtctagcaaaaggatggaacatttgtacagcatgaaatgtaagaacgtagtgccactgtccgatttgttgctggaaatgctggacgctcatcggctc

SEQ ID NO: 637 - protein, 245 aa, Artificial Sequence
  Description of Artificial Sequence: Synthetic Destabilizing Domain (DD)
SLALSLTADQMVSALLDAEPPILYSEYDPTRPFSEASMMGLLTNLADRELVHMINWAKRVPGFVDLTLHDQVHLLECAWMEILMIGLVWRSMEHPGKLLFAPNLLLDRNQGKCVEGGVEIFDMLLATSSRFRMMNLQGEEFVCLKSIILLNSGVYTFLSSTLKSLEEKDHIHRVLDKITDTLIHLMAKAGLTLQQQHQRLAQLLLILSHIRHMSNKRMEHLYSMKCKNVVPLSDLLLEMLDAHRL

SEQ ID NO: 638 - DNA, 735 bp, Artificial Sequence
  Description of Artificial Sequence: Synthetic Destabilizing Domain (DD)
tcgttggcactttccctgactgccgaccagatggtgtccgcccttctggacgccgagcctccaattctgtactcggagtacgatccgactcgcccgttctccgaagccagcatgatgggcctgttgactaacctggcggaccgcgagttggtgcacatgattaactgggctaagcgggtgccgggcttcgtggacctgaccctgcacgaccaagtgcacctcctggaatgcgcctggatggaaatcctcatgatcggcctcgtgtggagatccatggagcatcccggaaagctcctgtttgcacccaacctcctgcttgatcgcaaccagggaaaatgcgtggaagggggtgtcgagattttcgacatgctgctcgccacctcttcccggttccggatgatgaatctgcagggagaagagttcgtgtgtctgaagtcaatcatcctgctgaactccggggtctataccttcctgagctcgaccctcaagtcactggaggaaaaagaccacatccatcgcgtgctcgataagatcaccgacacccttatccatctcatggcgaaggctggactgaccctgcaacagcagcaccagaggctggcccagttgctgctgattctgagccacatccggcacatgtcgaacaagaggatggaacacctgtacagcatgaagtgcaagaacgtcgtgcctctgtccgatctgctcctggaaatgctggacgcgcacagactc

SEQ ID NO: 639 - DNA, 735 bp, Artificial Sequence
  Description of Artificial Sequence: Synthetic Destabilizing Domain (DD)
tcactggcgctcagccttactgccgaccaaatggtatcagctcttctggacgcagaacccccaattctttattccgagtacgaccccacacgcccgttcagtgaagcttccatgatgggcctccttacgaaccttgccgaccgggaactcgtgcacatgatcaattgggcgaagcgggtgccggggttcgtagatttgacacttcacgaccaagttcatctcttggaatgtgcttggatggagatattgatgatcggactcgtgtggaggtcaatggagcatcctggtaaacttcttttcgcacccaatctgctcttggatagaaatcagggtaagtgcgtcgagggtggcgttgaaatcttcgacatgctccttgcgacatccagccgattccgaatgatgaatcttcaaggagaggaatttgtctgtcttaagagcattatactcctcaatagtggagtttacaccttcttgtcctctacactgaaatcacttgaggaaaaagatcacatacatagggtgttggataaaatcacggatacactcatacatctgatggcaaaagcaggattgaccctgcaacagcagcaccagcgactggcccaactgctgttgatccttagccatatcagacacatgtctaacaaaaggatggaacatttgtacagcatgaaatgtaagaacgtagtgccactgtccgatttgttgctggaaatgctggacgctcatcggctc

SEQ ID NO: 640 - DNA, 735 bp, Artificial Sequence
  Description of Artificial Sequence: Synthetic Destabilizing Domain (DD)
tcactggcgctcagccttactgccgaccaaatggtatcagctcttctggacgcagaacccccaattctttattccgagtacgaccccacacgcccgttcagtgaagcttccatgatgggcctccttacgaaccttgccgaccgggaactcgtgcacatgatcaattgggcgaagcgggtgccggggttcgtagatttgacacttcacgaccaagttcatctcttggaatgtgcttggatggagatattgatgatcggactcgtgtggaggtcaatggagcatcctggtaaacttcttttcgcacccaatctgctcttggatagaaatcagggtaagtgcgtcgagggtggcgttgaaatcttcgacatgctccttgcgacatccagccgattccgaatgatgaatcttcaaggagaggaatttgtctgtcttaagagcattatactcctcaatagtggagtttacaccttcttgtcctctacactgaaatcacttgaggaaaaagatcacatacatagggtgttggataaaatcacggatacactcatacatctgatggcaaaagcaggattgaccctgcaacagcagcaccaacgactggcccaactgctgttgatccttagccatatcagacacatgtctaacaaaaggatggaacatttgtacagcatgaaatgtaagaacgtagtgccactgtccgatttgttgctggaaatgctggacgctcatcggctc

SEQ ID NO: 641 - protein, 247 aa, Artificial Sequence
  Description of Artificial Sequence: Synthetic Destabilizing Domain (DD)
RSSLALSLTADQMVSALLDAEPPILYSEYDPTRPFSEASMMGLLTNLADRELVHMINWAKRVPGFVDLALHDQVHLLECAWMEILMIGLVWRSMEHPGKLLFAPNLLLDRNQGKCVEGGVEIFDMLLATSSRFRMMNLQGEEFVCLKSIILLNSGVYTFLSSTLKSLEEKDHIHRVLDKITDTLIHLMAKAGLTLQQQHQRLAQLLLILSHIRHMSSKRMEHLYSMKCKNVVPLSDLLLEMLDAHRL

SEQ ID NO: 642 - protein, 245 aa, Artificial Sequence
  Description of Artificial Sequence: Synthetic Destabilizing Domain (DD)
SLALSLTADQMVSALLDAEPPILYSEYDPTGPFSEASMMGLLTNLADRELVHMINWAKRVPGFVDLTLHDQVHLLECAWMEILMIGLVWRSMEHPGKLLFAPNLLLDRNQGKCVEGGVEIFDMLLATSSRFRMMNLQGEEFVCLKSIILLNSGVYTFLSSTLKSLEEKDHIHRVLDKITDTLIHLMAKAGLTLQQQHQRLAQLLLILSHIRHMSSKRMEHLYSMKCKNVVPLSDLLLEMLDAHRL

SEQ ID NO: 643 - DNA, 735 bp, Artificial Sequence
  Description of Artificial Sequence: Synthetic Destabilizing Domain (DD)
tcactggcgctcagccttactgccgaccaaatggtatcagctcttctggacgcagaacccccaattctttattccgagtacgaccccacaggcccgttcagtgaagcttccatgatgggcctccttacgaaccttgccgaccgggaactcgtgcacatgatcaattgggcgaagcgggtgccggggttcgtagatttgacacttcacgaccaagttcatctcttggaatgtgcttggatggagatattgatgatcggactcgtgtggaggtcaatggagcatcctggtaaacttcttttcgcacccaatctgctcttggatagaaatcagggtaagtgcgtcgagggtggcgttgaaatcttcgacatgctccttgcgacatccagccgattccgaatgatgaatcttcaaggagaggaatttgtctgtcttaagagcattatactcctcaatagtggagtttacaccttcttgtcctctacactgaaatcacttgaggaaaaagatcacatacatagggtgttggataaaatcacggatacactcatacatctgatggcaaaagcaggattgaccctgcaacagcagcaccaacgactggcccaactgctgttgatccttagccatatcagacacatgtctagcaaaaggatggaacatttgtacagcatgaaatgtaagaacgtagtgccactgtccgatttgttgctggaaatgctggacgctcatcggctc

SEQ ID NO: 644 - protein, 245 aa, Artificial Sequence
  Description of Artificial Sequence: Synthetic Destabilizing Domain (DD)
SLALSLTADQMVSALLDAEPPILYSEYDPTGPFSEASMMGLLTNLADRELVHMINWAKRVPGFVDLTLHDQVHLLECAWMEILMIGLVWRSMEHPGKLLFAPNLLLDRNQGKCVEGGVEIFDMLLATSSRFRMMNLQGEEFVCLKSIILLNSGVYTFLSSTLKSLEEKDHIHRVLDKITDTLIHLMAKAGLTLQQQHQRLAQLLLILSHIRHMSNKRMGHLYSMKCKNVVPLSDLLLEMLDTHRL

SEQ ID NO: 645 - DNA, 735 bp, Artificial Sequence
  Description of Artificial Sequence: Synthetic Destabilizing Domain (DD)
tcactggcgctcagccttactgccgaccaaatggtatcagctcttctggacgcagaacccccaattctttattccgagtacgaccccacaggcccgttcagtgaagcttccatgatgggcctccttacgaaccttgccgaccgggaactcgtgcacatgatcaattgggcgaagcgggtgccggggttcgtagatttgacacttcacgaccaagttcatctcttggaatgtgcttggatggagatattgatgatcggactcgtgtggaggtcaatggagcatcctggtaaacttcttttcgcacccaatctgctcttggatagaaatcagggtaagtgcgtcgagggtggcgttgaaatcttcgacatgctccttgcgacatccagccgattccgaatgatgaatcttcaaggagaggaatttgtctgtcttaagagcattatactcctcaatagtggagtttacaccttcttgtcctctacactgaaatcacttgaggaaaaagatcacatacatagggtgttggataaaatcacggatacactcatacatctgatggcaaaagcaggattgaccctgcaacagcagcaccaacgactggcccaactgctgttgatccttagccatatcagacacatgtctaacaaaaggatgggacatttgtacagcatgaaatgtaagaacgtagtgccactgtccgatttgttgctggaaatgctggacactcatcggctc

SEQ ID NO: 646 - protein, 245 aa, Artificial Sequence
  Description of Artificial Sequence: Synthetic Destabilizing Domain (DD)
SLALSLTADQMVSALLDAEPPILYSEYDPTRPFSEASMMGLLTNLADRELVHMINWAKRVPGFVDLTLHDQVHLLECAWMEILMIGLVWRSMEHPGKLLFAPNLLLDRNQGKCVEGGVEIFDMLLAISSRFRMMNLQGEEFVCLKSIILLNSGVYTFLSSTLKSLEEKDHIHRVLDKITDTLIHLMAKAGLTLQQQHQRLAQLLLILSHIRHMSNKRMEHLYSMKCKNVVPLSDLLLEMLDAHRL

SEQ ID NO: 647 - DNA, 735 bp, Artificial Sequence
  Description of Artificial Sequence: Synthetic Destabilizing Domain (DD)
tcactggcgctcagccttactgccgaccaaatggtatcagctcttctggacgcagaacccccaattctttattccgagtacgaccccacacgcccgttcagtgaagcttccatgatgggcctccttacgaaccttgccgaccgggaactcgtgcacatgatcaattgggcgaagcgggtgccggggttcgtagatttgacacttcacgaccaagttcatctcttggaatgtgcttggatggagatattgatgatcggactcgtgtggaggtcaatggagcatcctggtaaacttcttttcgcacccaatctgctcttggatagaaatcagggtaagtgcgtcgagggtggcgttgaaatcttcgacatgctccttgcgatatccagccgattccgaatgatgaatcttcaaggagaggaatttgtctgtcttaagagcattatactcctcaatagtggagtttacaccttcttgtcctctacactgaaatcacttgaggaaaaagatcacatacatagggtgttggataaaatcacggatacactcatacatctgatggcaaaagcaggattgaccctgcaacagcagcaccaacgactggcccaactgctgttgatccttagccatatcagacacatgtctaacaaaaggatggaacatttgtacagcatgaaatgtaagaacgtagtgccactgtccgatttgttgctggaaatgctggacgctcatcggctc

SEQ ID NO: 648 - protein, 245 aa, Artificial Sequence
  Description of Artificial Sequence: Synthetic Destabilizing Domain (DD)
SLALSLTADQMVSALLDAEPPILYSEYDPTRPFSEASMMGLLTNLADRELVHMINWAKRVPGFVDLTLHDQVHLLECAWMEILMIGLVWRSMEHPGKLLFAPNLLLDRDQGKCVEGGVEIFDMLLATSSRFRMMNLQGEEFVCLKSIILLNSGVYTFLSSTLKSLEEKDHIHRVLDKITDTLIHLMAKAGLTLQQQHQRLAQLLLILSHIRHMSNKRMEHLYSMKCKNVVPLSDLLLEMLDAHRL

SEQ ID NO: 649 - DNA, 735 bp, Artificial Sequence
  Description of Artificial Sequence: Synthetic Destabilizing Domain (DD)
tcactggcgctcagccttactgccgaccaaatggtatcagctcttctggacgcagaacccccaattctttattccgagtacgaccccacacgcccgttcagtgaagcttccatgatgggcctccttacgaaccttgccgaccgggaactcgtgcacatgatcaattgggcgaagcgggtgccggggttcgtagatttgacacttcacgaccaagttcatctcttggaatgtgcttggatggagatattgatgatcggactcgtgtggaggtcaatggagcatcctggtaaacttcttttcgcacccaatctgctcttggatagagatcagggtaagtgcgtcgagggtggcgttgaaatcttcgacatgctccttgcgacatccagccgattccgaatgatgaatcttcaaggagaggaatttgtctgtcttaagagcattatactcctcaatagtggagtttacaccttcttgtcctctacactgaaatcacttgaggaaaaagatcacatacatagggtgttggataaaatcacggatacactcatacatctgatggcaaaagcaggattgaccctgcaacagcagcaccaacgactggcccaactgctgttgatccttagccatatcagacacatgtctaacaaaaggatggaacatttgtacagcatgaaatgtaagaacgtagtgccactgtccgatttgttgctggaaatgctggacgctcatcggctc

SEQ ID NO: 650 - protein, 245 aa, Artificial Sequence
  Description of Artificial Sequence: Synthetic Destabilizing Domain (DD)
SLALSLTADQMVSALLDAEPPILYSEYDPTRPFSEASMMGLLTNLADRELVHMINWAKRVPGFVDLTLHDQVHLLECAWMEILMIGLVWRSMEHPGKLLFAPNLLLDRNQGKCVEGGVEIFDMLLATSSRFRMMNLQGEEFVCLKSIILLNSGVYTFLSSTLKSLEEKDHIHRVLDKITDTLIHLMAKAGLTLQQQHQRLAQLLLILSHIRHMSSKRMEHLYSMKCKNVVPLSDLLLEMLDAHRL

SEQ ID NO: 651 - DNA, 735 bp, Artificial Sequence
  Description of Artificial Sequence: Synthetic Destabilizing Domain (DD)
tcactggcgctcagccttactgccgaccaaatggtatcagctcttctggacgcagaacccccaattctttattccgagtacgaccccacacgcccgttcagtgaagcttccatgatgggcctccttacgaaccttgccgaccgggaactcgtgcacatgatcaattgggcgaagcgggtgccggggttcgtagatttgacacttcacgaccaagttcatctcttggaatgtgcttggatggagatattgatgatcggactcgtgtggaggtcaatggagcatcctggtaaacttcttttcgcacccaatctgctcttggatagaaatcagggtaagtgcgtcgagggtggcgttgaaatcttcgacatgctccttgcgacatccagccgattccgaatgatgaatcttcaaggagaggaatttgtctgtcttaagagcattatactcctcaatagtggagtttacaccttcttgtcctctacactgaaatcacttgaggaaaaagatcacatacatagggtgttggataaaatcacggatacactcatacatctgatggcaaaagcaggattgaccctgcaacagcagcaccaacgactggcccaactgctgttgatccttagccatatcagacacatgtctagcaaaaggatggaacatttgtacagcatgaaatgtaagaacgtagtgccactgtccgatttgttgctggaaatgctggacgctcatcggctc

SEQ ID NO: 652 - protein, 245 aa, Artificial Sequence
  Description of Artificial Sequence: Synthetic Destabilizing Domain (DD)
SLALSLTADQMVSALLDAEPPILYSEYDPTRPFSEASMMGLLTNLADRELVHMINWAKRVPGFVDLTLHDQVHLLECAWMEILMIGLVWRSMEHPGKLLFAPNLLLDRNQGKCVEGGVEIFDMLLATSSRFRMMNLQGEEFVCLKSIILLNSGVYTFLSSTLKSLEEKDHIHRVLDKITDTLIHLMAKAGLTLQQQHRRLAQLLLILSHIRHMSNKRMEHLYSMKCKNVVPLSDLLLEMLDAHRL

SEQ ID NO: 653 - DNA, 735 bp, Artificial Sequence
  Description of Artificial Sequence: Synthetic Destabilizing Domain (DD)
tcactggcgctcagccttactgccgaccaaatggtatcagctcttctggacgcagaacccccaattctttattccgagtacgaccccacacgcccgttcagtgaagcttccatgatgggcctccttacgaaccttgccgaccgggaactcgtgcacatgatcaattgggcgaagcgggtgccggggttcgtagatttgacacttcacgaccaagttcatctcttggaatgtgcttggatggagatattgatgatcggactcgtgtggaggtcaatggagcatcctggtaaacttcttttcgcacccaatctgctcttggatagaaatcagggtaagtgcgtcgagggtggcgttgaaatcttcgacatgctccttgcgacatccagccgattccgaatgatgaatcttcaaggagaggaatttgtctgtcttaagagcattatactcctcaatagtggagtttacaccttcttgtcctctacactgaaatcacttgaggaaaaagatcacatacatagggtgttggataaaatcacggatacactcatacatctgatggcaaaagcaggattgaccctgcaacagcagcaccgacgactggcccaactgctgttgatccttagccatatcagacacatgtctaacaaaaggatggaacatttgtacagcatgaaatgtaagaacgtagtgccactgtccgatttgttgctggaaatgctggacgctcatcggctc

SEQ ID NO: 654 - protein, 245 aa, Artificial Sequence
  Description of Artificial Sequence: Synthetic Destabilizing Domain (DD)
NLALSLTADQMVSALLDAEPPILYSEYDPTRPFSEASMMGLLTNLADRELVHMINWAKRVPGFVDLTLHDQVHLLECAWMEILMIGLVWRSMEHPGKLLFAPNLLLDRNQGKCVEGGVEIFDMLLATSSRFRMMNLQVEEFVCLKSIILLNSGVYTFLSSTLKSLEEKDHIHRVLDKITDTLIHLMAKAGLTLQQQHQRLAQLLLILSHIRHMSNKRMEHLYSMKCKNVVPLSDLLLEMLDAHRL

SEQ ID NO: 655 - DNA, 735 bp, Artificial Sequence
  Description of Artificial Sequence: Synthetic Destabilizing Domain (DD)
aatctggcgctcagccttactgccgaccaaatggtatcagctcttctggacgcagaacccccaattctttattccgagtacgaccccacacgcccgttcagtgaagcttccatgatgggcctccttacgaaccttgccgaccgggaactcgtgcacatgatcaattgggcgaagcgggtgccggggttcgtagatttgacacttcacgaccaagttcatctcttggaatgtgcttggatggagatattgatgatcggactcgtgtggaggtcaatggagcatcctggtaaacttcttttcgcacccaatctgctcttggatagaaatcagggtaagtgcgtcgagggtggcgttgaaatcttcgacatgctccttgcgacatccagccgattccgaatgatgaatcttcaagtagaggaatttgtctgtcttaagagcattatactcctcaatagtggagtttacaccttcttgtcctctacactgaaatcacttgaggaaaaagatcacatacatagggtgttggataaaatcacggatacactcatacatctgatggcaaaagcaggattgaccctgcaacagcagcaccaacgactggcccaactgctgttgatccttagccatatcagacacatgtctaacaaaaggatggaacatttgtacagcatgaaatgtaagaacgtagtgccactgtccgatttgttgctggaaatgctggacgctcatcggctc

SEQ ID NO: 656 - protein, 245 aa, Artificial Sequence
  Description of Artificial Sequence: Synthetic Destabilizing Domain (DD)
SLALSLTADQMVSALLDAEPPILYSEYDPTRPFSEASMMGLLTNLADRELVHMINWAKRVPGFVDLTLHDQVHLLECAWMEILMIGLVWRSMEHPGKLLFAPNLLLDRFQGKCVEGGVEIFDMLLATSSRFRMMNLQGEEFVCLKSIILLNSGVYTFLSSTLKSLEEKDHIHRVLDKITDTLIHLMAKAGLTLQQQHQRLAQLLLILSHIRHMSNKRMEHLYSMKCKNVVPLSDLLLEMLDAHRL

SEQ ID NO: 657 - DNA, 735 bp, Artificial Sequence
  Description of Artificial Sequence: Synthetic Destabilizing Domain (DD)
tcactggcgctcagccttactgccgaccaaatggtatcagctcttctggacgcagaacccccaattctttattccgagtacgaccccacacgcccgttcagtgaagcttccatgatgggcctccttacgaaccttgccgaccgggaactcgtgcacatgatcaattgggcgaagcgggtgccggggttcgtagatttgacacttcacgaccaagttcatctcttggaatgtgcttggatggagatattgatgatcggactcgtgtggaggtcaatggagcatcctggtaaacttcttttcgcacccaatctgctcttggatagattccagggtaagtgcgtcgagggtggcgttgaaatcttcgacatgctccttgcgacatccagccgattccgaatgatgaatcttcaaggagaggaatttgtctgtcttaagagcattatactcctcaatagtggagtttacaccttcttgtcctctacactgaaatcacttgaggaaaaagatcacatacatagggtgttggataaaatcacggatacactcatacatctgatggcaaaagcaggattgaccctgcaacagcagcaccaacgactggcccaactgctgttgatccttagccatatcagacacatgtctaacaaaaggatggaacatttgtacagcatgaaatgtaagaacgtagtgccactgtccgatttgttgctggaaatgctggacgctcatcggctc

SEQ ID NO: 658 - protein, 245 aa, Artificial Sequence
  Description of Artificial Sequence: Synthetic Destabilizing Domain (DD)
SLALSLTADQMVSALLDAEPPILYSEYDPTRPFSEASMMGLLTNLADRELVHMINWAKRVPGFVDLTLHDQVHLLECAWMEILMIGLVWRSMEHPGKLLFAPNLLLDRLQGKCVEGGVEIFDMLLATSSRFRMMNLQGEEFVCLKSIILLNSGVYTFLSSTLKSLEEKDHIHRVLDKITDTLIHLMAKAGLTLQQQHQRLAQLLLILSHIRHMSNKRMEHLYSMKCKNVVPLSDLLLEMLDAHRL

SEQ ID NO: 659 - DNA, 735 bp, Artificial Sequence
  Description of Artificial Sequence: Synthetic Destabilizing Domain (DD)
tcactggcgctcagccttactgccgaccaaatggtatcagctcttctggacgcagaacccccaattctttattccgagtacgaccccacacgcccgttcagtgaagcttccatgatgggcctccttacgaaccttgccgaccgggaactcgtgcacatgatcaattgggcgaagcgggtgccggggttcgtagatttgacacttcacgaccaagttcatctcttggaatgtgcttggatggagatattgatgatcggactcgtgtggaggtcaatggagcatcctggtaaacttcttttcgcacccaatctgctcttggatagactgcagggtaagtgcgtcgagggtggcgttgaaatcttcgacatgctccttgcgacatccagccgattccgaatgatgaatcttcaaggagaggaatttgtctgtcttaagagcattatactcctcaatagtggagtttacaccttcttgtcctctacactgaaatcacttgaggaaaaagatcacatacatagggtgttggataaaatcacggatacactcatacatctgatggcaaaagcaggattgaccctgcaacagcagcaccaacgactggcccaactgctgttgatccttagccatatcagacacatgtctaacaaaaggatggaacatttgtacagcatgaaatgtaagaacgtagtgccactgtccgatttgttgctggaaatgctggacgctcatcggctc

SEQ ID NO: 660 - protein, 245 aa, Artificial Sequence
  Description of Artificial Sequence: Synthetic Destabilizing Domain (DD)
SLALSLTADQMVSALLDAEPPILYSEYDPTRPFSEASMMGLLTNLADRELVHMINWAKRVPGFVDLTLHDQVHLLECAWMEILMIGLVWRSMEHPGKLLFAPNLLLDRYQGKCVEGGVEIFDMLLATSSRFRMMNLQGEEFVCLKSIILLNSGVYTFLSSTLKSLEEKDHIHRVLDKITDTLIHLMAKAGLTLQQQHQRLAQLLLILSHIRHMSNKRMEHLYSMKCKNVVPLSDLLLEMLDAHRL

SEQ ID NO: 661 - DNA, 735 bp, Artificial Sequence
  Description of Artificial Sequence: Synthetic Destabilizing Domain (DD)
tcactggcgctcagccttactgccgaccaaatggtatcagctcttctggacgcagaacccccaattctttattccgagtacgaccccacacgcccgttcagtgaagcttccatgatgggcctccttacgaaccttgccgaccgggaactcgtgcacatgatcaattgggcgaagcgggtgccggggttcgtagatttgacacttcacgaccaagttcatctcttggaatgtgcttggatggagatattgatgatcggactcgtgtggaggtcaatggagcatcctggtaaacttcttttcgcacccaatctgctcttggatagataccagggtaagtgcgtcgagggtggcgttgaaatcttcgacatgctccttgcgacatccagccgattccgaatgatgaatcttcaaggagaggaatttgtctgtcttaagagcattatactcctcaatagtggagtttacaccttcttgtcctctacactgaaatcacttgaggaaaaagatcacatacatagggtgttggataaaatcacggatacactcatacatctgatggcaaaagcaggattgaccctgcaacagcagcaccaacgactggcccaactgctgttgatccttagccatatcagacacatgtctaacaaaaggatggaacatttgtacagcatgaaatgtaagaacgtagtgccactgtccgatttgttgctggaaatgctggacgctcatcggctc

SEQ ID NO: 662 - protein, 245 aa, Artificial Sequence
  Description of Artificial Sequence: Synthetic Destabilizing Domain (DD)
SLALSLTADQMVSALLDAEPPILYSEYDPTRPFSEASMMGLLTNLADRELVHMINWAKRVPGFVDLTLHDQVHLLECAWMEILMIGLVWRSMEHPGKLLFAPNLLLDRHQGKCVEGGVEIFDMLLATSSRFRMMNLQGEEFVCLKSIILLNSGVYTFLSSTLKSLEEKDHIHRVLDKITDTLIHLMAKAGLTLQQQHQRLAQLLLILSHIRHMSNKRMEHLYSMKCKNVVPLSDLLLEMLDAHRL

SEQ ID NO: 663 - DNA, 735 bp, Artificial Sequence
  Description of Artificial Sequence: Synthetic Destabilizing Domain (DD)
tcactggcgctcagccttactgccgaccaaatggtatcagctcttctggacgcagaacccccaattctttattccgagtacgaccccacacgcccgttcagtgaagcttccatgatgggcctccttacgaaccttgccgaccgggaactcgtgcacatgatcaattgggcgaagcgggtgccggggttcgtagatttgacacttcacgaccaagttcatctcttggaatgtgcttggatggagatattgatgatcggactcgtgtggaggtcaatggagcatcctggtaaacttcttttcgcacccaatctgctcttggatagacaccagggtaagtgcgtcgagggtggcgttgaaatcttcgacatgctccttgcgacatccagccgattccgaatgatgaatcttcaaggagaggaatttgtctgtcttaagagcattatactcctcaatagtggagtttacaccttcttgtcctctacactgaaatcacttgaggaaaaagatcacatacatagggtgttggataaaatcacggatacactcatacatctgatggcaaaagcaggattgaccctgcaacagcagcaccaacgactggcccaactgctgttgatccttagccatatcagacacatgtctaacaaaaggatggaacatttgtacagcatgaaatgtaagaacgtagtgccactgtccgatttgttgctggaaatgctggacgctcatcggctc

SEQ ID NO: 664 - protein, 245 aa, Artificial Sequence
  Description of Artificial Sequence: Synthetic Destabilizing Domain (DD)
SLALSLTADQMVSALLDAEPPILYSEYDPTRPFSEASMMGLLTNLADRELVHMINWAKRVPGFVDLTLHDQVHLLECAWMEILMIGLVWRSMEHPGKLLFAPNLLLDRQQGKCVEGGVEIFDMLLATSSRFRMMNLQGEEFVCLKSIILLNSGVYTFLSSTLKSLEEKDHIHRVLDKITDTLIHLMAKAGLTLQQQHQRLAQLLLILSHIRHMSNKRMEHLYSMKCKNVVPLSDLLLEMLDAHRL

SEQ ID NO: 665 - DNA, 735 bp, Artificial Sequence
  Description of Artificial Sequence: Synthetic Destabilizing Domain (DD)
tcactggcgctcagccttactgccgaccaaatggtatcagctcttctggacgcagaacccccaattctttattccgagtacgaccccacacgcccgttcagtgaagcttccatgatgggcctccttacgaaccttgccgaccgggaactcgtgcacatgatcaattgggcgaagcgggtgccggggttcgtagatttgacacttcacgaccaagttcatctcttggaatgtgcttggatggagatattgatgatcggactcgtgtggaggtcaatggagcatcctggtaaacttcttttcgcacccaatctgctcttggatagacagcagggtaagtgcgtcgagggtggcgttgaaatcttcgacatgctccttgcgacatccagccgattccgaatgatgaatcttcaaggagaggaatttgtctgtcttaagagcattatactcctcaatagtggagtttacaccttcttgtcctctacactgaaatcacttgaggaaaaagatcacatacatagggtgttggataaaatcacggatacactcatacatctgatggcaaaagcaggattgaccctgcaacagcagcaccaacgactggcccaactgctgttgatccttagccatatcagacacatgtctaacaaaaggatggaacatttgtacagcatgaaatgtaagaacgtagtgccactgtccgatttgttgctggaaatgctggacgctcatcggctc

SEQ ID NO: 666 - protein, 245 aa, Artificial Sequence
  Description of Artificial Sequence: Synthetic Destabilizing Domain (DD)
SLALSLTADQMVSALLDAEPPILYSEYDPTRPFSEASMMGLLTNLADRELVHMINWAKRVPGFVDLTLHDQVHLLECAWMEILMIGLVWRSMEHPGKLLFAPNLLLDRIQGKCVEGGVEIFDMLLATSSRFRMMNLQGEEFVCLKSIILLNSGVYTFLSSTLKSLEEKDHIHRVLDKITDTLIHLMAKAGLTLQQQHQRLAQLLLILSHIRHMSNKRMEHLYSMKCKNVVPLSDLLLEMLDAHRL

SEQ ID NO: 667 - DNA, 735 bp, Artificial Sequence
  Description of Artificial Sequence: Synthetic Destabilizing Domain (DD)
tcactggcgctcagccttactgccgaccaaatggtatcagctcttctggacgcagaacccccaattctttattccgagtacgaccccacacgcccgttcagtgaagcttccatgatgggcctccttacgaaccttgccgaccgggaactcgtgcacatgatcaattgggcgaagcgggtgccggggttcgtagatttgacacttcacgaccaagttcatctcttggaatgtgcttggatggagatattgatgatcggactcgtgtggaggtcaatggagcatcctggtaaacttcttttcgcacccaatctgctcttggatagaatccagggtaagtgcgtcgagggtggcgttgaaatcttcgacatgctccttgcgacatccagccgattccgaatgatgaatcttcaaggagaggaatttgtctgtcttaagagcattatactcctcaatagtggagtttacaccttcttgtcctctacactgaaatcacttgaggaaaaagatcacatacatagggtgttggataaaatcacggatacactcatacatctgatggcaaaagcaggattgaccctgcaacagcagcaccaacgactggcccaactgctgttgatccttagccatatcagacacatgtctaacaaaaggatggaacatttgtacagcatgaaatgtaagaacgtagtgccactgtccgatttgttgctggaaatgctggacgctcatcggctc

SEQ ID NO: 668 - protein, 245 aa, Artificial Sequence
  Description of Artificial Sequence: Synthetic Destabilizing Domain (DD)
SLALSLTADQMVSALLDAEPPILYSEYDPTRPFSEASMMGLLTNLADRELVHMINWAKRVPGFVDLTLHDQVHLLECAWMEILMIGLVWRSMEHPGKLLFAPNLLLDRMQGKCVEGGVEIFDMLLATSSRFRMMNLQGEEFVCLKSIILLNSGVYTFLSSTLKSLEEKDHIHRVLDKITDTLIHLMAKAGLTLQQQHQRLAQLLLILSHIRHMSNKRMEHLYSMKCKNVVPLSDLLLEMLDAHRL

SEQ ID NO: 669 - DNA, 735 bp, Artificial Sequence
  Description of Artificial Sequence: Synthetic Destabilizing Domain (DD)
tcactggcgctcagccttactgccgaccaaatggtatcagctcttctggacgcagaacccccaattctttattccgagtacgaccccacacgcccgttcagtgaagcttccatgatgggcctccttacgaaccttgccgaccgggaactcgtgcacatgatcaattgggcgaagcgggtgccggggttcgtagatttgacacttcacgaccaagttcatctcttggaatgtgcttggatggagatattgatgatcggactcgtgtggaggtcaatggagcatcctggtaaacttcttttcgcacccaatctgctcttggatagaatgcagggtaagtgcgtcgagggtggcgttgaaatcttcgacatgctccttgcgacatccagccgattccgaatgatgaatcttcaaggagaggaatttgtctgtcttaagagcattatactcctcaatagtggagtttacaccttcttgtcctctacactgaaatcacttgaggaaaaagatcacatacatagggtgttggataaaatcacggatacactcatacatctgatggcaaaagcaggattgaccctgcaacagcagcaccaacgactggcccaactgctgttgatccttagccatatcagacacatgtctaacaaaaggatggaacatttgtacagcatgaaatgtaagaacgtagtgccactgtccgatttgttgctggaaatgctggacgctcatcggctc

SEQ ID NO: 670 - protein, 245 aa, Artificial Sequence
  Description of Artificial Sequence: Synthetic Destabilizing Domain (DD)
SLALSLTADQMVSALLDAEPPILYSEYDPTRPFSEASMMGLLTNLADRELVHMINWAKRVPGFVDLTLHDQVHLLECAWMEILMIGLVWRSMEHPGKLLFAPNLLLDRKQGKCVEGGVEIFDMLLATSSRFRMMNLQGEEFVCLKSIILLNSGVYTFLSSTLKSLEEKDHIHRVLDKITDTLIHLMAKAGLTLQQQHQRLAQLLLILSHIRHMSNKRMEHLYSMKCKNVVPLSDLLLEMLDAHRL

SEQ ID NO: 671 - DNA, 735 bp, Artificial Sequence
  Description of Artificial Sequence: Synthetic Destabilizing Domain (DD)
tcactggcgctcagccttactgccgaccaaatggtatcagctcttctggacgcagaacccccaattctttattccgagtacgaccccacacgcccgttcagtgaagcttccatgatgggcctccttacgaaccttgccgaccgggaactcgtgcacatgatcaattgggcgaagcgggtgccggggttcgtagatttgacacttcacgaccaagttcatctcttggaatgtgcttggatggagatattgatgatcggactcgtgtggaggtcaatggagcatcctggtaaacttcttttcgcacccaatctgctcttggatagaaagcagggtaagtgcgtcgagggtggcgttgaaatcttcgacatgctccttgcgacatccagccgattccgaatgatgaatcttcaaggagaggaatttgtctgtcttaagagcattatactcctcaatagtggagtttacaccttcttgtcctctacactgaaatcacttgaggaaaaagatcacatacatagggtgttggataaaatcacggatacactcatacatctgatggcaaaagcaggattgaccctgcaacagcagcaccaacgactggcccaactgctgttgatccttagccatatcagacacatgtctaacaaaaggatggaacatttgtacagcatgaaatgtaagaacgtagtgccactgtccgatttgttgctggaaatgctggacgctcatcggctc

SEQ ID NO: 672 - protein, 245 aa, Artificial Sequence
  Description of Artificial Sequence: Synthetic Destabilizing Domain (DD)
SLALSLTADQMVSALLDAEPPILYSEYDPTRPFSEASMMGLLTNLADRELVHMINWAKRVPGFVDLTLHDQVHLLECAWMEILMIGLVWRSMEHPGKLLFAPNLLLDRVQGKCVEGGVEIFDMLLATSSRFRMMNLQGEEFVCLKSIILLNSGVYTFLSSTLKSLEEKDHIHRVLDKITDTLIHLMAKAGLTLQQQHQRLAQLLLILSHIRHMSNKRMEHLYSMKCKNVVPLSDLLLEMLDAHRL

SEQ ID NO: 673 - DNA, 735 bp, Artificial Sequence
  Description of Artificial Sequence: Synthetic Destabilizing Domain (DD)
tcactggcgctcagccttactgccgaccaaatggtatcagctcttctggacgcagaacccccaattctttattccgagtacgaccccacacgcccgttcagtgaagcttccatgatgggcctccttacgaaccttgccgaccgggaactcgtgcacatgatcaattgggcgaagcgggtgccggggttcgtagatttgacacttcacgaccaagttcatctcttggaatgtgcttggatggagatattgatgatcggactcgtgtggaggtcaatggagcatcctggtaaacttcttttcgcacccaatctgctcttggatagagtgcagggtaagtgcgtcgagggtggcgttgaaatcttcgacatgctccttgcgacatccagccgattccgaatgatgaatcttcaaggagaggaatttgtctgtcttaagagcattatactcctcaatagtggagtttacaccttcttgtcctctacactgaaatcacttgaggaaaaagatcacatacatagggtgttggataaaatcacggatacactcatacatctgatggcaaaagcaggattgaccctgcaacagcagcaccaacgactggcccaactgctgttgatccttagccatatcagacacatgtctaacaaaaggatggaacatttgtacagcatgaaatgtaagaacgtagtgccactgtccgatttgttgctggaaatgctggacgctcatcggctc

SEQ ID NO: 674 - protein, 245 aa, Artificial Sequence
  Description of Artificial Sequence: Synthetic Destabilizing Domain (DD)
SLALSLTADQMVSALLDAEPPILYSEYDPTRPFSEASMMGLLTNLADRELVHMINWAKRVPGFVDLTLHDQVHLLECAWMEILMIGLVWRSMEHPGKLLFAPNLLLDRSQGKCVEGGVEIFDMLLATSSRFRMMNLQGEEFVCLKSIILLNSGVYTFLSSTLKSLEEKDHIHRVLDKITDTLIHLMAKAGLTLQQQHQRLAQLLLILSHIRHMSNKRMEHLYSMKCKNVVPLSDLLLEMLDAHRL

SEQ ID NO: 675 - DNA, 735 bp, Artificial Sequence
  Description of Artificial Sequence: Synthetic Destabilizing Domain (DD)
tcactggcgctcagccttactgccgaccaaatggtatcagctcttctggacgcagaacccccaattctttattccgagtacgaccccacacgcccgttcagtgaagcttccatgatgggcctccttacgaaccttgccgaccgggaactcgtgcacatgatcaattgggcgaagcgggtgccggggttcgtagatttgacacttcacgaccaagttcatctcttggaatgtgcttggatggagatattgatgatcggactcgtgtggaggtcaatggagcatcctggtaaacttcttttcgcacccaatctgctcttggatagaagccagggtaagtgcgtcgagggtggcgttgaaatcttcgacatgctccttgcgacatccagccgattccgaatgatgaatcttcaaggagaggaatttgtctgtcttaagagcattatactcctcaatagtggagtttacaccttcttgtcctctacactgaaatcacttgaggaaaaagatcacatacatagggtgttggataaaatcacggatacactcatacatctgatggcaaaagcaggattgaccctgcaacagcagcaccaacgactggcccaactgctgttgatccttagccatatcagacacatgtctaacaaaaggatggaacatttgtacagcatgaaatgtaagaacgtagtgccactgtccgatttgttgctggaaatgctggacgctcatcggctc

SEQ ID NO: 676 - protein, 245 aa, Artificial Sequence
  Description of Artificial Sequence: Synthetic Destabilizing Domain (DD)
SLALSLTADQMVSALLDAEPPILYSEYDPTRPFSEASMMGLLTNLADRELVHMINWAKRVPGFVDLTLHDQVHLLECAWMEILMIGLVWRSMEHPGKLLFAPNLLLDRCQGKCVEGGVEIFDMLLATSSRFRMMNLQGEEFVCLKSIILLNSGVYTFLSSTLKSLEEKDHIHRVLDKITDTLIHLMAKAGLTLQQQHQRLAQLLLILSHIRHMSNKRMEHLYSMKCKNVVPLSDLLLEMLDAHRL

SEQ ID NO: 677 - DNA, 735 bp, Artificial Sequence
  Description of Artificial Sequence: Synthetic Destabilizing Domain (DD)
tcactggcgctcagccttactgccgaccaaatggtatcagctcttctggacgcagaacccccaattctttattccgagtacgaccccacacgcccgttcagtgaagcttccatgatgggcctccttacgaaccttgccgaccgggaactcgtgcacatgatcaattgggcgaaacgggtgccggggttcgtagatttgacacttcacgaccaagttcatctcttggaatgtgcttggatggagatattgatgatcggactcgtgtggaggtcaatggagcatcctggtaaacttcttttcgcacccaatctgctcttggatagatgccagggtaagtgcgtcgagggtggcgttgaaatcttcgacatgctccttgcgacatccagccgattccgaatgatgaatcttcaaggagaggaatttgtctgtcttaagagcattatactcctcaatagtggagtttacaccttcttgtcctctacactgaaatcacttgaggaaaaagatcacatacatagggtgttggataaaatcacggatacactcatacatctgatggcaaaagcaggattgaccctgcaacagcagcaccaacgactggcccaactgctgttgatccttagccatatcagacacatgtctaacaaaaggatggaacatttgtacagcatgaaatgtaagaacgtagtgccactgtccgatttgttgctggaaatgctggacgctcatcggctc

SEQ ID NO: 678 - protein, 245 aa, Artificial Sequence
  Description of Artificial Sequence: Synthetic Destabilizing Domain (DD)
SLALSLTADQMVSALLDAEPPILYSEYDPTRPFSEASMMGLLTNLADRELVHMINWAKRVPGFVDLTLHDQVHLLECAWMEILMIGLVWRSMEHPGKLLFAPNLLLDRWQGKCVEGGVEIFDMLLATSSRFRMMNLQGEEFVCLKSIILLNSGVYTFLSSTLKSLEEKDHIHRVLDKITDTLIHLMAKAGLTLQQQHQRLAQLLLILSHIRHMSNKRMEHLYSMKCKNVVPLSDLLLEMLDAHRL

SEQ ID NO: 679 - DNA, 735 bp, Artificial Sequence
  Description of Artificial Sequence: Synthetic Destabilizing Domain (DD)
tcactggcgctcagccttactgccgaccaaatggtatcagctcttctggacgcagaacccccaattctttattccgagtacgaccccacacgcccgttcagtgaagcttccatgatgggcctccttacgaaccttgccgaccgggaactcgtgcacatgatcaattgggcgaagcgggtgccggggttcgtagatttgacacttcacgaccaagttcatctcttggaatgtgcttggatggagatattgatgatcggactcgtgtggaggtcaatggagcatcctggtaaacttcttttcgcacccaatctgctcttggatagatggcagggtaagtgcgtcgagggtggcgttgaaatcttcgacatgctccttgcgacatccagccgattccgaatgatgaatcttcaaggagaggaatttgtctgtcttaagagcattatactcctcaatagtggagtttacaccttcttgtcctctacactgaaatcacttgaggaaaaagatcacatacatagggtgttggataaaatcacggatacactcatacatctgatggcaaaagcaggattgaccctgcaacagcagcaccaacgactggcccaactgctgttgatccttagccatatcagacacatgtctaacaaaaggatggaacatttgtacagcatgaaatgtaagaacgtagtgccactgtccgatttgttgctggaaatgctggacgctcatcggctc

SEQ ID NO: 680 - protein, 245 aa, Artificial Sequence
  Description of Artificial Sequence: Synthetic Destabilizing Domain (DD)
SLALSLTADQMVSALLDAEPPILYSEYDPTRPFSEASMMGLLTNLADRELVHMINWAKRVPGFVDLTLHDQVHLLECAWMEILMIGLVWRSMEHPGKLLFAPNLLLDRPQGKCVEGGVEIFDMLLATSSRFRMMNLQGEEFVCLKSIILLNSGVYTFLSSTLKSLEEKDHIHRVLDKITDTLIHLMAKAGLTLQQQHQRLAQLLLILSHIRHMSNKRMEHLYSMKCKNVVPLSDLLLEMLDAHRL

SEQ ID NO: 681 - DNA, 735 bp, Artificial Sequence
  Description of Artificial Sequence: Synthetic Destabilizing Domain (DD)
tcactggcgctcagccttactgccgaccaaatggtatcagctcttctggacgcagaacccccaattctttattccgagtacgaccccacacgcccgttcagtgaagcttccatgatgggcctccttacgaaccttgccgaccgggaactcgtgcacatgatcaattgggcgaagcgggtgccggggttcgtagatttgacacttcacgaccaagttcatctcttggaatgtgcttggatggagatattgatgatcggactcgtgtggaggtcaatggagcatcctggtaaacttcttttcgcacccaatctgctcttggatagaccccagggtaagtgcgtcgagggtggcgttgaaatcttcgacatgctccttgcgacatccagccgattccgaatgatgaatcttcaaggagaggaatttgtctgtcttaagagcattatactcctcaatagtggagtttacaccttcttgtcctctacactgaaatcacttgaggaaaaagatcacatacatagggtgttggataaaatcacggatacactcatacatctgatggcaaaagcaggattgaccctgcaacagcagcaccaacgactggcccaactgctgttgatccttagccatatcagacacatgtctaacaaaaggatggaacatttgtacagcatgaaatgtaagaacgtagtgccactgtccgatttgttgctggaaatgctggacgctcatcggctc

SEQ ID NO: 682 - protein, 245 aa, Artificial Sequence
  Description of Artificial Sequence: Synthetic Destabilizing Domain (DD)
SLALSLTADQMVSALLDAEPPILYSEYDPTRPFSEASMMGLLTNLADRELVHMINWAKRVPGFVDLTLHDQVHLLECAWMEILMIGLVWRSMEHPGKLLFAPNLLLDRRQGKCVEGGVEIFDMLLATSSRFRMMNLQGEEFVCLKSIILLNSGVYTFLSSTLKSLEEKDHIHRVLDKITDTLIHLMAKAGLTLQQQHQRLAQLLLILSHIRHMSNKRMEHLYSMKCKNVVPLSDLLLEMLDAHRL

SEQ ID NO: 683 - DNA, 735 bp, Artificial Sequence
  Description of Artificial Sequence: Synthetic Destabilizing Domain (DD)
tcactggcgctcagccttactgccgaccaaatggtatcagctcttctggacgcagaacccccaattctttattccgagtacgaccccacacgcccgttcagtgaagcttccatgatgggcctccttacgaaccttgccgaccgggaactcgtgcacatgatcaattgggcgaagcgggtgccggggttcgtagatttgacacttcacgaccaagttcatctcttggaatgtgcttggatggagatattgatgatcggactcgtgtggaggtcaatggagcatcctggtaaacttcttttcgcacccaatctgctcttggatagacgacagggtaagtgcgtcgagggtggcgttgaaatcttcgacatgctccttgcgacatccagccgattccgaatgatgaatcttcaaggagaggaatttgtctgtcttaagagcattatactcctcaatagtggagtttacaccttcttgtcctctacactgaaatcacttgaggaaaaagatcacatacatagggtgttggataaaatcacggatacactcatacatctgatggcaaaagcaggattgaccctgcaacagcagcaccaacgactggcccaactgctgttgatccttagccatatcagacacatgtctaacaaaaggatggaacatttgtacagcatgaaatgtaagaacgtagtgccactgtccgatttgttgctggaaatgctggacgctcatcggctc

SEQ ID NO: 684 - protein, 245 aa, Artificial Sequence
  Description of Artificial Sequence: Synthetic Destabilizing Domain (DD)
SLALSLTADQMVSALLDAEPPILYSEYDPTRPFSEASMMGLLTNLADRELVHMINWAKRVPGFVDLTLHDQVHLLECAWMEILMIGLVWRSMEHPGKLLFAPNLLLDRTQGKCVEGGVEIFDMLLATSSRFRMMNLQGEEFVCLKSIILLNSGVYTFLSSTLKSLEEKDHIHRVLDKITDTLIHLMAKAGLTLQQQHQRLAQLLLILSHIRHMSNKRMEHLYSMKCKNVVPLSDLLLEMLDAHRL

SEQ ID NO: 685 - DNA, 735 bp, Artificial Sequence
  Description of Artificial Sequence: Synthetic Destabilizing Domain (DD)
tcactggcgctcagccttactgccgaccaaatggtatcagctcttctggacgcagaacccccaattctttattccgagtacgaccccacacgcccgttcagtgaagcttccatgatgggcctccttacgaaccttgccgaccgggaactcgtgcacatgatcaattgggcgaagcgggtgccggggttcgtagatttgacacttcacgaccaagttcatctcttggaatgtgcttggatggagatattgatgatcggactcgtgtggaggtcaatggagcatcctggtaaacttcttttcgcacccaatctgctcttggatagaacccagggtaagtgcgtcgagggtggcgttgaaatcttcgacatgctccttgcgacatccagccgattccgaatgatgaatcttcaaggagaggaatttgtctgtcttaagagcattatactcctcaatagtggagtttacaccttcttgtcctctacactgaaatcacttgaggaaaaagatcacatacatagggtgttggataaaatcacggatacactcatacatctgatggcaaaagcaggattgaccctgcaacagcagcaccaacgactggcccaactgctgttgatccttagccatatcagacacatgtctaacaaaaggatggaacatttgtacagcatgaaatgtaagaacgtagtgccactgtccgatttgttgctggaaatgctggacgctcatcggctc

SEQ ID NO: 686 - protein, 245 aa, Artificial Sequence
  Description of Artificial Sequence: Synthetic Destabilizing Domain (DD)
SLALSLTADQMVSALLDAEPPILYSEYDPTRPFSEASMMGLLTNLADRELVHMINWAKRVPGFVDLTLHDQVHLLECAWMEILMIGLVWRSMEHPGKLLFAPNLLLDRAQGKCVEGGVEIFDMLLATSSRFRMMNLQGEEFVCLKSIILLNSGVYTFLSSTLKSLEEKDHIHRVLDKITDTLIHLMAKAGLTLQQQHQRLAQLLLILSHIRHMSNKRMEHLYSMKCKNVVPLSDLLLEMLDAHRL

SEQ ID NO: 687 - DNA, 735 bp, Artificial Sequence
  Description of Artificial Sequence: Synthetic Destabilizing Domain (DD)
tcactggcgctcagccttactgccgaccaaatggtatcagctcttctggacgcagaacccccaattctttattccgagtacgaccccacacgcccgttcagtgaagcttccatgatgggcctccttacgaaccttgccgaccgggaactcgtgcacatgatcaattgggcgaagcgggtgccggggttcgtagatttgacacttcacgaccaagttcatctcttggaatgtgcttggatggagatattgatgatcggactcgtgtggaggtcaatggagcatcctggtaaacttcttttcgcacccaatctgctcttggatagagcccagggtaagtgcgtcgagggtggcgttgaaatcttcgacatgctccttgcgacatccagccgattccgaatgatgaatcttcaaggagaggaatttgtctgtcttaagagcattatactcctcaatagtggagtttacaccttcttgtcctctacactgaaatcacttgaggaaaaagatcacatacatagggtgttggataaaatcacggatacactcatacatctgatggcaaaagcaggattgaccctgcaacagcagcaccaacgactggcccaactgctgttgatccttagccatatcagacacatgtctaacaaaaggatggaacatttgtacagcatgaaatgtaagaacgtagtgccactgtccgatttgttgctggaaatgctggacgctcatcggctc

SEQ ID NO: 688 - protein, 245 aa, Artificial Sequence
  Description of Artificial Sequence: Synthetic Destabilizing Domain (DD)
SLALSLTADQMVSALLDAEPPILYSEYDPTRPFSEASMMGLLTNLADRELVHMINWAKRVPGFVDLTLHDQVHLLECAWMEILMIGLVWRSMEHPGKLLFAPNLLLDREQGKCVEGGVEIFDMLLATSSRFRMMNLQGEEFVCLKSIILLNSGVYTFLSSTLKSLEEKDHIHRVLDKITDTLIHLMAKAGLTLQQQHQRLAQLLLILSHIRHMSNKRMEHLYSMKCKNVVPLSDLLLEMLDAHRL

SEQ ID NO: 689 - DNA, 735 bp, Artificial Sequence
  Description of Artificial Sequence: Synthetic Destabilizing Domain (DD)
tcactggcgctcagccttactgccgaccaaatggtatcagctcttctggacgcagaacccccaattctttattccgagtacgaccccacacgcccgttcagtgaagcttccatgatgggcctccttacgaaccttgccgaccgggaactcgtgcacatgatcaattgggcgaagcgggtgccggggttcgtagatttgacacttcacgaccaagttcatctcttggaatgtgcttggatggagatattgatgatcggactcgtgtggaggtcaatggagcatcctggtaaacttcttttcgcacccaatctgctcttggatagagagcagggtaagtgcgtcgagggtggcgttgaaatcttcgacatgctccttgcgacatccagccgattccgaatgatgaatcttcaaggagaggaatttgtctgtcttaagagcattatactcctcaatagtggagtttacaccttcttgtcctctacactgaaatcacttgaggaaaaagatcacatacatagggtgttggataaaatcacggatacactcatacatctgatggcaaaagcaggattgaccctgcaacagcagcaccaacgactggcccaactgctgttgatccttagccatatcagacacatgtctaacaaaaggatggaacatttgtacagcatgaaatgtaagaacgtagtgccactgtccgatttgttgctggaaatgctggacgctcatcggctc

SEQ ID NO: 690 - protein, 245 aa, Artificial Sequence
  Description of Artificial Sequence: Synthetic Destabilizing Domain (DD)
SLALSLTADQMVSALLDAEPPILYSEYDPTRPFSEASMMGLLTNLADRELVHMINWAKRVPGFVDLTLHDQVHLLECAWMEILMIGLVWRSMEHPGKLLFAPNLLLDRGQGKCVEGGVEIFDMLLATSSRFRMMNLQGEEFVCLKSIILLNSGVYTFLSSTLKSLEEKDHIHRVLDKITDTLIHLMAKAGLTLQQQHQRLAQLLLILSHIRHMSNKRMEHLYSMKCKNVVPLSDLLLEMLDAHRL

SEQ ID NO: 691 - DNA, 735 bp, Artificial Sequence
  Description of Artificial Sequence: Synthetic Destabilizing Domain (DD)
tcactggcgctcagccttactgccgaccaaatggtatcagctcttctggacgcagaacccccaattctttattccgagtacgaccccacacgcccgttcagtgaagcttccatgatgggcctccttacgaaccttgccgaccgggaactcgtgcacatgatcaattgggcgaagcgggtgccggggttcgtagatttgacacttcacgaccaagttcatctcttggaatgtgcttggatggagatattgatgatcggactcgtgtggaggtcaatggagcatcctggtaaacttcttttcgcacccaatctgctcttggatagaggccagggtaagtgcgtcgagggtggcgttgaaatcttcgacatgctccttgcgacatccagccgattccgaatgatgaatcttcaaggagaggaatttgtctgtcttaagagcattatactcctcaatagtggagtttacaccttcttgtcctctacactgaaatcacttgaggaaaaagatcacatacatagggtgttggataaaatcacggatacactcatacatctgatggcaaaagcaggattgaccctgcaacagcagcaccaacgactggcccaactgctgttgatccttagccatatcagacacatgtctaacaaaaggatggaacatttgtacagcatgaaatgtaagaacgtagtgccactgtccgatttgttgctggaaatgctggacgctcatcggctc

SEQ ID NO: 692 - protein, 245 aa, Artificial Sequence
  Description of Artificial Sequence: Synthetic Destabilizing Domain (DD)
SLALSLTADQMVSALLDAEPPILYSEYDPTRPFSEASMMGLLTNLADRELVHMINWAKRVPGFVDLTLHDQVHLLECAWMEILMIGLVWRSMEHPGKLLFAPNLLLDRNQGKCVEGGVEIFDMLLATSSRFRMMNLQGEEFVCLKSIILLNSGVYTFLSSTLKSLEEKDHIHRVLDKITDTLIHLMAKAGLTLQQQHFRLAQLLLILSHIRHMSNKRMEHLYSMKCKNVVPLSDLLLEMLDAHRL

SEQ ID NO: 693 - DNA, 735 bp, Artificial Sequence
  Description of Artificial Sequence: Synthetic Destabilizing Domain (DD)
tcactggcgctcagccttactgccgaccaaatggtatcagctcttctggacgcagaacccccaattctttattccgagtacgaccccacacgcccgttcagtgaagcttccatgatgggcctccttacgaaccttgccgaccgggaactcgtgcacatgatcaattgggcgaagcgggtgccggggttcgtagatttgacacttcacgaccaagttcatctcttggaatgtgcttggatggagatattgatgatcggactcgtgtggaggtcaatggagcatcctggtaaacttcttttcgcacccaatctgctcttggatagaaatcagggtaagtgcgtcgagggtggcgttgaaatcttcgacatgctccttgcgacatccagccgattccgaatgatgaatcttcaaggagaggaatttgtctgtcttaagagcattatactcctcaatagtggagtttacaccttcttgtcctctacactgaaatcacttgaggaaaaagatcacatacatagggtgttggataaaatcacggatacactcatacatctgatggcaaaagcaggattgaccctgcaacagcagcacttccgactggcccaactgctgttgatccttagccatatcagacacatgtctaacaaaaggatggaacatttgtacagcatgaaatgtaagaacgtagtgccactgtccgatttgttgctggaaatgctggacgctcatcggctc

SEQ ID NO: 694 - protein, 245 aa, Artificial Sequence
  Description of Artificial Sequence: Synthetic Destabilizing Domain (DD)
SLALSLTADQMVSALLDAEPPILYSEYDPTRPFSEASMMGLLTNLADRELVHMINWAKRVPGFVDLTLHDQVHLLECAWMEILMIGLVWRSMEHPGKLLFAPNLLLDRNQGKCVEGGVEIFDMLLATSSRFRMMNLQGEEFVCLKSIILLNSGVYTFLSSTLKSLEEKDHIHRVLDKITDTLIHLMAKAGLTLQQQHLRLAQLLLILSHIRHMSNKRMEHLYSMKCKNVVPLSDLLLEMLDAHRL

SEQ ID NO: 695 - DNA, 735 bp, Artificial Sequence
  Description of Artificial Sequence: Synthetic Destabilizing Domain (DD)
tcactggcgctcagccttactgccgaccaaatggtatcagctcttctggacgcagaacccccaattctttattccgagtacgaccccacacgcccgttcagtgaagcttccatgatgggcctccttacgaaccttgccgaccgggaactcgtgcacatgatcaattgggcgaagcgggtgccggggttcgtagatttgacacttcacgaccaagttcatctcttggaatgtgcttggatggagatattgatgatcggactcgtgtggaggtcaatggagcatcctggtaaacttcttttcgcacccaatctgctcttggatagaaatcagggtaagtgcgtcgagggtggcgttgaaatcttcgacatgctccttgcgacatccagccgattccgaatgatgaatcttcaaggagaggaatttgtctgtcttaagagcattatactcctcaatagtggagtttacaccttcttgtcctctacactgaaatcacttgaggaaaaagatcacatacatagggtgttggataaaatcacggatacactcatacatctgatggcaaaagcaggattgaccctgcaacagcagcacctgcgactggcccaactgctgttgatccttagccatatcagacacatgtctaacaaaaggatggaacatttgtacagcatgaaatgtaagaacgtagtgccactgtccgatttgttgctggaaatgctggacgctcatcggctc

SEQ ID NO: 696 - protein, 245 aa, Artificial Sequence
  Description of Artificial Sequence: Synthetic Destabilizing Domain (DD)
SLALSLTADQMVSALLDAEPPILYSEYDPTRPFSEASMMGLLTNLADRELVHMINWAKRVPGFVDLTLHDQVHLLECAWMEILMIGLVWRSMEHPGKLLFAPNLLLDRNQGKCVEGGVEIFDMLLATSSRFRMMNLQGEEFVCLKSIILLNSGVYTFLSSTLKSLEEKDHIHRVLDKITDTLIHLMAKAGLTLQQQHYRLAQLLLILSHIRHMSNKRMEHLYSMKCKNVVPLSDLLLEMLDAHRL

SEQ ID NO: 697 - DNA, 735 bp, Artificial Sequence
  Description of Artificial Sequence: Synthetic Destabilizing Domain (DD)
tcactggcgctcagccttactgccgaccaaatggtatcagctcttctggacgcagaacccccaattctttattccgagtacgaccccacacgcccgttcagtgaagcttccatgatgggcctccttacgaaccttgccgaccgggaactcgtgcacatgatcaattgggcgaagcgggtgccggggttcgtagatttgacacttcacgaccaagttcatctcttggaatgtgcttggatggagatattgatgatcggactcgtgtggaggtcaatggagcatcctggtaaacttcttttcgcacccaatctgctcttggatagaaatcagggtaagtgcgtcgagggtggcgttgaaatcttcgacatgctccttgcgacatccagccgattccgaatgatgaatcttcaaggagaggaatttgtctgtcttaagagcattatactcctcaatagtggagtttacaccttcttgtcctctacactgaaatcacttgaggaaaaagatcacatacatagggtgttggataaaatcacggatacactcatacatctgatggcaaaagcaggattgaccctgcaacagcagcactaccgactggcccaactgctgttgatccttagccatatcagacacatgtctaacaaaaggatggaacatttgtacagcatgaaatgtaagaacgtagtgccactgtccgatttgttgctggaaatgctggacgctcatcggctc

SEQ ID NO: 698 - protein, 245 aa, Artificial Sequence
  Description of Artificial Sequence: Synthetic Destabilizing Domain (DD)
SLALSLTADQMVSALLDAEPPILYSEYDPTRPFSEASMMGLLTNLADRELVHMINWAKRVPGFVDLTLHDQVHLLECAWMEILMIGLVWRSMEHPGKLLFAPNLLLDRNQGKCVEGGVEIFDMLLATSSRFRMMNLQGEEFVCLKSIILLNSGVYTFLSSTLKSLEEKDHIHRVLDKITDTLIHLMAKAGLTLQQQHHRLAQLLLILSHIRHMSNKRMEHLYSMKCKNVVPLSDLLLEMLDAHRL

SEQ ID NO: 699 - DNA, 735 bp, Artificial Sequence
  Description of Artificial Sequence: Synthetic Destabilizing Domain (DD)
tcactggcgctcagccttactgccgaccaaatggtatcagctcttctggacgcagaacccccaattctttattccgagtacgaccccacacgcccgttcagtgaagcttccatgatgggcctccttacgaaccttgccgaccgggaactcgtgcacatgatcaattgggcgaagcgggtgccggggttcgtagatttgacacttcacgaccaagttcatctcttggaatgtgcttggatggagatattgatgatcggactcgtgtggaggtcaatggagcatcctggtaaacttcttttcgcacccaatctgctcttggatagaaatcagggtaagtgcgtcgagggtggcgttgaaatcttcgacatgctccttgcgacatccagccgattccgaatgatgaatcttcaaggagaggaatttgtctgtcttaagagcattatactcctcaatagtggagtttacaccttcttgtcctctacactgaaatcacttgaggaaaaagatcacatacatagggtgttggataaaatcacggatacactcatacatctgatggcaaaagcaggattgaccctgcaacagcagcaccaccgactggcccaactgctgttgatccttagccatatcagacacatgtctaacaaaaggatggaacatttgtacagcatgaaatgtaagaacgtagtgccactgtccgatttgttgctggaaatgctggacgctcatcggctc

SEQ ID NO: 700 - protein, 245 aa, Artificial Sequence
  Description of Artificial Sequence: Synthetic Destabilizing Domain (DD)
SLALSLTADQMVSALLDAEPPILYSEYDPTRPFSEASMMGLLTNLADRELVHMINWAKRVPGFVDLTLHDQVHLLECAWMEILMIGLVWRSMEHPGKLLFAPNLLLDRNQGKCVEGGVEIFDMLLATSSRFRMMNLQGEEFVCLKSIILLNSGVYTFLSSTLKSLEEKDHIHRVLDKITDTLIHLMAKAGLTLQQQHIRLAQLLLILSHIRHMSNKRMEHLYSMKCKNVVPLSDLLLEMLDAHRL

SEQ ID NO: 701 - DNA, 735 bp, Artificial Sequence
  Description of Artificial Sequence: Synthetic Destabilizing Domain (DD)
tcactggcgctcagccttactgccgaccaaatggtatcagctcttctggacgcagaacccccaattctttattccgagtacgaccccacacgcccgttcagtgaagcttccatgatgggcctccttacgaaccttgccgaccgggaactcgtgcacatgatcaattgggcgaagcgggtgccggggttcgtagatttgacacttcacgaccaagttcatctcttggaatgtgcttggatggagatattgatgatcggactcgtgtggaggtcaatggagcatcctggtaaacttcttttcgcacccaatctgctcttggatagaaatcagggtaagtgcgtcgagggtggcgttgaaatcttcgacatgctccttgcgacatccagccgattccgaatgatgaatcttcaaggagaggaatttgtctgtcttaagagcattatactcctcaatagtggagtttacaccttcttgtcctctacactgaaatcacttgaggaaaaagatcacatacatagggtgttggataaaatcacggatacactcatacatctgatggcaaaagcaggattgaccctgcaacagcagcacatccgactggcccaactgctgttgatccttagccatatcagacacatgtctaacaaaaggatggaacatttgtacagcatgaaatgtaagaacgtagtgccactgtccgatttgttgctggaaatgctggacgctcatcggctc

SEQ ID NO: 702 - protein, 245 aa, Artificial Sequence
  Description of Artificial Sequence: Synthetic Destabilizing Domain (DD)
SLALSLTADQMVSALLDAEPPILYSEYDPTRPFSEASMMGLLTNLADRELVHMINWAKRVPGFVDLTLHDQVHLLECAWMEILMIGLVWRSMEHPGKLLFAPNLLLDRNQGKCVEGGVEIFDMLLATSSRFRMMNLQGEEFVCLKSIILLNSGVYTFLSSTLKSLEEKDHIHRVLDKITDTLIHLMAKAGLTLQQQHMRLAQLLLILSHIRHMSNKRMEHLYSMKCKNVVPLSDLLLEMLDAHRL

SEQ ID NO: 703 - DNA, 735 bp, Artificial Sequence
  Description of Artificial Sequence: Synthetic Destabilizing Domain (DD)
tcactggcgctcagccttactgccgaccaaatggtatcagctcttctggacgcagaacccccaattctttattccgagtacgaccccacacgcccgttcagtgaagcttccatgatgggcctccttacgaaccttgccgaccgggaactcgtgcacatgatcaattgggcgaagcgggtgccggggttcgtagatttgacacttcacgaccaagttcatctcttggaatgtgcttggatggagatattgatgatcggactcgtgtggaggtcaatggagcatcctggtaaacttcttttcgcacccaatctgctcttggatagaaatcagggtaagtgcgtcgagggtggcgttgaaatcttcgacatgctccttgcgacatccagccgattccgaatgatgaatcttcaaggagaggaatttgtctgtcttaagagcattatactcctcaatagtggagtttacaccttcttgtcctctacactgaaatcacttgaggaaaaagatcacatacatagggtgttggataaaatcacggatacactcatacatctgatggcaaaagcaggattgaccctgcaacagcagcacatgcgactggcccaactgctgttgatccttagccatatcagacacatgtctaacaaaaggatggaacatttgtacagcatgaaatgtaagaacgtagtgccactgtccgatttgttgctggaaatgctggacgctcatcggctc

SEQ ID NO: 704 - protein, 245 aa, Artificial Sequence
  Description of Artificial Sequence: Synthetic Destabilizing Domain (DD)
SLALSLTADQMVSALLDAEPPILYSEYDPTRPFSEASMMGLLTNLADRELVHMINWAKRVPGFVDLTLHDQVHLLECAWMEILMIGLVWRSMEHPGKLLFAPNLLLDRNQGKCVEGGVEIFDMLLATSSRFRMMNLQGEEFVCLKSIILLNSGVYTFLSSTLKSLEEKDHIHRVLDKITDTLIHLMAKAGLTLQQQHNRLAQLLLILSHIRHMSNKRMEHLYSMKCKNVVPLSDLLLEMLDAHRL

SEQ ID NO: 705 - DNA, 735 bp, Artificial Sequence
  Description of Artificial Sequence: Synthetic Destabilizing Domain (DD)
tcactggcgctcagccttactgccgaccaaatggtatcagctcttctggacgcagaacccccaattctttattccgagtacgaccccacacgcccgttcagtgaagcttccatgatgggcctccttacgaaccttgccgaccgggaactcgtgcacatgatcaattgggcgaagcgggtgccggggttcgtagatttgacacttcacgaccaagttcatctcttggaatgtgcttggatggagatattgatgatcggactcgtgtggaggtcaatggagcatcctggtaaacttcttttcgcacccaatctgctcttggatagaaatcagggtaagtgcgtcgagggtggcgttgaaatcttcgacatgctccttgcgacatccagccgattccgaatgatgaatcttcaaggagaggaatttgtctgtcttaagagcattatactcctcaatagtggagtttacaccttcttgtcctctacactgaaatcacttgaggaaaaagatcacatacatagggtgttggataaaatcacggatacactcatacatctgatggcaaaagcaggattgaccctgcaacagcagcacaaccgactggcccaactgctgttgatccttagccatatcagacacatgtctaacaaaaggatggaacatttgtacagcatgaaatgtaagaacgtagtgccactgtccgatttgttgctggaaatgctggacgctcatcggctc

SEQ ID NO: 706 - protein, 245 aa, Artificial Sequence
  Description of Artificial Sequence: Synthetic Destabilizing Domain (DD)
SLALSLTADQMVSALLDAEPPILYSEYDPTRPFSEASMMGLLTNLADRELVHMINWAKRVPGFVDLTLHDQVHLLECAWMEILMIGLVWRSMEHPGKLLFAPNLLLDRNQGKCVEGGVEIFDMLLATSSRFRMMNLQGEEFVCLKSIILLNSGVYTFLSSTLKSLEEKDHIHRVLDKITDTLIHLMAKAGLTLQQQHKRLAQLLLILSHIRHMSNKRMEHLYSMKCKNVVPLSDLLLEMLDAHRL

SEQ ID NO: 707 - DNA, 735 bp, Artificial Sequence
  Description of Artificial Sequence: Synthetic Destabilizing Domain (DD)
tcactggcgctcagccttactgccgaccaaatggtatcagctcttctggacgcagaacccccaattctttattccgagtacgaccccacacgcccgttcagtgaagcttccatgatgggcctccttacgaaccttgccgaccgggaactcgtgcacatgatcaattgggcgaagcgggtgccggggttcgtagatttgacacttcacgaccaagttcatctcttggaatgtgcttggatggagatattgatgatcggactcgtgtggaggtcaatggagcatcctggtaaacttcttttcgcacccaatctgctcttggatagaaatcagggtaagtgcgtcgagggtggcgttgaaatcttcgacatgctccttgcgacatccagccgattccgaatgatgaatcttcaaggagaggaatttgtctgtcttaagagcattatactcctcaatagtggagtttacaccttcttgtcctctacactgaaatcacttgaggaaaaagatcacatacatagggtgttggataaaatcacggatacactcatacatctgatggcaaaagcaggattgaccctgcaacagcagcacaagcgactggcccaactgctgttgatccttagccatatcagacacatgtctaacaaaaggatggaacatttgtacagcatgaaatgtaagaacgtagtgccactgtccgatttgttgctggaaatgctggacgctcatcggctc

SEQ ID NO: 708 - protein, 245 aa, Artificial Sequence
  Description of Artificial Sequence: Synthetic Destabilizing Domain (DD)
SLALSLTADQMVSALLDAEPPILYSEYDPTRPFSEASMMGLLTNLADRELVHMINWAKRVPGFVDLTLHDQVHLLECAWMEILMIGLVWRSMEHPGKLLFAPNLLLDRNQGKCVEGGVEIFDMLLATSSRFRMMNLQGEEFVCLKSIILLNSGVYTFLSSTLKSLEEKDHIHRVLDKITDTLIHLMAKAGLTLQQQHVRLAQLLLILSHIRHMSNKRMEHLYSMKCKNVVPLSDLLLEMLDAHRL

SEQ ID NO: 709 - DNA, 735 bp, Artificial Sequence
  Description of Artificial Sequence: Synthetic Destabilizing Domain (DD)
tcactggcgctcagccttactgccgaccaaatggtatcagctcttctggacgcagaacccccaattctttattccgagtacgaccccacacgcccgttcagtgaagcttccatgatgggcctccttacgaaccttgccgaccgggaactcgtgcacatgatcaattgggcgaagcgggtgccggggttcgtagatttgacacttcacgaccaagttcatctcttggaatgtgcttggatggagatattgatgatcggactcgtgtggaggtcaatggagcatcctggtaaacttcttttcgcacccaatctgctcttggatagaaatcagggtaagtgcgtcgagggtggcgttgaaatcttcgacatgctccttgcgacatccagccgattccgaatgatgaatcttcaaggagaggaatttgtctgtcttaagagcattatactcctcaatagtggagtttacaccttcttgtcctctacactgaaatcacttgaggaaaaagatcacatacatagggtgttggataaaatcacggatacactcatacatctgatggcaaaagcaggattgaccctgcaacagcagcacgtgcgactggcccaactgctgttgatccttagccatatcagacacatgtctaacaaaaggatggaacatttgtacagcatgaaatgtaagaacgtagtgccactgtccgatttgttgctggaaatgctggacgctcatcggctc

SEQ ID NO: 710 - protein, 245 aa, Artificial Sequence
  Description of Artificial Sequence: Synthetic Destabilizing Domain (DD)
SLALSLTADQMVSALLDAEPPILYSEYDPTRPFSEASMMGLLTNLADRELVHMINWAKRVPGFVDLTLHDQVHLLECAWMEILMIGLVWRSMEHPGKLLFAPNLLLDRNQGKCVEGGVEIFDMLLATSSRFRMMNLQGEEFVCLKSIILLNSGVYTFLSSTLKSLEEKDHIHRVLDKITDTLIHLMAKAGLTLQQQHSRLAQLLLILSHIRHMSNKRMEHLYSMKCKNVVPLSDLLLEMLDAHRL

SEQ ID NO: 711 - DNA, 735 bp, Artificial Sequence
  Description of Artificial Sequence: Synthetic Destabilizing Domain (DD)
tcactggcgctcagccttactgccgaccaaatggtatcagctcttctggacgcagaacccccaattctttattccgagtacgaccccacacgcccgttcagtgaagcttccatgatgggcctccttacgaaccttgccgaccgggaactcgtgcacatgatcaattgggcgaagcgggtgccggggttcgtagatttgacacttcacgaccaagttcatctcttggaatgtgcttggatggagatattgatgatcggactcgtgtggaggtcaatggagcatcctggtaaacttcttttcgcacccaatctgctcttggatagaaatcagggtaagtgcgtcgagggtggcgttgaaatcttcgacatgctccttgcgacatccagccgattccgaatgatgaatcttcaaggagaggaatttgtctgtcttaagagcattatactcctcaatagtggagtttacaccttcttgtcctctacactgaaatcacttgaggaaaaagatcacatacatagggtgttggataaaatcacggatacactcatacatctgatggcaaaagcaggattgaccctgcaacagcagcacagccgactggcccaactgctgttgatccttagccatatcagacacatgtctaacaaaaggatggaacatttgtacagcatgaaatgtaagaacgtagtgccactgtccgatttgttgctggaaatgctggacgctcatcggctc

SEQ ID NO: 712 - protein, 245 aa, Artificial Sequence
  Description of Artificial Sequence: Synthetic Destabilizing Domain (DD)
SLALSLTADQMVSALLDAEPPILYSEYDPTRPFSEASMMGLLTNLADRELVHMINWAKRVPGFVDLTLHDQVHLLECAWMEILMIGLVWRSMEHPGKLLFAPNLLLDRNQGKCVEGGVEIFDMLLATSSRFRMMNLQGEEFVCLKSIILLNSGVYTFLSSTLKSLEEKDHIHRVLDKITDTLIHLMAKAGLTLQQQHCRLAQLLLILSHIRHMSNKRMEHLYSMKCKNVVPLSDLLLEMLDAHRL

SEQ ID NO: 713 - DNA, 735 bp, Artificial Sequence
  Description of Artificial Sequence: Synthetic Destabilizing Domain (DD)
tcactggcgctcagccttactgccgaccaaatggtatcagctcttctggacgcagaacccccaattctttattccgagtacgaccccacacgcccgttcagtgaagcttccatgatgggcctccttacgaaccttgccgaccgggaactcgtgcacatgatcaattgggcgaagcgggtgccggggttcgtagatttgacacttcacgaccaagttcatctcttggaatgtgcttggatggagatattgatgatcggactcgtgtggaggtcaatggagcatcctggtaaacttcttttcgcacccaatctgctcttggatagaaatcagggtaagtgcgtcgagggtggcgttgaaatcttcgacatgctccttgcgacatccagccgattccgaatgatgaatcttcaaggagaggaatttgtctgtcttaagagcattatactcctcaatagtggagtttacaccttcttgtcctctacactgaaatcacttgaggaaaaagatcacatacatagggtgttggataaaatcacggatacactcatacatctgatggcaaaagcaggattgaccctgcaacagcagcactgccgactggcccaactgctgttgatccttagccatatcagacacatgtctaacaaaaggatggaacatttgtacagcatgaaatgtaagaacgtagtgccactgtccgatttgttgctggaaatgctggacgctcatcggctc

SEQ ID NO: 714 - protein, 245 aa, Artificial Sequence
  Description of Artificial Sequence: Synthetic Destabilizing Domain (DD)
SLALSLTADQMVSALLDAEPPILYSEYDPTRPFSEASMMGLLTNLADRELVHMINWAKRVPGFVDLTLHDQVHLLECAWMEILMIGLVWRSMEHPGKLLFAPNLLLDRNQGKCVEGGVEIFDMLLATSSRFRMMNLQGEEFVCLKSIILLNSGVYTFLSSTLKSLEEKDHIHRVLDKITDTLIHLMAKAGLTLQQQHWRLAQLLLILSHIRHMSNKRMEHLYSMKCKNVVPLSDLLLEMLDAHRL

SEQ ID NO: 715 - DNA, 735 bp, Artificial Sequence
  Description of Artificial Sequence: Synthetic Destabilizing Domain (DD)
tcactggcgctcagccttactgccgaccaaatggtatcagctcttctggacgcagaacccccaattctttattccgagtacgaccccacacgcccgttcagtgaagcttccatgatgggcctccttacgaaccttgccgaccgggaactcgtgcacatgatcaattgggcgaagcgggtgccggggttcgtagatttgacacttcacgaccaagttcatctcttggaatgtgcttggatggagatattgatgatcggactcgtgtggaggtcaatggagcatcctggtaaacttcttttcgcacccaatctgctcttggatagaaatcagggtaagtgcgtcgagggtggcgttgaaatcttcgacatgctccttgcgacatccagccgattccgaatgatgaatcttcaaggagaggaatttgtctgtcttaagagcattatactcctcaatagtggagtttacaccttcttgtcctctacactgaaatcacttgaggaaaaagatcacatacatagggtgttggataaaatcacggatacactcatacatctgatggcaaaagcaggattgaccctgcaacagcagcactggcgactagcccaactgctgttgatccttagccatatcagacacatgtctaacaaaaggatggaacatttgtacagcatgaaatgtaagaacgtagtgccactgtccgatttgttgctggaaatgctggacgctcatcggctc

SEQ ID NO: 716 - protein, 245 aa, Artificial Sequence
  Description of Artificial Sequence: Synthetic Destabilizing Domain (DD)
SLALSLTADQMVSALLDAEPPILYSEYDPTRPFSEASMMGLLTNLADRELVHMINWAKRVPGFVDLTLHDQVHLLECAWMEILMIGLVWRSMEHPGKLLFAPNLLLDRNQGKCVEGGVEIFDMLLATSSRFRMMNLQGEEFVCLKSIILLNSGVYTFLSSTLKSLEEKDHIHRVLDKITDTLIHLMAKAGLTLQQQHPRLAQLLLILSHIRHMSNKRMEHLYSMKCKNVVPLSDLLLEMLDAHRL

SEQ ID NO: 717 - DNA, 735 bp, Artificial Sequence
  Description of Artificial Sequence: Synthetic Destabilizing Domain (DD)
tcactggcgctcagccttactgccgaccaaatggtatcagctcttctggacgcagaacccccaattctttattccgagtacgaccccacacgcccgttcagtgaagcttccatgatgggcctccttacgaaccttgccgaccgggaactcgtgcacatgatcaattgggcgaagcgggtgccggggttcgtagatttgacacttcacgaccaagttcatctcttggaatgtgcttggatggagatattgatgatcggactcgtgtggaggtcaatggagcatcctggtaaacttcttttcgcacccaatctgctcttggatagaaatcagggtaagtgcgtcgagggtggcgttgaaatcttcgacatgctccttgcgacatccagccgattccgaatgatgaatcttcaaggagaggaatttgtctgtcttaagagcattatactcctcaatagtggagtttacaccttcttgtcctctacactgaaatcacttgaggaaaaagatcacatacatagggtgttggataaaatcacggatacactcatacatctgatggcaaaagcaggattgaccctgcaacagcagcacccccgactggcccaactgctgttgatccttagccatatcagacacatgtctaacaaaaggatggaacatttgtacagcatgaaatgtaagaacgtagtgccactgtccgatttgttgctggaaatgctggacgctcatcggctc

SEQ ID NO: 718 - protein, 245 aa, Artificial Sequence
  Description of Artificial Sequence: Synthetic Destabilizing Domain (DD)
SLALSLTADQMVSALLDAEPPILYSEYDPTRPFSEASMMGLLTNLADRELVHMINWAKRVPGFVDLTLHDQVHLLECAWMEILMIGLVWRSMEHPGKLLFAPNLLLDRNQGKCVEGGVEIFDMLLATSSRFRMMNLQGEEFVCLKSIILLNSGVYTFLSSTLKSLEEKDHIHRVLDKITDTLIHLMAKAGLTLQQQHTRLAQLLLILSHIRHMSNKRMEHLYSMKCKNVVPLSDLLLEMLDAHRL

SEQ ID NO: 719 - DNA, 735 bp, Artificial Sequence
  Description of Artificial Sequence: Synthetic Destabilizing Domain (DD)
tcactggcgctcagccttactgccgaccaaatggtatcagctcttctggacgcagaacccccaattctttattccgagtacgaccccacacgcccgttcagtgaagcttccatgatgggcctccttacgaaccttgccgaccgggaactcgtgcacatgatcaattgggcgaagcgggtgccggggttcgtagatttgacacttcacgaccaagttcatctcttggaatgtgcttggatggagatattgatgatcggactcgtgtggaggtcaatggagcatcctggtaaacttcttttcgcacccaatctgctcttggatagaaatcagggtaagtgcgtcgagggtggcgttgaaatcttcgacatgctccttgcgacatccagccgattccgaatgatgaatcttcaaggagaggaatttgtctgtcttaagagcattatactcctcaatagtggagtttacaccttcttgtcctctacactgaaatcacttgaggaaaaagatcacatacatagggtgttggataaaatcacggatacactcatacatctgatggcaaaagcaggattgaccctgcaacagcagcacacccgactggcccaactgctgttgatccttagccatatcagacacatgtctaacaaaaggatggaacatttgtacagcatgaaatgtaagaacgtagtgccactgtccgatttgttgctggaaatgctggacgctcatcggctc

SEQ ID NO: 720 - protein, 245 aa, Artificial Sequence
  Description of Artificial Sequence: Synthetic Destabilizing Domain (DD)
SLALSLTADQMVSALLDAEPPILYSEYDPTRPFSEASMMGLLTNLADRELVHMINWAKRVPGFVDLTLHDQVHLLECAWMEILMIGLVWRSMEHPGKLLFAPNLLLDRNQGKCVEGGVEIFDMLLATSSRFRMMNLQGEEFVCLKSIILLNSGVYTFLSSTLKSLEEKDHIHRVLDKITDTLIHLMAKAGLTLQQQHARLAQLLLILSHIRHMSNKRMEHLYSMKCKNVVPLSDLLLEMLDAHRL

SEQ ID NO: 721 - DNA, 735 bp, Artificial Sequence
  Description of Artificial Sequence: Synthetic Destabilizing Domain (DD)
tcactggcgctcagccttactgccgaccaaatggtatcagctcttctggacgcagaacccccaattctttattccgagtacgaccccacacgcccgttcagtgaagcttccatgatgggcctccttacgaaccttgccgaccgggaactcgtgcacatgatcaattgggcgaagcgggtgccggggttcgtagatttgacacttcacgaccaagttcatctcttggaatgtgcttggatggagatattgatgatcggactcgtgtggaggtcaatggagcatcctggtaaacttcttttcgcacccaatctgctcttggatagaaatcagggtaagtgcgtcgagggtggcgttgaaatcttcgacatgctccttgcgacatccagccgattccgaatgatgaatcttcaaggagaggaatttgtctgtcttaagagcattatactcctcaatagtggagtttacaccttcttgtcctctacactgaaatcacttgaggaaaaagatcacatacatagggtgttggataaaatcacggatacactcatacatctgatggcaaaagcaggattgaccctgcaacagcagcacgcccgactggcccaactgctgttgatccttagccatatcagacacatgtctaacaaaaggatggaacatttgtacagcatgaaatgtaagaacgtagtgccactgtccgatttgttgctggaaatgctggacgctcatcggctc

SEQ ID NO: 722 - protein, 245 aa, Artificial Sequence
  Description of Artificial Sequence: Synthetic Destabilizing Domain (DD)
SLALSLTADQMVSALLDAEPPILYSEYDPTRPFSEASMMGLLTNLADRELVHMINWAKRVPGFVDLTLHDQVHLLECAWMEILMIGLVWRSMEHPGKLLFAPNLLLDRNQGKCVEGGVEIFDMLLATSSRFRMMNLQGEEFVCLKSIILLNSGVYTFLSSTLKSLEEKDHIHRVLDKITDTLIHLMAKAGLTLQQQHDRLAQLLLILSHIRHMSNKRMEHLYSMKCKNVVPLSDLLLEMLDAHRL

SEQ ID NO: 723 - DNA, 735 bp, Artificial Sequence
  Description of Artificial Sequence: Synthetic Destabilizing Domain (DD)
tcactggcgctcagccttactgccgaccaaatggtatcagctcttctggacgcagaacccccaattctttattccgagtacgaccccacacgcccgttcagtgaagcttccatgatgggcctccttacgaaccttgccgaccgggaactcgtgcacatgatcaattgggcgaagcgggtgccggggttcgtagatttgacacttcacgaccaagttcatctcttggaatgtgcttggatggagatattgatgatcggactcgtgtggaggtcaatggagcatcctggtaaacttcttttcgcacccaatctgctcttggatagaaatcagggtaagtgcgtcgagggtggcgttgaaatcttcgacatgctccttgcgacatccagccgattccgaatgatgaatcttcaaggagaggaatttgtctgtcttaagagcattatactcctcaatagtggagtttacaccttcttgtcctctacactgaaatcacttgaggaaaaagatcacatacatagggtgttggataaaatcacggatacactcatacatctgatggcaaaagcaggattgaccctgcaacagcagcacgaccgactggcccaactgctgttgatccttagccatatcagacacatgtctaacaaaaggatggaacatttgtacagcatgaaatgtaagaacgtagtgccactgtccgatttgttgctggaaatgctggacgctcatcggctc

SEQ ID NO: 724 - protein, 245 aa, Artificial Sequence
  Description of Artificial Sequence: Synthetic Destabilizing Domain (DD)
SLALSLTADQMVSALLDAEPPILYSEYDPTRPFSEASMMGLLTNLADRELVHMINWAKRVPGFVDLTLHDQVHLLECAWMEILMIGLVWRSMEHPGKLLFAPNLLLDRNQGKCVEGGVEIFDMLLATSSRFRMMNLQGEEFVCLKSIILLNSGVYTFLSSTLKSLEEKDHIHRVLDKITDTLIHLMAKAGLTLQQQHERLAQLLLILSHIRHMSNKRMEHLYSMKCKNVVPLSDLLLEMLDAHRL

SEQ ID NO: 725 - DNA, 735 bp, Artificial Sequence
  Description of Artificial Sequence: Synthetic Destabilizing Domain (DD)
tcactggcgctcagccttactgccgaccaaatggtatcagctcttctggacgcagaacccccaattctttattccgagtacgaccccacacgcccgttcagtgaagcttccatgatgggcctccttacgaaccttgccgaccgggaactcgtgcacatgatcaattgggcgaagcgggtgccggggttcgtagatttgacacttcacgaccaagttcatctcttggaatgtgcttggatggagatattgatgatcggactcgtgtggaggtcaatggagcatcctggtaaacttcttttcgcacccaatctgctcttggatagaaatcagggtaagtgcgtcgagggtggcgttgaaatcttcgacatgctccttgcgacatccagccgattccgaatgatgaatcttcaaggagaggaatttgtctgtcttaagagcattatactcctcaatagtggagtttacaccttcttgtcctctacactgaaatcacttgaggaaaaagatcacatacatagggtgttggataaaatcacggatacactcatacatctgatggcaaaagcaggattgaccctgcaacagcagcacgagcgactggcccaactgctgttgatccttagccatatcagacacatgtctaacaaaaggatggaacatttgtacagcatgaaatgtaagaacgtagtgccactgtccgatttgttgctggaaatgctggacgctcatcggctc

SEQ ID NO: 726 - protein, 245 aa, Artificial Sequence
  Description of Artificial Sequence: Synthetic Destabilizing Domain (DD)
SLALSLTADQMVSALLDAEPPILYSEYDPTRPFSEASMMGLLTNLADRELVHMINWAKRVPGFVDLTLHDQVHLLECAWMEILMIGLVWRSMEHPGKLLFAPNLLLDRNQGKCVEGGVEIFDMLLATSSRFRMMNLQGEEFVCLKSIILLNSGVYTFLSSTLKSLEEKDHIHRVLDKITDTLIHLMAKAGLTLQQQHGRLAQLLLILSHIRHMSNKRMEHLYSMKCKNVVPLSDLLLEMLDAHRL

SEQ ID NO: 727 - DNA, 735 bp, Artificial Sequence
  Description of Artificial Sequence: Synthetic Destabilizing Domain (DD)
tcactggcgctcagccttactgccgaccaaatggtatcagctcttctggacgcagaacccccaattctttattccgagtacgaccccacacgcccgttcagtgaagcttccatgatgggcctccttacgaaccttgccgaccgggaactcgtgcacatgatcaattgggcgaagcgggtgccggggttcgtagatttgacacttcacgaccaagttcatctcttggaatgtgcttggatggagatattgatgatcggactcgtgtggaggtcaatggagcatcctggtaaacttcttttcgcgcccaatctgctcttggatagaaatcagggtaagtgcgtcgagggtggcgttgaaatcttcgacatgctccttgcgacatccagccgattccgaatgatgaatcttcaaggagaggaatttgtctgtcttaagagcattatactcctcaatagtggagtttacaccttcttgtcctctacactgaaatcacttgaggaaaaagatcacatacatagggtgttggataaaatcacggatacactcatacatctgatggcaaaagcaggattgaccctgcaacagcagcacggccgactggcccaactgctgttgatccttagccatatcagacacatgtctaacaaaaggatggaacatttgtacagcatgaaatgtaagaacgtagtgccactgtccgatttgttgctggaaatgctggacgctcatcggctc

SEQ ID NO: 728 - protein, 33 aa, Homo sapiens
MGLHLRPYRVGLLPDGLLFLLLLLMLLADPALP

SEQ ID NO: 729 - protein, 24 aa, Homo sapiens
MSAPKLLSLGCIFFPLLLFQQARA

SEQ ID NO: 730 - protein, 26 aa, Homo sapiens
MCPRAARAPATLLLALGAVLWPAAGA

SEQ ID NO: 731 - protein, 18 aa, Homo sapiens
MKLSLVAAMLLLLSAARA

SEQ ID NO: 732 - protein, 20 aa, Homo sapiens
MEPWPLLLLFSLCSAGLVLG

SEQ ID NO: 733 - protein, 23 aa, Homo sapiens
MTPGALLMLLGALGAPLAPGVRG

SEQ ID NO: 734 - protein, 20 aa, Homo sapiens
MARAPLGVLLLLGLLGRGVG

SEQ ID NO: 735 - protein, 19 aa, Homo sapiens
MVEMLPTAILLVLAVSVVA

SEQ ID NO: 736 - protein, 16 aa, Homo sapiens
MFRLWLLLAGLCGLLA

SEQ ID NO: 737 - protein, 28 aa, Homo sapiens
MECCRRATPGTLLLFLAFLLLSSRTARS

SEQ ID NO: 738 - protein, 18 aa, Homo sapiens
MLLLGAVLLLLALPGHDQ

SEQ ID NO: 739 - protein, 21 aa, Artificial Sequence
  Description of Artificial Sequence: Synthetic Signal Sequence
MKLVSVALMYLGSLAFLGADT

SEQ ID NO: 740 - protein, 16 aa, Homo sapiens
MTTLLWVFVTLRVITA

SEQ ID NO: 741 - protein, 17 aa, Homo sapiens
MISPFLVLAIGTCLTNS

SEQ ID NO: 742 - protein, 18 aa, Homo sapiens
MALSWVLTVLSLLPLLEA

SEQ ID NO: 743 - protein, 23 aa, Homo sapiens
MERMLPLLALGLLAAGFCPAVLC

SEQ ID NO: 744 - protein, 24 aa, Homo sapiens
MPSSVSWGILLLAGLCCLVPVSLA

SEQ ID NO: 745 - protein, 21 aa, Homo sapiens
MSMLVVFLLLWGVTWGPVTEA

SEQ ID NO: 746 - protein, 27 aa, Homo sapiens
MALLWGLLVLSWSCLQGPCSVFSPVSA

SEQ ID NO: 747 - protein, 18 aa, Artificial Sequence
  Description of Artificial Sequence: Synthetic Signal Sequence
MKSLVLLLCLAQLWGCHS

SEQ ID NO: 748 - protein, 23 aa, Homo sapiens
MGKNKLLHPSLVLLLLVLLPTDA

SEQ ID NO: 749 - protein, 15 aa, Homo sapiens
MKFFLLLFTIGFCWA

SEQ ID NO: 750 - protein, 18 aa, Homo sapiens
MKWVESIFLIFLLNFTES

SEQ ID NO: 751 - protein, 31 aa, Homo sapiens
MQLRNPELHLGCALALRFLALVSWDIPGARA

SEQ ID NO: 752 - protein, 19 aa, Homo sapiens
MRFFVPLFLVGILFPAILA

SEQ ID NO: 753 - protein, 17 aa, Homo sapiens
MLLKTVLLLGHVAQVLM

SEQ ID NO: 754 - protein, 23 aa, Homo sapiens
MEAVAVAAAVGVLLLAGAGGAAG

SEQ ID NO: 755 - protein, 15 aa, Homo sapiens
MRLLILTCLVAVALA

SEQ ID NO: 756 - protein, 23 aa, Homo sapiens
MGTSHPAFLVLGCLLTGLSLILC

SEQ ID NO: 757 - protein, 16 aa, Homo sapiens
MGTWILFACLLGAAFA

SEQ ID NO: 758 - protein, 16 aa, Homo sapiens
MRSTILLFCLLGSTRS

SEQ ID NO: 759 - protein, 19 aa, Homo sapiens
MPALGWAVAAILMLQTAMA

SEQ ID NO: 760 - protein, 17 aa, Homo sapiens
MLPGLALLLLAAWTARA

SEQ ID NO: 761 - protein, 24 aa, Homo sapiens
MVMGLGVLLLVFVLGLGLTPPTLA

SEQ ID NO: 762 - protein, 22 aa, Homo sapiens
MDSLASLVLCGVSLLLSGTVEG

SEQ ID NO: 763 - protein, 16 aa, Homo sapiens
MFTIKLLLFIVPLVIS

SEQ ID NO: 764 - protein, 26 aa, Homo sapiens
MLKKPLSAVTWLCIFIVAFVSHPAWL

SEQ ID NO: 765 - protein, 31 aa, Homo sapiens
MGQGWATAGLPSLLFLLLCYGHPLLVPSQEA

SEQ ID NO: 766 - protein, 33 aa, Homo sapiens
MRKRAPQSEMAPAGVSLRATILCLLAWAGLAAG

SEQ ID NO: 767 - protein, 20 aa, Homo sapiens
MEKIPVSAFLLLVALSYTLA

SEQ ID NO: 768 - protein, 21 aa, Homo sapiens
MMLHSALGLCLLLVTVSSNLA

SEQ ID NO: 769 - protein, 25 aa, Artificial Sequence
  Description of Artificial Sequence: Synthetic Signal Sequence
MKSSGLFPFLVLLALGTLAPWAVEG

SEQ ID NO: 770 - protein, 32 aa, Artificial Sequence
  Description of Artificial Sequence: Synthetic polypeptide
MYSNVIGTVTSGKRKVYLLSLLLIGFWDCVTC

SEQ ID NO: 771 - protein, 18 aa, Homo sapiens
MKAAVLTLAVLFLTGSQA

SEQ ID NO: 772 - protein, 18 aa, Homo sapiens
MKLLAATVLLLTICSLEG

SEQ ID NO: 773 - protein, 20 aa, Homo sapiens
MFLKAVVLTLALVAVAGARA

SEQ ID NO: 774 - protein, 27 aa, Homo sapiens
MDPPRPALLALLALPALLLLLLAGARA

SEQ ID NO: 775 - protein, 22 aa, Homo sapiens
MGTRLLPALFLVLLVLGFEVQG

SEQ ID NO: 776 - protein, 20 aa, Homo sapiens
MQPRVLLVVALLALLASARA

SEQ ID NO: 777 - protein, 26 aa, Homo sapiens
MRLFLSLPVLVVVLSIVLEGPAPAQG

SEQ ID NO: 778 - protein, 20 aa, Homo sapiens
MVMLLLLLSALAGLFGAAEG

SEQ ID NO: 779 - protein, 18 aa, Homo sapiens
MKVLWAALLVTFLAGCQA

SEQ ID NO: 780 - protein, 22 aa, Homo sapiens
MFHQIWAALLYFYGIILNSIYQ

SEQ ID NO: 781 - protein, 19 aa, Homo sapiens
MEHKEVVLLLLLFLKSAAP

SEQ ID NO: 782 - protein, 30 aa, Homo sapiens
MAPHGPGSLTTLVPWAAALLLALGVERALA

SEQ ID NO: 783 - protein, 23 aa, Homo sapiens
MPSPGTVCSLLLLGMLWLDLAMA

SEQ ID NO: 784 - protein, 18 aa, Homo sapiens
MGAPRSLLLALAAGLAVA

SEQ ID NO: 785 - protein, 25 aa, Homo sapiens
MSSFSTTTVSFLLLLAFQLLGQTRA

SEQ ID NO: 786 - protein, 32 aa, Homo sapiens
MPGPRRPAGSRLRLLLLLLLPPLLLLLRGSHA

SEQ ID NO: 787 - protein, 26 aa, Homo sapiens
MTRLTVLALLAGLLASSRAGSSPLLD

SEQ ID NO: 788 - protein, 31 aa, Homo sapiens
MRENMARGPCNAPRWVSLMVLVAIGTAVTAA

SEQ ID NO: 789 - protein, 20 aa, Homo sapiens
MAWASRLGLLLALLLPVVGA

SEQ ID NO: 790 - protein, 16 aa, Homo sapiens
MLLILLSVALLALSSA

SEQ ID NO: 791 - protein, 21 aa, Homo sapiens
MAAALFVLLGFALLGTHGASG

SEQ ID NO: 792 - protein, 32 aa, Homo sapiens
MPGGPGVLQALPATIFLLFLLSAVYLGPGCQA

SEQ ID NO: 793 - protein, 28 aa, Homo sapiens
MARLALSPVPSHWMVALLLLLSAEPVPA

SEQ ID NO: 794 - protein, 31 aa, Homo sapiens
MSSWIRWHGPAMARLWGFCWLVVGFWRAAFA

SEQ ID NO: 795 - protein, 19 aa, Homo sapiens
MISPVLILFSSFLCHVAIA

SEQ ID NO: 796 - protein, 20 aa, Homo sapiens
MSRSVALAVLALLSLSGLEA

SEQ ID NO: 797 - protein, 15 aa, Homo sapiens
MKVLILACLVALALA

SEQ ID NO: 798 - protein, 22 aa, Artificial Sequence
  Description of Artificial Sequence: Synthetic peptide
MRIHYLLFALLFLFLVPVPGHG

SEQ ID NO: 799 - protein, 20 aa, Homo sapiens
MGLFMIIAILLFQKPTVTEQ

SEQ ID NO: 800 - protein, 23 aa, Homo sapiens
MPGFLVRILLLLLVLLLLGPTRG

SEQ ID NO: 801 - protein, 22 aa, Homo sapiens
MARGSAVAWAALGPLLWGCALG

SEQ ID NO: 802 - protein, 22 aa, Homo sapiens
MTSSRLWFSLLLAAAFAGRATA

SEQ ID NO: 803 - protein, 20 aa, Homo sapiens
MNVLLGSVVIFATFVTLCNA

SEQ ID NO: 804 - protein, 20 aa, Homo sapiens
MAWQGLVLAACLLMFPSTTA

SEQ ID NO: 805 - protein, 32 aa, Homo sapiens
MRLPGAMPALALKGELLLLSLLLLLEPQISQG

SEQ ID NO: 806 - protein, 20 aa, Homo sapiens
MDRHSSYIFIWLQLELCAMA

SEQ ID NO: 807 - protein, 16 aa, Homo sapiens
MKLPLLLALLFGAVSA

SEQ ID NO: 808 - protein, 16 aa, Homo sapiens
MKTALILLSILGMACA

SEQ ID NO: 809 - protein, 30 aa, Homo sapiens
MLRGTMTAWRGMRPEVTLACLLLATAGCFA

SEQ ID NO: 810 - protein, 29 aa, Artificial Sequence
  Description of Artificial Sequence: Synthetic Signal Sequence
MKMASSLAFLLLNFHVSLFLVQLLTPCSA

SEQ ID NO: 811 - protein, 17 aa, Homo sapiens
MALMLSLVLSLLKLGSG

SEQ ID NO: 812 - protein, 25 aa, Homo sapiens
MAGPAIHTAPMLFLVLLLPLELSLA

SEQ ID NO: 813 - protein, 48 aa, Homo sapiens
MHPPKTPSGALHRKRKMAAWPFSRLWKVSDPILFQMTLIAALLPAVLG

SEQ ID NO: 814 - protein, 17 aa, Homo sapiens
MFFWCACCLMVAWRVSA

SEQ ID NO: 815 - protein, 22 aa, Homo sapiens
MEKKCTLYFLVLLPFFMILVTA

SEQ ID NO: 816 - protein, 24 aa, Homo sapiens
MRFTFTSRCLALFLLLNHPTPILP

SEQ ID NO: 817 - protein, 29 aa, Homo sapiens
MEAPGPRALRTALCGGCCCLLLCAQLAVA

SEQ ID NO: 818 - protein, 28 aa, Homo sapiens
MLRRPAPALAPAARLLLAGLLCGGGVWA

SEQ ID NO: 819 - protein, 19 aa, Homo sapiens
MDLRQFLMCLSLCTAFALS

SEQ ID NO: 820 - protein, 18 aa, Homo sapiens
MRMLLALLALSAARPSAS

SEQ ID NO: 821 - protein, 37 aa, Homo sapiens
MAPLCPSPWLPLLIPAPAPGLTVQLLLSLLLLVPVHP

SEQ ID NO: 822 - protein, 26 aa, Homo sapiens
MRLHRLRARLSAVACGLLLLLVRGQG

SEQ ID NO: 823 - protein, 16 aa, Homo sapiens
MRGLLVLSVLLGAVFG

SEQ ID NO: 824 - protein, 15 aa, Homo sapiens
MLALLVLVTVALASA

SEQ ID NO: 825 - protein, 17 aa, Homo sapiens
MDFPCLWLGLLLPLVAA

SEQ ID NO: 826 - protein, 20 aa, Homo sapiens
MSDLLSVFLHLLLLFKLVAP

SEQ ID NO: 827 - protein, 34 aa, Homo sapiens
MGHLSAPLHRVRVPWQGLLLTASLLTFWNPPTTA

SEQ ID NO: 828 - protein, 34 aa, Homo sapiens
MGPPSAPPCRLHVPWKEVLLTASLLTFWNPPTTA

SEQ ID NO: 829 - protein, 35 aa, Homo sapiens
MGSPSACPYRVCIPWQGLLLTASLLTFWNLPNSAQ

SEQ ID NO: 830 - protein, 34 aa, Homo sapiens
MGPISAPSCRWRIPWQGLLLTASLFTFWNPPTTA

SEQ ID NO: 831 - protein, 22 aa, Homo sapiens
MRVLSGTSLMLCSLLLLLQALC

SEQ ID NO: 832 - protein, 18 aa, Homo sapiens
MQPSSLLPLALCLLAAPA

SEQ ID NO: 833 - protein, 19 aa, Homo sapiens
MKTLLLLLLVLLELGEAQG

SEQ ID NO: 834 - protein, 18 aa, Homo sapiens
MQPLLLLLAFLLPTGAEA

SEQ ID NO: 835 - protein, 22 aa, Homo sapiens
MWATLPLLCAGAWLLGVPVCGA

SEQ ID NO: 836 - protein, 21 aa, Homo sapiens
MALTAHPSCLLALLVAGLAQG

SEQ ID NO: 837 - protein, 26 aa, Homo sapiens
MFPFYSCWRTGLLLLLLAVAVRESWQ

SEQ ID NO: 838 - protein, 40 aa, Homo sapiens
MGAAAGRSPHLGPAPARRPQRSLLLLQLLLLVAAPGSTQA

SEQ ID NO: 839 - protein, 23 aa, Homo sapiens
MQIITTALVCLLLAGMWPEDVDS

SEQ ID NO: 840 - protein, 16 aa, Homo sapiens
MKVSAVLLCLLLMTAA

SEQ ID NO: 841 - protein, 19 aa, Homo sapiens
MKISVAAIPFFLLITIALG

SEQ ID NO: 842 - protein, 21 aa, Homo sapiens
MKVSVAALSCLMLVAVLGSQA

SEQ ID NO: 843 - protein, 23 aa, Homo sapiens
MKVSEAALSLLVLILIITSASRS

SEQ ID NO: 844 - protein, 23 aa, Homo sapiens
MAPLKMLALVTLLLGASLQHIHA

SEQ ID NO: 845 - protein, 20 aa, Homo sapiens
MKGLAAALLVLVCTMALCSC

SEQ ID NO: 846 - protein, 21 aa, Homo sapiens
MALLLALSLLVLWTSPAPTLS

SEQ ID NO: 847 - protein, 23 aa, Homo sapiens
MKVSAALLCLLLIAATFIPQGLA

SEQ ID NO: 848 - protein, 26 aa, Homo sapiens
MCCTKSLLLAALMSVLLLHLCGESEA

SEQ ID NO: 849 - protein, 23 aa, Homo sapiens
MAQSLALSLLILVLAFGIPRTQG

SEQ ID NO: 850 - protein, 24 aa, Homo sapiens
MARLQTALLVVLVLLAVALQATEA

SEQ ID NO: 851 - protein, 21 aa, Homo sapiens
MKVSVAALSCLMLVTALGSQA

SEQ ID NO: 852 - protein, 26 aa, Homo sapiens
MAGLMTIVTSLLFLGVCAHHIIPTGS

SEQ ID NO: 853 - protein, 23 aa, Homo sapiens
MMGLSLASAVLLASLLSLHLGTA

SEQ ID NO: 854 - protein, 24 aa, Homo sapiens
MKGPPTFCSLLLLSLLLSPDPTAA

SEQ ID NO: 855 - protein, 23 aa, Homo sapiens
MQVSTAALAVLLCTMALCNQFSA

SEQ ID NO: 856 - protein, 23 aa, Homo sapiens
MQVSTAALAVLLCTMALCNQVLS

SEQ ID NO: 857 - protein, 23 aa, Homo sapiens
MKLCVTVLSLLMLVAAFCSPALS

SEQ ID NO: 858 - protein, 23 aa, Homo sapiens
MKVSAAALAVILIATALCAPASA

SEQ ID NO: 859 - protein, 23 aa, Homo sapiens
MKASAALLCLLLTAAAFSPQGLA

SEQ ID NO: 860 - protein, 21 aa, Homo sapiens
MQGPPLLTAAHLLCVCTAALA

SEQ ID NO: 861 - protein, 21 aa, Homo sapiens
MSAVLLLALLGFILPLPGVQA

SEQ ID NO: 862 - protein, 23 aa, Homo sapiens
MAFDVSCFFWVVLFSAGCKVITS

SEQ ID NO: 863 - protein, 18 aa, Homo sapiens
MDYPTLLLALLHVYRALC

SEQ ID NO: 864 - protein, 19 aa, Homo sapiens
MARPHPWWLCVLGTLVGLS

SEQ ID NO: 865 - protein, 28 aa, Homo sapiens
MLRRRGSPGMGVHVGAALGALWFCLTGA

SEQ ID NO: 866 - protein, 35 aa, Homo sapiens
MSGGWMAQVGAWRTGALGLALLLLLGLGLGLEAAA

SEQ ID NO: 867 - protein, 19 aa, Homo sapiens
MALLFSLILAICTRPGFLA

SEQ ID NO: 868 - protein, 25 aa, Homo sapiens
MGIQGGSVLFGLLLVLAVFCHSGHS

SEQ ID NO: 869 - protein, 19 aa, Homo sapiens
MSRGLQLLLLSCAYSLAPA

SEQ ID NO: 870 - protein, 21 aa, Homo sapiens
MALPVTALLLPLALLLHAARP

SEQ ID NO: 871 - DNA, 63 bp, Homo sapiens
atggccttaccagtgaccgccttgctcctgccgctggccttgctgctccacgccgccaggccg

SEQ ID NO: 872 - DNA, 63 bp, Homo sapiens
atggcactgcctgtgaccgccctgctgctgccactggccctgctgctgcacgcagccaggccc

SEQ ID NO: 873 - DNA, 63 bp, Homo sapiens
atggcactgccagtgacagccctgctgctgcctctggccctgctgctgcacgcagccagacct

SEQ ID NO: 874 - DNA, 63 bp, Homo sapiens
atggcactgcctgtgacagccctgctgctgccactggccctgctgctgcacgcagcccgccct

SEQ ID NO: 875 - DNA, 63 bp, Homo sapiens
atggcactgcctgtgaccgccctgctgctgccactggccctgctgctgcacgcagcccgccct

SEQ ID NO: 876 - DNA, 63 bp, Homo sapiens
atggcactgcctgtgaccgccctgctgctgccactggccctgctgctgcacgcagccaggcct

SEQ ID NO: 877 - DNA, 63 bp, Homo sapiens
atggcactgccagtgaccgccctgctgctgcctctggccctgctgctgcacgcagccagacca

SEQ ID NO: 878 - DNA, 63 bp, Homo sapiens
atggcactgcctgtgaccgccctgctgctgccactggccctgctgctgcacgcagccaggcca

SEQ ID NO: 879 - DNA, 63 bp, Homo sapiens
atggcactgcctgtgaccgccctgctgctgccactggccctgctgctgcacgcagccagaccc

SEQ ID NO: 880 - DNA, 63 bp, Homo sapiens
atggccctgcctgtgacagccctgctgctgcctctggctctgctgctgcatgccgctagaccc

SEQ ID NO: 881 - DNA, 63 bp, Homo sapiens
atggccctccctgtcaccgccctgctgcttccgctggctcttctgctccacgccgctcggccc

SEQ ID NO: 882 - protein, 22 aa, Homo sapiens
MARGAALALLLFGLLGVLVAAP

SEQ ID NO: 883 - protein, 24 aa, Homo sapiens
MGAPAASLLLLLLLFACCWAPGGA

SEQ ID NO: 884 - protein, 21 aa, Homo sapiens
MVGKMWPVLWTLCAVRVTVDA

SEQ ID NO: 885 - protein, 23 aa, Homo sapiens
MGLPRLVCAFLLAACCCCPRVAG

SEQ ID NO: 886 - protein, 28 aa, Homo sapiens
MLCPWRTANLGLLLILTIFLVAASSSLC

SEQ ID NO: 887 - protein, 17 aa, Homo sapiens
MHLLLFQLLVLLPLGKT

SEQ ID NO: 888 - protein, 32 aa, Homo sapiens
MLGAKPHWLPGPLHSPGLPLVLVLLALGAGWA

SEQ ID NO: 889 - protein, 27 aa, Homo sapiens
MGSGRRALSAVPAVLLVLTLPGLPVWA

SEQ ID NO: 890 - protein, 19 aa, Homo sapiens
MKILILGIFLFLCSTPAWA

SEQ ID NO: 891 - protein, 21 aa, Homo sapiens
MGVKASQTGFVVLVLLQCCSA

SEQ ID NO: 892 - protein, 26 aa, Homo sapiens
MGATTMDQKSLWAGVVVLLLLQGGSA

SEQ ID NO: 893 - protein, 21 aa, Homo sapiens
MVRSVAWAGFMVLLMIPWGSA

SEQ ID NO: 894 - protein, 20 aa, Homo sapiens
MNSGVCLCVLMAVLAAGALT

SEQ ID NO: 895 - protein, 17 aa, Homo sapiens
MLAATVLTLALLGNAHA

SEQ ID NO: 896 - protein, 28 aa, Homo sapiens
MHSKVTIICIRFLFWFLLLCMLIGKSHT

SEQ ID NO: 897 - protein, 25 aa, Homo sapiens
MVPEVRVLSSLLGLALLWFPLDSHA

SEQ ID NO: 898 - protein, 20 aa, Homo sapiens
MEMFQGLLLLLLLSMGGTWA

SEQ ID NO: 899 - protein, 26 aa, Homo sapiens
MAPGSRTSLLLAFALLCLPWLQEAGA

SEQ ID NO: 900 - protein, 18 aa, Homo sapiens
MRSAAVLALLLCAGQVTA

SEQ ID NO: 901 - protein, 19 aa, Homo sapiens
MLLLPLPLLLFLLCSRAEA

SEQ ID NO: 902 - protein, 18 aa, Homo sapiens
MAFLWLLSCWALLGTTFG

SEQ ID NO: 903 - protein, 22 aa, Homo sapiens
MMKTLLLFVGLLLTWESGQVLG

SEQ ID NO: 904 - protein, 19 aa, Homo sapiens
MPLLTLYLLLFWLSGYSIA

SEQ ID NO: 905 - protein, 18 aa, Homo sapiens
MRLLVLLWGCLLLPGYEA

SEQ ID NO: 906 - protein, 28 aa, Homo sapiens
MFPGCPRLWVLVVLGTSWVGWGSQGTEA

SEQ ID NO: 907 - protein, 19 aa, Homo sapiens
MQIELSTCFFLCLLRFCFS

SEQ ID NO: 908 - protein, 18 aa, Homo sapiens
MIFLYQVVHFILFTSVSG

SEQ ID NO: 909 - protein, 19 aa, Homo sapiens
MRALLLLGFLLVSLESTLS

SEQ ID NO: 910 - protein, 20 aa, Homo sapiens
MRLKNLTFIIILIISGELYA

SEQ ID NO: 911 - protein, 27 aa, Homo sapiens
MESSRVRLLPLLGAALLLMLPLLGTRA

SEQ ID NO: 912 - protein, 17 aa, Homo sapiens
MEKILILLLVALSVAYA

SEQ ID NO: 913 - protein, 21 aa, Homo sapiens
MAAALALVAGVLSGAVLPLWS

SEQ ID NO: 914 - protein, 22 aa, Homo sapiens
MFSFVDLRLLLLLAATALLTHG

SEQ ID NO: 915 - protein, 23 aa, Homo sapiens
MMSFVQKGSWLLLALLHPTIILA

SEQ ID NO: 916 - protein, 27 aa, Homo sapiens
MGPRLSVWLLLLPAALLLHEEHSRAAA

SEQ ID NO: 917 - protein, 23 aa, Homo sapiens
MKTCWKIPVFFFVCSFLEPWASA

SEQ ID NO: 918 - protein, 19 aa, Homo sapiens
MRAARALLPLLLQACWTAA

SEQ ID NO: 919 - protein, 21 aa, Homo sapiens
MWVSWAPGLWLLGLWATFGHG

SEQ ID NO: 920 - protein, 25 aa, Homo sapiens
MGRDQRAVAGPALRRWLLLGTVTVG

SEQ ID NO: 921 - protein, 26 aa, Homo sapiens
MMANWAEARPLLILIVLLGQFVSIKA

SEQ ID NO: 922 - protein, 30 aa, Homo sapiens
MRPQGPAASPQRLRGLLLLLLLQLPAPSSA

SEQ ID NO: 923 - protein, 22 aa, Homo sapiens
MEGPRGWLVLCVLAISLASMVT

SEQ ID NO: 924 - protein, 25 aa, Homo sapiens
MKIPWGSIPVLMLLLLLGLIDISQA

SEQ ID NO: 925 - protein, 28 aa, Homo sapiens
MDVGPSSLPHLGLKLLLLLLLLPLRGQA

SEQ ID NO: 926 - protein, 15 aa, Homo sapiens
MRPLLVLLLLGLAAG

SEQ ID NO: 927 - protein, 27 aa, Homo sapiens
MVTAALGPVWAALLLFLLMCEIPMVEL

SEQ ID NO: 928 - protein, 17 aa, Homo sapiens
MWLLYLLVPALFCRAGG

SEQ ID NO: 929 - protein, 15 aa, Homo sapiens
MWCIVLFSLLAWVYA

SEQ ID NO: 930 - protein, 20 aa, Homo sapiens
MGPLMVLFCLLFLYPGLADS

SEQ ID NO: 931 - protein, 22 aa, Homo sapiens
MGPTSGPSLLLLLLTHLPLALG

SEQ ID NO: 932 - protein, 19 aa, Homo sapiens
MRLLWGLIWASSFFTLSLQ

SEQ ID NO: 933 - protein, 21 aa, Homo sapiens
MATSMGLLLLLLLLLTQPGAG

SEQ ID NO: 934 - protein, 21 aa, Homo sapiens
MARRSVLYFILLNALINKGQA

SEQ ID NO: 935 - protein, 22 aa, Homo sapiens
MKVISLFILVGFIGEFQSFSSA

SEQ ID NO: 936 - protein, 20 aa, Homo sapiens
MLPPGTATLLTLLLAAGSLG

SEQ ID NO: 937 - protein, 21 aa, Homo sapiens
MSACRSFAVAICILEISILTA

SEQ ID NO: 938 - protein, 34 aa, Homo sapiens
MTVARPSVPAALPLLGELPRLLLLVLLCLPAVWG

SEQ ID NO: 939 - protein, 25 aa, Homo sapiens
MGSNLSPQLCLMPFILGLLSGGVTT

SEQ ID NO: 940 - protein, 17 aa, Artificial Sequence
  Description of Artificial Sequence: Synthetic peptide
RLLAKIICLMLWAICVA

SEQ ID NO: 941 - protein, 18 aa, Homo sapiens
MWLLVSVILISRISSVGG

SEQ ID NO: 942 - protein, 18 aa, Homo sapiens
MKLLHVFLLFLCFHLRFC

SEQ ID NO: 943 - protein, 41 aa, Homo sapiens
MGASSPRSPEPVGPPAPGLPFCCGGSLLAVVVLLALPVAWG

SEQ ID NO: 944 - protein, 20 aa, Homo sapiens
MGAAGLLGVFLALVAPGVLG

SEQ ID NO: 945 - protein, 20 aa, Artificial Sequence
  Description of Artificial Sequence: Synthetic Signal Sequence
MKMWLLVSHLVIISITTCLA

SEQ ID NO: 946 - protein, 30 aa, Homo sapiens
MGTATRRKPHLLLVAAVALVSSSAWSSALG

SEQ ID NO: 947 - protein, 22 aa, Homo sapiens
MPLLLYTCLLWLPTSGLWTVQA

SEQ ID NO: 948 - protein, 26 aa, Homo sapiens
MPRSCCSRSGALLLALLLQASMEVRG

SEQ ID NO: 949 - protein, 23 aa, Homo sapiens
MGGHPQLRLVKALLLLGLNPVSA

SEQ ID NO: 950 - protein, 24 aa, Homo sapiens
MSPNFKLQCHFILIFLTALRGESR

SEQ ID NO: 951 - protein, 18 aa, Homo sapiens
MEKLLCFLVLTSLSHAFG

SEQ ID NO: 952 - protein, 21 aa, Homo sapiens
MRLSVCLLLLTLALCCYRANA

SEQ ID NO: 953 - protein, 20 aa, Homo sapiens
MKLAALLGLCVALSCSSAAA

SEQ ID NO: 954 - protein, 21 aa, Homo sapiens
MQAAWLLGALVVPQLLGFGHG

SEQ ID NO: 955 - protein, 21 aa, Homo sapiens
MRPAFALCLLWQALWPGPGGG

SEQ ID NO: 956 - protein, 29 aa, Homo sapiens
MAGLNCGVSIALLGVLLLGAARLPRGAEA

SEQ ID NO: 957 - protein, 21 aa, Homo sapiens
MNQTAILICCLIFLTLSGIQG

SEQ ID NO: 958 - protein, 21 aa, Artificial Sequence
  Description of Artificial Sequence: Synthetic Signal Sequence
MSVKGMAIALAVILCATVVQG

SEQ ID NO: 959 - protein, 34 aa, Homo sapiens
MARATLSAAPSNPRLLRVALLLLLLVAASRRAAG

SEQ ID NO: 960 - protein, 34 aa, Homo sapiens
MAHATLSAAPSNPRLLRVALLLLLLVAASRRAAG

SEQ ID NO: 961 - protein, 36 aa, Homo sapiens
MSLLSSRAARVPGPSSSLCALLVLLLLLTQPGPIAS

SEQ ID NO: 962 - protein, 37 aa, Homo sapiens
MSLPSSRAARVPGPSGSLCALLALLLLLTPPGPLASA

SEQ ID NO: 963 - protein, 22 aa, Homo sapiens
MKKSGVLFLLGIILLVLIGVQG

SEQ ID NO: 964 - protein, 28 aa, Homo sapiens
MSSPQRRKAMPWALSLLLMGFQLLVTYA

SEQ ID NO: 965 - protein, 28 aa, Homo sapiens
MLGLPWKGGLSWALLLLLLGSQILLIYA

SEQ ID NO: 966 - protein, 26 aa, Homo sapiens
MAGPLRAPLLLLAILAVALAVSPAAG

SEQ ID NO: 967 - protein, 20 aa, Homo sapiens
MMWPMHTPLLLLTALMVAVA

SEQ ID NO: 968 - protein, 20 aa, Homo sapiens
MARPLCTLLLLMATLAGALA

SEQ ID NO: 969 - protein, 20 aa, Homo sapiens
MAWPLCTLLLLLATQAVALA

SEQ ID NO: 970 - protein, 20 aa, Homo sapiens
MAQHLSTLLLLLATLAVALA

SEQ ID NO: 971 - protein, 34 aa, Homo sapiens
MYLVAGDRGLAGCGHLLVSLLGLLLLLARSGTRA

SEQ ID NO: 972 - protein, 21 aa, Homo sapiens
MEIKHLLFLVAAACLLPMLSM

SEQ ID NO: 973 - protein, 24 aa, Homo sapiens
MRLPRRAALGLLPLLLLLPPAPEA

SEQ ID NO: 974 - protein, 22 aa, Homo sapiens
MLKPSLPFTSLLFLQLPLLGVG

SEQ ID NO: 975 - protein, 37 aa, Homo sapiens
MPAGRRGPAAQSARRPPPLLPLLLLLCVLGAPRAGSG

SEQ ID NO: 976 - protein, 21 aa, Homo sapiens
MRLLILALLGICSLTAYIVEG

SEQ ID NO: 977 - protein, 22 aa, Homo sapiens
MRTPGPLPVLLLLLAGAPAARP

SEQ ID NO: 978 - protein, 23 aa, Homo sapiens
MTATEALLRVLLLLLAFGHSTYG

SEQ ID NO: 979 - protein, 26 aa, Homo sapiens
MAAASRSASGWALLLLVALWQQRAAG

SEQ ID NO: 980 - protein, 22 aa, Homo sapiens
MRGMKLLGALLALAALLQGAVS

SEQ ID NO: 981 - protein, 19 aa, Homo sapiens
MRFMTLLFLTALAGALVCA

SEQ ID NO: 982 - protein, 21 aa, Homo sapiens
MKFQGPLACLLLALCLGSGEA

SEQ ID NO: 983 - protein, 31 aa, Homo sapiens
MMALGAAGATRVFVAMVAAALGGHPLLGVSA

SEQ ID NO: 984 - protein, 21 aa, Homo sapiens
MQRLGATLLCLLLAAAVPTAP

SEQ ID NO: 985 - protein, 18 aa, Homo sapiens
MVAAVLLGLSWLCSPLGA

SEQ ID NO: 986 - protein, 16 aa, Homo sapiens
MWSGWWLWPLVAVCTA

SEQ ID NO: 987 - protein, 24 aa, Homo sapiens
MGAGPSLLLAALLLLLSGDGAVRC

SEQ ID NO: 988 - protein, 22 aa, Homo sapiens
MAPPGSSTVFLLALTIIASTWA

SEQ ID NO: 989 - protein, 23 aa, Homo sapiens
MEAPAAGLFLLLLLGTWAPAPGS

SEQ ID NO: 990 - protein, 25 aa, Homo sapiens
MASLFRSYLPAIWLLLSQLLRESLA

SEQ ID NO: 991 - protein, 21 aa, Homo sapiens
MRGLAVLLTVALATLLAPGAG

SEQ ID NO: 992 - protein, 25 aa, Homo sapiens
MGSRAELCTLLGGFSFLLLLIPGEG

SEQ ID NO: 993 - protein, 22 aa, Homo sapiens
MRASSFLIVVVFLIAGTLVLEA

SEQ ID NO: 994 - protein, 16 aa, Homo sapiens
MIRTLLLSTLVAGALS

SEQ ID NO: 995 - protein, 25 aa, Homo sapiens
MDRGTLPLAVALLLASCSLSPTSLA

SEQ ID NO: 996 - protein, 32 aa, Homo sapiens
MAAAVPRAAFLSPLLPLLLGFLLLSAPHGGSG

SEQ ID NO: 997 - protein, 21 aa, Homo sapiens
MRALWVLGLCCVLLTFGSVRA

SEQ ID NO: 998 - protein, 29 aa, Homo sapiens
MISLPGPLVTNLLRFLFLGLSALAPPSRA

SEQ ID NO: 999 - protein, 17 aa, Homo sapiens
MDYLLMIFSLLFVACQG

SEQ ID NO: 1000 - protein, 27 aa, Homo sapiens
MVPKLFTSQICLLLLLGLMGVEGSLHA

SEQ ID NO: 1001 - protein, 23 aa, Homo sapiens
MKVSAALLWLLLIAAAFSPQGLA

SEQ ID NO: 1002 - protein, 20 aa, Homo sapiens
MDCQLSILLLLSCSVLDSFG

SEQ ID NO: 1003 - protein, 17 aa, Homo sapiens
MALDYLLLLLLASAVAA

SEQ ID NO: 1004 - protein, 16 aa, Homo sapiens
MVCSLWVLLLVSSVLA

SEQ ID NO: 1005 - protein, 18 aa, Homo sapiens
MEFLWAPLLGLCCSLAAA

SEQ ID NO: 1006 - protein, 25 aa, Homo sapiens
MRLLPLLRTVLWAAFLGSPLRGGSS

SEQ ID NO: 1007 - protein, 27 aa, Homo sapiens
MARPGQRWLGKWLVAMVVWALCRLATP

SEQ ID NO: 1008 - protein, 27 aa, Homo sapiens
MGPPHSGPGGVRVGALLLLGVLGLVSG

SEQ ID NO: 1009 - protein, 24 aa, Homo sapiens
MRPSGTAGAALLALLAALCPASRA

SEQ ID NO: 1010 - protein, 22 aa, Homo sapiens
MALGVPISVYLLFNAMTALTEE

SEQ ID NO: 1011 - protein, 23 aa, Homo sapiens
MGRGWGFLFGLLGAVWLLSSGHG

SEQ ID NO: 1012 - protein, 27 aa, Homo sapiens
MGVHECPAWLWLLLSLLSLPLGLPVLG

SEQ ID NO: 1013 - protein, 24 aa, Homo sapiens
MDHLGASLWPQVGSLCLLLAGAAW

SEQ ID NO: 1014 - protein, 21 aa, Homo sapiens
MIASQFLSALTLVLLIKESGA

SEQ ID NO: 1015 - protein, 18 aa, Homo sapiens
MLALLCSCLLLAAGASDA

SEQ ID NO: 1016 - protein, 27 aa, Homo sapiens
MKLGCVLMAWALYLSLGVLWVAQMLLA

SEQ ID NO: 1017 - protein, 16 aa, Homo sapiens
MLPRLLLLICAPLCEP

SEQ ID NO: 1018 - protein, 19 aa, Homo sapiens
MLLWSLLVIFDAVTEQADS

SEQ ID NO: 1019 - protein, 19 aa, Homo sapiens
MFSMRIVCLVLSVVGTAWT

SEQ ID NO: 1020 - protein, 30 aa, Homo sapiens
MKRMVSWSFHKLKTMKHLLLLLLCVFLVKS

SEQ ID NO: 1021 - protein, 26 aa, Artificial Sequence
  Description of Artificial Sequence: Synthetic Signal Sequence
MSWSLHPRNLILYFYALLFLSSTCVA

SEQ ID NO: 1022 - protein, 24 aa, Homo sapiens
MRSGCVVVHVWILAGLWLAVAGRP

SEQ ID NO: 1023 - protein, 28 aa, Homo sapiens
MDSDETGFEHSGLWVSVLAGLLLGACQA

SEQ ID NO: 1024 - protein, 24 aa, Homo sapiens
MLGARLRLWVCALCSVCSMSVLRA

SEQ ID NO: 1025 - protein, 22 aa, Homo sapiens
MGAPACALALCVAVAIVAGASS

SEQ ID NO: 1026 - protein, 21 aa, Homo sapiens
MRLLLALLGVLLSVPGPPVLS

SEQ ID NO: 1027 - protein, 24 aa, Homo sapiens
MTPSPLLLLLLPPLLLGAFPPAAA

SEQ ID NO: 1028 - protein, 31 aa, Homo sapiens
MLRGPGPGLLLLAVQCLGTAVPSTGASKSKR

SEQ ID NO: 1029 - protein, 29 aa, Homo sapiens
MERAAPSRRVPLPLLLLGGLALLAAGVDA

SEQ ID NO: 1030 - protein, 29 aa, Homo sapiens
MELSGATMARGLAVLLVLFLHIKNLPAQA

SEQ ID NO: 1031 - protein, 23 aa, Homo sapiens
MDLLWILPSLWLLLLGGPACLKT

SEQ ID NO: 1032 - protein, 19 aa, Homo sapiens
MRLFLWNAVLTLFVTSLIG

SEQ ID NO: 1033 - protein, 21 aa, Homo sapiens
MRLSWFRVLTVLSICLSAVAT

SEQ ID NO: 1034 - protein, 16 aa, Homo sapiens
MVWKWMPLLLLLVCVA

SEQ ID NO: 1035 - protein, 29 aa, Homo sapiens
MVRARHQPGGLCLLLLLLCQFMEDRSAQA

SEQ ID NO: 1036 - protein, 20 aa, Homo sapiens
MWKRWLALALALVAVAWVRA

SEQ ID NO: 1037 - protein, 26 aa, Homo sapiens
MRPGAPGPLWPLPWGALAWAVGFVSS

SEQ ID NO: 1038 - protein, 18 aa, Homo sapiens
MKTLQFFFLFCCWKAICC

SEQ ID NO: 1039 - protein, 24 aa, Homo sapiens
MAPISLSWLLRLATFCHLTVLLAG

SEQ ID NO: 1040 - protein, 22 aa, Homo sapiens
MAMTWIVFSLWPLTVFMGHIGG

SEQ ID NO: 1041 - protein, 26 aa, Artificial Sequence
  Description of Artificial Sequence: Synthetic Signal Sequence
MTAAAGSAGRAAVPLLLCALLAPGGA

SEQ ID NO: 1042 - protein, 18 aa, Homo sapiens
MTPPRLFWVWLLVAGTQG

SEQ ID NO: 1043 - protein, 19 aa, Homo sapiens
MWLLLTMASLISVLGTTHG

SEQ ID NO: 1044 - protein, 16 aa, Homo sapiens
MKWMVVVLVCLQLLEA

SEQ ID NO: 1045 - protein, 21 aa, Homo sapiens
MQRLCVYVLIFALALAAFSEA

SEQ ID NO: 1046 - protein, 23 aa, Homo sapiens
MRGSELPLVLLALVLCLAPRGRA

SEQ ID NO: 1047 - protein, 31 aa, Homo sapiens
MVRPLNPRPLPPVVLMLLLLLPPSPLPLAAG

SEQ ID NO: 1048 - protein, 27 aa, Homo sapiens
MAPHRPAPALLCALSLALCALSLPVRA

SEQ ID NO: 1049 - protein, 19 aa, Homo sapiens
MNWHLPLFLLASVTLPSIC

SEQ ID NO: 1050 - protein, 22 aa, Homo sapiens
MALKNKFSCLWILGLCLVATTS

SEQ ID NO: 1051 - protein, 20 aa, Homo sapiens
MKSIYFVAGLFVMLVQGSWQ

SEQ ID NO: 1052 - protein, 14 aa, Homo sapiens
MLLPLLLLLPMCWA

SEQ ID NO: 1053 - protein, 39 aa, Homo sapiens
MEFSSPSREECPKPLSRVSIMAGSLTGLLLLQAVSWASG

SEQ ID NO: 1054 - protein, 18 aa, Homo sapiens
MLCLLLTLGVALVCGVPA

SEQ ID NO: 1055 - protein, 19 aa, Homo sapiens
MYGKIIFVLLLSAIVSISA

SEQ ID NO: 1056 - protein, 19 aa, Homo sapiens
MYGKIIFVLLLSEIVSISA

SEQ ID NO: 1057 - protein, 19 aa, Homo sapiens
MYGKIIFVLLLSGIVSISA

SEQ ID NO: 1058 - protein, 24 aa, Homo sapiens
MDYYRKYAAIFLVTLSVFLHVLHS

SEQ ID NO: 1059 - protein, 23 aa, Homo sapiens
MELRARGWWLLCAAAALVACARG

SEQ ID NO: 1060 - protein, 21 aa, Homo sapiens
MAAAMPLALLVLLLLGPGGWC

SEQ ID NO: 1061 - protein, 27 aa, Homo sapiens
MAVTDSLSRAATVLATVLLLSFGSVAA

SEQ ID NO: 1062 - protein, 25 aa, Homo sapiens
MTPQSLLQTTLFLLSLLFLVQGAHG

SEQ ID NO: 1063 - protein, 24 aa, Homo sapiens
MARLGNCSLTWAALIILLLPGSLE

SEQ ID NO: 1064 - protein, 17 aa, Homo sapiens
MWLQSLLLLGTVACSIS

SEQ ID NO: 1065 - protein, 22 aa, Homo sapiens
MLLLVTSLLLCELPHPAFLLIP

SEQ ID NO: 1066 - DNA, 66 bp, Homo sapiens
atgcttctcctggtgacaagccttctgctctgtgagttaccacacccagcattcctcctgatccca

SEQ ID NO: 1067 - DNA, 66 bp, Homo sapiens
atgctgctgctcgtgacatctctgctgctgtgcgagctgccccaccccgcctttctgctgatcccc

SEQ ID NO: 1068 - protein, 26 aa, Homo sapiens
MRNSYRFLASSLSVVVSLLLIPEDVC

SEQ ID NO: 1069 - protein, 18 aa, Homo sapiens
MQPILLLLAFLLLPRADA

SEQ ID NO: 1070 - protein, 18 aa, Homo sapiens
MQPFLLLLAFLLTPGAGT

SEQ ID NO: 1071 - protein, 24 aa, Homo sapiens
MSRTAYTVGALLLLLGTLLPAAEG

SEQ ID NO: 1072 - protein, 19 aa, Homo sapiens
MKLASGFLVLWLSLGGGLA

SEQ ID NO: 1073 - protein, 26 aa, Homo sapiens
MAAGSRTSLLLAFGLLCLSWLQEGSA

SEQ ID NO: 1074 - protein, 34 aa, Homo sapiens
MARAALSAAPSNPRLLRVALLLLLLVAAGRRAAG

SEQ ID NO: 1075 - protein, 21 aa, Homo sapiens
MNAFLLFALCLLGAWAALAGG

SEQ ID NO: 1076 - protein, 18 aa, Homo sapiens
MSALGAVIALLLWGQLFA

SEQ ID NO: 1077 - protein, 31 aa, Homo sapiens
MLVRRGARAGPRMPRGWTALCLLSLLPSGFM

SEQ ID NO: 1078 - protein, 23 aa, Homo sapiens
MARVLGAPVALGLWSLCWSLAIA

SEQ ID NO: 1079 - protein, 35 aa, Homo sapiens
MLLRSKPALPPPLMLLLLGPLGPLSPGALPRPAQA

SEQ ID NO: 1080 - protein, 19 aa, Homo sapiens
MKHSLNALLIFLIITSAWG

SEQ ID NO: 1081 - protein, 22 aa, Homo sapiens
MDTSPLCFSILLVLCIFIQSSA

SEQ ID NO: 1082 - protein, 31 aa, Homo sapiens
MWVTKLLPALLLQHVLLHLLLLPIAIPYAEG

SEQ ID NO: 1083 - protein, 35 aa, Homo sapiens
MGRWAWVPSPWPPPGLGPFLLLLLLLLLLPRGFQP

SEQ ID NO: 1084 - protein, 22 aa, Homo sapiens
MGPRARPALLLLMLLQTAVLQG

SEQ ID NO: 1085 - protein, 15 aa, Homo sapiens
MWFLTTLLLWVPVDG

SEQ ID NO: 1086 - protein, 19 aa, Homo sapiens
MKFFVFALVLALMISMISA

SEQ ID NO: 1087 - protein, 19 aa, Homo sapiens
MKFFVFALILALMLSMTGA

SEQ ID NO: 1088 - protein, 18 aa, Homo sapiens
MKALIAALLLITLQYSCA

SEQ ID NO: 1089 - protein, 24 aa, Homo sapiens
MAVMAPRTLLLLLSGALALTQTWA

SEQ ID NO: 1090 - protein, 24 aa, Homo sapiens
MAVMAPRTLLLLLSGALALTHTWA

SEQ ID NO: 1091 - protein, 24 aa, Homo sapiens
MAVMAPRTLLLLLLGALALTQTWA

SEQ ID NO: 1092 - protein, 24 aa, Homo sapiens
MAIMAPRTLVLLLSGALALTQTWA

SEQ ID NO: 1093 - protein, 24 aa, Homo sapiens
MAVMPPRTLLLLLSGALALTQTWA

SEQ ID NO: 1094 - protein, 21 aa, Homo sapiens
MVDGTLLLLLSEALALTQTWA

SEQ ID NO: 1095 - protein, 21 aa, Homo sapiens
MAPRSLLLLLSGALALTDTWA

SEQ ID NO: 1096 - protein, 24 aa, Homo sapiens
MRVTAPRTVLLLLSGALALTETWA

SEQ ID NO: 1097 - protein, 24 aa, Homo sapiens
MRVTAPRTLLLLLWGAVALTETWA

SEQ ID NO: 1098 - protein, 24 aa, Homo sapiens
MRVTAPRTVLLLLSAALALTETWA

SEQ ID NO: 1099 - protein, 24 aa, Homo sapiens
MLVMAPRTVLLLLSAALALTETWA

SEQ ID NO: 1100 - protein, 24 aa, Homo sapiens
MRVTAPRTVLLLLWGAVALTETWA

SEQ ID NO: 1101 - protein, 24 aa, Homo sapiens
MRVTAPRTLLLLLWGALALTETWA

SEQ ID NO: 1102 - protein, 23 aa, Artificial Sequence
  Description of Artificial Sequence: Synthetic peptide
RVTAPRTLLLLLWGALALTETWA

SEQ ID NO: 1103 - protein, 24 aa, Homo sapiens
MRVMEPRTLILLLSGALALTETWA

SEQ ID NO: 1104 - protein, 24 aa, Homo sapiens
MRVMAPRTLILLLSGALALTETWA

SEQ ID NO: 1105 - protein, 24 aa, Homo sapiens
MRVMAPRTLLLLLSGALALTETWA

SEQ ID NO: 1106 - protein, 24 aa, Homo sapiens
MRVMAPQALLLLLSGALALIETWA

SEQ ID NO: 1107 - protein, 24 aa, Homo sapiens
MRVMAPRALLLLLSGGLALTETWA

SEQ ID NO: 1108 - protein, 25 aa, Homo sapiens
GSGWVPWVVALLVNLTRLDSSMTQG

SEQ ID NO: 1109 - protein, 28 aa, Homo sapiens
MRPEDRMFHIRAVILRALSLAFLLSLRG

SEQ ID NO: 1110 - protein, 29 aa, Homo sapiens
MMVLQVSAAPRTVALTALLMVLLTSVVQG

SEQ ID NO: 1111 - protein, 23 aa, Homo sapiens
MILNKALMLGALALTTVMSPCGG

SEQ ID NO: 1112 - protein, 32 aa, Artificial Sequence
  Description of Artificial Sequence: Synthetic Signal Sequence
MSWKKALRIPGGLRAATVTLMLSMLSTPVAEG

SEQ ID NO: 1113 - protein, 32 aa, Artificial Sequence
  Description of Artificial Sequence: Synthetic Signal Sequence
MSWKKALRIPGGLRVATVTLMLAMLSTPVAEG

SEQ ID NO: 1114 - protein, 23 aa, Homo sapiens
MILNKALLLGALALTTVMSPCGG

SEQ ID NO: 1115 - protein, 23 aa, Homo sapiens
MILNKALLLGALALTAVMSPCGG

SEQ ID NO: 1116 - protein, 32 aa, Artificial Sequence
  Description of Artificial Sequence: Synthetic Signal Sequence
MSWKKSLRIPGDLRVATVTLMLAILSSSLAEG

SEQ ID NO: 1117 - protein, 23 aa, Homo sapiens
MILNKALMLGSLALTTVMSPCGG

SEQ ID NO: 1118 - protein, 32 aa, Artificial Sequence
  Description of Artificial Sequence: Synthetic Signal Sequence
MSWKKALRIPGGLRVATVTLMLAMLSTSVAEG

SEQ ID NO: 1119 - protein, 32 aa, Artificial Sequence
  Description of Artificial Sequence: Synthetic Signal Sequence
MSWKKALRIPGDLRVATVTLMLAMLSSLLAEG

SEQ ID NO: 1120 - protein, 25 aa, Homo sapiens
MAISGVPVLGFFIIAVLMSAQESWA

SEQ ID NO: 1121 - protein, 29 aa, Homo sapiens
MVCLRLPGGSCMAVLTVTLMVLSSPLALA

SEQ ID NO: 1122 - protein, 29 aa, Homo sapiens
MVCLKLPGGSCMTALTVTLMVLSSPLALA

SEQ ID NO: 1123 - protein, 29 aa, Homo sapiens
MVCLKFPGGSCMAALTVTLMVLSSPLALA

SEQ ID NO: 1124 - protein, 29 aa, Homo sapiens
MVCLKLPGGSCMAALTVTLMVLSSPLALA

SEQ ID NO: 1125 - protein, 29 aa, Homo sapiens
MVCLKLPGGSSLAALTVTLMVLSSRLAFA

SEQ ID NO: 1126 - protein, 29 aa, Homo sapiens
MVCLKLPGGSCMAALTVTLTVLSSPLALA

SEQ ID NO: 1127 - protein, 32 aa, Artificial Sequence
  Description of Artificial Sequence: Synthetic Signal Sequence
MSWKMALQIPGGFWAAAVTVMLVMLSTPVAEA

SEQ ID NO: 1128 - protein, 23 aa, Homo sapiens
MFARMSDLHVLLLMALVGKTACG

SEQ ID NO: 1129 - protein, 19 aa, Homo sapiens
MDWTWRVFCLLAVAPGAHS

SEQ ID NO: 1130 - protein, 19 aa, Homo sapiens
  MOD_RES (5)..(8): Any amino acid
MDWTXXXXFLVAAATRVHS

SEQ ID NO: 1131 - protein, 19 aa, Homo sapiens
MDWTWRILFLVAAATGAHS

SEQ ID NO: 1132 - protein, 19 aa, Homo sapiens
MKHLWFLLLWCQLPDVGVL

SEQ ID NO: 1133 - protein, 19 aa, Homo sapiens
MDILCSTLLLLTVPSGVLS

SEQ ID NO: 1134 - protein, 19 aa, Homo sapiens
MEFGLSWLFLVAILKGVQC

SEQ ID NO: 1135 - protein, 20 aa, Homo sapiens
MGSQVHLLSFLLLWISDTRA

SEQ ID NO: 1136 - protein, 22 aa, Homo sapiens
MDMRVPAQLLGLLLLWLRRVRC

SEQ ID NO: 1137 - protein, 22 aa, Homo sapiens
MDMRVPAQLLGLLLLWLPGAKC

SEQ ID NO: 1138 - protein, 22 aa, Homo sapiens
MDMRVPAQLLGLLLLWLRGARC

SEQ ID NO: 1139 - protein, 4 aa, Homo sapiens
GSSG

SEQ ID NO: 1140 - protein, 20 aa, Homo sapiens
MRLPAQLLGLLMLWVPGSSG

SEQ ID NO: 1141 - protein, 20 aa, Homo sapiens
MEAPAQLLFLLLLWLPDTTG

SEQ ID NO: 1142 - protein, 20 aa, Homo sapiens
METPAQLLFLLLLWLPDTTG

SEQ ID NO: 1143 - protein, 4 aa, Artificial Sequence
  Description of Artificial Sequence: Synthetic peptide
VPSG

SEQ ID NO: 1144 - protein, 20 aa, Homo sapiens
MEAPAQLLFLLLLWLPDTTR

SEQ ID NO: 1145 - protein, 20 aa, Homo sapiens
MVLQTQVFISLLLWISGAYG

SEQ ID NO: 1146 - protein, 20 aa, Homo sapiens
MAWTPLFLFLLTCCPGGSNS

SEQ ID NO: 1147 - protein, 19 aa, Homo sapiens
MTCSPLLLTLLIHCTGSWA

SEQ ID NO: 1148 - protein, 19 aa, Homo sapiens
MAWAPLLLTLLAHCTDCWA

SEQ ID NO: 1149 - protein, 18 aa, Homo sapiens
MDWTWILFLVAAATRVHS

SEQ ID NO: 1150 - DNA, 54 bp, Homo sapiens
atggactggacatggatactcttcctggtagcagccgccacacgagtgcacagc

SEQ ID NO: 1151 - DNA, 54 bp, Homo sapiens
atggactggacctggattctgtttctggtggccgctgccacaagagtgcacagc

SEQ ID NO: 1152 - DNA, 54 bp, Homo sapiens
atggattggacctggattctgtttctggtggccgctgccacaagagtgcacagc

SEQ ID NO: 1153 - protein, 23 aa, Homo sapiens
MGVPRPQPWALGLLLFLLPGSLG

SEQ ID NO: 1154 - protein, 18 aa, Homo sapiens
MVLHLLLFLLLTPQGGHS

SEQ ID NO: 1155 - protein, 24 aa, Homo sapiens
MALWMRLLPLLALLALWGPDPAAA

SEQ ID NO: 1156 - protein, 24 aa, Homo sapiens
MAPRGCIVAVFAIFCISRLLCSHG

SEQ ID NO: 1157 - protein, 24 aa, Homo sapiens
MRPRCCILALVCWITVFLLQCSKG

SEQ ID NO: 1158 - protein, 27 aa, Homo sapiens
MGTGGRRGAAAAPLLVAVAALLLGAAG

SEQ ID NO: 1159 - protein, 20 aa, Homo sapiens
MDPRLPAWALVLLGPALVFA

SEQ ID NO: 1160 - protein, 30 aa, Homo sapiens
MKSGSGGGSPTSLWGLLFLSAALSLWPTSG

SEQ ID NO: 1161 - protein, 24 aa, Homo sapiens
MGIPMGKSMLVLLTFLAFASCCIA

SEQ ID NO: 1162 - protein, 25 aa, Homo sapiens
MSEVPVARVWLVLLLLTVQVGVTAG

SEQ ID NO: 1163 - protein, 39 aa, Homo sapiens
MLPRVGCPALPLPPPPLLPLLPLLLLLLGASGGGGGARA

SEQ ID NO: 1164 - protein, 27 aa, Homo sapiens
MQRARPTLWAAALTLLVLLRGPPVARA

SEQ ID NO: 1165 - protein, 21 aa, Homo sapiens
MLPLCLVAALLLAAGPGPSLG

SEQ ID NO: 1166 - protein, 26 aa, Homo sapiens
MERPSLRALLLGAAGLLLLLLPLSSS

SEQ ID NO: 1167 - protein, 27 aa, Homo sapiens
MALRKGGLALALLLLSWVALGPRSLEG

SEQ ID NO: 1168 - protein, 22 aa, Homo sapiens
MKGSIFTLFLFSVLFAISEVRS

SEQ ID NO: 1169 - protein, 29 aa, Homo sapiens
MGPERTGAAPLPLLLVLALSQGILNCCLA

SEQ ID NO: 1170 - protein, 32 aa, Homo sapiens
MGPGPSRAPRAPRLMLCALALMVAAGGCVVSA

SEQ ID NO: 1171 - protein, 39 aa, Homo sapiens
MFPTESAWLGKRGANPGPEAAVRETVMLLLCLGVPTGRP

SEQ ID NO: 1172 - protein, 41 aa, Homo sapiens
MGSRTPESPLHAVQLRWGPRRRPPLLPLLLLLLPPPPRVGG

SEQ ID NO: 1173 - protein, 23 aa, Homo sapiens
MAAAGQLCLLYLSAGLLSRLGAA

SEQ ID NO: 1174 - protein, 33 aa, Homo sapiens
MAGARSRDPWGASGICYLFGSLLVELLFSRAVA

SEQ ID NO: 1175 - protein, 18 aa, Homo sapiens
MWLFHTLLCIASLALLAA

SEQ ID NO: 1176 - protein, 31 aa, Homo sapiens
MARALCPLQALWLLEWVLLLLGPCAAPPAWA

SEQ ID NO: 1177 - protein, 25 aa, Homo sapiens
MKDSCITVMAMALLSGFFFFAPASS

SEQ ID NO: 1178 - protein, 16 aa, Homo sapiens
MALRVLLLTALTLCHG

SEQ ID NO: 1179 - protein, 30 aa, Homo sapiens
MAFPPRRRLRLGPRGLPLLLSGLLLPLCRA

SEQ ID NO: 1180 - protein, 19 aa, Homo sapiens
MTRTRAALLLFTALATSLG

SEQ ID NO: 1181 - protein, 20 aa, Homo sapiens
MNLQPIFWIGLISSVCCVFA

SEQ ID NO: 1182 - protein, 22 aa, Homo sapiens
MLGLRPPLLALVGLLSLGCVLS

SEQ ID NO: 1183 - protein, 27 aa, Homo sapiens
MAGPRPSPWARLLLAALISVSLSGTLA

SEQ ID NO: 1184 - protein, 19 aa, Homo sapiens
MVALPMVLVLLLVLSRGES

SEQ ID NO: 1185 - protein, 18 aa, Homo sapiens
MNQLSFLLFLIATTRGWS

SEQ ID NO: 1186 - protein, 28 aa, Artificial Sequence
  Description of Artificial Sequence: Synthetic Signal Sequence
MKPPRPVRTCSKVLVLLSLLAIHQTTTA

SEQ ID NO: 1187 - protein, 27 aa, Homo sapiens
MAPSSPRPALPALLVLLGALFPGPGNA

SEQ ID NO: 1188 - protein, 23 aa, Homo sapiens
MASPFALLMVLVVLSCKSSCSLG

SEQ ID NO: 1189 - protein, 23 aa, Homo sapiens
MALSFSLLMAVLVLSYKSICSLG

SEQ ID NO: 1190 - protein, 23 aa, Homo sapiens
MALPFALMMALVVLSCKSSCSLG

SEQ ID NO: 1191 - protein, 23 aa, Homo sapiens
MALTFALLVALLVLSCKSSCSVG

SEQ ID NO: 1192 - protein, 21 aa, Homo sapiens
MALPFVLLMALVVLNCKSICS

SEQ ID NO: 1193 - protein, 20 aa, Homo sapiens
MALPFALLMALVVLSCKSSC

SEQ ID NO: 1194 - protein, 23 aa, Homo sapiens
MARSFSLLMVVLVLSYKSICSLG

SEQ ID NO: 1195 - protein, 23 aa, Homo sapiens
MALTFYLLVALVVLSYKSFSSLG

SEQ ID NO: 1196 - protein, 21 aa, Homo sapiens
MTNKCLLQIALLLCFSTTALS

SEQ ID NO: 1197 - protein, 27 aa, Artificial Sequence
  Description of Artificial Sequence: Synthetic Signal Sequence
MSTKPDMIQKCLWLEILMGIFIAGTLS

SEQ ID NO: 1198 - protein, 21 aa, Homo sapiens
MALLFPLLAALVMTSYSPVGS

SEQ ID NO: 1199 - protein, 26 aa, Homo sapiens
MLLSQNAFIFRSLNLVLMVYISLVFG

SEQ ID NO: 1200 - protein, 17 aa, Homo sapiens
MALLFLLPLVMQGVSRA

SEQ ID NO: 1201 - protein, 30 aa, Homo sapiens
MAPRRARGCRTLGLPALLLLLLLRPPATRG

SEQ ID NO: 1202 - DNA, 90 bp, Homo sapiens
atggccccgcggcgggcgcgcggctgccggaccctcggtctcccggcgctgctactgctgctgctgctccggccgccggcgacgcggggc

SEQ ID NO: 1203 - protein, 24 aa, Homo sapiens
MKASSLAFSLLSAAFYLLWTPSTG

SEQ ID NO: 1204 - protein, 25 aa, Homo sapiens
MEICRGLRSHLITLLLFLFHSETIC

SEQ ID NO: 1205 - protein, 17 aa, Homo sapiens
MKVLLRLICFIALLISS

SEQ ID NO: 1206 - protein, 18 aa, Homo sapiens
MGFWILAILTILMYSTAA

SEQ ID NO: 1207 - protein, 19 aa, Homo sapiens
MWSLLLCGLSIALPLSVTA

SEQ ID NO: 1208 - protein, 18 aa, Homo sapiens
MHSSALLCCLVLLTGVRA

SEQ ID NO: 1209 - protein, 21 aa, Homo sapiens
MLPCLVVLLAALLSLRLGSDA

SEQ ID NO: 1210 - protein, 19 aa, Homo sapiens
MAWSLGSWLGGCLLVSALG

SEQ ID NO: 1211 - protein, 22 aa, Homo sapiens
MCPARSLLLVATLVLLDHLSLA

SEQ ID NO: 1212 - protein, 22 aa, Homo sapiens
MCHQQLVISWFSLVFLASPLVA

SEQ ID NO: 1213 - DNA, 66 bp, Homo sapiens
atgtgtcaccagcagttggtcatctcttggttttccctggtttttctggcatctcccctcgtggcc

SEQ ID NO: 1214 - DNA, 66 bp, Homo sapiens
atgtgccaccagcagctggtcatcagctggttctccctggtgtttctggcatcccctctggtggca

SEQ ID NO: 1215 - DNA, 66 bp, Homo sapiens
atgtgccaccagcagctggtcatcagctggttctccctggtgtttctggccagccctctggtggcc

SEQ ID NO: 1216 - DNA, 66 bp, Homo sapiens
atgtgccaccagcagctggtcatcagctggttctccctggtgtttctggcaagccctctggtggca

SEQ ID NO: 1217 - DNA, 66 bp, Homo sapiens
atgtgccaccagcagctggtcatcagctggttctccctggtgtttctggcatccccactggtggca

SEQ ID NO: 1218 - DNA, 66 bp, Homo sapiens
atgtgccaccaacagctcgtgatcagctggttctccctggtgttcctggctagccccctggtggcc

SEQ ID NO: 1219 - DNA, 66 bp, Homo sapiens
atgtgccaccagcagctggtcatctcttggttcagcctggtgtttctggcctcccccctggtggcc

SEQ ID NO: 1220 - DNA, 66 bp, Homo sapiens
atgtgccaccagcagctggtcatctcctggttctctctggtgtttctggcatctcctctggtggca

SEQ ID NO: 1221 - DNA, 66 bp, Homo sapiens
atgtgccaccagcagctggtcatctcttggttcagcctggtgtttctggcatccccactggtggca

SEQ ID NO: 1222 - protein, 32 aa, Homo sapiens
MGAARSPPSAVPGPLLGLLLLLLGVLAPGGAS

SEQ ID NO: 1223 - protein, 17 aa, Homo sapiens
MSLVLLSLAALCRSAVP

SEQ ID NO: 1224 - protein, 20 aa, Homo sapiens
MPVPWFLLSLALGRSPVVLS

SEQ ID NO: 1225 - protein, 23 aa, Homo sapiens
MTPGKTSLVSLLLLLSLEAIVKA

SEQ ID NO: 1226 - protein, 20 aa, Homo sapiens
MVKYLLLSILGLAFLSEAAA

SEQ ID NO: 1227 - protein, 18 aa, Homo sapiens
MNCRELPLTLWVLISVST

SEQ ID NO: 1228 - protein, 28 aa, Homo sapiens
MRHNWTPDLSPLWVLLLCAHVVTLLVRA

SEQ ID NO: 1229 - protein, 24 aa, Homo sapiens
MKLQCVSLWLLGTILILCSVDNHG

SEQ ID NO: 1230 - protein, 20 aa, Homo sapiens
MYRMQLLSCIALSLALVTNS

SEQ ID NO: 1231 - DNA, 60 bp, Homo sapiens
atgtaccgaatgcaactgctgagctgcatcgccctgagcctggcactcgtgaccaacagc

SEQ ID NO: 1232 - DNA, 60 bp, Homo sapiens
atgtacaggatgcagctgctgagctgcatcgccctgagcctggccctggtgaccaacagc

SEQ ID NO: 1233 - DNA, 60 bp, Homo sapiens
atgtacagaatgcagctgctgagctgcatcgccctgtccctcgccctggtgaccaactcc

SEQ ID NO: 1234 - DNA, 60 bp, Homo sapiens
atgtacaggatgcaactcctgtcttgcattgcactaagtcttgcacttgtcacaaacagt

SEQ ID NO: 1235 - protein, 21 aa, Homo sapiens
MDSYLLMWGLLTFIMVPGCQA

SEQ ID NO: 1236 - protein, 26 aa, Homo sapiens
MAAPALSWRLPLLILLLPLATSWASA

SEQ ID NO: 1237 - protein, 29 aa, Homo sapiens
MQTFTMVLEEIWTSLFMWFFYALIPCLLT

SEQ ID NO: 1238 - protein, 19 aa, Homo sapiens
MPRGWAAPLLLLLLQGGWG

SEQ ID NO: 1239 - protein, 33 aa, Homo sapiens
MAALQKSVSSFLMGTLATSCLLLLALLVQGGAA

SEQ ID NO: 1240 - protein, 21 aa, Homo sapiens
MMPKHCFLGFLISFFLTGVAG

SEQ ID NO: 1241 - protein, 51 aa, Homo sapiens
MNFQQRLQSLWTLARPFCPPLLATASQMQMVVLPCLGFTLLLWSQVSGAQG

SEQ ID NO: 1242 - protein, 32 aa, Homo sapiens
MRERPRLGEDSSLISLFLQVVAFLAMVMGTHT

SEQ ID NO: 1243 - protein, 19 aa, Homo sapiens
MSRLPVLLLLQLLVRPGLQ

SEQ ID NO: 1244 - protein, 19 aa, Homo sapiens
MMWTWALWMLPSLCKFSLA

SEQ ID NO: 1245 - protein, 24 aa, Homo sapiens
MGLTSQLLPPLFFLLACAGNFVHG

SEQ ID NO: 1246 - protein, 19 aa, Homo sapiens
MRMLLHLSLLALGAAYVYA

SEQ ID NO: 1247 - protein, 20 aa, Homo sapiens
MIIVAHVLLILLGATEILQA

SEQ ID NO: 1248 - protein, 29 aa, Homo sapiens
MNSFSTSAFGPVAFSLGLLLVLPAAFPAP

SEQ ID NO: 1249 - protein, 19 aa, Homo sapiens
MLAVGCALLAALLAAPGAA

SEQ ID NO: 1250 - protein, 22 aa, Homo sapiens
MLTLQTWLVQALFIFLTTESTG

SEQ ID NO: 1251 - protein, 25 aa, Homo sapiens
MFHVSFRYIFGLPPLILVLLPVASS

SEQ ID NO: 1252 - protein, 20 aa, Homo sapiens
MTILGTTFGMVFSLLQVVSG

SEQ ID NO: 1253 - protein, 20 aa, Homo sapiens
MTSKLAVALLAAFLISAALC

SEQ ID NO: 1254 - protein, 18 aa, Homo sapiens
MLLAMVLTSALLLCSVAG

SEQ ID NO: 1255 - protein, 17 aa, Homo sapiens
MMREWVLLMSVLLCGLA

SEQ ID NO: 1256 - protein, 19 aa, Homo sapiens
MHSFPPLLLLLFWGVVSHS

SEQ ID NO: 1257 - protein, 19 aa, Homo sapiens
MQGPWVLLLLGLRLQLSLG

SEQ ID NO: 1258 - protein, 27 aa, Homo sapiens
MGTKAQVERKLLCLFILAILLCSLALG

SEQ ID NO: 1259 - protein, 28 aa, Homo sapiens
MARRSRHRLLLLLLRYLVVALGYHKAYG

SEQ ID NO: 1260 - protein, 31 aa, Homo sapiens
MALRRPPRLRLCARLPDFFLLLLFRGCLIGA

SEQ ID NO: 1261 - protein, 19 aa, Homo sapiens
MFCPLKLILLPVLLDYSLG

SEQ ID NO: 1262 - protein, 22 aa, Homo sapiens
MARSLLLPLQILLLSLALETAG

SEQ ID NO: 1263 - protein, 20 aa, Homo sapiens
MKSFLLVVNALALTLPFLAV

SEQ ID NO: 1264 - protein, 30 aa, Homo sapiens
MLPPPRPAAALALPVLLLLLVVLTPPPTGA

SEQ ID NO: 1265 - protein, 31 aa, Homo sapiens
MHKWILTWILPTLLYRSCFHIICLVGTISLA

SEQ ID NO: 1266 - protein, 21 aa, Homo sapiens
MSLLVVSMACVGFFLLQGAWP

SEQ ID NO: 1267 - protein, 20 aa, Homo sapiens
MLRMRVPALLVLLFCFRGRA

SEQ ID NO: 1268 - protein, 18 aa, Homo sapiens
MKLITILFLCSRLLLSLT

SEQ ID NO: 1269 - protein, 25 aa, Homo sapiens
MKKTQTWILTCIYLQLLLFNPLVKT

SEQ ID NO: 1270 - protein, 23 aa, Homo sapiens
MEWWASSPLRLWLLLFLLPSAQG

SEQ ID NO: 1271 - protein, 35 aa, Homo sapiens
MAPARTMARARLAPAGIPAVALWLLCTLGLQGTQA

SEQ ID NO: 1272 - protein, 27 aa, Homo sapiens
MAQLCGLRRSRAFLALLGSLLLSGVLA

SEQ ID NO: 1273 - protein, 23 aa, Homo sapiens
MPRPRLLAALCGALLCAPSLLVA

SEQ ID NO: 1274 - protein, 21 aa, Homo sapiens
MKPVWVATLLWMLLLVPRLGA

SEQ ID NO: 1275 - protein, 19 aa, Homo sapiens
MELSWHVVFIALLSFSCWG

SEQ ID NO: 1276 - protein, 19 aa, Homo sapiens
MKLVFLVLLFLGALGLCLA

SEQ ID NO: 1277 - protein, 21 aa, Homo sapiens
MGLLQLLAFSFLALCRARVRA

SEQ ID NO: 1278 - protein, 33 aa, Homo sapiens
MRGSHRAAPALRPRGRLWPVLAVLAAAAAAGCA

SEQ ID NO: 1279 - protein, 21 aa, Homo sapiens
MAPLALHLLVLVPILLSLVAS

SEQ ID NO: 1280 - protein, 21 aa, Homo sapiens
MICQKFCVVLLHWEFIYVITA

SEQ ID NO: 1281 - protein, 35 aa, Homo sapiens
MSSWSRQRPKSPGGIQPHVSRTLFLLLLLAASAWG

SEQ ID NO: 1282 - protein, 25 aa, Homo sapiens
MARMSFVIAACQLVLGLLMTSLTES

SEQ ID NO: 1283 - protein, 35 aa, Homo sapiens
MGLQTTKWPSHGAFFLKSWLIISLGLYSQVSKLLA

SEQ ID NO: 1284 - protein, 47 aa, Homo sapiens
MGSLQHCCCLLPKMGDTWAQLPWPGPPHPAMLLISLLLAAGLMHSDA

SEQ ID NO: 1285 - protein, 22 aa, Homo sapiens
MKVLAAGVVPLLLVLHWKHGAG

SEQ ID NO: 1286 - protein, 23 aa, Homo sapiens
MYLWLKLLAFGFAFLDTEVFVTG

SEQ ID NO: 1287 - protein, 23 aa, Homo sapiens
MTPILTVLICLGLSLDPRTHVQA

SEQ ID NO: 1288 - protein, 19 aa, Homo sapiens
MATLLLLLGVLVVSPDALG

SEQ ID NO: 1289 - protein, 21 aa, Homo sapiens
MAQVKLQESGTELAKPGAAVK

SEQ ID NO: 1290 - protein, 18 aa, Artificial Sequence
  Description of Artificial Sequence: Synthetic Signal Sequence
MKPLLLAVSLGLIAALQA

SEQ ID NO: 1291 - protein, 25 aa, Homo sapiens
MGALARALPSILLALLLTSTPEALG

SEQ ID NO: 1292 - protein, 27 aa, Homo sapiens
MESKALLVLTLAVWLQSLTASRGGVAA

SEQ ID NO: 1293 - protein, 22 aa, Homo sapiens
MAQTSSYFMLISCLMFLSQSQG

SEQ ID NO: 1294 - protein, 18 aa, Homo sapiens
MWLRAFILATLSASAAWG

SEQ ID NO: 1295 - protein, 33 aa, Homo sapiens
MTMETQMSQNVCPRNLWLLQPLTVLLLLASADS

SEQ ID NO: 1296 - protein, 21 aa, Homo sapiens
MGPWGWKLRWTVALLLAAAGT

SEQ ID NO: 1297 - protein, 28 aa, Homo sapiens
MIFPWKCQSTQRDLWNIFKLWGWTMLCC

SEQ ID NO: 1298 - protein, 18 aa, Homo sapiens
MSLSAFTLFLALIGGTSG

SEQ ID NO: 1299 - protein, 31 aa, Homo sapiens
MEPPDAPAQARGAPRLLLLAVLLAAHPDAQA

SEQ ID NO: 1300 - protein, 20 aa, Homo sapiens
MEMLQGLLLLLLLSMGGAWA

SEQ ID NO: 1301 - protein, 25 aa, Homo sapiens
MAMGVPRVILLCLFGAALCLTGSQA

SEQ ID NO: 1302 - protein, 22 aa, Homo sapiens
MEPGPALAWLLLLSLLADCLKA

SEQ ID NO: 1303 - protein, 21 aa, Homo sapiens
MASRWAVQLLLVAAWSMGCGE

SEQ ID NO: 1304 - protein, 28 aa, Homo sapiens
MWEAQFLGLLFLQPLWVAPVKPLQPGAE

SEQ ID NO: 1305 - protein, 20 aa, Homo sapiens
MRTALLLLAALAVATGPALT

SEQ ID NO: 1306 - protein, 27 aa, Homo sapiens
MRTGWATPRRPAGLLMLLFWFFDLAEP

SEQ ID NO: 1307 - protein, 20 aa, Homo sapiens
MKGFTATLFLWTLIFPSCSG

SEQ ID NO: 1308 - protein, 28 aa, Homo sapiens
MVAGSDAGRALGVLSVVCLLHCFGFISC

SEQ ID NO: 1309 - protein, 34 aa, Homo sapiens
MTPPERLFLPRVCGTTLHLLLLGLLLVLLPGAQG

SEQ ID NO: 1310 - protein, 32 aa, Homo sapiens
MITGVFSMRLWTPVGVLTSLAYCLHQRRVALA

SEQ ID NO: 1311 - protein, 30 aa, Homo sapiens
MAGKRSGWSRAALLQLLLGVNLVVMPPTRA

SEQ ID NO: 1312 - protein, 49 aa, Homo sapiens
MGAYARASGVCARGCLDSAGPWTMSRALRPPLPPLCFFLLLLAAAGARA

SEQ ID NO: 1313 - protein, 28 aa, Homo sapiens
MIRAAPPPLFLLLLLLLLLVSWASRGEA

SEQ ID NO: 1314 - protein, 27 aa, Homo sapiens
MAPRSARRPLLLLLPVAAARPHALSSA

SEQ ID NO: 1315 - protein, 28 aa, Homo sapiens
MVCFRLFPVPGSGLVLVCLVLGAVRSYA

SEQ ID NO: 1316 - protein, 18 aa, Homo sapiens
MKALIVLGLVLLSVTVQG

SEQ ID NO: 1317 - protein, 32 aa, Homo sapiens
MTAPGAAGRCPPTTWLGSLLLLVCLLASRSIT

SEQ ID NO: 1318 - protein, 22 aa, Homo sapiens
MGELMAFLLPLIIVLMVKHSDS

SEQ ID NO: 1319 - protein, 18 aa, Homo sapiens
MKLLMVLMLAALLLHCYA

SEQ ID NO: 1320 - protein, 20 aa, Homo sapiens
MSLFPSLPLLLLSMVAASYS

SEQ ID NO: 1321 - protein, 15 aa, Homo sapiens
MRLILPVGLIATTLA

SEQ ID NO: 1322 - protein, 17 aa, Homo sapiens
MRLTVLCAVCLLPGSLA

SEQ ID NO: 1323 - protein, 19 aa, Homo sapiens
MKSLILLAILAALAVVTLC

SEQ ID NO: 1324 - protein, 19 aa, Homo sapiens
MSLWQPLVLVLLVLGCCFA

SEQ ID NO: 1325 - protein, 24 aa, Homo sapiens
MDLVLKRCLLHLAVIGALLAVGAT

SEQ ID NO: 1326 - protein, 24 aa, Homo sapiens
MARSLVCLGVIILLSAFSGPGVRG

SEQ ID NO: 1327 - protein, 19 aa, Homo sapiens
MRGPSGALWLLLALRTVLG

SEQ ID NO: 1328 - protein, 34 aa, Homo sapiens
MEPPGRRECPFPSWRFPGLLLAAMVLLLYSFSDA

SEQ ID NO: 1329 - protein, 17 aa, Artificial Sequence
  Description of Artificial Sequence: Synthetic Signal Sequence
MKLVNIWLLLLVVLLCG

SEQ ID NO: 1330 - protein, 36 aa, Homo sapiens
MALPTARPLLGSCGTPALGSLLFLLFSLGWVQPSRT

SEQ ID NO: 1331 - protein, 23 aa, Homo sapiens
MAPFEPLASGILLLLWLIAPSRA

SEQ ID NO: 1332 - protein, 26 aa, Homo sapiens
MGAAARTLRLALGLLLLATLLRPADA

SEQ ID NO: 1333 - protein, 23 aa, Homo sapiens
MTPWLGLIVLLGSWSLGDWGAEA

SEQ ID NO: 1334 - protein, 23 aa, Homo sapiens
MGLGPVFLLLAGIFPFAPPGAAA

SEQ ID NO: 1335 - protein, 21 aa, Homo sapiens
MKALLALPLLLLLSTPPCAPQ

SEQ ID NO: 1336 - protein, 20 aa, Homo sapiens
MQHRGFLLLTLLALLALTSA

SEQ ID NO: 1337 - protein, 20 aa, Homo sapiens
MKTLQSTLLLLLLVPLIKPA

SEQ ID NO: 1338 - protein, 19 aa, Homo sapiens
MERASCLLLLLLPLVHVSA

SEQ ID NO: 1339 - protein, 23 aa, Homo sapiens
MTPGTQSPFFLLLLLTVLTVVTG

SEQ ID NO: 1340 - protein, 20 aa, Homo sapiens
MKFLAVLVLLGVSIFLVSAQ

SEQ ID NO: 1341 - protein, 29 aa, Homo sapiens
MAPGAPSSSPSPILAVLLFSSLVLSPAQA

SEQ ID NO: 1342 - protein, 31 aa, Homo sapiens
MQQRGAAGSRGCALFPLLGVLFFQGVYIVFS

SEQ ID NO: 1343 - protein, 19 aa, Homo sapiens
MIFLTALPLFWIMISASRG

SEQ ID NO: 1344 - protein, 29 aa, Homo sapiens
MASLSRPSLPSCLCSFLLLLLLQVSSSYA

SEQ ID NO: 1345 - protein, 25 aa, Homo sapiens
MAHRPPSPALASVLLALLLSGAARA

SEQ ID NO: 1346 - protein, 48 aa, Homo sapiens
MGVPFFSSLRCMVDLGPCWAGGLTAEMKLLLALAGLLAILATPQPSEG

SEQ ID NO: 1347 - protein, 23 aa, Homo sapiens
MARKSNLPVLLVPFLLCQALVRC

SEQ ID NO: 1348 - protein, 26 aa, Homo sapiens
MAAVVAATRWWQLLLVLSAAGMGASG

SEQ ID NO: 1349 - protein, 36 aa, Homo sapiens
MRLLPLAPGRLRRGSPRHLPSCSPALLLLVLGGCLG

SEQ ID NO: 1350 - protein, 21 aa, Homo sapiens
MAQGVLWILLGLLLWSDPGTA

SEQ ID NO: 1351 - protein, 26 aa, Homo sapiens
MDPQTAPSRALLLLLFLHLAFLGGRS

SEQ ID NO: 1352 - protein, 21 aa, Homo sapiens
MLGQVVTLILLLLLKVYQGKG

SEQ ID NO: 1353 - protein, 19 aa, Homo sapiens
MAGPSLACCLLGLLALTSA

SEQ ID NO: 1354 - protein, 19 aa, Homo sapiens
MVVALRYVWPLLLCSPCLL

SEQ ID NO: 1355 - protein, 22 aa, Homo sapiens
MQLTRCCFVFLVQGSLYLVICG

SEQ ID NO: 1356 - protein, 15 aa, Homo sapiens
MLRVLVGAVLPAMLL

SEQ ID NO: 1357 - protein, 26 aa, Homo sapiens
MVSRMVSTMLSGLLFWLASGWTPAFA

SEQ ID NO: 1358 - protein, 41 aa, Homo sapiens
MSRPQGLLWLPLLFTPVCVMLNSNVLLWLTALAIKFTLIDS

SEQ ID NO: 1359 - protein, 24 aa, Homo sapiens
MARRAGGARMFGSLLLFALLAAGV

SEQ ID NO: 1360 - protein, 22 aa, Homo sapiens
MALERLCSVLKVLLITVLVVEG

SEQ ID NO: 1361 - protein, 21 aa, Homo sapiens
MERGLPLLCAVLALVLAPAGA

SEQ ID NO: 1362 - protein, 28 aa, Homo sapiens
MSGSSLPSALALSLLLVSGSLLPGPGAA

SEQ ID NO: 1363 - protein, 33 aa, Homo sapiens
MGVCGYLFLPWKCLVVVSLRLLFLVPTGVPVRS

SEQ ID NO: 1364 - protein, 20 aa, Homo sapiens
MFSLKTLPFLLLLHVQISKA

SEQ ID NO: 1365 - protein, 19 aa, Homo sapiens
MRTLAILAAILLVALQAQA

SEQ ID NO: 1366 - protein, 20 aa, Homo sapiens
MPLGLLWLGLALLGALHAQA

SEQ ID NO: 1367 - protein, 28 aa, Homo sapiens
MLASSSRIRAAWTRALLLPLLLAGPVGC

SEQ ID NO: 1368 - protein, 30 aa, Homo sapiens
MEGDRVAGRPVLSSLPVLLLLQLLMLRAAA

SEQ ID NO: 1369 - protein, 25 aa, Homo sapiens
MAAAAATKILLCLPLLLLLSGWSRA

SEQ ID NO: 1370 - protein, 34 aa, Homo sapiens
MESPSAPPHRWCIPWQRLLLTASLLTFWNPPTTA

SEQ ID NO: 1371 - protein, 27 aa, Homo sapiens
MVPKLFTSQICLLLLLGLLAVEGSLHV

SEQ ID NO: 1372 - protein, 19 aa, Homo sapiens
MRFLAATFLLLALSTAAQA

SEQ ID NO: 1373 - protein, 20 aa, Homo sapiens
MSCPVPACCALLLVLGLCRA

SEQ ID NO: 1374 - protein, 30 aa, Homo sapiens
DVSLCPAKCSFWRIFLLGSVWLDYVGSVLA

SEQ ID NO: 1375 - protein, 29 aa, Homo sapiens
MRAPGRPALRPLPLPPLLLLLLAAPWGRA

SEQ ID NO: 1376 - protein, 28 aa, Homo sapiens
MMVALRGASALLVLFLAAFLPPPQCTQD

SEQ ID NO: 1377 - protein, 24 aa, Homo sapiens
MEYQILKMSLCLFILLFLTPGILC

SEQ ID NO: 1378 - protein, 25 aa, Homo sapiens
MGVLLTQRTLLSLVLALLFPSMASM

SEQ ID NO: 1379 - protein, 17 aa, Homo sapiens
MARILLLFLPGLVAVCA

SEQ ID NO: 1380 - protein, 29 aa, Homo sapiens
MAAARLCLSLLLLSTCVALLLQPLLGAQG

SEQ ID NO: 1381 - protein, 23 aa, Homo sapiens
MKVTGIFLLSALALLSLSGNTGA

SEQ ID NO: 1382 - protein, 16 aa, Homo sapiens
MLPLWTLSLLLGAVAG

SEQ ID NO: 1383 - protein, 25 aa, Homo sapiens
MIPAKDMAKVMIVMLAICFLTKSDG

SEQ ID NO: 1384 - protein, 15 aa, Homo sapiens
MKWLLLLGLVALSEC

SEQ ID NO: 1385 - protein, 27 aa, Homo sapiens
MHGSCSFLMLLLPLLLLLVATTGPVGA

SEQ ID NO: 1386 - protein, 28 aa, Homo sapiens
MVFVRRPWPALTTVLLALLVCLGALVDA

SEQ ID NO: 1387 - protein, 20 aa, Homo sapiens
MGLPGLFCLAVLAASSFSKA

SEQ ID NO: 1388 - protein, 25 aa, Homo sapiens
MKVLLAAALIAGSVFFLLLPGPSAA

SEQ ID NO: 1389 - protein, 21 aa, Homo sapiens
MAARLLLLGILLLLLPLPVPA

SEQ ID NO: 1390 - protein, 24 aa, Homo sapiens
MGPPGSPWQWVTLLLGLLLPPAAP

SEQ ID NO: 1391 - protein, 22 aa, Homo sapiens
MGWTMRLVTAALLLGLMMVVTG

SEQ ID NO: 1392 - protein, 23 aa, Homo sapiens
MSAFRLWPGLLIMLGSLCHRGSP

SEQ ID NO: 1393 - protein, 21 aa, Homo sapiens
MLLAWVQAFLVSNMLLAEAYG

SEQ ID NO: 1394 - protein, 15 aa, Homo sapiens
MKLLVLAVLLTVAAA

SEQ ID NO: 1395 - protein, 20 aa, Homo sapiens
MKTLLLLAVIMIFGLLQAHG

SEQ ID NO: 1396 - protein, 17 aa, Homo sapiens
MALFGALFLALLAGAHA

SEQ ID NO: 1397 - protein, 18 aa, Homo sapiens
MPVMRLFPCFLQLLAGLA

SEQ ID NO: 1398 - protein, 18 aa, Homo sapiens
MRACISLVLAVLCGLAWA

SEQ ID NO: 1399 - protein, 19 aa, Homo sapiens
MILFKQATYFISLFATVSC

SEQ ID NO: 1400 - protein, 22 aa, Homo sapiens
MASRLTLLTLLLLLLAGDRASS

SEQ ID NO: 1401 - protein, 19 aa, Homo sapiens
MQLFLLLCLVLLSPQGASL

SEQ ID NO: 1402 - protein, 19 aa, Homo sapiens
MEHKEVVLLLLLFLKSGQG

SEQ ID NO: 1403 - protein, 23 aa, Homo sapiens
MQMSPALTCLVLGLALVFGEGSA

SEQ ID NO: 1404 - protein, 34 aa, Homo sapiens
MSLRLDTTPSCNSARPLHALQVLLLLSLLLTALA

SEQ ID NO: 1405 - protein, 27 aa, Homo sapiens
MQPRWAQGATMWLGVLLTLLLCSSLEG

SEQ ID NO: 1406 - protein, 31 aa, Homo sapiens
MSSAAGFCASRPGLLFLGLLLLPLVVAFASA

SEQ ID NO: 1407 - protein, 30 aa, Homo sapiens
MSSAARSRLTRATRQEMLFLALLLLPVVVA

SEQ ID NO: 1408 - protein, 16 aa, Homo sapiens
MPLLLLLLLLPSPLHP

SEQ ID NO: 1409 - protein, 26 aa, Homo sapiens
MGSGPRGALSLLLLLLAPPSRPAAGC

SEQ ID NO: 1410 - protein, 16 aa, Homo sapiens
MPAWGALFLLWATAEA

SEQ ID NO: 1411 - protein, 32 aa, Homo sapiens
MGVPTALEAGSWRWGSLLFALFLAASLGPVAA

SEQ ID NO: 1412 - protein, 21 aa, Homo sapiens
MVPPKLHVLFCLCGCLAVVYP

SEQ ID NO: 1413 - protein, 20 aa, Homo sapiens
MRTLACLLLLGCGYLAHVLA

SEQ ID NO: 1414 - protein, 20 aa, Homo sapiens
MNRCWALFLSLCCYLRLVSA

SEQ ID NO: 1415 - protein, 32 aa, Homo sapiens
MQAQQYQQQRRKFAAAFLAFIFILAAVDTAEA

SEQ ID NO: 1416 - protein, 18 aa, Homo sapiens
MLLFVLTCLLAVFPAIST

SEQ ID NO: 1417 - protein, 26 aa, Homo sapiens
MGLGARGAWAALLLGTLQVLALLGAA

SEQ ID NO: 1418 - protein, 25 aa, Homo sapiens
MRKDRLLHLCLVLLLILLSASDSNS

SEQ ID NO: 1419 - protein, 34 aa, Homo sapiens
MGTLSAPPCTQRIKWKGLLLTASLLNFWNLPTTA

SEQ ID NO: 1420 - protein, 34 aa, Homo sapiens
MGPLSAPPCTEHIKWKGLLVTASLLNFWNLPTTA

SEQ ID NO: 1421 - protein, 22 aa, Homo sapiens
MARAPPLLAALTALLAAAAAGG

SEQ ID NO: 1422 - protein, 16 aa, Homo sapiens
MYALFLLASLLGAALA

SEQ ID NO: 1423 - protein, 20 aa, Homo sapiens
MATPRGLGALLLLLLLPTSG

SEQ ID NO: 1424 - protein, 23 aa, Homo sapiens
MRGANAWAPLCLLLAAATQLSRQ

SEQ ID NO: 1425 - protein, 23 aa, Artificial Sequence
  Description of Artificial Sequence: Synthetic Signal Sequence
MKPIQKLLAGLILLTWCVEGCSS

SEQ ID NO: 1426 - protein, 19 aa, Homo sapiens
MIFLLLMLSLELQLHQIAA

SEQ ID NO: 1427 - protein, 19 aa, Homo sapiens
MRGATRVSIMLLLVTVSDC

SEQ ID NO: 1428 - protein, 27 aa, Homo sapiens
MRSLCCAPLLLLLLLPPLLLTPRAGDA

SEQ ID NO: 1429 - protein, 28 aa, Homo sapiens
MNIKGSPWKGSLLLLLVSNLLLCQSVAP

SEQ ID NO: 1430 - protein, 24 aa, Homo sapiens
MKENVASATVFTLLLFLNTCLLNG

SEQ ID NO: 1431 - protein, 28 aa, Homo sapiens
MRLLQLLFRASPATLLLVLCLQLGANKA

SEQ ID NO: 1432 - protein, 27 aa, Homo sapiens
MASSPWGCVCGLLLLLLPLLGTGPALG

SEQ ID NO: 1433 - protein, 17 aa, Homo sapiens
MIWYILIIGILLPQSLA

SEQ ID NO: 1434 - protein, 25 aa, Homo sapiens
MVSRKAVAALLVVHVAAMLASQTEA

SEQ ID NO: 1435 - protein, 28 aa, Homo sapiens
MLGNKRLGLSGLTLALSLLVCLGALAEA

SEQ ID NO: 1436 - protein, 27 aa, Homo sapiens
MITEGAQAPRLLLPPLLLLLTLPATGS

SEQ ID NO: 1437 - protein, 30 aa, Homo sapiens
MGTVSSRRSWWPLPLLLLLLLLLGPAGARA

SEQ ID NO: 1438 - protein, 35 aa, Homo sapiens
MGTVSSRRSWWPLPLLLLLLLLLGPAGARAQEDED

SEQ ID NO: 1439 - protein, 24 aa, Homo sapiens
MPRLFFFHLLGVCLLLNQFSRAVA

SEQ ID NO: 1440 - protein, 23 aa, Homo sapiens
MSRSLLLRFLLFLLLLPPLPVLL

SEQ ID NO: 1441 - protein, 22 aa, Homo sapiens
MATHHTLWMGLALLGVLGDLQA

SEQ ID NO: 1442 - protein, 20 aa, Homo sapiens
MKAVLLALLMAGLALQPGTA

SEQ ID NO: 1443 - protein, 17 aa, Homo sapiens
MWVPVVFLTLSVTWIGA

SEQ ID NO: 1444 - protein, 32 aa, Homo sapiens
MRAAPLLLARAASLSLGFLFLLFFWLDRSVLA

SEQ ID NO: 1445 - protein, 19 aa, Homo sapiens
MRSLGALLLLLSACLAVSA

SEQ ID NO: 1446 - protein, 21 aa, Homo sapiens
MWATQGLAVALALSVLPGSRA

SEQ ID NO: 1447 - protein, 31 aa, Homo sapiens
MAGLSRGSARALLAALLASTLLALLVSPARG

SEQ ID NO: 1448 - protein, 17 aa, Homo sapiens
MLRRALLCLAVAALVRA

SEQ ID NO: 1449 - protein, 24 aa, Homo sapiens
MRLRRLALFPGVALLLAAARLAAA

SEQ ID NO: 1450 - protein, 30 aa, Homo sapiens
MAGSRQRGLRARVRPLFCALLLSLGRFVRG

SEQ ID NO: 1451 - protein, 17 aa, Homo sapiens
MAVFLQLLPLLLSRAQG

SEQ ID NO: 1452 - protein, 21 aa, Homo sapiens
MESRVLLRTFCLIFGLGAVWG

SEQ ID NO: 1453 - protein, 31 aa, Homo sapiens
MQSVQSTSFCLRKQCLCLTFLLLHLLGQVAA

SEQ ID NO: 1454 - protein, 20 aa, Homo sapiens
MVYKTLFALCILTAGWRVQS

SEQ ID NO: 1455 - protein, 21 aa, Homo sapiens
MKVVPSLLLSVLLAQVWLVPG

SEQ ID NO: 1456 - protein, 22 aa, Homo sapiens
MASSIRRGRGAWTRLLSLLLLA

SEQ ID NO: 1457 - protein, 26 aa, Homo sapiens
MAVRELCFPRQRQVLFLFLFWGVSLA

SEQ ID NO: 1458 - protein, 41 aa, Homo sapiens
MANCQIAILYQRFQRVVFGISQLLCFSALISELTNQKEVAA

SEQ ID NO: 1459 - protein, 20 aa, Homo sapiens
MWLCPLALNLILMAASGAVC

SEQ ID NO: 1460 - protein, 20 aa, Homo sapiens
MWLCPLALNLILMAASGAAC

SEQ ID NO: 1461 - protein, 41 aa, Homo sapiens
MVGQMYCYPGSHLARALTRALALALVLALLVGPFLSGLAGA

SEQ ID NO: 1462 - protein, 19 aa, Homo sapiens
MRRLLEPCWWILFLKITSS

SEQ ID NO: 1463 - protein, 26 aa, Homo sapiens
MLPPMALPSVSWMLLSCLILLCQVQG

SEQ ID NO: 1464 - protein, 22 aa, Homo sapiens
MASRSMRLLLLLSCLAKTGVLG

SEQ ID NO: 1465 - protein, 25 aa, Homo sapiens
MARYMLLLLLAVWVLTGELWPGAEA

SEQ ID NO: 1466 - protein, 23 aa, Homo sapiens
MDGWRRMPRWGLLLLLWGSCTFG

SEQ ID NO: 1467 - protein, 26 aa, Homo sapiens
MELALRRSPVPRWLLLLPLLLGLNAG

SEQ ID NO: 1468 - protein, 18 aa, Homo sapiens
MKWVWALLLLAALGSGRA

SEQ ID NO: 1469 - protein, 28 aa, Homo sapiens
MALQRTHSLLLLLLLTLLGLGLVQPSYG

SEQ ID NO: 1470 - protein, 28 aa, Homo sapiens
MALEKSLVRLLLLVLILLVLGWVQPSLG

SEQ ID NO: 1471 - protein, 18 aa, Homo sapiens
MRPLLLLALLGWLLLAEA

SEQ ID NO: 1472 - protein, 16 aa, Homo sapiens
MLLILLSVALLAFSSA

SEQ ID NO: 1473 - protein, 28 aa, Homo sapiens
MGHHRPWLHASVLWAGVASLLLPPAMTQ

SEQ ID NO: 1474 - protein, 40 aa, Homo sapiens
MMLPQNSWHIDFGRCCCHQNLFSAVVTCILLLNSCFLISS

SEQ ID NO: 1475 - protein, 23 aa, Homo sapiens
MQLPLALCLVCLLVHTAFRVVEG

SEQ ID NO: 1476 - protein, 23 aa, Homo sapiens
MLPPAIHFYLLPLACILMKSCLA

SEQ ID NO: 1477 - protein, 20 aa, Homo sapiens
MKLMVLVFTIGLTLLLGVQA

SEQ ID NO: 1478 - protein, 31 aa, Homo sapiens
MGIGRSEGGRRGAALGVLLALGAALLAVGSA

SEQ ID NO: 1479 - protein, 24 aa, Homo sapiens
MLQGPGSLLLLFLASHCCLGSARG

SEQ ID NO: 1480 - protein, 32 aa, Homo sapiens
MVCGSPGGMLLLRAGLLALAALCLLRVPGARA

SEQ ID NO: 1481 - protein, 21 aa, Homo sapiens
MRLSVCLLMVSLALCCYQAHA

SEQ ID NO: 1482 - protein, 20 aa, Homo sapiens
MQPTLLLSLLGAVGLAAVNS

SEQ ID NO: 1483 - protein, 19 aa, Homo sapiens
MWRSLGLALALCLLPSGGT

SEQ ID NO: 1484 - protein, 38 aa, Homo sapiens
MGLRSWLAAPWGALPPRPPLLLLLLLLLLLQPPPPTWA

SEQ ID NO: 1485 - protein, 25 aa, Homo sapiens
MQTPRASPPRPALLLLLLLLGGAHG

SEQ ID NO: 1486 - protein, 23 aa, Artificial Sequence
  Description of Artificial Sequence: Synthetic Signal Sequence
MKPNIIFVLSLLLILEKQAAVMG

SEQ ID NO: 1487 - protein, 23 aa, Homo sapiens
MKSIILFVLSLLLILEKQAAVMG

SEQ ID NO: 1488 - protein, 27 aa, Homo sapiens
MMQKLLKCSRLVLALALILVLESSVQG

SEQ ID NO: 1489 - protein, 23 aa, Homo sapiens
MALSVLRLALLLLAVTFAASLIP

SEQ ID NO: 1490 - protein, 23 aa, Homo sapiens
MKLSGMFLLLSLALFCFLTGVFS

SEQ ID NO: 1491 - protein, 19 aa, Homo sapiens
MRLAVGALLVCAVLGLCLA

SEQ ID NO: 1492 - protein, 18 aa, Homo sapiens
MKWVTFISLLFLFSSAYS

SEQ ID NO: 1493 - protein, 18 aa, Homo sapiens
MKLLTGLVFCSLVLGVSS

SEQ ID NO: 1494 - protein, 18 aa, Homo sapiens
MRLFTGIVFCSLVMGVTS

SEQ ID NO: 1495 - protein, 19 aa, Homo sapiens
MNKPLLWISVLTSLLEAFA

SEQ ID NO: 1496 - protein, 29 aa, Homo sapiens
MESRGPLATSRLLLLLLLLLLRHTRQGWA

SEQ ID NO: 1497 - protein, 47 aa, Homo sapiens
MTGERPSTALPDRRWGPRILGFWGGCRVWVFAAIFLLLSLAASWSKA

SEQ ID NO: 1498 - protein, 18 aa, Homo sapiens
MFALGLPFLVLLVASVES

SEQ ID NO: 1499 - protein, 21 aa, Homo sapiens
MAQHHLWILLLCLQTWPEAAG

SEQ ID NO: 1500 - protein, 21 aa, Homo sapiens
MLWLFQSLLFVFCFGPGNVVS

SEQ ID NO: 1501 - protein, 22 aa, Homo sapiens
MAGSPTCLTLIYILWQLTGSAA

SEQ ID NO: 1502 - protein, 22 aa, Homo sapiens
MVMRPLWSLLLWEALLPITVTG

SEQ ID NO: 1503 - protein, 24 aa, Homo sapiens
MLSCRLQCALAALSIVLALGCVTG

SEQ ID NO: 1504 - protein, 26 aa, Homo sapiens
MATGSRTSLLLAFGLLCLPWLQEGSA

SEQ ID NO: 1505 - protein, 17 aa, Homo sapiens
MRAWIFFLLCLAGRALA

SEQ ID NO: 1506 - protein, 46 aa, Homo sapiens
MPRYGASLRQSCPRSGREQGQDGTAGAPGLLWMGLVLALALALALA

SEQ ID NO: 1507 - protein, 17 aa, Homo sapiens
MLQNSAVLLVLVISASA

SEQ ID NO: 1508 - protein, 19 aa, Homo sapiens
MKFLVFAFILALMVSMIGA

SEQ ID NO: 1509 - protein, 21 aa, Homo sapiens
MPLRKMKIPFLLLFFLWEAES

SEQ ID NO: 1510 - protein, 14 aa, Homo sapiens
MLVLGLLVAGAADG

SEQ ID NO: 1511 - protein, 22 aa, Artificial Sequence
  Description of Artificial Sequence: Synthetic Signal Sequence
MKSLTWILGLWALAACFTPGES

SEQ ID NO: 1512 - protein, 33 aa, Homo sapiens
MAAPALGLVCGRCPELGLVLLLLLLSLLCGAAG

SEQ ID NO: 1513 - protein, 19 aa, Homo sapiens
MGSGLPLVLLLTLLGSSHG

SEQ ID NO: 1514 - protein, 20 aa, Homo sapiens
MKSLSLLLAVALGLATAVSA

SEQ ID NO: 1515 - protein, 18 aa, Homo sapiens
MGTQEGWCLLLCLALSGA

SEQ ID NO: 1516 - protein, 21 aa, Homo sapiens
MDMWTALLILQALLLPSLADG

SEQ ID NO: 1517 - protein, 25 aa, Homo sapiens
MAGPPRLLLLPLLLALARGLPGALA

SEQ ID NO: 1518 - protein, 27 aa, Homo sapiens
MAMLLGASVLILWLQPDWVNSQQKNDD

SEQ ID NO: 1519 - protein, 20 aa, Homo sapiens
IFASLLRAVIASICVVSSMA

SEQ ID NO: 1520 - protein, 20 aa, Homo sapiens
MLLLLVPVLEVIFTLGGTRA

SEQ ID NO: 1521 - protein, 21 aa, Homo sapiens
MGTSLLCWMALCLLGADHADT

SEQ ID NO: 1522 - protein, 20 aa, Homo sapiens
MRWALLVLLAFLSPASQKSS

SEQ ID NO: 1523 - protein, 24 aa, Homo sapiens
MSFPCKFVASFLLIFNVSSKGAVS

SEQ ID NO: 1524 - protein, 16 aa, Homo sapiens
MLFLLLPLLAVLPGDG

SEQ ID NO: 1525 - protein, 19 aa, Homo sapiens
MLLLFLLFEGLCCPGENTA

SEQ ID NO: 1526 - protein, 21 aa, Homo sapiens
MEHSTFLSGLVLATLLSQVSP

SEQ ID NO: 1527 - protein, 22 aa, Homo sapiens
MQSGTHWRVLGLCLLSVGVWGQ

SEQ ID NO: 1528 - protein, 22 aa, Homo sapiens
MEQGKGLAVLILAIILLQGTLA

SEQ ID NO: 1529 - protein, 21 aa, Homo sapiens
MKWKALFTAAILQAQLPITEA

SEQ ID NO: 1530 - protein, 25 aa, Homo sapiens
MNRGVPFRHLLLVLQLALLPAATQG

SEQ ID NO: 1531 - protein, 24 aa, Homo sapiens
MPMGSLQPLATLYLLGMLVASCLG

SEQ ID NO: 1532 - protein, 21 aa, Homo sapiens
MRPRLWLLLAAQLTVLHGNSV

SEQ ID NO: 1533 - protein, 18 aa, Homo sapiens
MLRLLLALNLFPSIQVTG

SEQ ID NO: 1534 - protein, 22 aa, Homo sapiens
MGAMTQLLAGVFLAFLALATEG

SEQ ID NO: 1535 - protein, 30 aa, Homo sapiens
MDCRKMARFSYSVIWIMAISKVFELGLVAG

SEQ ID NO: 1536 - protein, 22 aa, Homo sapiens
MRAPGCGRLVLPLLLLAAAALA

SEQ ID NO: 1537 - protein, 21 aa, Homo sapiens
MELWGAYLLLCLFSLLTQVTT

SEQ ID NO: 1538 - protein, 22 aa, Homo sapiens
MGRGLLRGLWPLHIVLWTRIAS

SEQ ID NO: 1539 - protein, 26 aa, Homo sapiens
METRPRLGATCLLGFSFLLLVISSDG

SEQ ID NO: 1540 - protein, 29 aa, Homo sapiens
MHPAVFLSLPDLRCSLLLLVTWVFTPVTT

SEQ ID NO: 1541 - protein, 18 aa, Homo sapiens
MLGVLVLGALALAGLGFP

SEQ ID NO: 1542 - protein, 21 aa, Homo sapiens
MELTELLLVVMLLLTARLTLS

SEQ ID NO: 1543 - protein, 18 aa, Homo sapiens
MGLAWGLGVLFLMHVCGT

SEQ ID NO: 1544 - protein, 19 aa, Homo sapiens
MNLAISIALLLTVLQVSRG

SEQ ID NO: 1545 - protein, 19 aa, Homo sapiens
MALVLEIFTLLASICWVSA

SEQ ID NO: 1546 - protein, 20 aa, Homo sapiens
MRPADLLQLVLLLDLPRDLG

SEQ ID NO: 1547 - protein, 20 aa, Homo sapiens
MTALFLMSMLFGLACGQAMS

SEQ ID NO: 1548 - protein, 20 aa, Homo sapiens
MSPFLYLVLLVLGLHATIHC

SEQ ID NO: 1549 - protein, 32 aa, Homo sapiens
METPAWPRVPRPETAVARTLLLGWVFAQVAGA

SEQ ID NO: 1550 - protein, 28 aa, Homo sapiens
MIYTMKKVHALWASVCLLLNLAPAPLNA

SEQ ID NO: 1551 - protein, 22 aa, Homo sapiens
MDPARPLGLSILLLFLTEAALG

SEQ ID NO: 1552 - protein, 22 aa, Homo sapiens
MDAMKRGLCCVLLLCGAVFVSP

SEQ ID NO: 1553 - protein, 34 aa, Homo sapiens
MGHTRRQGTSPSKCPYLNFFQLLVLAGLSHFCSG

SEQ ID NO: 1554 - protein, 37 aa, Homo sapiens
MAAAWPSGPSAPEAVTARLVGVLWFVSVTTGPWGAVA

SEQ ID NO: 1555 - protein, 24 aa, Homo sapiens
MTSIFHFAIIFMLILQIRIQLSEE

SEQ ID NO: 1556 - protein, 23 aa, Homo sapiens
MRQTLPCIYFWGGLLPFGMLCAS

SEQ ID NO: 1557 - protein, 23 aa, Homo sapiens
MMSASRLAGTLIPAMAFLSCVRP

SEQ ID NO: 1558 - protein, 20 aa, Homo sapiens
MGDHLDLLLGVVLMAGPVFG

SEQ ID NO: 1559 - protein, 40 aa, Homo sapiens
MVLWESPRQCSSWTLCEGFCWLLLLPVMLLIVARPVKLAA

SEQ ID NO: 1560 - protein, 23 aa, Homo sapiens
MRQSHQLPLVGLLLFSFIPSQLC

SEQ ID NO: 1561 - protein, 18 aa, Homo sapiens
MRHLGAFLFLLGVLGALT

SEQ ID NO: 1562 - protein, 29 aa, Homo sapiens
MPPSGLRLLLLLLPLLWLLVLTPGRPAAG

SEQ ID NO: 1563 - protein, 18 aa, Homo sapiens
MRLLPRLLLLLLLVFPAT

SEQ ID NO: 1564 - protein, 22 aa, Homo sapiens
MGSPGMVLGLLVQIWALQEASS

SEQ ID NO: 1565 - protein, 26 aa, Homo sapiens
MALPPGPAALRHTLLLLPALLSSGWG

SEQ ID NO: 1566 - protein, 33 aa, Homo sapiens
MWGARRSSVSSSWNAASLLQLLLAALLAAGARA

SEQ ID NO: 1567 - protein, 30 aa, Homo sapiens
MAAACGPGAAGYCLLLGLHLFLLTAGPALG

SEQ ID NO: 1568 - protein, 33 aa, Homo sapiens
MATLWGGLLRLGSLLSLSCLALSVLLLAQLSDA

SEQ ID NO: 1569 - protein, 20 aa, Homo sapiens
MASHRLLLLCLAGLVFVSEA

SEQ ID NO: 1570 - protein, 24 aa, Homo sapiens
MATMENKVICALVLVSMLALGTLA

SEQ ID NO: 1571 - protein, 21 aa, Homo sapiens
MAARALCMLGLVLALLSSSSA

SEQ ID NO: 1572 - protein, 19 aa, Homo sapiens
MGLQACLLGLFALILSGKC

SEQ ID NO: 1573 - protein, 15 aa, Homo sapiens
MNPLLILTFVAAALA

SEQ ID NO: 1574 - protein, 15 aa, Homo sapiens
MNLLLILTFVAAAVA

SEQ ID NO: 1575 - protein, 21 aa, Homo sapiens
MWRCPLGLLLLLPLAGHLALG

SEQ ID NO: 1576 - protein, 55 aa, Homo sapiens
MEQRGQNAPAASGARKRHGPGPREARGARPGPRVPKTLVLVVAAVLLLVSAESAL

SEQ ID NO: 1577 - protein, 23 aa, Homo sapiens
MARIPKTLKFVVVIVAVLLPVLA

SEQ ID NO: 1578 - protein, 55 aa, Homo sapiens
MGLWGQSVPTASSARAGRYPGARTASGTRPWLLDPKILKFVVFIVAVLLPVRVDS

SEQ ID NO: 1579 - protein, 21 aa, Homo sapiens
MNKLLCCALVFLDISIKWTTQ

SEQ ID NO: 1580 - protein, 38 aa, Homo sapiens
MEPPGDWGPPPWRSTPKTDVLRLVLYLTFLGAPCYAPA

SEQ ID NO: 1581 - protein, 28 aa, Homo sapiens
MGAGATGRAMDGPRLLLLLLLGVSLGGA

SEQ ID NO: 1582 - protein, 25 aa, Homo sapiens
MAQHGAMGAFRALCGLALLCALSLG

SEQ ID NO: 1583 - protein, 29 aa, Homo sapiens
MALKVLLEQEKTFFTLLVLLGYLSCKVTC

SEQ ID NO: 1584 - protein, 25 aa, Artificial Sequence
  Description of Artificial Sequence: Synthetic Signal Sequence
MKPSLLCRPLSCFLMLLPWPLATLT

SEQ ID NO: 1585 - protein, 21 aa, Homo sapiens
MGLSTVPDLLLPLVLLELLVG

SEQ ID NO: 1586 - protein, 22 aa, Homo sapiens
MAPVAVWAALAVGLELWAAAHA

SEQ ID NO: 1587 - protein, 20 aa, Homo sapiens
MVRLPLQCVLWGCLLTAVHP

SEQ ID NO: 1588 - protein, 29 aa, Homo sapiens
MRALEGPGLSLLCLVLALPALLPVPAVRG

SEQ ID NO: 1589 - protein, 18 aa, Homo sapiens
MRVLLAALGLLFLGALRA

SEQ ID NO: 1590 - protein, 23 aa, Homo sapiens
MGNSCYNIVATLLLVLNFERTRS

SEQ ID NO: 1591 - protein, 26 aa, Homo sapiens
MAHVGDCTQTPWLPVLVVSLMCSARA

SEQ ID NO: 1592 - protein, 17 aa, Homo sapiens
MIILIYLFLLLWEDTQG

SEQ ID NO: 1593 - protein, 21 aa, Homo sapiens
MVWRVPPFLLPILFLASHVGA

SEQ ID NO: 1594 - protein, 23 aa, Homo sapiens
MDSLRKMLISVAMLGAGAGVGYA

SEQ ID NO: 1595 - protein, 22 aa, Homo sapiens
MGHPPLLPLLLLLHTCVPASWG

SEQ ID NO: 1596 - protein, 20 aa, Homo sapiens
MRALLARLLLCVLVVSDSKG

SEQ ID NO: 1597 - protein, 24 aa, Homo sapiens
MGQPSLTWMLMVVVASWFITTAAT

SEQ ID NO: 1598 - protein, 20 aa, Homo sapiens
MYKLASCCLLFIGFLNPLLS

SEQ ID NO: 1599 - protein, 21 aa, Homo sapiens
MKLAVTLTLVTLALCCSSASA

SEQ ID NO: 1600 - protein, 37 aa, Homo sapiens
MVAVLGGRGVLRLRLLLSALKPGIHVPRAGPAAAFGT

SEQ ID NO: 1601 - protein, 24 aa, Homo sapiens
MPGKMVVILGASNILWIMFAASQA

SEQ ID NO: 1602 - protein, 26 aa, Homo sapiens
MNFLLSWVHWSLALLLYLHHAKWSQA

SEQ ID NO: 1603 - protein, 31 aa, Homo sapiens
MHLLGFFSVACSLLAAALLPGPREAPAAAAA

SEQ ID NO: 1604 - protein, 26 aa, Homo sapiens
MVSYWDTGVLLCALLSCLLLTGSSSG

SEQ ID NO: 1605 - protein, 24 aa, Homo sapiens
MQRGAALCLRLWLCLGLLDGLVSG

SEQ ID NO: 1606 - protein, 19 aa, Homo sapiens
MPDTMLPACFLGLLAFSSA

SEQ ID NO: 1607 - protein, 21 aa, Homo sapiens
MKVLISSLLLLLPLMLMSMVS

SEQ ID NO: 1608 - protein, 20 aa, Homo sapiens
MFINIKSILWMCSTLIVTHA

SEQ ID NO: 1609 - protein, 16 aa, Homo sapiens
MKRVLVLLLAVAFGHA

SEQ ID NO: 1610 - protein, 32 aa, Homo sapiens
MWQLTSLLLFVATWGISGTPAPLDSVFSSSER

SEQ ID NO: 1611 - protein, 24 aa, Homo sapiens
MRVLGGRCGALLACLLLVLPVSEA

SEQ ID NO: 1612 - protein, 23 aa, Homo sapiens
MAGCVPLLQGLVLVLALHRVEPS

SEQ ID NO: 1613 - protein, 24 aa, Homo sapiens
MERGAGAKLLPLLLLLRATGFTCA

SEQ ID NO: 1614 - protein, 19 aa, Homo sapiens
MAPLRPLLILALLAWVALA

SEQ ID NO: 1615 - protein, 22 aa, Homo sapiens
MIPARFAGVLLALALILPGTLC

SEQ ID NO: 1616 - protein, 23 aa, Homo sapiens
MAELPGPFLCGALLGFLCLSGLA

SEQ ID NO: 1617 - protein, 19 aa, Homo sapiens
MGILLGLLLLGHLTVDTYG

SEQ ID NO: 1618 - protein, 16 aa, Artificial Sequence
  Description of Artificial Sequence: Synthetic Signal Sequence
MTAEFLSLLCLGLCLG

SEQ ID NO: 1619 - protein, 23 aa, Homo sapiens
MRGTPKTHLLAFSLLCLLSKVRT

SEQ ID NO: 1620 - protein, 28 aa, Homo sapiens
MARKLSVILILTFALSVTNPLHELKAAA

SEQ ID NO: 1621 - protein, 17 aa, Homo sapiens
MVPVLLSLLLLLGPAVP

SEQ ID NO: 1622 - protein, 38 aa, Homo sapiens
MACRQRGGSWSPSGWFNAGWSTYRSISLFFALVTSGNS

SEQ ID NO: 1623 - protein, 16 aa, Homo sapiens
MLTVALLALLCASASG

SEQ ID NO: 1624 - protein, 9 aa, Homo sapiens
SARNRQKRS

SEQ ID NO: 1625 - DNA, 27 bp, Homo sapiens
agcgccaggaatcgccagaagcggtcc

SEQ ID NO: 1626 - protein, 8 aa, Homo sapiens
ARNRQKRS

SEQ ID NO: 1627 - DNA, 24 bp, Homo sapiens
gcccggaatagacagaagagatct

SEQ ID NO: 1628 - protein, 12 aa, Artificial Sequence
  Description of Artificial Sequence: Synthetic Cleavage site sequence
ESRRVRRNKRSK

SEQ ID NO: 1629 - DNA, 36 bp, Artificial Sequence
  Description of Artificial Sequence: Synthetic Cleavage site sequence
gagtctaggcgcgtgcggagaaataagcggagcaag

SEQ ID NO: 1630 - DNA, 36 bp, Artificial Sequence
  Description of Artificial Sequence: Synthetic Cleavage site sequence
gagtctcggagagtgaggcgcaataagaggagcaag

SEQ ID NO: 1631 - DNA, 36 bp, Artificial Sequence
  Description of Artificial Sequence: Synthetic Cleavage site sequence
gagtccaggagagtgcggcgcaacaagaggagcaag

SEQ ID NO: 1632 - DNA, 36 bp, Artificial Sequence
  Description of Artificial Sequence: Synthetic Cleavage site sequence
gagtccaggagagtgcggcgcaacaagcggtctaag

SEQ ID NO: 1633 - DNA, 36 bp, Artificial Sequence
  Description of Artificial Sequence: Synthetic Cleavage site sequence
gagtctcggcgcgtgaggagaaataagagaagcaag

SEQ ID NO: 1634 - DNA, 36 bp, Artificial Sequence
  Description of Artificial Sequence: Synthetic Cleavage site sequence
gagtctaggagagtgcggcgcaataagagaagcaag

SEQ ID NO: 1635 - protein, 14 aa, Artificial Sequence
  Description of Artificial Sequence: Synthetic Cleavage site sequence
SGESRRVRRNKRSK

SEQ ID NO: 1636 - DNA, 42 bp, Artificial Sequence
  Description of Artificial Sequence: Synthetic Cleavage site sequence
agtggtgagtccaggagagtgcggcgcaacaagaggagcaag

SEQ ID NO: 1637 - protein, 19 aa, Artificial Sequence
  Description of Artificial Sequence: Synthetic Cleavage site sequence
ATNFSLLKQAGDVEENPGP

SEQ ID NO: 1638 - DNA, 57 bp, Artificial Sequence
  Description of Artificial Sequence: Synthetic Cleavage site sequence
gctactaacttcagcctgctgaagcaggctggagacgtggaggagaaccctggacct

SEQ ID NO: 1639 - DNA, 57 bp, Artificial Sequence
  Description of Artificial Sequence: Synthetic Cleavage site sequence
gcaaccaattttagtctacttaaacaagcaggtgatgtagaagaaaatccaggtcca

SEQ ID NO: 1640 - protein, 20 aa, Artificial Sequence
  Description of Artificial Sequence: Synthetic Cleavage site sequence
GATNFSLLKQAGDVEENPGP

SEQ ID NO: 1641 - DNA, 60 bp, Artificial Sequence
  Description of Artificial Sequence: Synthetic Cleavage site sequence
ggagctactaacttcagcctgctgaagcaggctggagacgtggaggagaaccctggacct

SEQ ID NO: 1642 - protein, 5 aa, Unknown
  Description of Unknown: Granzyme B sequence
  MOD_RES (5)..(5): Any amino acid
IEPDX

SEQ ID NO: 1643 - protein, 5 aa, Unknown
  Description of Unknown: Enterokinase sequence
DDDDK

SEQ ID NO: 1644 - protein, 6 aa, Unknown
  Description of Unknown: Genenase sequence
PGAAHY

SEQ ID NO: 1645 - protein, 7 aa, Unknown
  Description of Unknown: PreScission protease sequence
LEVFQGP

SEQ ID NO: 1646 - protein, 6 aa, Unknown
  Description of Unknown: Thrombin sequence
LVPRGS

SEQ ID NO: 1647 - protein, 7 aa, Unknown
  Description of Unknown: TEV protease sequence
ENLYFQG

SEQ ID NO: 1648 - protein, 4 aa, Artificial Sequence
  Description of Artificial Sequence: Synthetic peptide
RTKR

SEQ ID NO: 1649 - DNA, 12 bp, Artificial Sequence
  Description of Artificial Sequence: Synthetic Cleavage site sequence
agaacgaagaga

SEQ ID NO: 1650 - protein, 20 aa, Artificial Sequence
  Description of Artificial Sequence: Synthetic Cleavage site sequence
GTGAEDPRPSRKRRSLGDVG

SEQ ID NO: 1651 - protein, 14 aa, Artificial Sequence
  Description of Artificial Sequence: Synthetic Cleavage site sequence
GTGAEDPRPSRKRR

SEQ ID NO: 1652 - protein, 15 aa, Artificial Sequence
  Description of Artificial Sequence: Synthetic Cleavage site sequence
LQWLEQQVAKRRTKR

SEQ ID NO: 1653 - protein, 18 aa, Artificial Sequence
  Description of Artificial Sequence: Synthetic Cleavage site sequence
GTGAEDPRPSRKRRSLGG

SEQ ID NO: 1654 - protein, 17 aa, Artificial Sequence
  Description of Artificial Sequence: Synthetic Cleavage site sequence
GTGAEDPRPSRKRRSLG

SEQ ID NO: 1655 - protein, 14 aa, Artificial Sequence
  Description of Artificial Sequence: Synthetic Cleavage site sequence
SLNLTESHNSRKKR

SEQ ID NO: 1656 - protein, 14 aa, Artificial Sequence
  Description of Artificial Sequence: Synthetic Cleavage site sequence
CKINGYPKRGRKRR

SEQ ID NO: 1657 - protein, 4 aa, Artificial Sequence
  Description of Artificial Sequence: Synthetic Cleavage site sequence
RGDS

SEQ ID NO: 1658 - protein, 8 aa, Artificial Sequence
  Description of Artificial Sequence: Synthetic Cleavage site sequence
SARNRRKR

SEQ ID NO: 1659 - protein, 21 aa, Artificial Sequence
  Description of Artificial Sequence: Synthetic Cleavage site sequence
GSGEGRGSLLTCGDVEENPGP

SEQ ID NO: 1660 - protein, 22 aa, Artificial Sequence
  Description of Artificial Sequence: Synthetic Cleavage site sequence
GSGATNFSLLKQAGDVEENPGP

SEQ ID NO: 1661 - protein, 23 aa, Artificial Sequence
  Description of Artificial Sequence: Synthetic Cleavage site sequence
GSGQCTNYALLKLAGDVESNPGP

SEQ ID NO: 1662 - protein, 25 aa, Artificial Sequence
  Description of Artificial Sequence: Synthetic Cleavage site sequence
GSGVKQTLNFDLLKLAGDVESNPGP

SEQ ID NO: 1663 - protein, 15 aa, Artificial Sequence
  Description of Artificial Sequence: Synthetic Tag
GLNDIFEAQKIEWHE

SEQ ID NO: 1664 - protein, 130 aa, Artificial Sequence
  Description of Artificial Sequence: Synthetic Tag
MLRKFKISIDGKEYLVEMEEISESSVPAATPITPTTENTRAASDQKQQSQTPSPAATASAANTMPAPMPGTILKVLVNVGDTVSENQPLMILEAMKMENEIVAGMAGTVSAIHVSSGQTVNAGDNLITIA

SEQ ID NO: 1665 - protein, 26 aa, Artificial Sequence
  Description of Artificial Sequence: Synthetic Tag
KRRWKKNFIAVSAANRFKKISSSGAL

SEQ ID NO: 1666 - protein, 50 aa, Artificial Sequence
  Description of Artificial Sequence: Synthetic Tag
TNPGVSAWQVNTAYTAQLVTYNGKTYKCLQPHTSLAGWEPSNVPALWQLQ

SEQ ID NO: 1667 - protein, 13 aa, Artificial Sequence
  Description of Artificial Sequence: Synthetic Tag
GAPVPYPDPLEPR

SEQ ID NO: 1668 - protein, 296 aa, Artificial Sequence
  Description of Artificial Sequence: Synthetic Tag
MLLWTAVLFLAPVAGTPAAPPKAVLKLEPQWINVLQEDSVTLTCRGTHSPESDSIQWFHNGNLIPTHTQPSYRFKANNNDSGEYTCQTGQTSLSDPVHLTVLSEWLVLQTPHLEFQEGETIVLRCHSWKDKPLVKVTFFQNGKSKKFSRSDPNFSIPQANHSHSGDYHCTGNIGYTLYSSKPVTITVQAPSSSPMGIIVAVVTGIAVAAIVAAVVALIYCRKKRISANSTDPVKAAQFEPPGRQMIAIRKRQPEETNNDYETADGGYMTLNPRAPTDDDKNIYLTLPPNDHVNSNN

SEQ ID NO: 1669 - protein, 8 aa, Artificial Sequence
  Description of Artificial Sequence: Synthetic Tag
DYKDDDDK

SEQ ID NO: 1670 - DNA, 24 bp, Artificial Sequence
  Description of Artificial Sequence: Synthetic Tag
gactacaaagacgatgacgacaag

SEQ ID NO: 1671 - DNA, 24 bp, Artificial Sequence
  Description of Artificial Sequence: Synthetic Tag
gactacaaggacgatgacgacaag

SEQ ID NO: 1672 - DNA, 24 bp, Artificial Sequence
  Description of Artificial Sequence: Synthetic Tag
gattataaagatgatgatgataaa

SEQ ID NO: 1673 - DNA, 24 bp, Artificial Sequence
  Description of Artificial Sequence: Synthetic Tag
gattataaagacgacgatgataag

SEQ ID NO: 1674 - protein, 238 aa, Artificial Sequence
  Description of Artificial Sequence: Synthetic Tag
MSKGEELFTGVVPILVELDGDVNGHKFSVSGEGEGDATYGKLTLKFICTTGKLPVPWPTLVTTFAYGVQCFSRYPDHMKRHDFFKSAMPEGYVQERTIFFKDDGNYKTRAEVKFEGDTLVNRIELKGIDFKEDGNILGHKLEYNYNSHNVYIMADKQKNGIKVNFKIRHNIEDGSVQLADHYQQNTPIGDGPVLLPDNHYLSTQSVLSKDPNEKRDHMVLLEFVTAAGITHGMDELYK

SEQ ID NO: 1675 - protein, 239 aa, Artificial Sequence
  Description of Artificial Sequence: Synthetic Tag
MVSKGEELFTGVVPILVELDGDVNGHKFSVSGEGEGDATYGKLTLKFICTTGKLPVPWPTLVTTLTWGVQCFSRYPDHMKQHDFFKSAMPEGYVQERTIFFKDDGNYKTRAEVKFEGDTLVNRIELKGIDFKEDGNILGHKLEYNYISHNVYITADKQKNGIKANFKIRHNIEDGSVQLADHYQQNTPIGDGPVLLPDNHYLSTQSALSKDPNEKRDHMVLLEFVTAAGITLGMDELYK

SEQ ID NO: 1676 - protein, 225 aa, Artificial Sequence
  Description of Artificial Sequence: Synthetic Tag
MASSEDVIKEFMRFKVRMEGSVNGHEFEIEGEGEGRPYEGTQTAKLKVTKGGPLPFAWDILSPQFQYGSKAYVKHPADIPDYLKLSFPEGFKWERVMNFEDGGVVTVTQDSSLQDGEFIYKVKLRGTNFPSDGPVMQKKTMGWEASTERMYPEDGALKGEIKMRLKLKDGGHYDAEVKTTYMAKKPVQLPGAYKTDIKLDITSHNEDYTIVEQYERAEGRHSTGA

SEQ ID NO: 1677 - protein, 239 aa, Artificial Sequence
  Description of Artificial Sequence: Synthetic Tag
MVSKGEELFTGVVPILVELDGDVNGHKFSVSGEGEGDATYGKLTLKFICTTGKLPVPWPTLVTTFGYGLQCFARYPDHMKQHDFFKSAMPEGYVQERTIFFKDDGNYKTRAEVKFEGDTLVNRIELKGIDFKEDGNILGHKLEYNYNSHNVYIMADKQKNGIKVNFKIRHNIEDGSVQLADHYQQNTPIGDGPVLLPDNHYLSYQSALSKDPNEKRDHMVLLEFVTAAGITLGMDELYK

SEQ ID NO: 1678 - protein, 201 aa, Artificial Sequence
  Description of Artificial Sequence: Synthetic Tag
MKLFYKPGACSLASHITLRESGKDFTLVSVDLMKKRLENGDNYFAVNPKGQVPALLLDDGTLLTEGVAIMQYLADSVPDRQLLAPVNSISRYKTIEWLNYIATELHKGFTPLFRPDTPEEYKSTVRAQLEKKLQYVNEALKDEHWICGQRFTIADAYLFTVLRWAYAVKLNLEGLEHIAAFMQRMAERPEVQDALSAEGLK

SEQ ID NO: 1679 - protein, 90 aa, Artificial Sequence
  Description of Artificial Sequence: Synthetic Tag
MVARTLSATTGELPSRGCSRRIVPISSASDGVHALVLHQRAIGSAGVDATAHYVSGPYRRETLVGTSHWIPDEEPEKLARLVLEHIAAHG

SEQ ID NO: 1680 - protein, 19 aa, Artificial Sequence
  Description of Artificial Sequence: Synthetic Tag
KDHLIHNVHKEFHAHAHNK

SEQ ID NO: 1681 - protein, 9 aa, Artificial Sequence
  Description of Artificial Sequence: Synthetic Tag
YPYDVPDYA

SEQ ID NO: 1682 - DNA, 27 bp, Artificial Sequence
  Description of Artificial Sequence: Synthetic Tag
tacccatacgatgttccagattacgct

SEQ ID NO: 1683 - DNA, 27 bp, Artificial Sequence
  Description of Artificial Sequence: Synthetic Tag
tatccttacgatgtgcccgactatgct

SEQ ID NO: 1684 - DNA, 27 bp, Artificial Sequence
  Description of Artificial Sequence: Synthetic Tag
tatccgtacgacgtaccagactacgca

SEQ ID NO: 1685 - protein, 16 aa, Artificial Sequence
  Description of Artificial Sequence: Synthetic Tag
TDKDMTITFTNKKDAE

SEQ ID NO: 1686 - protein, 396 aa, Artificial Sequence
  Description of Artificial Sequence: Synthetic Tag
MKIKTGARILALSALTTMMFSASALAKIEEGKLVIWINGDKGYNGLAEVGKKFEKDTGIKVTVEHPDKLEEKFPQVAATGDGPDIIFWAHDRFGGYAQSGLLAEITPDKAFQDKLYPFTWDAVRYNGKLIAYPIAVEALSLIYNKDLLPNPPKTWEEIPALDKELKAKGKSALMFNLQEPYFTWPLIAADGGYAFKYENGKYDIKDVGVDNAGAKAGLTFLVDLIKNKHMNADTDYSIAEAAFNKGETAMTINGPWAWSNIDTSKVNYGVTVLPTFKGQPSKPFVGVLSAGINAASPNKELAKEFLENYLLTDEGLEAVNKDKPLGAVALKSYEEELAKDPRIAATMENAQKGEIMPNIPQMSAFWYAVRTAVINAASGRQTVDEALKDAQTRITK

SEQ ID NO: 1687 - protein, 10 aa, Artificial Sequence
  Description of Artificial Sequence: Synthetic Tag
EQKLISEEDL

SEQ ID NO: 1688 - protein, 6 aa, Artificial Sequence
  Description of Artificial Sequence: Synthetic Tag
HHHHHH

SEQ ID NO: 1689 - protein, 5 aa, Artificial Sequence
  Description of Artificial Sequence: Synthetic Tag
RRRRR

SEQ ID NO: 1690 - protein, 6 aa, Artificial Sequence
  Description of Artificial Sequence: Synthetic Tag
EEEEEE

SEQ ID NO: 1691 - protein, 38 aa, Artificial Sequence
  Description of Artificial Sequence: Synthetic Tag
MDEKTTGWRGGHVVEGLAGELEQLRARLEHHPQGQREP

SEQ ID NO: 1692 - protein, 12 aa, Artificial Sequence
  Description of Artificial Sequence: Synthetic Tag
KLGDIEFIKVNK

SEQ ID NO: 1693 - protein, 13 aa, Artificial Sequence
  Description of Artificial Sequence: Synthetic Tag
SLAELLNAGLGGS

SEQ ID NO: 1694 - protein, 13 aa, Artificial Sequence
  Description of Artificial Sequence: Synthetic Tag
AHIVMVDAYKPTK

SEQ ID NO: 1695 - protein, 15 aa, Artificial Sequence
  Description of Artificial Sequence: Synthetic Tag
KETAAAKFERQHMDS

SEQ ID NO: 1696 - protein, 8 aa, Artificial Sequence
  Description of Artificial Sequence: Synthetic Tag
WSHPQFEK

SEQ ID NO: 1697 - protein, 6 aa, Artificial Sequence
  Description of Artificial Sequence: Synthetic Tag
CCPGCC

SEQ ID NO: 1698 - protein, 139 aa, Artificial Sequence
  Description of Artificial Sequence: Synthetic Tag
MNTVCTHCQAINRIPDDRIEDAAKCGRCGHDLFDGEVINATGETLDKLLKDDLPVVIDFWAPWCGPCRNFAPIFEDVAQERSGKVRFVKVNTEAERELSSRFGIRSIPTIMIFKNGQVVDMLNGAVPKAPFDSWLNESL

SEQ ID NO: 1699 - protein, 14 aa, Artificial Sequence
  Description of Artificial Sequence: Synthetic Tag
GKPIPNPLLGLDST

SEQ ID NO: 1700 - DNA, 42 bp, Artificial Sequence
  Description of Artificial Sequence: Synthetic Tag
ggtaagcctatccctaaccctctcctcggtctcgattctacg

SEQ ID NO: 1701 - protein, 11 aa, Artificial Sequence
  Description of Artificial Sequence: Synthetic Tag
YTDIEMNRLGK

SEQ ID NO: 1702 - protein, 8 aa, Artificial Sequence
  Description of Artificial Sequence: Synthetic Tag
DLYDDDDK

SEQ ID NO: 1703 - protein, 4 aa, Artificial Sequence
  Description of Artificial Sequence: Synthetic Linker
GGGG

SEQ ID NO: 1704 - protein, 6 aa, Artificial Sequence
  Description of Artificial Sequence: Synthetic Linker
GGGGGG

SEQ ID NO: 1705 - protein, 8 aa, Artificial Sequence
  Description of Artificial Sequence: Synthetic Linker
GGGGGGGG

SEQ ID NO: 1706 - protein, 4 aa, Artificial Sequence
  Description of Artificial Sequence: Synthetic Linker
GGGS

SEQ ID NO: 1707 - protein, 5 aa, Artificial Sequence
  Description of Artificial Sequence: Synthetic Linker
GGGGS

SEQ ID NO: 1708 - protein, 10 aa, Artificial Sequence
  Description of Artificial Sequence: Synthetic Linker
GGGGSGGGGS

SEQ ID NO: 1709 - protein, 15 aa, Artificial Sequence
  Description of Artificial Sequence: Synthetic Linker
GGGGSGGGGSGGGGS

SEQ ID NO: 1710 - DNA, 45 bp, Artificial Sequence
  Description of Artificial Sequence: Synthetic Linker
ggaggaggaggatccggaggaggaggatctggcggcggcggcagc

SEQ ID NO: 1711 - DNA, 45 bp, Artificial Sequence
  Description of Artificial Sequence: Synthetic Linker
ggaggaggaggatccggaggaggaggatctggcggaggaggcagc

SEQ ID NO: 1712 - DNA, 45 bp, Artificial Sequence
  Description of Artificial Sequence: Synthetic Linker
ggaggaggaggaagcggaggaggaggatccggcggaggaggctct

SEQ ID NO: 1713 - DNA, 45 bp, Artificial Sequence
  Description of Artificial Sequence: Synthetic Linker
ggaggaggaggcagcggaggaggaggttctggaggaggcggcagc

SEQ ID NO: 1714 - DNA, 45 bp, Artificial Sequence
  Description of Artificial Sequence: Synthetic Linker
ggcggcggcggctctggaggaggaggcagcggcggaggaggctcc

SEQ ID NO: 1715 - DNA, 45 bp, Artificial Sequence
  Description of Artificial Sequence: Synthetic Linker
ggaggaggaggcagcggcggaggaggctccggcggcggcggctct

SEQ ID NO: 1716 - protein, 20 aa, Artificial Sequence
  Description of Artificial Sequence: Synthetic Linker
GGGGSGGGGSGGGGSGGGGS

SEQ ID NO: 1717 - protein, 36 aa, Artificial Sequence
  Description of Artificial Sequence: Synthetic Linker
GGSGGGSEGGGSEGGGSEGGGSEGGGSEGGGSGGGS

SEQ ID NO: 1718 - protein, 5 aa, Artificial Sequence
  Description of Artificial Sequence: Synthetic Linker
SSSSG

SEQ ID NO: 1719 - protein, 10 aa, Artificial Sequence
  Description of Artificial Sequence: Synthetic Linker
SSSSGSSSSG

SEQ ID NO: 1720 - protein, 13 aa, Artificial Sequence
  Description of Artificial Sequence: Synthetic Linker
SGSSSSGSSSSGS

SEQ ID NO: 1721 - protein, 15 aa, Artificial Sequence
  Description of Artificial Sequence: Synthetic Linker
SSSSGSSSSGSSSSG

SEQ ID NO: 1722 - protein, 19 aa, Artificial Sequence
  Description of Artificial Sequence: Synthetic Linker
SVTVSSSGSSSSGSSSSGS

SEQ ID NO: 1723 - protein, 20 aa, Artificial Sequence
  Description of Artificial Sequence: Synthetic Linker
SSSSGSSSSGSSSSGSSSSG

SEQ ID NO: 1724 - protein, 25 aa, Artificial Sequence
  Description of Artificial Sequence: Synthetic Linker
SSSSGSSSSGSSSSGSSSSGSSSSG

SEQ ID NO: 1725 - protein, 6 aa, Artificial Sequence
  Description of Artificial Sequence: Synthetic Linker
EFSTEF

SEQ ID NO: 1726 - DNA, 18 bp, Artificial Sequence
  Description of Artificial Sequence: Synthetic Linker
gagttctccaccgagttc

SEQ ID NO: 1727 - DNA, 18 bp, Artificial Sequence
  Description of Artificial Sequence: Synthetic Linker
gagttcagcaccgagttt

SEQ ID NO: 1728 - protein, 5 aa, Artificial Sequence
  Description of Artificial Sequence: Synthetic Linker
GGSGG

SEQ ID NO: 1729 - DNA, 15 bp, Artificial Sequence
  Description of Artificial Sequence: Synthetic Linker
ggaggcagcggagga

SEQ ID NO: 1730 - DNA, 15 bp, Artificial Sequence
  Description of Artificial Sequence: Synthetic Linker
ggaggctctggagga

SEQ ID NO: 1731 - DNA, 15 bp, Artificial Sequence
  Description of Artificial Sequence: Synthetic Linker
ggaggctccggcgga

SEQ ID NO: 1732 - DNA, 15 bp, Artificial Sequence
  Description of Artificial Sequence: Synthetic Linker
ggaggatccggaggc

SEQ ID NO: 1733 - DNA, 15 bp, Artificial Sequence
  Description of Artificial Sequence: Synthetic Linker
ggaggatctggagga

SEQ ID NO: 1734 - DNA, 15 bp, Artificial Sequence
  Description of Artificial Sequence: Synthetic Linker
ggtggatccggagga

SEQ ID NO: 1735 - protein, 4 aa, Artificial Sequence
  Description of Artificial Sequence: Synthetic Linker
GGSG

SEQ ID NO: 1736 - DNA, 12 bp, Artificial Sequence
  Description of Artificial Sequence: Synthetic Linker
ggaggatctgga

SEQ ID NO: 1737 - DNA, 12 bp, Artificial Sequence
  Description of Artificial Sequence: Synthetic Linker
ggtggatccgga

SEQ ID NO: 1738 - DNA, 18 bp, Artificial Sequence
  Description of Artificial Sequence: Synthetic Linker
ggtggctctggtggtggt

SEQ ID NO: 1739 - DNA, 18 bp, Artificial Sequence
  Description of Artificial Sequence: Synthetic Linker
ggaggtagtggtggaggc

SEQ ID NO: 1740 - protein, 6 aa, Artificial Sequence
  Description of Artificial Sequence: Synthetic Linker
GGSGGG

SEQ ID NO: 1741 - protein, 26 aa, Artificial Sequence
  Description of Artificial Sequence: Synthetic Linker
SGGGSGGGGSGGGGSGGGGSGGGSLQ

SEQ ID NO: 1742 - DNA, 78 bp, Artificial Sequence
  Description of Artificial Sequence: Synthetic Linker
tcaggtggcggtagtggtgggggaggatctggaggcggaggaagcgggggtggaggttcaggaggagggagcttgcaa

SEQ ID NO: 1743 - DNA, 78 bp, Artificial Sequence
  Description of Artificial Sequence: Synthetic Linker
tcaggtggcggtagtggtgggggaggatctggaggcggaggaagcgggggtggaggttcaggtggaggcagcttgcaa

SEQ ID NO: 1744 - DNA, 78 bp, Artificial Sequence
  Description of Artificial Sequence: Synthetic Linker
tccggtggaggtagcggtggagggggttctggtggaggaggttctggaggtggaggttctggcggtgggtccttgcaa

SEQ ID NO: 1745 - DNA, 78 bp, Artificial Sequence
  Description of Artificial Sequence: Synthetic Linker
tctggcggaggaagcggaggcggaggatctggtggtggtggatctggcggcggtggtagtggcggaggttctctgcaa

SEQ ID NO: 1746 - DNA, 78 bp, Artificial Sequence
  Description of Artificial Sequence: Synthetic Linker
tccggggggggtagcgggggagggggttccggcgggggagggtctggagggggaggttccggcggggggtccttgcaa

SEQ ID NO: 1747 - DNA, 78 bp, Artificial Sequence
  Description of Artificial Sequence: Synthetic Linker
tctggcggaggatctggaggaggcggatctggaggaggaggcagtggaggcggaggatctggcggaggatctctgcag

SEQ ID NO: 1748 - protein, 5 aa, Artificial Sequence
  Description of Artificial Sequence: Synthetic Linker
SGGGS

SEQ ID NO: 1749 - DNA, 15 bp, Artificial Sequence
  Description of Artificial Sequence: Synthetic Linker
tcaggtggcggtagt

SEQ ID NO: 1750 - DNA, 15 bp, Artificial Sequence
  Description of Artificial Sequence: Synthetic Linker
agcggcggtggcagc

SEQ ID NO: 1751 - DNA, 15 bp, Artificial Sequence
  Description of Artificial Sequence: Synthetic Linker
tcaggcggggggagt

SEQ ID NO: 1752 - protein, 20 aa, Artificial Sequence
  Description of Artificial Sequence: Synthetic Linker
SGGGSGGGGSGGGGSGGGGS

SEQ ID NO: 1753 - DNA, 60 bp, Artificial Sequence
  Description of Artificial Sequence: Synthetic Linker
agtggtggcgggtccggcggtggtggtagcgggggtggaggctcaggtggcggtggcagt

SEQ ID NO: 1754 - protein, 9 aa, Artificial Sequence
  Description of Artificial Sequence: Synthetic Linker
GGSGGGSGG

SEQ ID NO: 1755 - DNA, 27 bp, Artificial Sequence
  Description of Artificial Sequence: Synthetic Linker
ggaggtagtggtggaggcagtggtgga

SEQ ID NO: 1756 - protein, 5 aa, Artificial Sequence
  Description of Artificial Sequence: Synthetic Linker
GGGGG

SEQ ID NO: 1757 - protein, 25 aa, Artificial Sequence
  Description of Artificial Sequence: Synthetic Linker
GGGGSGGGGSGGGGSGGGGSGGGGS

SEQ ID NO: 1758 - protein, 30 aa, Artificial Sequence
  Description of Artificial Sequence: Synthetic Linker
GGGGSGGGGSGGGGSGGGGSGGGGSGGGGS

SEQ ID NO: 1759 - protein, 10 aa, Artificial Sequence
  Description of Artificial Sequence: Synthetic Linker
SSSSGSSSSG

SEQ ID NO: 1760 - protein, 30 aa, Artificial Sequence
  Description of Artificial Sequence: Synthetic Linker
SSSSGSSSSGSSSSGSSSSGSSSSGSSSSG

SEQ ID NO: 1761 - protein, 34 aa, Artificial Sequence
  Description of Artificial Sequence: Synthetic Linker
SGGGSGGGGSGGGGSGGGGSGGGGSGGGGSGGGS

SEQ ID NO: 1762 - DNA, 102 bp, Artificial Sequence
  Description of Artificial Sequence: Synthetic Linker
tctggtggcgggagtggaggaggtgggtccggagggggagggagcggtggtggaggttccggcggggggggtagtggaggcggagggtcaggtgggggcagc

SEQ ID NO: 1763 - protein, 36 aa, Artificial Sequence
  Description of Artificial Sequence: Synthetic Linker
GGSAGGSGSGSSGGSSGASGTGTAGGTGSGSGTGSG

SEQ ID NO: 1764 - protein, 5 aa, Artificial Sequence
  Description of Artificial Sequence: Synthetic Linker
PAPAP

SEQ ID NO: 1765 - protein, 10 aa, Artificial Sequence
  Description of Artificial Sequence: Synthetic Linker
APAPAPAPAP

SEQ ID NO: 1766 - protein, 12 aa, Artificial Sequence
  Description of Artificial Sequence: Synthetic Linker
APAPAPAPAPAP

SEQ ID NO: 1767 - protein, 14 aa, Artificial Sequence
  Description of Artificial Sequence: Synthetic Linker
APAPAPAPAPAPAP

SEQ ID NO: 1768 - protein, 16 aa, Artificial Sequence
  Description of Artificial Sequence: Synthetic Linker
APAPAPAPAPAPAPAP

SEQ ID NO: 1769 - protein, 18 aa, Artificial Sequence
  Description of Artificial Sequence: Synthetic Linker
APAPAPAPAPAPAPAPAP

SEQ ID NO: 1770 - protein, 20 aa, Artificial Sequence
  Description of Artificial Sequence: Synthetic Linker
APAPAPAPAPAPAPAPAPAP

SEQ ID NO: 1771 - protein, 22 aa, Artificial Sequence
  Description of Artificial Sequence: Synthetic Linker
APAPAPAPAPAPAPAPAPAPAP

SEQ ID NO: 1772 - protein, 24 aa, Artificial Sequence
  Description of Artificial Sequence: Synthetic Linker
APAPAPAPAPAPAPAPAPAPAPAP

SEQ ID NO: 1773 - protein, 26 aa, Artificial Sequence
  Description of Artificial Sequence: Synthetic Linker
APAPAPAPAPAPAPAPAPAPAPAPAP

SEQ ID NO: 1774 - protein, 28 aa, Artificial Sequence
  Description of Artificial Sequence: Synthetic Linker
APAPAPAPAPAPAPAPAPAPAPAPAPAP

SEQ ID NO: 1775 - protein, 30 aa, Artificial Sequence
  Description of Artificial Sequence: Synthetic Linker
APAPAPAPAPAPAPAPAPAPAPAPAPAPAP

SEQ ID NO: 1776 - protein, 32 aa, Artificial Sequence
  Description of Artificial Sequence: Synthetic Linker
APAPAPAPAPAPAPAPAPAPAPAPAPAPAPAP

SEQ ID NO: 1777 - protein, 33 aa, Artificial Sequence
  Description of Artificial Sequence: Synthetic Linker
EPEPEPEPIPEPPKEAPVVIEKPKPKPKPKPKP

SEQ ID NO: 1778 - protein, 34 aa, Artificial Sequence
  Description of Artificial Sequence: Synthetic Linker
APAPAPAPAPAPAPAPAPAPAPAPAPAPAPAPAP

SEQ ID NO: 1779 - protein, 5 aa, Artificial Sequence
  Description of Artificial Sequence: Synthetic Linker
EAAAK

SEQ ID NO: 1780 - protein, 10 aa, Artificial Sequence
  Description of Artificial Sequence: Synthetic Linker
EAAAKEAAAK

SEQ ID NO: 1781 - protein, 12 aa, Artificial Sequence
  Description of Artificial Sequence: Synthetic Linker
AEAAAKEAAAKA

SEQ ID NO: 1782 - protein, 15 aa, Artificial Sequence
  Description of Artificial Sequence: Synthetic Linker
EAAAKEAAAKEAAAK

SEQ ID NO: 1783 - protein, 17 aa, Artificial Sequence
  Description of Artificial Sequence: Synthetic Linker
AEAAAKEAAAKEAAAKA

SEQ ID NO: 1784 - protein, 22 aa, Artificial Sequence
  Description of Artificial Sequence: Synthetic Linker
AEAAAKEAAAKEAAAKEAAAKA

SEQ ID NO: 1785 - protein, 27 aa, Artificial Sequence
  Description of Artificial Sequence: Synthetic Linker
AEAAAKEAAAKEAAAKEAAAKEAAAKA

SEQ ID NO: 1786 - protein, 46 aa, Artificial Sequence
  Description of Artificial Sequence: Synthetic Linker
AEAAAKEAAAKEAAAKEAAAKALEAEAAAKEAAAKEAAAKEAAAKA

SEQ ID NO: 1787 - protein, 12 aa, Artificial Sequence
  Description of Artificial Sequence: Synthetic Linker
GKSSGSGSESKS

SEQ ID NO: 1788 - protein, 15 aa, Artificial Sequence
  Description of Artificial Sequence: Synthetic Linker
GGSTSGSGKSSEGKG

SEQ ID NO: 1789 - protein, 19 aa, Artificial Sequence
  Description of Artificial Sequence: Synthetic Linker
GSTSGSGKSSSEGSGSTKG

SEQ ID NO: 1790 - protein, 13 aa, Artificial Sequence
  Description of Artificial Sequence: Synthetic Linker
VDYPYDVPDYALD

SEQ ID NO: 1791 - DNA, 39 bp, Artificial Sequence
  Description of Artificial Sequence: Synthetic Linker
gtcgactatccctacgatgttccggactacgcactggac

SEQ ID NO: 1792 - protein, 14 aa, Artificial Sequence
  Description of Artificial Sequence: Synthetic Linker
EGKSSGSGSESKEF

SEQ ID NO: 1793 - protein, 35 aa, Artificial Sequence
  Description of Artificial Sequence: Synthetic Linker
SGGGSGGGGSGGGGSGGGGSGGGSLQYPYDVPDYA

SEQ ID NO: 1794 - DNA, 105 bp, Artificial Sequence
  Description of Artificial Sequence: Synthetic Linker
tcaggtggcggtagtggtgggggaggatctggaggcggaggaagcgggggtggaggttcaggtggaggcagcttgcaatacccatacgatgttccagattacgct

SEQ ID NO: 1795 - protein, 8 aa, Artificial Sequence
  Description of Artificial Sequence: Synthetic Linker
DYKDDDDK

SEQ ID NO: 1796 - DNA, 24 bp, Artificial Sequence
  Description of Artificial Sequence: Synthetic Linker
gactacaaagacgatgacgacaag

SEQ ID NO: 1797 - protein, 34 aa, Artificial Sequence
  Description of Artificial Sequence: Synthetic Linker
SGGGSGGGGSGGGGSGGGGSYPYDVPDYASGGGS

SEQ ID NO: 1798 - DNA, 102 bp, Artificial Sequence
  Description of Artificial Sequence: Synthetic Linker
agtggtggcgggtccggcggtggtggtagcgggggtggaggctcaggtggcggtggcagttatccttacgatgtgcccgactatgcttcaggcggggggagt

SEQ ID NO: 1799 - protein, 22 aa, Artificial Sequence
  Description of Artificial Sequence: Synthetic Linker
GSGATNFSLLKQAGDVEENPGP

SEQ ID NO: 1800 - DNA, 66 bp, Artificial Sequence
  Description of Artificial Sequence: Synthetic Linker
ggttcaggagctactaacttcagcctgctgaagcaggctggagacgtggaggagaaccctggacct

SEQ ID NO: 1801 - protein, 8 aa, Artificial Sequence
  Description of Artificial Sequence: Synthetic Linker
  MOD_RES (4)..(4): Any amino acid
DVEXNPGP

SEQ ID NO: 1802 - protein, 8 aa, Artificial Sequence
  Description of Artificial Sequence: Synthetic Linker
  MOD_RES (4)..(4): Any amino acid
DIEXNPGP

SEQ ID NO: 1803 - protein, 22 aa, Artificial Sequence
  Description of Artificial Sequence: Synthetic Linker
SGGGGSGGGGSGGGGSGGGSLQ

SEQ ID NO: 1804 - protein, 13 aa, Artificial Sequence
  Description of Artificial Sequence: Synthetic Linker
QLIGMLQGLMRDL

SEQ ID NO: 1805 - DNA, 39 bp, Artificial Sequence
  Description of Artificial Sequence: Synthetic Linker
cagctgatagggatgctacaaggcctgatgcgtgacctg

SEQ ID NO: 1806 - protein, 4 aa, Artificial Sequence
  Description of Artificial Sequence: Synthetic Linker
ASFE

SEQ ID NO: 1807 - DNA, 12 bp, Artificial Sequence
  Description of Artificial Sequence: Synthetic Linker
gctagcttcgaa

SEQ ID NO: 1808 - protein, 6 aa, Artificial Sequence
  Description of Artificial Sequence: Synthetic Linker
ATKASK

SEQ ID NO: 1809 - protein, 7 aa, Artificial Sequence
  Description of Artificial Sequence: Synthetic Linker
ATKGATK

SEQ ID NO: 1810 - protein, 7 aa, Artificial Sequence
  Description of Artificial Sequence: Synthetic Linker
IAKAFKN

SEQ ID NO: 1811 - protein, 14 aa, Artificial Sequence
  Description of Artificial Sequence: Synthetic Linker
VRGSPAINVAVHVF

SEQ ID NO: 1812 - protein, 18 aa, Artificial Sequence
  Description of Artificial Sequence: Synthetic Linker
GSTSGSGKPGSGEGSTKG

SEQ ID NO: 1813 - protein, 18 aa, Artificial Sequence
  Description of Artificial Sequence: Synthetic Linker
KESGSVSSEQLAQFRSLD

SEQ ID NO: 1814 - protein, 4 aa, Artificial Sequence
  Description of Artificial Sequence: Synthetic Linker
GFLG

SEQ ID NO: 1815 - protein, 6 aa, Artificial Sequence
  Description of Artificial Sequence: Synthetic Linker
PLGLWA

SEQ ID NO: 1816 - protein, 6 aa, Artificial Sequence
  Description of Artificial Sequence: Synthetic Linker
RVLAEA

SEQ ID NO: 1817 - protein, 8 aa, Artificial Sequence
  Description of Artificial Sequence: Synthetic Linker
GGIEGRGS

SEQ ID NO: 1818 - protein, 9 aa, Artificial Sequence
  Description of Artificial Sequence: Synthetic Linker
RRRRRRRRR

SEQ ID NO: 1819 - protein, 10 aa, Artificial Sequence
  Description of Artificial Sequence: Synthetic Linker
EDVVCCSMSY

SEQ ID NO: 1820 - protein, 10 aa, Artificial Sequence
  Description of Artificial Sequence: Synthetic Linker
TRHRQPRGWE

SEQ ID NO: 1821 - protein, 10 aa, Artificial Sequence
  Description of Artificial Sequence: Synthetic Linker
AGNRVRRSVG

SEQ ID NO: 1822 - protein, 12 aa, Artificial Sequence
  Description of Artificial Sequence: Synthetic Linker
CRRRRRREAEAC

SEQ ID NO: 1823 - protein, 17 aa, Artificial Sequence
  Description of Artificial Sequence: Synthetic Linker
VSQTSKLTRAETVFPDV

SEQ ID NO: 1824 - protein, 20 aa, Artificial Sequence
  Description of Artificial Sequence: Synthetic Linker
LEAGCKNFFPRSFTSCGSLE

SEQ ID NO: 1825 - protein, 12 aa, Artificial Sequence
  Description of Artificial Sequence: Synthetic Linker
GSAGSAAGSGEF

SEQ ID NO: 1826 - protein, 14 aa, Artificial Sequence
  Description of Artificial Sequence: Synthetic Linker
EGKSSGSGSESKST

SEQ ID NO: 1827 - protein, 20 aa, Artificial Sequence
  Description of Artificial Sequence: Synthetic Linker
NSGAGSGGSSGSDGASGSRD

SEQ ID NO: 1828 - protein, 8 aa, Artificial Sequence
  Description of Artificial Sequence: Synthetic Linker
LWSLDTTP

SEQ ID NO: 1829 - protein, 4 aa, Artificial Sequence
  Description of Artificial Sequence: Synthetic Linker
MDGA

SEQ ID NO: 1830 - protein, 4 aa, Artificial Sequence
  Description of Artificial Sequence: Synthetic Linker
QGNY

SEQ ID NO: 1831 - protein, 4 aa, Artificial Sequence
  Description of Artificial Sequence: Synthetic Linker
RDGK

SEQ ID NO: 1832 - protein, 5 aa, Artificial Sequence
  Description of Artificial Sequence: Synthetic Linker
DLNVG

SEQ ID NO: 1833 - protein, 5 aa, Artificial Sequence
  Description of Artificial Sequence: Synthetic Linker
MATDE

SEQ ID NO: 1834 - protein, 6 aa, Artificial Sequence
  Description of Artificial Sequence: Synthetic Linker
LTGSGA

SEQ ID NO: 1835 - protein, 7 aa, Artificial Sequence
  Description of Artificial Sequence: Synthetic Linker
FAASGEL

SEQ ID NO: 1836 - protein, 7 aa, Artificial Sequence
  Description of Artificial Sequence: Synthetic Linker
FNNREEQ

SEQ ID NO: 1837 - protein, 7 aa, Artificial Sequence
  Description of Artificial Sequence: Synthetic Linker
GYMARNE

SEQ ID NO: 1838 - protein, 7 aa, Artificial Sequence
  Description of Artificial Sequence: Synthetic Linker
VGTEHAK

SEQ ID NO: 1839 - protein, 5 aa, Artificial Sequence
  Description of Artificial Sequence: Synthetic Linker
LNLDY

SEQ ID NO: 1840 - protein, 14 aa, Artificial Sequence
  Description of Artificial Sequence: Synthetic Linker
KDGVIKGYYAYINP

SEQ ID NO: 1841 - protein, 4 aa, Artificial Sequence
  Description of Artificial Sequence: Synthetic Linker
SKAQ

SEQ ID NO: 1842 - protein, 6 aa, Artificial Sequence
  Description of Artificial Sequence: Synthetic Linker
LFNASA

SEQ ID NO: 1843 - protein, 6 aa, Artificial Sequence
  Description of Artificial Sequence: Synthetic Linker
YQDGSV

SEQ ID NO: 1844 - protein, 7 aa, Artificial Sequence
  Description of Artificial Sequence: Synthetic Linker
IHPQSVI

SEQ ID NO: 1845 - protein, 5 aa, Artificial Sequence
  Description of Artificial Sequence: Synthetic Linker
KNPMD

SEQ ID NO: 1846 - protein, 7 aa, Artificial Sequence
  Description of Artificial Sequence: Synthetic Linker
LGSEVPL

SEQ ID NO: 1847 - protein, 14 aa, Artificial Sequence
  Description of Artificial Sequence: Synthetic Linker
LNVNNKVPNGATSM

SEQ ID NO: 1848 - protein, 5 aa, Artificial Sequence
  Description of Artificial Sequence: Synthetic Linker
TTDDL

SEQ ID NO: 1849 - protein, 6 aa, Artificial Sequence
  Description of Artificial Sequence: Synthetic Linker
AAGIRA

SEQ ID NO: 1850 - protein, 6 aa, Artificial Sequence
  Description of Artificial Sequence: Synthetic Linker
QAGVDC

SEQ ID NO: 1851 - protein, 6 aa, Artificial Sequence
  Description of Artificial Sequence: Synthetic Linker
YNPTDI

SEQ ID NO: 1852 - protein, 8 aa, Artificial Sequence
  Description of Artificial Sequence: Synthetic Linker
EFLPRDTG

SEQ ID NO: 1853 - protein, 9 aa, Artificial Sequence
  Description of Artificial Sequence: Synthetic Linker
GSGLPEQTD

SEQ ID NO: 1854 - protein, 5 aa, Artificial Sequence
  Description of Artificial Sequence: Synthetic Linker
YSSNV

SEQ ID NO: 1855 - protein, 6 aa, Artificial Sequence
  Description of Artificial Sequence: Synthetic Linker
KAGLNP

SEQ ID NO: 1856 - protein, 6 aa, Artificial Sequence
  Description of Artificial Sequence: Synthetic Linker
KEEGKF

SEQ ID NO: 1857 - protein, 6 aa, Artificial Sequence
  Description of Artificial Sequence: Synthetic Linker
VRGGIW

SEQ ID NO: 1858 - protein, 9 aa, Artificial Sequence
  Description of Artificial Sequence: Synthetic Linker
QRYLKPENK

SEQ ID NO: 1859 - protein, 6 aa, Artificial Sequence
  Description of Artificial Sequence: Synthetic Linker
EGVGEI

SEQ ID NO: 1860 - protein, 8 aa, Artificial Sequence
  Description of Artificial Sequence: Synthetic Linker
PVDPPEKW

SEQ ID NO: 1861 - protein, 9 aa, Artificial Sequence
  Description of Artificial Sequence: Synthetic Linker
AHPGVSIPT

SEQ ID NO: 1862 - protein, 15 aa, Artificial Sequence
  Description of Artificial Sequence: Synthetic Linker
FKDPELPRNTPKRSI

SEQ ID NO: 1863 - protein, 14 aa, Artificial Sequence
  Description of Artificial Sequence: Synthetic Linker
YLEGVERNPVGAGL

SEQ ID NO: 1864 - protein, 5 aa, Artificial Sequence
  Description of Artificial Sequence: Synthetic Linker
CPRCP

SEQ ID NO: 1865 - protein, 7 aa, Artificial Sequence
  Description of Artificial Sequence: Synthetic Linker
APPVAGP

SEQ ID NO: 1866 - protein, 8 aa, Artificial Sequence
  Description of Artificial Sequence: Synthetic Linker
APELLGGP

SEQ ID NO: 1867 - protein, 9 aa, Artificial Sequence
  Description of Artificial Sequence: Synthetic Linker
CCVECPPCP

SEQ ID NO: 1868 - protein, 12 aa, Artificial Sequence
  Description of Artificial Sequence: Synthetic Linker
ELKTPLGDTTHT

SEQ ID NO: 1869 - protein, 6 aa, Artificial Sequence
  Description of Artificial Sequence: Synthetic Linker
HNVDDV

SEQ ID NO: 1870 - protein, 6 aa, Artificial Sequence
  Description of Artificial Sequence: Synthetic Linker
AGQKDE

SEQ ID NO: 1871 - protein, 9 aa, Artificial Sequence
  Description of Artificial Sequence: Synthetic Linker
KLNLPILPT

SEQ ID NO: 1872 - protein, 9 aa, Artificial Sequence
  Description of Artificial Sequence: Synthetic Linker
SSPRVTNEG

SEQ ID NO: 1873 - protein, 17 aa, Artificial Sequence
  Description of Artificial Sequence: Synthetic Linker
KAAAALKGSDHRRATNV

SEQ ID NO: 1874 - protein, 4 aa, Artificial Sequence
  Description of Artificial Sequence: Synthetic Linker
KKRV

SEQ ID NO: 1875 - protein, 5 aa, Artificial Sequence
  Description of Artificial Sequence: Synthetic Linker
QLEVK

SEQ ID NO: 1876 - protein, 5 aa, Artificial Sequence
  Description of Artificial Sequence: Synthetic Linker
TNGRL

SEQ ID NO: 1877 - protein, 10 aa, Artificial Sequence
  Description of Artificial Sequence: Synthetic Linker
LYTPEIAENQ

SEQ ID NO: 1878 - protein, 4 aa, Artificial Sequence
  Description of Artificial Sequence: Synthetic Linker
NSEY

SEQ ID NO: 1879 - protein, 5 aa, Artificial Sequence
  Description of Artificial Sequence: Synthetic Linker
SMKDF

SEQ ID NO: 1880 - protein, 12 aa, Artificial Sequence
  Description of Artificial Sequence: Synthetic Linker
KDRWQERHILRP

SEQ ID NO: 1881 - protein, 14 aa, Artificial Sequence
  Description of Artificial Sequence: Synthetic Linker
DDPEGPVMPGSHSV

SEQ ID NO: 1882 - protein, 23 aa, Artificial Sequence
  Description of Artificial Sequence: Synthetic Linker
LCPSNPTCIYKYGDESSNSLPGH

SEQ ID NO: 1883 - protein, 35 aa, Artificial Sequence
  Description of Artificial Sequence: Synthetic Linker
LCEALQHNLPPFTPPPHTEDSVYPMPRVIFRMFDY

SEQ ID NO: 1884 - protein, 5 aa, Artificial Sequence
  Description of Artificial Sequence: Synthetic Linker
NMVTC

SEQ ID NO: 1885 - protein, 10 aa, Artificial Sequence
  Description of Artificial Sequence: Synthetic Linker
NLEEHLGKLN

SEQ ID NO: 1886 - protein, 4 aa, Artificial Sequence
  Description of Artificial Sequence: Synthetic Linker
QGAH

SEQ ID NO: 1887 - protein, 6 aa, Artificial Sequence
  Description of Artificial Sequence: Synthetic Linker
QRIPLY

SEQ ID NO: 1888 - protein, 8 aa, Artificial Sequence
  Description of Artificial Sequence: Synthetic Linker
QRKPLFYI

SEQ ID NO: 1889 - protein, 4 aa, Artificial Sequence
  Description of Artificial Sequence: Synthetic Linker
AGGR

SEQ ID NO: 1890 - protein, 6 aa, Artificial Sequence
  Description of Artificial Sequence: Synthetic Linker
YPYKGE

SEQ ID NO: 1891 - protein, 7 aa, Artificial Sequence
  Description of Artificial Sequence: Synthetic Linker
NHETGEL

SEQ ID NO: 1892 - protein, 8 aa, Artificial Sequence
  Description of Artificial Sequence: Synthetic Linker
TFELKTDV

SEQ ID NO: 1893 - protein, 25 aa, Artificial Sequence
  Description of Artificial Sequence: Synthetic Linker
ALGLPHSDVFRQAKDVAESDRGFSL

SEQ ID NO: 1894 - protein, 4 aa, Artificial Sequence
  Description of Artificial Sequence: Synthetic Linker
LKDW

SEQ ID NO: 1895 - protein, 4 aa, Artificial Sequence
  Description of Artificial Sequence: Synthetic Linker
WTGM

SEQ ID NO: 1896 - protein, 4 aa, Artificial Sequence
  Description of Artificial Sequence: Synthetic Linker
YNGL

SEQ ID NO: 1897 - protein, 5 aa, Artificial Sequence
  Description of Artificial Sequence: Synthetic Linker
DRPGE

SEQ ID NO: 1898 - protein, 5 aa, Artificial Sequence
  Description of Artificial Sequence: Synthetic Linker
LGVSI

SEQ ID NO: 1899 - protein, 5 aa, Artificial Sequence
  Description of Artificial Sequence: Synthetic Linker
RSTGR

SEQ ID NO: 1900 - protein, 5 aa, Artificial Sequence
  Description of Artificial Sequence: Synthetic Linker
YRMLP

SEQ ID NO: 1901 - protein, 5 aa, Artificial Sequence
  Description of Artificial Sequence: Synthetic Linker
YVNDF

SEQ ID NO: 1902 - protein, 6 aa, Artificial Sequence
  Description of Artificial Sequence: Synthetic Linker
EYGSPR

SEQ ID NO: 1903 - protein, 6 aa, Artificial Sequence
  Description of Artificial Sequence: Synthetic Linker
IDRGRV

SEQ ID NO: 1904 - protein, 7 aa, Artificial Sequence
  Description of Artificial Sequence: Synthetic Linker
RAADGQM

SEQ ID NO: 1905 - protein, 7 aa, Artificial Sequence
  Description of Artificial Sequence: Synthetic Linker
TKEKNNV

SEQ ID NO: 1906 - protein, 8 aa, Artificial Sequence
  Description of Artificial Sequence: Synthetic Linker
DQAGLGHE

SEQ ID NO: 1907 - protein, 8 aa, Artificial Sequence
  Description of Artificial Sequence: Synthetic Linker
FSQIKDAM

SEQ ID NO: 1908 - protein, 8 aa, Artificial Sequence
  Description of Artificial Sequence: Synthetic Linker
QAAPGKST

SEQ ID NO: 1909 - protein, 8 aa, Artificial Sequence
  Description of Artificial Sequence: Synthetic Linker
QLPAGATQ

SEQ ID NO: 1910 - protein, 9 aa, Artificial Sequence
  Description of Artificial Sequence: Synthetic Linker
AAKHPDMLT

SEQ ID NO: 1911 - protein, 9 aa, Artificial Sequence
  Description of Artificial Sequence: Synthetic Linker
LASKLPTGV

SEQ ID NO: 1912 - protein, 9 aa, Artificial Sequence
  Description of Artificial Sequence: Synthetic Linker
PNGLEDTPQ

SEQ ID NO: 1913 - protein, 9 aa, Artificial Sequence
  Description of Artificial Sequence: Synthetic Linker
QERLSGNQA

SEQ ID NO: 1914 - protein, 12 aa, Artificial Sequence
  Description of Artificial Sequence: Synthetic Linker
NGFGFAGRGQNT

SEQ ID NO: 1915 - protein, 14 aa, Artificial Sequence
  Description of Artificial Sequence: Synthetic Linker
RLPSSFLPDEDQGV

SEQ ID NO: 1916 - protein, 15 aa, Artificial Sequence
  Description of Artificial Sequence: Synthetic Linker
FNLPAIVELGTATGF

SEQ ID NO: 1917 - protein, 17 aa, Artificial Sequence
  Description of Artificial Sequence: Synthetic Linker
MLKPIAKGDHGEGKKGF

SEQ ID NO: 1918 - protein, 7 aa, Artificial Sequence
  Description of Artificial Sequence: Synthetic Linker
LAHLLPP

SEQ ID NO: 1919 - protein, 9 aa, Artificial Sequence
  Description of Artificial Sequence: Synthetic Linker
QAPEAGFEH

SEQ ID NO: 1920 - protein, 10 aa, Artificial Sequence
  Description of Artificial Sequence: Synthetic Linker
KDKFICDRPL

SEQ ID NO: 1921 - protein, 16 aa, Artificial Sequence
  Description of Artificial Sequence: Synthetic Linker
PVEFHNPLKGHVAEPH

SEQ ID NO: 1922 - protein, 16 aa, Artificial Sequence
  Description of Artificial Sequence: Synthetic Linker
QKTMPSAPAPDGLPSE

SEQ ID NO: 1923 - protein, 4 aa, Artificial Sequence
  Description of Artificial Sequence: Synthetic Linker
AGRV

SEQ ID NO: 1924 - protein, 6 aa, Artificial Sequence
  Description of Artificial Sequence: Synthetic Linker
AGHGFA

SEQ ID NO: 1925 - protein, 10 aa, Artificial Sequence
  Description of Artificial Sequence: Synthetic Linker
LPPGPGPFPG

SEQ ID NO: 1926 - protein, 11 aa, Artificial Sequence
  Description of Artificial Sequence: Synthetic Linker
IFGIGGGLLEY

SEQ ID NO: 1927 - protein, 15 aa, Artificial Sequence
  Description of Artificial Sequence: Synthetic Linker
AYYNFEDLPNNMDNI

SEQ ID NO: 1928 - protein, 10 aa, Artificial Sequence
  Description of Artificial Sequence: Synthetic Linker
MICTRSKPKC

SEQ ID NO: 1929 - protein, 6 aa, Artificial Sequence
  Description of Artificial Sequence: Synthetic Linker
QSSLDL

SEQ ID NO: 1930 - protein, 6 aa, Artificial Sequence
  Description of Artificial Sequence: Synthetic Linker
IPDGDE

SEQ ID NO: 1931 - protein, 15 aa, Artificial Sequence
  Description of Artificial Sequence: Synthetic Linker
PTNPVTGEIPTLSAL

SEQ ID NO: 1932 - protein, 9 aa, Artificial Sequence
  Description of Artificial Sequence: Synthetic Linker
GGPCRADIK

SEQ ID NO: 1933 - protein, 11 aa, Artificial Sequence
  Description of Artificial Sequence: Synthetic Linker
SGACSTDKPCG

SEQ ID NO: 1934 - protein, 11 aa, Artificial Sequence
  Description of Artificial Sequence: Synthetic Linker
EGSKTVPIADK

SEQ ID NO: 1935 - protein, 7 aa, Artificial Sequence
  Description of Artificial Sequence: Synthetic Linker
INGKKPE

SEQ ID NO: 1936 - protein, 8 aa, Artificial Sequence
  Description of Artificial Sequence: Synthetic Linker
ELPAYMSG

SEQ ID NO: 1937 - protein, 8 aa, Artificial Sequence
  Description of Artificial Sequence: Synthetic Linker
VTGTLDYG

SEQ ID NO: 1938 - protein, 15 aa, Artificial Sequence
  Description of Artificial Sequence: Synthetic Linker
AAEDAIEIHPGTPNV

SEQ ID NO: 1939 - protein, 21 aa, Artificial Sequence
  Description of Artificial Sequence: Synthetic Linker
LEFKMPADGRIWGSKYPRPTA

SEQ ID NO: 1940 - protein, 5 aa, Artificial Sequence
  Description of Artificial Sequence: Synthetic Linker
SDYDV

SEQ ID NO: 1941 - protein, 5 aa, Artificial Sequence
  Description of Artificial Sequence: Synthetic Linker
VGSGP

SEQ ID NO: 1942 - protein, 6 aa, Artificial Sequence
  Description of Artificial Sequence: Synthetic Linker
IDSQSA

SEQ ID NO: 1943 - protein, 6 aa, Artificial Sequence
  Description of Artificial Sequence: Synthetic Linker
NKRDAY

SEQ ID NO: 1944 - protein, 6 aa, Artificial Sequence
  Description of Artificial Sequence: Synthetic Linker
RKGIRT

SEQ ID NO: 1945 - protein, 7 aa, Artificial Sequence
  Description of Artificial Sequence: Synthetic Linker
MGERFGG

SEQ ID NO: 1946 - protein, 8 aa, Artificial Sequence
  Description of Artificial Sequence: Synthetic Linker
VDTGAEKR

SEQ ID NO: 1947 - protein, 10 aa, Artificial Sequence
  Description of Artificial Sequence: Synthetic Linker
TGGHPSKEAQ

SEQ ID NO: 1948 - protein, 10 aa, Artificial Sequence
  Description of Artificial Sequence: Synthetic Linker
VPAATEGGLH

SEQ ID NO: 1949 - protein, 18 aa, Artificial Sequence
  Description of Artificial Sequence: Synthetic Linker
VLDTVDIENYISVPKTEG

SEQ ID NO: 1950 - protein, 5 aa, Artificial Sequence
  Description of Artificial Sequence: Synthetic Linker
DLAYV

SEQ ID NO: 1951 - protein, 13 aa, Artificial Sequence
  Description of Artificial Sequence: Synthetic Linker
VVPPELKTKDHII

SEQ ID NO: 1952 - protein, 5 aa, Artificial Sequence
  Description of Artificial Sequence: Synthetic Linker
WKQHK

SEQ ID NO: 1953 - protein, 7 aa, Artificial Sequence
  Description of Artificial Sequence: Synthetic Linker
KIQGCSA

SEQ ID NO: 1954 - protein, 8 aa, Artificial Sequence
  Description of Artificial Sequence: Synthetic Linker
DVASGDGL

SEQ ID NO: 1955 - protein, 20 aa, Artificial Sequence
  Description of Artificial Sequence: Synthetic Linker
VSPWHRMSYFFNPVSNFISF

SEQ ID NO: 1956 - protein, 5 aa, Artificial Sequence
  Description of Artificial Sequence: Synthetic Linker
YDNDE

SEQ ID NO: 1957 - protein, 10 aa, Artificial Sequence
  Description of Artificial Sequence: Synthetic Linker
RNGDSRRPGL

SEQ ID NO: 1958 - protein, 4 aa, Artificial Sequence
  Description of Artificial Sequence: Synthetic Linker
VEET

SEQ ID NO: 1959 - protein, 6 aa, Artificial Sequence
  Description of Artificial Sequence: Synthetic Linker
AIQDIS

SEQ ID NO: 1960 - protein, 6 aa, Artificial Sequence
  Description of Artificial Sequence: Synthetic Linker
KLPITL

SEQ ID NO: 1961 - protein, 11 aa, Artificial Sequence
  Description of Artificial Sequence: Synthetic Linker
ADSAYITYAND

SEQ ID NO: 1962 - protein, 4 aa, Artificial Sequence
  Description of Artificial Sequence: Synthetic Linker
FGGV

SEQ ID NO: 1963 - protein, 4 aa, Artificial Sequence
  Description of Artificial Sequence: Synthetic Linker
YGIK

SEQ ID NO: 1964 - protein, 5 aa, Artificial Sequence
  Description of Artificial Sequence: Synthetic Linker
INFNS

SEQ ID NO: 1965 - protein, 5 aa, Artificial Sequence
  Description of Artificial Sequence: Synthetic Linker
YGRDH

SEQ ID NO: 1966 - protein, 6 aa, Artificial Sequence
  Description of Artificial Sequence: Synthetic Linker
GMSRTN

SEQ ID NO: 1967 - protein, 7 aa, Artificial Sequence
  Description of Artificial Sequence: Synthetic Linker
ASLGING

SEQ ID NO: 1968 - protein, 7 aa, Artificial Sequence
  Description of Artificial Sequence: Synthetic Linker
SAPRLQH

SEQ ID NO: 1969 - protein, 7 aa, Artificial Sequence
  Description of Artificial Sequence: Synthetic Linker
YIPDFGG

SEQ ID NO: 1970 - protein, 8 aa, Artificial Sequence
  Description of Artificial Sequence: Synthetic Linker
SLPNYLAP

SEQ ID NO: 1971 - protein, 9 aa, Artificial Sequence
  Description of Artificial Sequence: Synthetic Linker
LDGKFADNV

SEQ ID NO: 1972 - protein, 9 aa, Artificial Sequence
  Description of Artificial Sequence: Synthetic Linker
VINNVNADP

SEQ ID NO: 1973 - protein, 10 aa, Artificial Sequence
  Description of Artificial Sequence: Synthetic Linker
QTQHALEKLS

SEQ ID NO: 1974 - protein, 11 aa, Artificial Sequence
  Description of Artificial Sequence: Synthetic Linker
EGKVFKTRHTG

SEQ ID NO: 1975 - protein, 11 aa, Artificial Sequence
  Description of Artificial Sequence: Synthetic Linker
VKADSEGQPGP

SEQ ID NO: 1976 - protein, 12 aa, Artificial Sequence
  Description of Artificial Sequence: Synthetic Linker
RAFVYHPDIEDR

SEQ ID NO: 1977 - protein, 13 aa, Artificial Sequence
  Description of Artificial Sequence: Synthetic Linker
AFGDVDTADPLDP

SEQ ID NO: 1978 - protein, 13 aa, Artificial Sequence
  Description of Artificial Sequence: Synthetic Linker
LKTETHARGEGST

SEQ ID NO: 1979 - protein, 16 aa, Artificial Sequence
  Description of Artificial Sequence: Synthetic Linker
KNGPIDFQPREPFSAL

SEQ ID NO: 1980 - protein, 16 aa, Artificial Sequence
  Description of Artificial Sequence: Synthetic Linker
VINPGTDRNWTGHPFV

SEQ ID NO: 1981 - protein, 17 aa, Artificial Sequence
  Description of Artificial Sequence: Synthetic Linker
QITQEYFGFATHLAYQG

SEQ ID NO: 1982 - protein, 22 aa, Artificial Sequence
  Description of Artificial Sequence: Synthetic Linker
NHWDNLNRVVERGYAGLSLWDW

SEQ ID NO: 1983 - protein, 15 aa, Artificial Sequence
  Description of Artificial Sequence: Synthetic Linker
VGSLVSGPSFTSGEV

SEQ ID NO: 1984 - protein, 13 aa, Artificial Sequence
  Description of Artificial Sequence: Synthetic Linker
ITSQETDGWYTLA

SEQ ID NO: 1985 - protein, 21 aa, Artificial Sequence
  Description of Artificial Sequence: Synthetic Linker
RNKEGQDVNEQGQPIRGRTQD

SEQ ID NO: 1986 - protein, 5 aa, Artificial Sequence
  Description of Artificial Sequence: Synthetic Linker
HFQPF

SEQ ID NO: 1987 - protein, 5 aa, Artificial Sequence
  Description of Artificial Sequence: Synthetic Linker
TGTPV

SEQ ID NO: 1988 - protein, 7 aa, Artificial Sequence
  Description of Artificial Sequence: Synthetic Linker
PLSHFDA

SEQ ID NO: 1989 - protein, 4 aa, Artificial Sequence
  Description of Artificial Sequence: Synthetic Linker
FNPI

SEQ ID NO: 1990 - protein, 4 aa, Artificial Sequence
  Description of Artificial Sequence: Synthetic Linker
KNGS

SEQ ID NO: 1991 - protein, 5 aa, Artificial Sequence
  Description of Artificial Sequence: Synthetic Linker
DRFQG

SEQ ID NO: 1992 - protein, 5 aa, Artificial Sequence
  Description of Artificial Sequence: Synthetic Linker
EVPDI

SEQ ID NO: 1993 - protein, 6 aa, Artificial Sequence
  Description of Artificial Sequence: Synthetic Linker
ACELHT

SEQ ID NO: 1994 - protein, 6 aa, Artificial Sequence
  Description of Artificial Sequence: Synthetic Linker
LPATLT

SEQ ID NO: 1995 - protein, 6 aa, Artificial Sequence
  Description of Artificial Sequence: Synthetic Linker
LPDPYG

SEQ ID NO: 1996 - protein, 6 aa, Artificial Sequence
  Description of Artificial Sequence: Synthetic Linker
LPHAQP

SEQ ID NO: 1997 - protein, 6 aa, Artificial Sequence
  Description of Artificial Sequence: Synthetic Linker
RQQASF

SEQ ID NO: 1998 - protein, 6 aa, Artificial Sequence
  Description of Artificial Sequence: Synthetic Linker
YIGGNL

SEQ ID NO: 1999 - protein, 7 aa, Artificial Sequence
  Description of Artificial Sequence: Synthetic Linker
FGRTCKE

SEQ ID NO: 2000 - protein, 7 aa, Artificial Sequence
  Description of Artificial Sequence: Synthetic Linker
VDKGDNV

SEQ ID NO: 2001 - protein, 7 aa, Artificial Sequence
  Description of Artificial Sequence: Synthetic Linker
WGPECNH

SEQ ID NO: 2002 - protein, 8 aa, Artificial Sequence
  Description of Artificial Sequence: Synthetic Linker
VRRCEAQK

SEQ ID NO: 2003 - protein, 9 aa, Artificial Sequence
  Description of Artificial Sequence: Synthetic Linker
KVLIKEEDA

SEQ ID NO: 2004 - protein, 9 aa, Artificial Sequence
  Description of Artificial Sequence: Synthetic Linker
SCATGWKGL

SEQ ID NO: 2005 - protein, 10 aa, Artificial Sequence
  Description of Artificial Sequence: Synthetic Linker
IVDLPDHIEV

SEQ ID NO: 2006 - protein, 10 aa, Artificial Sequence
  Description of Artificial Sequence: Synthetic Linker
LCTACMNNGV

SEQ ID NO: 2007 - protein, 13 aa, Artificial Sequence
  Description of Artificial Sequence: Synthetic Linker
RCSGQEGCKSYVF

SEQ ID NO: 2008 - protein, 22 aa, Artificial Sequence
  Description of Artificial Sequence: Synthetic Linker
LCSPGWQGLQCEREGIPRMTPK

SEQ ID NO: 2009 - protein, 25 aa, Artificial Sequence
  Description of Artificial Sequence: Synthetic Linker
CNEACHPGFYGPDCKLRCSCNNGEM

SEQ ID NO: 2010 - protein, 4 aa, Artificial Sequence
  Description of Artificial Sequence: Synthetic Linker
LKTP

SEQ ID NO: 2011 - protein, 14 aa, Artificial Sequence
  Description of Artificial Sequence: Synthetic Linker
AKGRRAEDGSVIDY

SEQ ID NO: 2012 - protein, 12 aa, Artificial Sequence
  Description of Artificial Sequence: Synthetic Linker
AARPLRVHRRPL

SEQ ID NO: 2013 - protein, 4 aa, Artificial Sequence
  Description of Artificial Sequence: Synthetic Linker
LIPL

SEQ ID NO: 2014 - protein, 5 aa, Artificial Sequence
  Description of Artificial Sequence: Synthetic Linker
FGEGA

SEQ ID NO: 2015 - protein, 6 aa, Artificial Sequence
  Description of Artificial Sequence: Synthetic Linker
AFDDAK

SEQ ID NO: 2016 - protein, 6 aa, Artificial Sequence
  Description of Artificial Sequence: Synthetic Linker
KVNGKR

SEQ ID NO: 2017 - protein, 7 aa, Artificial Sequence
  Description of Artificial Sequence: Synthetic Linker
LSKTGMP

SEQ ID NO: 2018 - protein, 8 aa, Artificial Sequence
  Description of Artificial Sequence: Synthetic Linker
VLPYPRMR

SEQ ID NO: 2019 - protein, 8 aa, Artificial Sequence
  Description of Artificial Sequence: Synthetic Linker
VRADDGLL

SEQ ID NO: 2020 - protein, 16 aa, Artificial Sequence
  Description of Artificial Sequence: Synthetic Linker
EAEDDFKIEKPTKEDA

SEQ ID NO: 2021 - protein, 5 aa, Artificial Sequence
  Description of Artificial Sequence: Synthetic Linker
IRFGR

SEQ ID NO: 2022 - protein, 6 aa, Artificial Sequence
  Description of Artificial Sequence: Synthetic Linker
QTETHV

SEQ ID NO: 2023 - protein, 13 aa, Artificial Sequence
  Description of Artificial Sequence: Synthetic Linker
PLKGRYTPSVGDV

SEQ ID NO: 2024 - protein, 7 aa, Artificial Sequence
  Description of Artificial Sequence: Synthetic Linker
KNPALSD

SEQ ID NO: 2025 - protein, 12 aa, Artificial Sequence
  Description of Artificial Sequence: Synthetic Linker
RFGSSEIGKGKK

SEQ ID NO: 2026 - protein, 14 aa, Artificial Sequence
  Description of Artificial Sequence: Synthetic Linker
GKFSGRKGTWVGFT

SEQ ID NO: 2027 - protein, 9 aa, Artificial Sequence
  Description of Artificial Sequence: Synthetic Linker
QFFMSDKPL

SEQ ID NO: 2028 - protein, 11 aa, Artificial Sequence
  Description of Artificial Sequence: Synthetic Linker
HAPRDMGPQPR

SEQ ID NO: 2029 - protein, 12 aa, Artificial Sequence
  Description of Artificial Sequence: Synthetic Linker
HFKPAPWNGLPA

SEQ ID NO: 2030 - protein, 6 aa, Artificial Sequence
  Description of Artificial Sequence: Synthetic Linker
LDPPKQ

SEQ ID NO: 2031 - protein, 6 aa, Artificial Sequence
  Description of Artificial Sequence: Synthetic Linker
TATADD

SEQ ID NO: 2032 - protein, 7 aa, Artificial Sequence
  Description of Artificial Sequence: Synthetic Linker
AEAQTCR

SEQ ID NO: 2033 - protein, 7 aa, Artificial Sequence
  Description of Artificial Sequence: Synthetic Linker
EEKPQGQ

SEQ ID NO: 2034 - protein, 7 aa, Artificial Sequence
  Description of Artificial Sequence: Synthetic Linker
LGLNDPL

SEQ ID NO: 2035 - protein, 7 aa, Artificial Sequence
  Description of Artificial Sequence: Synthetic Linker
RFPTLPF

SEQ ID NO: 2036 - protein, 9 aa, Artificial Sequence
  Description of Artificial Sequence: Synthetic Linker
ISSFDRPNI

SEQ ID NO: 2037 - protein, 13 aa, Artificial Sequence
  Description of Artificial Sequence: Synthetic Linker
YFGEGRQEPCGNC

SEQ ID NO: 2038 - protein, 7 aa, Artificial Sequence
  Description of Artificial Sequence: Synthetic Linker
LGLNRKW

SEQ ID NO: 2039 - protein, 12 aa, Artificial Sequence
  Description of Artificial Sequence: Synthetic Linker
YFGSYGTRGVGY

SEQ ID NO: 2040 - protein, 4 aa, Artificial Sequence
  Description of Artificial Sequence: Synthetic Linker
NIKG

SEQ ID NO: 2041 - protein, 5 aa, Artificial Sequence
  Description of Artificial Sequence: Synthetic Linker
NPVPQ

SEQ ID NO: 2042 - protein, 6 aa, Artificial Sequence
  Description of Artificial Sequence: Synthetic Linker
AKFPAD

SEQ ID NO: 2043 - protein, 6 aa, Artificial Sequence
  Description of Artificial Sequence: Synthetic Linker
IQNVDF

SEQ ID NO: 2044 - protein, 6 aa, Artificial Sequence
  Description of Artificial Sequence: Synthetic Linker
LTGQMV

SEQ ID NO: 2045 - protein, 8 aa, Artificial Sequence
  Description of Artificial Sequence: Synthetic Linker
AAEDARQY

SEQ ID NO: 2046 - protein, 16 aa, Artificial Sequence
  Description of Artificial Sequence: Synthetic Linker
KLDGSQTSKWLSSEPL

SEQ ID NO: 2047 - protein, 4 aa, Artificial Sequence
  Description of Artificial Sequence: Synthetic Linker
DIFK

SEQ ID NO: 2048 - protein, 4 aa, Artificial Sequence
  Description of Artificial Sequence: Synthetic Linker
LPGM

SEQ ID NO: 2049 - protein, 6 aa, Artificial Sequence
  Description of Artificial Sequence: Synthetic Linker
IPGNGG

SEQ ID NO: 2050 - protein, 6 aa, Artificial Sequence
  Description of Artificial Sequence: Synthetic Linker
VEDWVE

SEQ ID NO: 2051 - protein, 15 aa, Artificial Sequence
  Description of Artificial Sequence: Synthetic Linker
RLKADETYTSPEDYF

SEQ ID NO: 2052 - protein, 5 aa, Artificial Sequence
  Description of Artificial Sequence: Synthetic Linker
RKPTE

SEQ ID NO: 2053 - protein, 6 aa, Artificial Sequence
  Description of Artificial Sequence: Synthetic Linker
YARTIV

SEQ ID NO: 2054 - protein, 4 aa, Artificial Sequence
  Description of Artificial Sequence: Synthetic Linker
REDG

SEQ ID NO: 2055 - protein, 4 aa, Artificial Sequence
  Description of Artificial Sequence: Synthetic Linker
YKTL

SEQ ID NO: 2056 - protein, 6 aa, Artificial Sequence
  Description of Artificial Sequence: Synthetic Linker
DRAKRI

SEQ ID NO: 2057 - protein, 11 aa, Artificial Sequence
  Description of Artificial Sequence: Synthetic Linker
KAPQTEPPASI

SEQ ID NO: 2058 - protein, 21 aa, Artificial Sequence
  Description of Artificial Sequence: Synthetic Linker
AAQSDRPAHAQGVPLTRIERT

SEQ ID NO: 2059 - protein, 8 aa, Artificial Sequence
  Description of Artificial Sequence: Synthetic Linker
DWDKDADP

SEQ ID NO: 2060 - protein, 14 aa, Artificial Sequence
  Description of Artificial Sequence: Synthetic Linker
LFDRHVSSSVRLND

SEQ ID NO: 2061 - protein, 26 aa, Artificial Sequence
  Description of Artificial Sequence: Synthetic Linker
LVEESSRQLPTAAPEPAKVDQDAGRL

SEQ ID NO: 2062 - protein, 6 aa, Artificial Sequence
  Description of Artificial Sequence: Synthetic Linker
LLGVTP

SEQ ID NO: 2063 - protein, 4 aa, Artificial Sequence
  Description of Artificial Sequence: Synthetic Linker
DTLP

SEQ ID NO: 2064 - protein, 4 aa, Artificial Sequence
  Description of Artificial Sequence: Synthetic Linker
ENGL

SEQ ID NO: 2065 - protein, 4 aa, Artificial Sequence
  Description of Artificial Sequence: Synthetic Linker
FREV

SEQ ID NO: 2066 - protein, 4 aa, Artificial Sequence
  Description of Artificial Sequence: Synthetic Linker
KVSP

SEQ ID NO: 2067 - protein, 4 aa, Artificial Sequence
  Description of Artificial Sequence: Synthetic Linker
LDGK

SEQ ID NO: 2068 - protein, 4 aa, Artificial Sequence
  Description of Artificial Sequence: Synthetic Linker
LNGK

SEQ ID NO: 2069 - protein, 4 aa, Artificial Sequence
  Description of Artificial Sequence: Synthetic Linker
PLLI

SEQ ID NO: 2070 - protein, 4 aa, Artificial Sequence
  Description of Artificial Sequence: Synthetic Linker
SGQT

SEQ ID NO: 2071 - protein, 5 aa, Artificial Sequence
  Description of Artificial Sequence: Synthetic Linker
KNPRG

SEQ ID NO: 2072 - protein, 5 aa, Artificial Sequence
  Description of Artificial Sequence: Synthetic Linker
KPTTQ

SEQ ID NO: 2073 - protein, 5 aa, Artificial Sequence
  Description of Artificial Sequence: Synthetic Linker
SLKWK

SEQ ID NO: 2074 - protein, 5 aa, Artificial Sequence
  Description of Artificial Sequence: Synthetic Linker
TSEMD

SEQ ID NO: 2075 - protein, 6 aa, Artificial Sequence
  Description of Artificial Sequence: Synthetic Linker
LSGQEA

SEQ ID NO: 2076 - protein, 9 aa, Artificial Sequence
  Description of Artificial Sequence: Synthetic Linker
PLDVAPQGK

SEQ ID NO: 2077 - protein, 11 aa, Artificial Sequence
  Description of Artificial Sequence: Synthetic Linker
AKNTYDDSAWT

SEQ ID NO: 2078 - protein, 12 aa, Artificial Sequence
  Description of Artificial Sequence: Synthetic Linker
ELPELPQPESAG

SEQ ID NO: 2079 - protein, 12 aa, Artificial Sequence
  Description of Artificial Sequence: Synthetic Linker
QPNATAWSEAGH

SEQ ID NO: 2080 - protein, 12 aa, Artificial Sequence
  Description of Artificial Sequence: Synthetic Linker
SEYLFRHSDNEL

SEQ ID NO: 2081 - protein, 13 aa, Artificial Sequence
  Description of Artificial Sequence: Synthetic Linker
VAYTAPKVQLPSL

SEQ ID NO: 2082 - protein, 15 aa, Artificial Sequence
  Description of Artificial Sequence: Synthetic Linker
NLSVTLPAASHAIPH

SEQ ID NO: 2083 - protein, 16 aa, Artificial Sequence
  Description of Artificial Sequence: Synthetic Linker
IDNMGLDEDWTIGSED

SEQ ID NO: 2084 - protein, 23 aa, Artificial Sequence
  Description of Artificial Sequence: Synthetic Linker
TGNLGGENYRDTVRGPLNEGGLY

SEQ ID NO: 2085 - protein, 10 aa, Artificial Sequence
  Description of Artificial Sequence: Synthetic Linker
SNADLQTLPA

SEQ ID NO: 2086 - protein, 11 aa, Artificial Sequence
  Description of Artificial Sequence: Synthetic Linker
LRGKIVPTPMQ

SEQ ID NO: 2087 - protein, 12 aa, Artificial Sequence
  Description of Artificial Sequence: Synthetic Linker
KGGVAYRLPVPG

SEQ ID NO: 2088 - protein, 11 aa, Artificial Sequence
  Description of Artificial Sequence: Synthetic Linker
QAWATAPYAPT

SEQ ID NO: 2089 - protein, 7 aa, Artificial Sequence
  Description of Artificial Sequence: Synthetic Linker
YSKGVSQ

SEQ ID NO: 2090 - protein, 6 aa, Artificial Sequence
  Description of Artificial Sequence: Synthetic Linker
QKGRVL

SEQ ID NO: 2091 - protein, 6 aa, Artificial Sequence
  Description of Artificial Sequence: Synthetic Linker
VLGKEL

SEQ ID NO: 2092 - protein, 4 aa, Artificial Sequence
  Description of Artificial Sequence: Synthetic Linker
ANTP

SEQ ID NO: 2093 - protein, 4 aa, Artificial Sequence
  Description of Artificial Sequence: Synthetic Linker
DAPT

SEQ ID NO: 2094 - protein, 5 aa, Artificial Sequence
  Description of Artificial Sequence: Synthetic Linker
LDPIK

SEQ ID NO: 2095 - protein, 5 aa, Artificial Sequence
  Description of Artificial Sequence: Synthetic Linker
TTDFQ

SEQ ID NO: 2096 - protein, 6 aa, Artificial Sequence
  Description of Artificial Sequence: Synthetic Linker
PWNKEV

SEQ ID NO: 2097 - protein, 6 aa, Artificial Sequence
  Description of Artificial Sequence: Synthetic Linker
QQLLPP

SEQ ID NO: 2098 - protein, 8 aa, Artificial Sequence
  Description of Artificial Sequence: Synthetic Linker
TDPQTGKT

SEQ ID NO: 2099 - protein, 9 aa, Artificial Sequence
  Description of Artificial Sequence: Synthetic Linker
GRHGIVPTR

SEQ ID NO: 2100 - protein, 9 aa, Artificial Sequence
  Description of Artificial Sequence: Synthetic Linker
TADGSWFFK

SEQ ID NO: 2101 - protein, 12 aa, Artificial Sequence
  Description of Artificial Sequence: Synthetic Linker
LFSMGVTRGKWG

SEQ ID NO: 2102 - protein, 18 aa, Artificial Sequence
  Description of Artificial Sequence: Synthetic Linker
LAPGMGEDGELEETGVPA

SEQ ID NO: 2103 - protein, 21 aa, Artificial Sequence
  Description of Artificial Sequence: Synthetic Linker
CWVMHPGESWHGFKDIPDNWS

SEQ ID NO: 2104 - protein, 7 aa, Artificial Sequence
  Description of Artificial Sequence: Synthetic Linker
EVHVRGH

SEQ ID NO: 2105 - protein, 17 aa, Artificial Sequence
  Description of Artificial Sequence: Synthetic Linker
VGDPGPICRPWECCDKA

SEQ ID NO: 2106 - protein, 7 aa, Artificial Sequence
  Description of Artificial Sequence: Synthetic Linker
KYEIPEG

SEQ ID NO: 2107 - protein, 7 aa, Artificial Sequence
  Description of Artificial Sequence: Synthetic Linker
RKVCEQE

SEQ ID NO: 2108 - protein, 12 aa, Artificial Sequence
  Description of Artificial Sequence: Synthetic Linker
EQLLPKLFDGCY

SEQ ID NO: 2109 - protein, 5 aa, Artificial Sequence
  Description of Artificial Sequence: Synthetic Linker
SLHFS

SEQ ID NO: 2110 - protein, 6 aa, Artificial Sequence
  Description of Artificial Sequence: Synthetic Linker
VYPLQW

SEQ ID NO: 2111 - protein, 7 aa, Artificial Sequence
  Description of Artificial Sequence: Synthetic Linker
KTVSGLY

SEQ ID NO: 2112 - protein, 12 aa, Artificial Sequence
  Description of Artificial Sequence: Synthetic Linker
SDPAFQPPCSEV

SEQ ID NO: 2113 - protein, 13 aa, Artificial Sequence
  Description of Artificial Sequence: Synthetic Linker
SVVKPIGLAPLVY

SEQ ID NO: 2114 - protein, 30 aa, Artificial Sequence
  Description of Artificial Sequence: Synthetic Linker
ARWHSRLGFFRDPRPFPLPLSSLFSDGGNV

SEQ ID NO: 2115 - protein, 15 aa, Artificial Sequence
  Description of Artificial Sequence: Synthetic Linker
ELRSLTRHPKYKTEL

SEQ ID NO: 2116 - protein, 7 aa, Artificial Sequence
  Description of Artificial Sequence: Synthetic Linker
VYNTFCI

SEQ ID NO: 2117 - protein, 4 aa, Artificial Sequence
  Description of Artificial Sequence: Synthetic Linker
AATM

SEQ ID NO: 2118 - protein, 4 aa, Artificial Sequence
  Description of Artificial Sequence: Synthetic Linker
FAGT

SEQ ID NO: 2119 - protein, 4 aa, Artificial Sequence
  Description of Artificial Sequence: Synthetic Linker
RGDF

SEQ ID NO: 2120 - protein, 4 aa, Artificial Sequence
  Description of Artificial Sequence: Synthetic Linker
SNPW

SEQ ID NO: 2121 - protein, 4 aa, Artificial Sequence
  Description of Artificial Sequence: Synthetic Linker
SPDK

SEQ ID NO: 2122 - protein, 7 aa, Artificial Sequence
  Description of Artificial Sequence: Synthetic Linker
KTADQQD

SEQ ID NO: 2123 - protein, 8 aa, Artificial Sequence
  Description of Artificial Sequence: Synthetic Linker
QGAGAVDA

SEQ ID NO: 2124 - protein, 9 aa, Artificial Sequence
  Description of Artificial Sequence: Synthetic Linker
AKQDDDSHY

SEQ ID NO: 2125 - protein, 9 aa, Artificial Sequence
  Description of Artificial Sequence: Synthetic Linker
DKDNTSSKV

SEQ ID NO: 2126 - protein, 9 aa, Artificial Sequence
  Description of Artificial Sequence: Synthetic Linker
NLSALEKPI

SEQ ID NO: 2127 - protein, 11 aa, Artificial Sequence
  Description of Artificial Sequence: Synthetic Linker
IHRHANGKPYA

SEQ ID NO: 2128 - protein, 16 aa, Artificial Sequence
  Description of Artificial Sequence: Synthetic Linker
EGVENIEDIESSEITE

SEQ ID NO: 2129 - protein, 36 aa, Artificial Sequence
  Description of Artificial Sequence: Synthetic Linker
DSKDGSSYYHEANSDAKDQLDGDGLQFYALKNNFTA

SEQ ID NO: 2130 - protein, 9 aa, Artificial Sequence
  Description of Artificial Sequence: Synthetic Linker
GSIQGQDLS

SEQ ID NO: 2131 - protein, 4 aa, Artificial Sequence
  Description of Artificial Sequence: Synthetic Linker
RFDT

SEQ ID NO: 2132 - protein, 15 aa, Artificial Sequence
  Description of Artificial Sequence: Synthetic Linker
TLTTPASNQLLALPR

SEQ ID NO: 2133 - protein, 4 aa, Artificial Sequence
  Description of Artificial Sequence: Synthetic Linker
ELPF

SEQ ID NO: 2134 - protein, 7 aa, Artificial Sequence
  Description of Artificial Sequence: Synthetic Linker
AGDNPDA

SEQ ID NO: 2135 - protein, 7 aa, Artificial Sequence
  Description of Artificial Sequence: Synthetic Linker
VTTAEAY

SEQ ID NO: 2136 - protein, 11 aa, Artificial Sequence
  Description of Artificial Sequence: Synthetic Linker
AFPGLNGMDLA

SEQ ID NO: 2137 - protein, 18 aa, Artificial Sequence
  Description of Artificial Sequence: Synthetic Linker
WTQGSWTLTGGLPQAKKE

SEQ ID NO: 2138 - protein, 16 aa, Artificial Sequence
  Description of Artificial Sequence: Synthetic Linker
RGIKLTKIKLDLPINF

SEQ ID NO: 2139 - protein, 4 aa, Artificial Sequence
  Description of Artificial Sequence: Synthetic Linker
FLDV

SEQ ID NO: 2140 - protein, 5 aa, Artificial Sequence
  Description of Artificial Sequence: Synthetic Linker
QTSLS

SEQ ID NO: 2141 - protein, 26 aa, Artificial Sequence
  Description of Artificial Sequence: Synthetic Linker
YTGKWGLNDVNPEAWPRDLKGMAAVR

SEQ ID NO: 2142 - protein, 17 aa, Artificial Sequence
  Description of Artificial Sequence: Synthetic Linker
VKEGAGQPDFCDGHSPA

SEQ ID NO: 2143 - protein, 9 aa, Artificial Sequence
  Description of Artificial Sequence: Synthetic Linker
VDGSRGDGS

SEQ ID NO: 2144 - protein, 41 aa, Artificial Sequence
  Description of Artificial Sequence: Synthetic Linker
LKARVGSADDAKKDAAKKDDAKKDDAKKDGSQTNKAKNLVQ

SEQ ID NO: 2145 - protein, 7 aa, Artificial Sequence
  Description of Artificial Sequence: Synthetic Linker
VAKEGET

SEQ ID NO: 2146 - protein, 14 aa, Artificial Sequence
  Description of Artificial Sequence: Synthetic Linker
TMKNTGRNVNDRPV

SEQ ID NO: 2147 - protein, 4 aa, Artificial Sequence
  Description of Artificial Sequence: Synthetic Linker
EVND

SEQ ID NO: 2148 - protein, 4 aa, Artificial Sequence
  Description of Artificial Sequence: Synthetic Linker
NSDG

SEQ ID NO: 2149 - protein, 4 aa, Artificial Sequence
  Description of Artificial Sequence: Synthetic Linker
TPYG

SEQ ID NO: 2150 - protein, 5 aa, Artificial Sequence
  Description of Artificial Sequence: Synthetic Linker
GRGNP

SEQ ID NO: 2151 - protein, 5 aa, Artificial Sequence
  Description of Artificial Sequence: Synthetic Linker
SENPV

SEQ ID NO: 2152 - protein, 6 aa, Artificial Sequence
  Description of Artificial Sequence: Synthetic Linker
RAQMDL

SEQ ID NO: 2153 - protein, 6 aa, Artificial Sequence
  Description of Artificial Sequence: Synthetic Linker
RTSRNP

SEQ ID NO: 2154 - protein, 6 aa, Artificial Sequence
  Description of Artificial Sequence: Synthetic Linker
YVLNDI

SEQ ID NO: 2155 - protein, 7 aa, Artificial Sequence
  Description of Artificial Sequence: Synthetic Linker
AKKDGTH

SEQ ID NO: 2156 - protein, 8 aa, Artificial Sequence
  Description of Artificial Sequence: Synthetic Linker
DATHIGKL

SEQ ID NO: 2157 - protein, 8 aa, Artificial Sequence
  Description of Artificial Sequence: Synthetic Linker
KQIGGDGM

SEQ ID NO: 2158 - protein, 8 aa, Artificial Sequence
  Description of Artificial Sequence: Synthetic Linker
VLTIPEII

SEQ ID NO: 2159 - protein, 8 aa, Artificial Sequence
  Description of Artificial Sequence: Synthetic Linker
YKFQEGQE

SEQ ID NO: 2160 - protein, 9 aa, Artificial Sequence
  Description of Artificial Sequence: Synthetic Linker
NAKDDEGVL

SEQ ID NO: 2161 - protein, 9 aa, Artificial Sequence
  Description of Artificial Sequence: Synthetic Linker
SYGQFEDGI

SEQ ID NO: 2162 - protein, 10 aa, Artificial Sequence
  Description of Artificial Sequence: Synthetic Linker
HGHVCFQFDA

SEQ ID NO: 2163 - protein, 16 aa, Artificial Sequence
  Description of Artificial Sequence: Synthetic Linker
LFNPWCEDDAVYLDNE

SEQ ID NO: 2164 - protein, 20 aa, Artificial Sequence
  Description of Artificial Sequence: Synthetic Linker
GSWDNIYAYGVPPSAWTGSV

SEQ ID NO: 2165 - protein, 20 aa, Artificial Sequence
  Description of Artificial Sequence: Synthetic Linker
MYGAKKPLNTEGVMKSRSNV

SEQ ID NO: 2166 - protein, 5 aa, Artificial Sequence
  Description of Artificial Sequence: Synthetic Linker
CPPCP

SEQ ID NO: 2167 - protein, 6 aa, Artificial Sequence
  Description of Artificial Sequence: Synthetic Linker
QPKAAP

SEQ ID NO: 2168 - protein, 25 aa, Artificial Sequence
  Description of Artificial Sequence: Synthetic Linker
PPPPPASSTTFSTTRRSSTTSSSPS

SEQ ID NO: 2169 - protein, 27 aa, Artificial Sequence
  Description of Artificial Sequence: Synthetic Linker
GGNPPGGNPPGTTTPRPATSTGSSPGP

SEQ ID NO: 2170 - protein, 33 aa, Artificial Sequence
  Description of Artificial Sequence: Synthetic Linker
GTSTGGSTTTTASGTTSTKASTTSTSSTSTGTG

SEQ ID NO: 2171 - protein, 33 aa, Artificial Sequence
  Description of Artificial Sequence: Synthetic Linker
TVSSSSVSSSHSSTSTSSSHSSSSTPPTQPTGV

SEQ ID NO: 2172 - protein, 34 aa, Artificial Sequence
  Description of Artificial Sequence: Synthetic Linker
GSSGTPPSNPSSSASPTSSTAKPSSTSTASNPSG

SEQ ID NO: 2173 - protein, 41 aa, Artificial Sequence
  Description of Artificial Sequence: Synthetic Linker
ASSSSSTRAASTTSRVSPTTSRSSSATPPPGSTTTRVPPVG

SEQ ID NO: 2174 - protein, 48 aa, Artificial Sequence
  Description of Artificial Sequence: Synthetic Linker
PSSGGTSSSSSAAPQSTSTKASTTTSAVRTTSTATTKTTSSAPAQGTN

SEQ ID NO: 2175 - protein, 6 aa, Artificial Sequence
  Description of Artificial Sequence: Synthetic Linker
ASTKGP

SEQ ID NO: 2176 - protein, 12 aa, Artificial Sequence
  Description of Artificial Sequence: Synthetic Linker
TVAAPSVFIFPP

SEQ ID NO: 2177 - protein, 13 aa, Artificial Sequence
  Description of Artificial Sequence: Synthetic Linker
ASTKGPSVFPLAP

SEQ ID NO: 2178 - protein, 13 aa, Artificial Sequence
  Description of Artificial Sequence: Synthetic Linker
QPKAAPSVTLFPP

SEQ ID NO: 2179 - protein, 5 aa, Artificial Sequence
  Description of Artificial Sequence: Synthetic Linker
RSANS

SEQ ID NO: 2180 - protein, 9 aa, Artificial Sequence
  Description of Artificial Sequence: Synthetic Linker
RPAKLALPP

SEQ ID NO: 2181 - protein, 17 aa, Artificial Sequence
  Description of Artificial Sequence: Synthetic Linker
SLHGFDLASEQHTVRDT

SEQ ID NO: 2182 - protein, 4 aa, Artificial Sequence
  Description of Artificial Sequence: Synthetic Linker
RARI

SEQ ID NO: 2183 - protein, 11 aa, Artificial Sequence
  Description of Artificial Sequence: Synthetic Linker
TKPQLGIREGM

SEQ ID NO: 2184 - protein, 21 aa, Artificial Sequence
  Description of Artificial Sequence: Synthetic Linker
HKPMAAPTTLKAGPLLSSEKL

SEQ ID NO: 2185 - protein, 12 aa, Artificial Sequence
  Description of Artificial Sequence: Synthetic Linker
SLPADRKPGEPV

SEQ ID NO: 2186 - protein, 6 aa, Artificial Sequence
  Description of Artificial Sequence: Synthetic Linker
RRHGEY

SEQ ID NO: 2187 - protein, 7 aa, Artificial Sequence
  Description of Artificial Sequence: Synthetic Linker
ANQNSAE

SEQ ID NO: 2188 - protein, 14 aa, Artificial Sequence
  Description of Artificial Sequence: Synthetic Linker
LTTNLTAFFREAHH

SEQ ID NO: 2189 - protein, 4 aa, Artificial Sequence
  Description of Artificial Sequence: Synthetic Linker
PNQR

SEQ ID NO: 2190 - protein, 5 aa, Artificial Sequence
  Description of Artificial Sequence: Synthetic Linker
ARNDP

SEQ ID NO: 2191 - protein, 5 aa, Artificial Sequence
  Description of Artificial Sequence: Synthetic Linker
LNWTR

SEQ ID NO: 2192 - protein, 6 aa, Artificial Sequence
  Description of Artificial Sequence: Synthetic Linker
DAATDR

SEQ ID NO: 2193 - protein, 6 aa, Artificial Sequence
  Description of Artificial Sequence: Synthetic Linker
DKASGA

SEQ ID NO: 2194 - protein, 6 aa, Artificial Sequence
  Description of Artificial Sequence: Synthetic Linker
GPNGNI

SEQ ID NO: 2195 - protein, 9 aa, Artificial Sequence
  Description of Artificial Sequence: Synthetic Linker
AWDNSDSSV

SEQ ID NO: 2196 - protein, 9 aa, Artificial Sequence
  Description of Artificial Sequence: Synthetic Linker
LAHVGRSLI

SEQ ID NO: 2197 - protein, 9 aa, Artificial Sequence
  Description of Artificial Sequence: Synthetic Linker
TKNPQRGTF

SEQ ID NO: 2198 - protein, 11 aa, Artificial Sequence
  Description of Artificial Sequence: Synthetic Linker
APMPAGLETWV

SEQ ID NO: 2199 - protein, 16 aa, Artificial Sequence
  Description of Artificial Sequence: Synthetic Linker
DTGTLPNLNSEVGAGW

SEQ ID NO: 2200 - protein, 18 aa, Artificial Sequence
  Description of Artificial Sequence: Synthetic Linker
ANHMWNPTGAHQSSIPAL

SEQ ID NO: 2201 - protein, 4 aa, Artificial Sequence
  Description of Artificial Sequence: Synthetic Linker
DATE

SEQ ID NO: 2202 - protein, 7 aa, Artificial Sequence
  Description of Artificial Sequence: Synthetic Linker
RNYLINS

SEQ ID NO: 2203 - protein, 14 aa, Artificial Sequence
  Description of Artificial Sequence: Synthetic Linker
SSPKNLDDKVKLSE

SEQ ID NO: 2204 - protein, 5 aa, Artificial Sequence
  Description of Artificial Sequence: Synthetic Linker
QYQIV

SEQ ID NO: 2205 - protein, 8 aa, Artificial Sequence
  Description of Artificial Sequence: Synthetic Linker
RWLKNASP

SEQ ID NO: 2206 - protein, 14 aa, Artificial Sequence
  Description of Artificial Sequence: Synthetic Linker
NILNDRNPVVTEDV

SEQ ID NO: 2207 - protein, 5 aa, Artificial Sequence
  Description of Artificial Sequence: Synthetic Linker
YTPGE

SEQ ID NO: 2208 - protein, 4 aa, Artificial Sequence
  Description of Artificial Sequence: Synthetic Linker
FGTQ

SEQ ID NO: 2209 - protein, 6 aa, Artificial Sequence
  Description of Artificial Sequence: Synthetic Linker
SLQSGY

SEQ ID NO: 2210 - protein, 6 aa, Artificial Sequence
  Description of Artificial Sequence: Synthetic Linker
TIPANR

SEQ ID NO: 2211 - protein, 9 aa, Artificial Sequence
  Description of Artificial Sequence: Synthetic Linker
KSEKGRNKF

SEQ ID NO: 2212 - protein, 7 aa, Artificial Sequence
  Description of Artificial Sequence: Synthetic Linker
YFNKYSS

SEQ ID NO: 2213 - protein, 8 aa, Artificial Sequence
  Description of Artificial Sequence: Synthetic Linker
YRNPSRNI

SEQ ID NO: 2214 - protein, 4 aa, Artificial Sequence
  Description of Artificial Sequence: Synthetic Linker
YGLN

SEQ ID NO: 2215 - protein, 5 aa, Artificial Sequence
  Description of Artificial Sequence: Synthetic Linker
IMGSV

SEQ ID NO: 2216 - protein, 5 aa, Artificial Sequence
  Description of Artificial Sequence: Synthetic Linker
SGRDA

SEQ ID NO: 2217 - protein, 6 aa, Artificial Sequence
  Description of Artificial Sequence: Synthetic Linker
LIEKGG

SEQ ID NO: 2218 - protein, 7 aa, Artificial Sequence
  Description of Artificial Sequence: Synthetic Linker
DINNISP

SEQ ID NO: 2219 - protein, 7 aa, Artificial Sequence
  Description of Artificial Sequence: Synthetic Linker
GRHVRGI

SEQ ID NO: 2220 - protein, 8 aa, Artificial Sequence
  Description of Artificial Sequence: Synthetic Linker
VRGREPGD

SEQ ID NO: 2221 - protein, 6 aa, Artificial Sequence
  Description of Artificial Sequence: Synthetic Linker
EMEIPE

SEQ ID NO: 2222 - protein, 6 aa, Artificial Sequence
  Description of Artificial Sequence: Synthetic Linker
RMIKSA

SEQ ID NO: 2223 - protein, 4 aa, Artificial Sequence
  Description of Artificial Sequence: Synthetic Linker
GFTP

SEQ ID NO: 2224 - protein, 5 aa, Artificial Sequence
  Description of Artificial Sequence: Synthetic Linker
FKIDV

SEQ ID NO: 2225 - protein, 5 aa, Artificial Sequence
  Description of Artificial Sequence: Synthetic Linker
NLDDP

SEQ ID NO: 2226 - protein, 11 aa, Artificial Sequence
  Description of Artificial Sequence: Synthetic Linker
LQNQQDNRGNI

SEQ ID NO: 2227 - protein, 19 aa, Artificial Sequence
  Description of Artificial Sequence: Synthetic Linker
NPQGQVWIEGREQQPQKNI

SEQ ID NO: 2228 - protein, 35 aa, Artificial Sequence
  Description of Artificial Sequence: Synthetic Linker
RVQGPFSVIRPPLRSQRPQEEVNGLEETICSARCT

SEQ ID NO: 2229 - protein, 53 aa, Artificial Sequence
  Description of Artificial Sequence: Synthetic Linker
DSSVFQPGGGSPFGEGQGQGQQGQGQGHQGQGQGQQGQQGQQGQQSQGQGFRD

SEQ ID NO: 2230 - protein, 5 aa, Artificial Sequence
  Description of Artificial Sequence: Synthetic Linker
CEGSD

SEQ ID NO: 2231 - protein, 7 aa, Artificial Sequence
  Description of Artificial Sequence: Synthetic Linker
VQQQETI

SEQ ID NO: 2232 - protein, 8 aa, Artificial Sequence
  Description of Artificial Sequence: Synthetic Linker
KGINSKKT

SEQ ID NO: 2233 - protein, 12 aa, Artificial Sequence
  Description of Artificial Sequence: Synthetic Linker
RLKLEDRQVDLT

SEQ ID NO: 2234 - protein, 8 aa, Artificial Sequence
  Description of Artificial Sequence: Synthetic Linker
TDSTQIKM

SEQ ID NO: 2235 - protein, 11 aa, Artificial Sequence
  Description of Artificial Sequence: Synthetic Linker
ILLQYNTEDAY

SEQ ID NO: 2236 - protein, 14 aa, Artificial Sequence
  Description of Artificial Sequence: Synthetic Linker
ELVTNCFKNRYTLQ

SEQ ID NO: 2237 - protein, 23 aa, Artificial Sequence
  Description of Artificial Sequence: Synthetic Linker
IKLYLGYKNKKLRVNINVPMKTE

SEQ ID NO: 2238 - protein, 24 aa, Artificial Sequence
  Description of Artificial Sequence: Synthetic Linker
KSKLLVLEDENANVDEVELKPDTL

SEQ ID NO: 2239 - protein, 11 aa, Artificial Sequence
  Description of Artificial Sequence: Synthetic Linker
VLTFDLAAPTV

SEQ ID NO: 2240 - protein, 27 aa, Artificial Sequence
  Description of Artificial Sequence: Synthetic Linker
CPAGNFIGKTATPYTSGTPCGDCPSDC

SEQ ID NO: 2241 - protein, 8 aa, Artificial Sequence
  Description of Artificial Sequence: Synthetic Linker
HLPGREAH

SEQ ID NO: 2242 - protein, 8 aa, Artificial Sequence
  Description of Artificial Sequence: Synthetic Linker
YLPDAFGP

SEQ ID NO: 2243 - protein, 21 aa, Artificial Sequence
  Description of Artificial Sequence: Synthetic Linker
LEIKTLLMDEQDHGYALTGDA

SEQ ID NO: 2244 - protein, 7 aa, Artificial Sequence
  Description of Artificial Sequence: Synthetic Linker
VLAMAKV

SEQ ID NO: 2245 - protein, 4 aa, Artificial Sequence
  Description of Artificial Sequence: Synthetic Linker
FAFG

SEQ ID NO: 2246 - protein, 4 aa, Artificial Sequence
  Description of Artificial Sequence: Synthetic Linker
GPNQ

SEQ ID NO: 2247 - protein, 8 aa, Artificial Sequence
  Description of Artificial Sequence: Synthetic Linker
DEINNPSL

SEQ ID NO: 2248 - protein, 24 aa, Artificial Sequence
  Description of Artificial Sequence: Synthetic Linker
VIPAGKLERVDPTTVRQEGPWADP

SEQ ID NO: 2249 - protein, 15 aa, Artificial Sequence
  Description of Artificial Sequence: Synthetic Linker
LGVSSSEVSRVEADS

SEQ ID NO: 2250 - protein, 6 aa, Artificial Sequence
  Description of Artificial Sequence: Synthetic Linker
AIPDFG

SEQ ID NO: 2251 - protein, 6 aa, Artificial Sequence
  Description of Artificial Sequence: Synthetic Linker
VDPAYR

SEQ ID NO: 2252 - protein, 6 aa, Artificial Sequence
  Description of Artificial Sequence: Synthetic Linker
YAPSSP

SEQ ID NO: 2253 - protein, 23 aa, Artificial Sequence
  Description of Artificial Sequence: Synthetic Linker
ATPQMEEDKGPINHPQYPGDVGL

SEQ ID NO: 2254 - protein, 4 aa, Artificial Sequence
  Description of Artificial Sequence: Synthetic Linker
IWEP

SEQ ID NO: 2255 - protein, 6 aa, Artificial Sequence
  Description of Artificial Sequence: Synthetic Linker
RTDIQT

SEQ ID NO: 2256 - protein, 13 aa, Artificial Sequence
  Description of Artificial Sequence: Synthetic Linker
KIPFTANKFEKNY

SEQ ID NO: 2257 - protein, 10 aa, Artificial Sequence
  Description of Artificial Sequence: Synthetic Linker
LEGDKNALNQ

SEQ ID NO: 2258 - protein, 4 aa, Artificial Sequence
  Description of Artificial Sequence: Synthetic Linker
AGGD

SEQ ID NO: 2259 - protein, 4 aa, Artificial Sequence
  Description of Artificial Sequence: Synthetic Linker
KADV

SEQ ID NO: 2260 - protein, 4 aa, Artificial Sequence
  Description of Artificial Sequence: Synthetic Linker
KGGR

SEQ ID NO: 2261 - protein, 4 aa, Artificial Sequence
  Description of Artificial Sequence: Synthetic Linker
LGTF

SEQ ID NO: 2262 - protein, 4 aa, Artificial Sequence
  Description of Artificial Sequence: Synthetic Linker
LPFL

SEQ ID NO: 2263 - protein, 4 aa, Artificial Sequence
  Description of Artificial Sequence: Synthetic Linker
QKGK

SEQ ID NO: 2264 - protein, 5 aa, Artificial Sequence
  Description of Artificial Sequence: Synthetic Linker
EEKCE

SEQ ID NO: 2265 - protein, 5 aa, Artificial Sequence
  Description of Artificial Sequence: Synthetic Linker
LGAGD

SEQ ID NO: 2266 - protein, 5 aa, Artificial Sequence
  Description of Artificial Sequence: Synthetic Linker
LKSIE

SEQ ID NO: 2267 - protein, 5 aa, Artificial Sequence
  Description of Artificial Sequence: Synthetic Linker
PKTDD

SEQ ID NO: 2268 - protein, 5 aa, Artificial Sequence
  Description of Artificial Sequence: Synthetic Linker
SAFGS

SEQ ID NO: 2269 - protein, 5 aa, Artificial Sequence
  Description of Artificial Sequence: Synthetic Linker
VLRDP

SEQ ID NO: 2270 - protein, 6 aa, Artificial Sequence
  Description of Artificial Sequence: Synthetic Linker
EEGYKA

SEQ ID NO: 2271 - protein, 6 aa, Artificial Sequence
  Description of Artificial Sequence: Synthetic Linker
KDLGVK

SEQ ID NO: 2272 - protein, 6 aa, Artificial Sequence
  Description of Artificial Sequence: Synthetic Linker
LVDISV

SEQ ID NO: 2273 - protein, 6 aa, Artificial Sequence
  Description of Artificial Sequence: Synthetic Linker
NIRAVP

SEQ ID NO: 2274 - protein, 6 aa, Artificial Sequence
  Description of Artificial Sequence: Synthetic Linker
RCGARR

SEQ ID NO: 2275 - protein, 6 aa, Artificial Sequence
  Description of Artificial Sequence: Synthetic Linker
VFRKGF

SEQ ID NO: 2276 - protein, 6 aa, Artificial Sequence
  Description of Artificial Sequence: Synthetic Linker
VIGKAL

SEQ ID NO: 2277 - protein, 7 aa, Artificial Sequence
  Description of Artificial Sequence: Synthetic Linker
IGIGLPE

SEQ ID NO: 2278 - protein, 7 aa, Artificial Sequence
  Description of Artificial Sequence: Synthetic Linker
QDETGKW

SEQ ID NO: 2279 - protein, 7 aa, Artificial Sequence
  Description of Artificial Sequence: Synthetic Linker
VGMANTT

SEQ ID NO: 2280 - protein, 8 aa, Artificial Sequence
  Description of Artificial Sequence: Synthetic Linker
ELSNIEQV

SEQ ID NO: 2281 - protein, 10 aa, Artificial Sequence
  Description of Artificial Sequence: Synthetic Linker
FQGLTQDQGF

SEQ ID NO: 2282 - protein, 12 aa, Artificial Sequence
  Description of Artificial Sequence: Synthetic Linker
CGKSLSENEITL

SEQ ID NO: 2283 - protein, 14 aa, Artificial Sequence
  Description of Artificial Sequence: Synthetic Linker
LQGWDGQSPGTESH

SEQ ID NO: 2284 - protein, 17 aa, Artificial Sequence
  Description of Artificial Sequence: Synthetic Linker
PVPRIAELMGKKLPNFG

SEQ ID NO: 2285 - protein, 18 aa, Artificial Sequence
  Description of Artificial Sequence: Synthetic Linker
QYGASVSAKPELPLFYTP

SEQ ID NO: 2286 - protein, 18 aa, Artificial Sequence
  Description of Artificial Sequence: Synthetic Linker
SKAGMCACHSPLPSIRGA

SEQ ID NO: 2287 - protein, 23 aa, Artificial Sequence
  Description of Artificial Sequence: Synthetic Linker
EQNAAFPPLERKPFIPKKPIPAI

SEQ ID NO: 2288 - protein, 28 aa, Artificial Sequence
  Description of Artificial Sequence: Synthetic Linker
EALSPIKFNRWDLPEVDPETMQTSEPWV

SEQ ID NO: 2289 - protein, 7 aa, Artificial Sequence
  Description of Artificial Sequence: Synthetic Linker
NTGSGKR

SEQ ID NO: 2290 - protein, 7 aa, Artificial Sequence
  Description of Artificial Sequence: Synthetic Linker
TQPVQSS

SEQ ID NO: 2291 - protein, 7 aa, Artificial Sequence
  Description of Artificial Sequence: Synthetic Linker
YTGDNCA

SEQ ID NO: 2292 - protein, 18 aa, Artificial Sequence
  Description of Artificial Sequence: Synthetic Linker
LPRDGLKDPQGKPLHYDR

SEQ ID NO: 2293 - protein, 7 aa, Artificial Sequence
  Description of Artificial Sequence: Synthetic Linker
DDDRIKD

SEQ ID NO: 2294 - protein, 7 aa, Artificial Sequence
  Description of Artificial Sequence: Synthetic Linker
EAEKNQQ

SEQ ID NO: 2295 - protein, 11 aa, Artificial Sequence
  Description of Artificial Sequence: Synthetic Linker
NHLGIDLGETP

SEQ ID NO: 2296 - protein, 13 aa, Artificial Sequence
  Description of Artificial Sequence: Synthetic Linker
RLFESSGCAGKLA

SEQ ID NO: 2297 - protein, 13 aa, Artificial Sequence
  Description of Artificial Sequence: Synthetic Linker
VRHDGRHAHDYDY

SEQ ID NO: 2298 - protein, 15 aa, Artificial Sequence
  Description of Artificial Sequence: Synthetic Linker
RDIEADTPARYNADP

SEQ ID NO: 2299 - protein, 4 aa, Artificial Sequence
  Description of Artificial Sequence: Synthetic Linker
LSSR

SEQ ID NO: 2300 - protein, 4 aa, Artificial Sequence
  Description of Artificial Sequence: Synthetic Linker
SILM

SEQ ID NO: 2301 - protein, 5 aa, Artificial Sequence
  Description of Artificial Sequence: Synthetic Linker
DTSGG

SEQ ID NO: 2302 - protein, 5 aa, Artificial Sequence
  Description of Artificial Sequence: Synthetic Linker
LGDGA

SEQ ID NO: 2303 - protein, 6 aa, Artificial Sequence
  Description of Artificial Sequence: Synthetic Linker
ANNSTL

SEQ ID NO: 2304 - protein, 6 aa, Artificial Sequence
  Description of Artificial Sequence: Synthetic Linker
IDEIQK

SEQ ID NO: 2305 - protein, 6 aa, Artificial Sequence
  Description of Artificial Sequence: Synthetic Linker
KLPSFE

SEQ ID NO: 2306 - protein, 6 aa, Artificial Sequence
  Description of Artificial Sequence: Synthetic Linker
QEVSQC

SEQ ID NO: 2307 - protein, 6 aa, Artificial Sequence
  Description of Artificial Sequence: Synthetic Linker
RSLSTT

SEQ ID NO: 2308 - protein, 6 aa, Artificial Sequence
  Description of Artificial Sequence: Synthetic Linker
SSNHKL

SEQ ID NO: 2309 - protein, 6 aa, Artificial Sequence
  Description of Artificial Sequence: Synthetic Linker
TFESSH

SEQ ID NO: 2310 - protein, 7 aa, Artificial Sequence
  Description of Artificial Sequence: Synthetic Linker
TALRPSA

SEQ ID NO: 2311 - protein, 8 aa, Artificial Sequence
  Description of Artificial Sequence: Synthetic Linker
PLYESPRK

SEQ ID NO: 2312 - protein, 9 aa, Artificial Sequence
  Description of Artificial Sequence: Synthetic Linker
LNSDGYPDS

SEQ ID NO: 2313 - protein, 9 aa, Artificial Sequence
  Description of Artificial Sequence: Synthetic Linker
LWTDISARI

SEQ ID NO: 2314 - protein, 11 aa, Artificial Sequence
  Description of Artificial Sequence: Synthetic Linker
HKEMLGGEIIP

SEQ ID NO: 2315 - protein, 12 aa, Artificial Sequence
  Description of Artificial Sequence: Synthetic Linker
TLGTQPTVLRTF

SEQ ID NO: 2316 - protein, 12 aa, Artificial Sequence
  Description of Artificial Sequence: Synthetic Linker
VFSNVNLKEVNY

SEQ ID NO: 2317 - protein, 13 aa, Artificial Sequence
  Description of Artificial Sequence: Synthetic Linker
NVFACSDRPTVIY

SEQ ID NO: 2318 - protein, 14 aa, Artificial Sequence
  Description of Artificial Sequence: Synthetic Linker
DITPLGDSNGLSPL

SEQ ID NO: 2319 - protein, 14 aa, Artificial Sequence
  Description of Artificial Sequence: Synthetic Linker
FGLNIETGLLSDRK

SEQ ID NO: 2320 - protein, 29 aa, Artificial Sequence
  Description of Artificial Sequence: Synthetic Linker
TQALSSSVSSSKLFSSSTAPHETSFGEEV

SEQ ID NO: 2321 - protein, 4 aa, Artificial Sequence
  Description of Artificial Sequence: Synthetic Linker
EHGV

SEQ ID NO: 2322 - protein, 4 aa, Artificial Sequence
  Description of Artificial Sequence: Synthetic Linker
REGK

SEQ ID NO: 2323 - protein, 5 aa, Artificial Sequence
  Description of Artificial Sequence: Synthetic Linker
TVLHA

SEQ ID NO: 2324 - protein, 6 aa, Artificial Sequence
  Description of Artificial Sequence: Synthetic Linker
ETEKTG

SEQ ID NO: 2325 - protein, 6 aa, Artificial Sequence
  Description of Artificial Sequence: Synthetic Linker
FHYEGG

SEQ ID NO: 2326 - protein, 6 aa, Artificial Sequence
  Description of Artificial Sequence: Synthetic Linker
LDSGVS

SEQ ID NO: 2327 - protein, 6 aa, Artificial Sequence
  Description of Artificial Sequence: Synthetic Linker
PQAPLA

SEQ ID NO: 2328 - protein, 7 aa, Artificial Sequence
  Description of Artificial Sequence: Synthetic Linker
DKRDGKE

SEQ ID NO: 2329 - protein, 8 aa, Artificial Sequence
  Description of Artificial Sequence: Synthetic Linker
IHPEEGVS

SEQ ID NO: 2330 - protein, 14 aa, Artificial Sequence
  Description of Artificial Sequence: Synthetic Linker
PSLETFTNVTEFEY

SEQ ID NO: 2331 - protein, 19 aa, Artificial Sequence
  Description of Artificial Sequence: Synthetic Linker
GGKFDDNSYKVSGGLHGVG

SEQ ID NO: 2332 - protein, 5 aa, Artificial Sequence
  Description of Artificial Sequence: Synthetic Linker
MKPEN

SEQ ID NO: 2333 - protein, 6 aa, Artificial Sequence
  Description of Artificial Sequence: Synthetic Linker
TNISRA

SEQ ID NO: 2334 - protein, 7 aa, Artificial Sequence
  Description of Artificial Sequence: Synthetic Linker
LLESGRL

SEQ ID NO: 2335 - protein, 15 aa, Artificial Sequence
  Description of Artificial Sequence: Synthetic Linker
VWGTKGLANEGKVIG

SEQ ID NO: 2336 - protein, 28 aa, Artificial Sequence
  Description of Artificial Sequence: Synthetic Linker
TLSQWGFFSPYGIGDNDACTINPYDGWA

SEQ ID NO: 2337 - protein, 4 aa, Artificial Sequence
  Description of Artificial Sequence: Synthetic Linker
MERE

SEQ ID NO: 2338 - protein, 7 aa, Artificial Sequence
  Description of Artificial Sequence: Synthetic Linker
FIDKPGI

SEQ ID NO: 2339 - protein, 8 aa, Artificial Sequence
  Description of Artificial Sequence: Synthetic Linker
TLNYTCPT

SEQ ID NO: 2340 - protein, 10 aa, Artificial Sequence
  Description of Artificial Sequence: Synthetic Linker
LLQERQDNLL

SEQ ID NO: 2341 - protein, 12 aa, Artificial Sequence
  Description of Artificial Sequence: Synthetic Linker
QRTTLPHIRSIT

SEQ ID NO: 2342 - protein, 4 aa, Artificial Sequence
  Description of Artificial Sequence: Synthetic Linker
VGGF

SEQ ID NO: 2343 - protein, 5 aa, Artificial Sequence
  Description of Artificial Sequence: Synthetic Linker
AKIQI

SEQ ID NO: 2344 - protein, 5 aa, Artificial Sequence
  Description of Artificial Sequence: Synthetic Linker
KEQNK

SEQ ID NO: 2345 - protein, 7 aa, Artificial Sequence
  Description of Artificial Sequence: Synthetic Linker
PGPKCPF

SEQ ID NO: 2346 - protein, 9 aa, Artificial Sequence
  Description of Artificial Sequence: Synthetic Linker
QLNYISIAS

SEQ ID NO: 2347 - protein, 9 aa, Artificial Sequence
  Description of Artificial Sequence: Synthetic Linker
SANNIAKYD

SEQ ID NO: 2348 - protein, 16 aa, Artificial Sequence
  Description of Artificial Sequence: Synthetic Linker
AIKGNIDAPQVVEGEK

SEQ ID NO: 2349 - protein, 18 aa, Artificial Sequence
  Description of Artificial Sequence: Synthetic Linker
VIPQGRSHPVQPYPGAFV

SEQ ID NO: 2350 - protein, 4 aa, Artificial Sequence
  Description of Artificial Sequence: Synthetic Linker
ETSR

SEQ ID NO: 2351 - protein, 5 aa, Artificial Sequence
  Description of Artificial Sequence: Synthetic Linker
GVGRR

SEQ ID NO: 2352 - protein, 6 aa, Artificial Sequence
  Description of Artificial Sequence: Synthetic Linker
FFLGQI

SEQ ID NO: 2353 - protein, 6 aa, Artificial Sequence
  Description of Artificial Sequence: Synthetic Linker
LEGSSL

SEQ ID NO: 2354 - protein, 8 aa, Artificial Sequence
  Description of Artificial Sequence: Synthetic Linker
DLSQVNEL

SEQ ID NO: 2355 - protein, 8 aa, Artificial Sequence
  Description of Artificial Sequence: Synthetic Linker
KNANGDYF

SEQ ID NO: 2356 - protein, 11 aa, Artificial Sequence
  Description of Artificial Sequence: Synthetic Linker
ILPLPYPNSPV

SEQ ID NO: 2357 - protein, 12 aa, Artificial Sequence
  Description of Artificial Sequence: Synthetic Linker
FADPTIQSQSEI

SEQ ID NO: 2358 - protein, 13 aa, Artificial Sequence
  Description of Artificial Sequence: Synthetic Linker
CGPYFANDNFSLE

SEQ ID NO: 2359 - protein, 15 aa, Artificial Sequence
  Description of Artificial Sequence: Synthetic Linker
PDSPTYDKFLNPESL

SEQ ID NO: 2360 - protein, 4 aa, Artificial Sequence
  Description of Artificial Sequence: Synthetic Linker
TGDL

SEQ ID NO: 2361 - protein, 6 aa, Artificial Sequence
  Description of Artificial Sequence: Synthetic Linker
FDNEYE

SEQ ID NO: 2362 - protein, 7 aa, Artificial Sequence
  Description of Artificial Sequence: Synthetic Linker
SLKFEGD

SEQ ID NO: 2363 - protein, 13 aa, Artificial Sequence
  Description of Artificial Sequence: Synthetic Linker
VFNPEGRDLITDW

SEQ ID NO: 2364 - protein, 15 aa, Artificial Sequence
  Description of Artificial Sequence: Synthetic Linker
GGNYDINSHLPLIPE

SEQ ID NO: 2365 - protein, 5 aa, Artificial Sequence
  Description of Artificial Sequence: Synthetic Linker
RNEQD

SEQ ID NO: 2366 - protein, 4 aa, Artificial Sequence
  Description of Artificial Sequence: Synthetic Linker
KEGK

SEQ ID NO: 2367 - protein, 5 aa, Artificial Sequence
  Description of Artificial Sequence: Synthetic Linker
MEQAM

SEQ ID NO: 2368 - protein, 6 aa, Artificial Sequence
  Description of Artificial Sequence: Synthetic Linker
ILRVNV

SEQ ID NO: 2369 - protein, 7 aa, Artificial Sequence
  Description of Artificial Sequence: Synthetic Linker
LPDGEDP

SEQ ID NO: 2370 - protein, 7 aa, Artificial Sequence
  Description of Artificial Sequence: Synthetic Linker
LSIGIRR

SEQ ID NO: 2371 - protein, 8 aa, Artificial Sequence
  Description of Artificial Sequence: Synthetic Linker
DNAEPNRL

SEQ ID NO: 2372 - protein, 17 aa, Artificial Sequence
  Description of Artificial Sequence: Synthetic Linker
GFVRKAILASFPEGVGI

SEQ ID NO: 2373 - protein, 4 aa, Artificial Sequence
  Description of Artificial Sequence: Synthetic Linker
VDGV

SEQ ID NO: 2374 - protein, 5 aa, Artificial Sequence
  Description of Artificial Sequence: Synthetic Linker
LWNGG

SEQ ID NO: 2375 - protein, 5 aa, Artificial Sequence
  Description of Artificial Sequence: Synthetic Linker
RGISK

SEQ ID NO: 2376 - protein, 7 aa, Artificial Sequence
  Description of Artificial Sequence: Synthetic Linker
CYVCEKW

SEQ ID NO: 2377 - protein, 7 aa, Artificial Sequence
  Description of Artificial Sequence: Synthetic Linker
RDQNGNI

SEQ ID NO: 2378 - protein, 8 aa, Artificial Sequence
  Description of Artificial Sequence: Synthetic Linker
RDKDKNFK

SEQ ID NO: 2379 - protein, 8 aa, Artificial Sequence
  Description of Artificial Sequence: Synthetic Linker
TAGNEDTK

SEQ ID NO: 2380 - protein, 9 aa, Artificial Sequence
  Description of Artificial Sequence: Synthetic Linker
ESNGRYSAL

SEQ ID NO: 2381 - protein, 11 aa, Artificial Sequence
  Description of Artificial Sequence: Synthetic Linker
GSHKSDALFGK

SEQ ID NO: 2382 - protein, 18 aa, Artificial Sequence
  Description of Artificial Sequence: Synthetic Linker
SKRKPSGGKPGTYNVWNF

SEQ ID NO: 2383 - protein, 4 aa, Artificial Sequence
  Description of Artificial Sequence: Synthetic Linker
FYNM

SEQ ID NO: 2384 - protein, 4 aa, Artificial Sequence
  Description of Artificial Sequence: Synthetic Linker
KFTW

SEQ ID NO: 2385 - protein, 6 aa, Artificial Sequence
  Description of Artificial Sequence: Synthetic Linker
FITPII

SEQ ID NO: 2386 - protein, 6 aa, Artificial Sequence
  Description of Artificial Sequence: Synthetic Linker
FSKKKA

SEQ ID NO: 2387 - protein, 7 aa, Artificial Sequence
  Description of Artificial Sequence: Synthetic Linker
SNLDRHL

SEQ ID NO: 2388 - protein, 8 aa, Artificial Sequence
  Description of Artificial Sequence: Synthetic Linker
FHSLQGND

SEQ ID NO: 2389 - protein, 8 aa, Artificial Sequence
  Description of Artificial Sequence: Synthetic Linker
ITKPTKNT

SEQ ID NO: 2390 - protein, 10 aa, Artificial Sequence
  Description of Artificial Sequence: Synthetic Linker
YYKGLGTSLA

SEQ ID NO: 2391 - protein, 14 aa, Artificial Sequence
  Description of Artificial Sequence: Synthetic Linker
QYEPGTVLDPTLKE

SEQ ID NO: 2392 - protein, 6 aa, Artificial Sequence
  Description of Artificial Sequence: Synthetic Linker
LNPSSR

SEQ ID NO: 2393 - protein, 8 aa, Artificial Sequence
  Description of Artificial Sequence: Synthetic Linker
QRAPPKTF

SEQ ID NO: 2394 - protein, 12 aa, Artificial Sequence
  Description of Artificial Sequence: Synthetic Linker
ADAKVMKDAKTK

SEQ ID NO: 2395 - protein, 4 aa, Artificial Sequence
  Description of Artificial Sequence: Synthetic Linker
LNGN

SEQ ID NO: 2396 - protein, 5 aa, Artificial Sequence
  Description of Artificial Sequence: Synthetic Linker
AGEME

SEQ ID NO: 2397 - protein, 6 aa, Artificial Sequence
  Description of Artificial Sequence: Synthetic Linker
MDNMGR

SEQ ID NO: 2398 - protein, 6 aa, Artificial Sequence
  Description of Artificial Sequence: Synthetic Linker
SREYKK

SEQ ID NO: 2399 - protein, 6 aa, Artificial Sequence
  Description of Artificial Sequence: Synthetic Linker
STKDVK

SEQ ID NO: 2400 - protein, 7 aa, Artificial Sequence
  Description of Artificial Sequence: Synthetic Linker
KLPVKGF

SEQ ID NO: 2401 - protein, 7 aa, Artificial Sequence
  Description of Artificial Sequence: Synthetic Linker
PFNGEDY

SEQ ID NO: 2402 - protein, 8 aa, Artificial Sequence
  Description of Artificial Sequence: Synthetic Linker
FKMQSLDK

SEQ ID NO: 2403 - protein, 4 aa, Artificial Sequence
  Description of Artificial Sequence: Synthetic Linker
TPEG

SEQ ID NO: 2404 - protein, 5 aa, Artificial Sequence
  Description of Artificial Sequence: Synthetic Linker
VGPLK

SEQ ID NO: 2405 - protein, 6 aa, Artificial Sequence
  Description of Artificial Sequence: Synthetic Linker
ETDADF

SEQ ID NO: 2406 - protein, 8 aa, Artificial Sequence
  Description of Artificial Sequence: Synthetic Linker
IPEEDGSS

SEQ ID NO: 2407 - protein, 9 aa, Artificial Sequence
  Description of Artificial Sequence: Synthetic Linker
DCTKLGTGA

SEQ ID NO: 2408 - protein, 10 aa, Artificial Sequence
  Description of Artificial Sequence: Synthetic Linker
NIPNDVTKLN

SEQ ID NO: 2409 - protein, 15 aa, Artificial Sequence
  Description of Artificial Sequence: Synthetic Linker
GAARPGLRLPGCVDA

SEQ ID NO: 2410 - protein, 12 aa, Artificial Sequence
  Description of Artificial Sequence: Synthetic Linker
RLRRNDDEPAEM

SEQ ID NO: 2411 - protein, 4 aa, Artificial Sequence
  Description of Artificial Sequence: Synthetic Linker
LDQR

SEQ ID NO: 2412 - protein, 5 aa, Artificial Sequence
  Description of Artificial Sequence: Synthetic Linker
VDGNR

SEQ ID NO: 2413 - protein, 6 aa, Artificial Sequence
  Description of Artificial Sequence: Synthetic Linker
PLRRFY

SEQ ID NO: 2414 - protein, 6 aa, Artificial Sequence
  Description of Artificial Sequence: Synthetic Linker
YAEEDG

SEQ ID NO: 2415 - protein, 6 aa, Artificial Sequence
  Description of Artificial Sequence: Synthetic Linker
YEDGRL

SEQ ID NO: 2416 - protein, 7 aa, Artificial Sequence
  Description of Artificial Sequence: Synthetic Linker
RSNQGTA

SEQ ID NO: 2417 - protein, 10 aa, Artificial Sequence
  Description of Artificial Sequence: Synthetic Linker
DGPASENGFL

SEQ ID NO: 2418 - protein, 14 aa, Artificial Sequence
  Description of Artificial Sequence: Synthetic Linker
PRVVVGQRVRKGDL

SEQ ID NO: 2419 - protein, 16 aa, Artificial Sequence
  Description of Artificial Sequence: Synthetic Linker
ELITNIGETAGVVQDI

SEQ ID NO: 2420 - protein, 20 aa, Artificial Sequence
  Description of Artificial Sequence: Synthetic Linker
SDPTLPRSDRECPKCHSREN

SEQ ID NO: 2421 - protein, 5 aa, Artificial Sequence
  Description of Artificial Sequence: Synthetic Linker
VEGEV

SEQ ID NO: 2422 - protein, 8 aa, Artificial Sequence
  Description of Artificial Sequence: Synthetic Linker
YVPVVQEV

SEQ ID NO: 2423 - protein, 4 aa, Artificial Sequence
  Description of Artificial Sequence: Synthetic Linker
YQNN

SEQ ID NO: 2424 - protein, 5 aa, Artificial Sequence
  Description of Artificial Sequence: Synthetic Linker
LVVNI

SEQ ID NO: 2425 - protein, 6 aa, Artificial Sequence
  Description of Artificial Sequence: Synthetic Linker
EKNFQT

SEQ ID NO: 2426 - protein, 11 aa, Artificial Sequence
  Description of Artificial Sequence: Synthetic Linker
MKLVPSIPPAT

SEQ ID NO: 2427 - protein, 14 aa, Artificial Sequence
  Description of Artificial Sequence: Synthetic Linker
TQPDVPFKNPDNVV

SEQ ID NO: 2428 - protein, 32 aa, Artificial Sequence
  Description of Artificial Sequence: Synthetic Linker
YPEDHNEPQSVRAASSDPGEVVPSACAADEPV

SEQ ID NO: 2429 - protein, 4 aa, Artificial Sequence
  Description of Artificial Sequence: Synthetic Linker
ALCL

SEQ ID NO: 2430 - protein, 4 aa, Artificial Sequence
  Description of Artificial Sequence: Synthetic Linker
LLSL

SEQ ID NO: 2431 - protein, 7 aa, Artificial Sequence
  Description of Artificial Sequence: Synthetic Linker
LNNVRFS

SEQ ID NO: 2432 - protein, 7 aa, Artificial Sequence
  Description of Artificial Sequence: Synthetic Linker
SLCKAHL

SEQ ID NO: 2433 - protein, 8 aa, Artificial Sequence
  Description of Artificial Sequence: Synthetic Linker
EHNNLVNV

SEQ ID NO: 2434 - protein, 8 aa, Artificial Sequence
  Description of Artificial Sequence: Synthetic Linker
YDTGRTGR

SEQ ID NO: 2435 - protein, 11 aa, Artificial Sequence
  Description of Artificial Sequence: Synthetic Linker
QHNLKQNDQPQ

SEQ ID NO: 2436 - protein, 11 aa, Artificial Sequence
  Description of Artificial Sequence: Synthetic Linker
LYPNAQTGHGH

SEQ ID NO: 2437 - protein, 13 aa, Artificial Sequence
  Description of Artificial Sequence: Synthetic Linker
AEVTYKHHEPTGC

SEQ ID NO: 2438 - protein, 4 aa, Artificial Sequence
  Description of Artificial Sequence: Synthetic Linker
MITP

SEQ ID NO: 2439 - protein, 8 aa, Artificial Sequence
  Description of Artificial Sequence: Synthetic Linker
LQHPKIIK

SEQ ID NO: 2440 - protein, 12 aa, Artificial Sequence
  Description of Artificial Sequence: Synthetic Linker
REDEEMGLTTTS

SEQ ID NO: 2441 - protein, 5 aa, Artificial Sequence
  Description of Artificial Sequence: Synthetic Linker
GSREE

SEQ ID NO: 2442 - protein, 4 aa, Artificial Sequence
  Description of Artificial Sequence: Synthetic Linker
ENTC

SEQ ID NO: 2443 - protein, 11 aa, Artificial Sequence
  Description of Artificial Sequence: Synthetic Linker
PVSGAKTFKNE

SEQ ID NO: 2444 - protein, 5 aa, Artificial Sequence
  Description of Artificial Sequence: Synthetic Linker
LSQDD

SEQ ID NO: 2445 - protein, 8 aa, Artificial Sequence
  Description of Artificial Sequence: Synthetic Linker
LLGADDDL

SEQ ID NO: 2446 - protein, 4 aa, Artificial Sequence
  Description of Artificial Sequence: Synthetic Linker
GHGE

SEQ ID NO: 2447 - protein, 4 aa, Artificial Sequence
  Description of Artificial Sequence: Synthetic Linker
PKGR

SEQ ID NO: 2448 - protein, 5 aa, Artificial Sequence
  Description of Artificial Sequence: Synthetic Linker
ALPSP

SEQ ID NO: 2449 - protein, 6 aa, Artificial Sequence
  Description of Artificial Sequence: Synthetic Linker
DYGVEV

SEQ ID NO: 2450 - protein, 6 aa, Artificial Sequence
  Description of Artificial Sequence: Synthetic Linker
EDPSLK

SEQ ID NO: 2451 - protein, 7 aa, Artificial Sequence
  Description of Artificial Sequence: Synthetic Linker
FGDGPPL

SEQ ID NO: 2452 - protein, 8 aa, Artificial Sequence
  Description of Artificial Sequence: Synthetic Linker
RQEETGEL

SEQ ID NO: 2453 - protein, 8 aa, Artificial Sequence
  Description of Artificial Sequence: Synthetic Linker
SVPKVPYR

SEQ ID NO: 2454 - protein, 8 aa, Artificial Sequence
  Description of Artificial Sequence: Synthetic Linker
WQGEKPES

SEQ ID NO: 2455 - protein, 12 aa, Artificial Sequence
  Description of Artificial Sequence: Synthetic Linker
EVPFARLPDPNV

SEQ ID NO: 2456 - protein, 4 aa, Artificial Sequence
  Description of Artificial Sequence: Synthetic Linker
DIYV

SEQ ID NO: 2457 - protein, 6 aa, Artificial Sequence
  Description of Artificial Sequence: Synthetic Linker
IGENIN

SEQ ID NO: 2458 - protein, 7 aa, Artificial Sequence
  Description of Artificial Sequence: Synthetic Linker
AGKITDV

SEQ ID NO: 2459 - protein, 8 aa, Artificial Sequence
  Description of Artificial Sequence: Synthetic Linker
KAGNVAAD

SEQ ID NO: 2460 - protein, 14 aa, Artificial Sequence
  Description of Artificial Sequence: Synthetic Linker
YIPVPTRDLEKPFL

SEQ ID NO: 2461 - protein, 4 aa, Artificial Sequence
  Description of Artificial Sequence: Synthetic Linker
GEHI

SEQ ID NO: 2462 - protein, 4 aa, Artificial Sequence
  Description of Artificial Sequence: Synthetic Linker
EGPE

SEQ ID NO: 2463 - protein, 4 aa, Artificial Sequence
  Description of Artificial Sequence: Synthetic Linker
FEWT

SEQ ID NO: 2464 - protein, 4 aa, Artificial Sequence
  Description of Artificial Sequence: Synthetic Linker
KATY

SEQ ID NO: 2465 - protein, 4 aa, Artificial Sequence
  Description of Artificial Sequence: Synthetic Linker
KDGV

SEQ ID NO: 2466 - protein, 4 aa, Artificial Sequence
  Description of Artificial Sequence: Synthetic Linker
LLGS

SEQ ID NO: 2467 - protein, 4 aa, Artificial Sequence
  Description of Artificial Sequence: Synthetic Linker
VSKS

SEQ ID NO: 2468 - protein, 7 aa, Artificial Sequence
  Description of Artificial Sequence: Synthetic Linker
KAPDGRI

SEQ ID NO: 2469 - protein, 8 aa, Artificial Sequence
  Description of Artificial Sequence: Synthetic Linker
RKASNKAY

SEQ ID NO: 2470 - protein, 10 aa, Artificial Sequence
  Description of Artificial Sequence: Synthetic Linker
YAPILYENDH

SEQ ID NO: 2471 - protein, 4 aa, Artificial Sequence
  Description of Artificial Sequence: Synthetic Linker
YSLG

SEQ ID NO: 2472 - protein, 6 aa, Artificial Sequence
  Description of Artificial Sequence: Synthetic Linker
LDPQWS

SEQ ID NO: 2473 - protein, 7 aa, Artificial Sequence
  Description of Artificial Sequence: Synthetic Linker
REGNGPT

SEQ ID NO: 2474 - protein, 7 aa, Artificial Sequence
  Description of Artificial Sequence: Synthetic Linker
RGEQVAF

SEQ ID NO: 2475 - protein, 8 aa, Artificial Sequence
  Description of Artificial Sequence: Synthetic Linker
QQPHGPYY

SEQ ID NO: 2476 - protein, 11 aa, Artificial Sequence
  Description of Artificial Sequence: Synthetic Linker
LDTWPPETQNW

SEQ ID NO: 2477 - protein, 13 aa, Artificial Sequence
  Description of Artificial Sequence: Synthetic Linker
CFHPASGFAWQFS

SEQ ID NO: 2478 - protein, 16 aa, Artificial Sequence
  Description of Artificial Sequence: Synthetic Linker
GIQSPRPNGPMQTAAN

SEQ ID NO: 2479 - protein, 17 aa, Artificial Sequence
  Description of Artificial Sequence: Synthetic Linker
IDAEEDSTRRMGFETIL

SEQ ID NO: 2480 - protein, 22 aa, Artificial Sequence
  Description of Artificial Sequence: Synthetic Linker
EMPDAPLQPGWDRPETPYSPPL

SEQ ID NO: 2481 - protein, 6 aa, Artificial Sequence
  Description of Artificial Sequence: Synthetic Linker
LLDAPV

SEQ ID NO: 2482 - protein, 5 aa, Artificial Sequence
  Description of Artificial Sequence: Synthetic Linker
EHIDL

SEQ ID NO: 2483 - protein, 5 aa, Artificial Sequence
  Description of Artificial Sequence: Synthetic Linker
FGCDK

SEQ ID NO: 2484 - protein, 7 aa, Artificial Sequence
  Description of Artificial Sequence: Synthetic Linker
CDCKHTT

SEQ ID NO: 2485 - protein, 9 aa, Artificial Sequence
  Description of Artificial Sequence: Synthetic Linker
LNGNDNTIK

SEQ ID NO: 2486 - protein, 10 aa, Artificial Sequence
  Description of Artificial Sequence: Synthetic Linker
ISENKNDAKV

SEQ ID NO: 2487 - protein, 8 aa, Artificial Sequence
  Description of Artificial Sequence: Synthetic Linker
TAACTNTS

SEQ ID NO: 2488 - protein, 4 aa, Artificial Sequence
  Description of Artificial Sequence: Synthetic Linker
LTLL

SEQ ID NO: 2489 - protein, 12 aa, Artificial Sequence
  Description of Artificial Sequence: Synthetic Linker
DWENWQNVGQWR

SEQ ID NO: 2490 - protein, 8 aa, Artificial Sequence
  Description of Artificial Sequence: Synthetic Linker
STKNPVHA

SEQ ID NO: 2491 - protein, 5 aa, Artificial Sequence
  Description of Artificial Sequence: Synthetic Linker
THRNK

SEQ ID NO: 2492 - protein, 12 aa, Artificial Sequence
  Description of Artificial Sequence: Synthetic Linker
IDHVLGVPYTTV

SEQ ID NO: 2493 - protein, 4 aa, Artificial Sequence
  Description of Artificial Sequence: Synthetic Linker
IDGR

SEQ ID NO: 2494 - protein, 4 aa, Artificial Sequence
  Description of Artificial Sequence: Synthetic Linker
KGTQ

SEQ ID NO: 2495 - protein, 5 aa, Artificial Sequence
  Description of Artificial Sequence: Synthetic Linker
ETIKG

SEQ ID NO: 2496 - protein, 6 aa, Artificial Sequence
  Description of Artificial Sequence: Synthetic Linker
ECSSES

SEQ ID NO: 2497 - protein, 7 aa, Artificial Sequence
  Description of Artificial Sequence: Synthetic Linker
LDPTKTI

SEQ ID NO: 2498 - protein, 8 aa, Artificial Sequence
  Description of Artificial Sequence: Synthetic Linker
SKPEAEET

SEQ ID NO: 2499 - protein, 10 aa, Artificial Sequence
  Description of Artificial Sequence: Synthetic Linker
ETAVTQTYGG

SEQ ID NO: 2500 - protein, 11 aa, Artificial Sequence
  Description of Artificial Sequence: Synthetic Linker
FCTDHTVLVQT

SEQ ID NO: 2501 - protein, 4 aa, Artificial Sequence
  Description of Artificial Sequence: Synthetic Linker
SGGT

SEQ ID NO: 2502 - protein, 6 aa, Artificial Sequence
  Description of Artificial Sequence: Synthetic Linker
FNENGI

SEQ ID NO: 2503 - protein, 6 aa, Artificial Sequence
  Description of Artificial Sequence: Synthetic Linker
SFLNSM

SEQ ID NO: 2504 - protein, 7 aa, Artificial Sequence
  Description of Artificial Sequence: Synthetic Linker
QNTGANN

SEQ ID NO: 2505 - protein, 9 aa, Artificial Sequence
  Description of Artificial Sequence: Synthetic Linker
QNGYKPGDL

SEQ ID NO: 2506 - protein, 12 aa, Artificial Sequence
  Description of Artificial Sequence: Synthetic Linker
TTGTINGATAAT

SEQ ID NO: 2507 - protein, 15 aa, Artificial Sequence
  Description of Artificial Sequence: Synthetic Linker
DSSDPAATAPTTAST

SEQ ID NO: 2508 - protein, 11 aa, Artificial Sequence
  Description of Artificial Sequence: Synthetic Linker
AEQPGGWKGWR

SEQ ID NO: 2509 - protein, 7 aa, Artificial Sequence
  Description of Artificial Sequence: Synthetic Linker
VYRFDKE

SEQ ID NO: 2510 - protein, 4 aa, Artificial Sequence
  Description of Artificial Sequence: Synthetic Linker
DAHG

SEQ ID NO: 2511 - protein, 4 aa, Artificial Sequence
  Description of Artificial Sequence: Synthetic Linker
KGAL

SEQ ID NO: 2512 - protein, 5 aa, Artificial Sequence
  Description of Artificial Sequence: Synthetic Linker
RGVEW

SEQ ID NO: 2513 - protein, 6 aa, Artificial Sequence
  Description of Artificial Sequence: Synthetic Linker
VTDHDW

SEQ ID NO: 2514 - protein, 7 aa, Artificial Sequence
  Description of Artificial Sequence: Synthetic Linker
SGLEVSE

SEQ ID NO: 2515 - protein, 8 aa, Artificial Sequence
  Description of Artificial Sequence: Synthetic Linker
LPLPLVPQ

SEQ ID NO: 2516 - protein, 8 aa, Artificial Sequence
  Description of Artificial Sequence: Synthetic Linker
VGEPEMPS

SEQ ID NO: 2517 - protein, 9 aa, Artificial Sequence
  Description of Artificial Sequence: Synthetic Linker
SAILPGRFQ

SEQ ID NO: 2518 - protein, 18 aa, Artificial Sequence
  Description of Artificial Sequence: Synthetic Linker
QGKCKKTCRDVFCPGSST

SEQ ID NO: 2519 - protein, 4 aa, Artificial Sequence
  Description of Artificial Sequence: Synthetic Linker
EEGL

SEQ ID NO: 2520 - protein, 4 aa, Artificial Sequence
  Description of Artificial Sequence: Synthetic Linker
FAGY

SEQ ID NO: 2521 - protein, 6 aa, Artificial Sequence
  Description of Artificial Sequence: Synthetic Linker
NKETRK

SEQ ID NO: 2522 - protein, 7 aa, Artificial Sequence
  Description of Artificial Sequence: Synthetic Linker
EKELYFK

SEQ ID NO: 2523 - protein, 7 aa, Artificial Sequence
  Description of Artificial Sequence: Synthetic Linker
FQGKIKG

SEQ ID NO: 2524 - protein, 7 aa, Artificial Sequence
  Description of Artificial Sequence: Synthetic Linker
MWPDADL

SEQ ID NO: 2525 - protein, 7 aa, Artificial Sequence
  Description of Artificial Sequence: Synthetic Linker
VGEGFAF

SEQ ID NO: 2526 - protein, 10 aa, Artificial Sequence
  Description of Artificial Sequence: Synthetic Linker
GTARASIPTY

SEQ ID NO: 2527 - protein, 13 aa, Artificial Sequence
  Description of Artificial Sequence: Synthetic Linker
FTPVSKDPQSANW

SEQ ID NO: 2528 - protein, 13 aa, Artificial Sequence
  Description of Artificial Sequence: Synthetic Linker
YLPKGEDGKDYSW

SEQ ID NO: 2529 - protein, 22 aa, Artificial Sequence
  Description of Artificial Sequence: Synthetic Linker
WGFERDENGNPKRDETLKHPRC

SEQ ID NO: 2530 - protein, 55 aa, Artificial Sequence
  Description of Artificial Sequence: Synthetic Linker
AYLYGPGREDGPLPEYYEPMECPVIEHPFSKTLHNPTALHFATEEKAVCDPRYPF

SEQ ID NO: 2531 - protein, 44 aa, Artificial Sequence
  Description of Artificial Sequence: Synthetic Linker
GRLFAINKMAEGPFPEHYEPIETPLGTNPLHPNVVSNPVVRLYE

SEQ ID NO: 2532 - protein, 4 aa, Artificial Sequence
  Description of Artificial Sequence: Synthetic Linker
AAQK

SEQ ID NO: 2533 - protein, 4 aa, Artificial Sequence
  Description of Artificial Sequence: Synthetic Linker
EDGL

SEQ ID NO: 2534 - protein, 4 aa, Artificial Sequence
  Description of Artificial Sequence: Synthetic Linker
FSGY

SEQ ID NO: 2535 - protein, 5 aa, Artificial Sequence
  Description of Artificial Sequence: Synthetic Linker
TNASL

SEQ ID NO: 2536 - protein, 6 aa, Artificial Sequence
  Description of Artificial Sequence: Synthetic Linker
DAEKRQ

SEQ ID NO: 2537 - protein, 7 aa, Artificial Sequence
  Description of Artificial Sequence: Synthetic Linker
DEGKVTG

SEQ ID NO: 2538 - protein, 7 aa, Artificial Sequence
  Description of Artificial Sequence: Synthetic Linker
ENNKINA

SEQ ID NO: 2539 - protein, 7 aa, Artificial Sequence
  Description of Artificial Sequence: Synthetic Linker
VRDDFAF

SEQ ID NO: 2540 - protein, 10 aa, Artificial Sequence
  Description of Artificial Sequence: Synthetic Linker
TLPSEKQVDL

SEQ ID NO: 2541 - protein, 11 aa, Artificial Sequence
  Description of Artificial Sequence: Synthetic Linker
WLPKWDQTYDV

SEQ ID NO: 2542 - protein, 12 aa, Artificial Sequence
  Description of Artificial Sequence: Synthetic Linker
ALRMGKKEQFPY

SEQ ID NO: 2543 - protein, 13 aa, Artificial Sequence
  Description of Artificial Sequence: Synthetic Linker
NTPKATLADQVNY

SEQ ID NO: 2544 - protein, 27 aa, Artificial Sequence
  Description of Artificial Sequence: Synthetic Linker
YDKSSWNYQLDENGYAKRDETLTHPRC

SEQ ID NO: 2545 - protein, 9 aa, Artificial Sequence
  Description of Artificial Sequence: Synthetic Linker
HLPATIGDY

SEQ ID NO: 2546 - protein, 4 aa, Artificial Sequence
  Description of Artificial Sequence: Synthetic Linker
SNRG

SEQ ID NO: 2547 - protein, 6 aa, Artificial Sequence
  Description of Artificial Sequence: Synthetic Linker
DAVKGK

SEQ ID NO: 2548 - protein, 7 aa, Artificial Sequence
  Description of Artificial Sequence: Synthetic Linker
LLPDGRV

SEQ ID NO: 2549 - protein, 7 aa, Artificial Sequence
  Description of Artificial Sequence: Synthetic Linker
MDGNGQI

SEQ ID NO: 2550 - protein, 7 aa, Artificial Sequence
  Description of Artificial Sequence: Synthetic Linker
QAGPSTA

SEQ ID NO: 2551 - protein, 7 aa, Artificial Sequence
  Description of Artificial Sequence: Synthetic Linker
SDNHAWL

SEQ ID NO: 2552 - protein, 7 aa, Artificial Sequence
  Description of Artificial Sequence: Synthetic Linker
VLPDGST

SEQ ID NO: 2553 - protein, 7 aa, Artificial Sequence
  Description of Artificial Sequence: Synthetic Linker
YNSNGNL

SEQ ID NO: 2554 - protein, 7 aa, Artificial Sequence
  Description of Artificial Sequence: Synthetic Linker
YTSGSGD

SEQ ID NO: 2555 - protein, 8 aa, Artificial Sequence
  Description of Artificial Sequence: Synthetic Linker
DLPIVPAA

SEQ ID NO: 2556 - protein, 8 aa, Artificial Sequence
  Description of Artificial Sequence: Synthetic Linker
IEPTSGRV

SEQ ID NO: 2557 - protein, 8 aa, Artificial Sequence
  Description of Artificial Sequence: Synthetic Linker
WDPSTGIV

SEQ ID NO: 2558 - protein, 9 aa, Artificial Sequence
  Description of Artificial Sequence: Synthetic Linker
EANGQPWTS

SEQ ID NO: 2559 - protein, 9 aa, Artificial Sequence
  Description of Artificial Sequence: Synthetic Linker
MLTADKQGL

SEQ ID NO: 2560 - protein, 9 aa, Artificial Sequence
  Description of Artificial Sequence: Synthetic Linker
VAPDAMCGN

SEQ ID NO: 2561 - protein, 10 aa, Artificial Sequence
  Description of Artificial Sequence: Synthetic Linker
TLGEPGTSPN

SEQ ID NO: 2562 - protein, 12 aa, Artificial Sequence
  Description of Artificial Sequence: Synthetic Linker
VTVTKHDMFCPG

SEQ ID NO: 2563 - protein, 13 aa, Artificial Sequence
  Description of Artificial Sequence: Synthetic Linker
KQNPNSIVRVYHS

SEQ ID NO: 2564 - protein, 14 aa, Artificial Sequence
  Description of Artificial Sequence: Synthetic Linker
FASNGLYFARTFHT

SEQ ID NO: 2565 - protein, 14 aa, Artificial Sequence
  Description of Artificial Sequence: Synthetic Linker
GGGLCGDCTTNHFD

SEQ ID NO: 2566 - protein, 14 aa, Artificial Sequence
  Description of Artificial Sequence: Synthetic Linker
QASSYTAPQPGLGR

SEQ ID NO: 2567 - protein, 16 aa, Artificial Sequence
  Description of Artificial Sequence: Synthetic Linker
FGGSPDYQDSDATTNA

SEQ ID NO: 2568 - protein, 17 aa, Artificial Sequence
  Description of Artificial Sequence: Synthetic Linker
WSSYRNDAFGGSPGGIT

SEQ ID NO: 2569 - protein, 20 aa, Artificial Sequence
  Description of Artificial Sequence: Synthetic Linker
TGGQRRGIPFEDSTPVFTPE

SEQ ID NO: 2570 - protein, 10 aa, Artificial Sequence
  Description of Artificial Sequence: Synthetic Linker
LIPQHTGTFR

SEQ ID NO: 2571 - protein, 11 aa, Artificial Sequence
  Description of Artificial Sequence: Synthetic Linker
EPRSQPHTKPS

SEQ ID NO: 2572 - protein, 4 aa, Artificial Sequence
  Description of Artificial Sequence: Synthetic Linker
KPAP

SEQ ID NO: 2573 - protein, 6 aa, Artificial Sequence
  Description of Artificial Sequence: Synthetic Linker
IEGANG

SEQ ID NO: 2574 - protein, 8 aa, Artificial Sequence
  Description of Artificial Sequence: Synthetic Linker
PIKNMPID

SEQ ID NO: 2575 - protein, 12 aa, Artificial Sequence
  Description of Artificial Sequence: Synthetic Linker
DQPTAHPTVRDE

SEQ ID NO: 2576 - protein, 8 aa, Artificial Sequence
  Description of Artificial Sequence: Synthetic Linker
LVRTLVPT

SEQ ID NO: 2577 - protein, 9 aa, Artificial Sequence
  Description of Artificial Sequence: Synthetic Linker
AGAPVETPQ

SEQ ID NO: 2578 - protein, 11 aa, Artificial Sequence
  Description of Artificial Sequence: Synthetic Linker
SLDAPATSLTG

SEQ ID NO: 2579 - protein, 12 aa, Artificial Sequence
  Description of Artificial Sequence: Synthetic Linker
YAAGTPLSSPEL

SEQ ID NO: 2580 - protein, 4 aa, Artificial Sequence
  Description of Artificial Sequence: Synthetic Linker
KVEH

SEQ ID NO: 2581 - protein, 4 aa, Artificial Sequence
  Description of Artificial Sequence: Synthetic Linker
SHGQ

SEQ ID NO: 2582 - protein, 4 aa, Artificial Sequence
  Description of Artificial Sequence: Synthetic Linker
VDLS

SEQ ID NO: 2583 - protein, 5 aa, Artificial Sequence
  Description of Artificial Sequence: Synthetic Linker
KGLDA

SEQ ID NO: 2584 - protein, 5 aa, Artificial Sequence
  Description of Artificial Sequence: Synthetic Linker
LGPNA

SEQ ID NO: 2585 - protein, 5 aa, Artificial Sequence
  Description of Artificial Sequence: Synthetic Linker
LTGRI

SEQ ID NO: 2586 - protein, 6 aa, Artificial Sequence
  Description of Artificial Sequence: Synthetic Linker
ITRRSV

SEQ ID NO: 2587 - protein, 6 aa, Artificial Sequence
  Description of Artificial Sequence: Synthetic Linker
VKRQDI

SEQ ID NO: 2588 - protein, 7 aa, Artificial Sequence
  Description of Artificial Sequence: Synthetic Linker
FDKTGAE

SEQ ID NO: 2589 - protein, 17 aa, Artificial Sequence
  Description of Artificial Sequence: Synthetic Linker
ESNLQYDAGDKGIYRHY

SEQ ID NO: 2590 - protein, 5 aa, Artificial Sequence
  Description of Artificial Sequence: Synthetic Linker
DIGTI

SEQ ID NO: 2591 - protein, 27 aa, Artificial Sequence
  Description of Artificial Sequence: Synthetic Linker
TKKPVPDFSFYDRSAPIYTQPRYLPPS

SEQ ID NO: 2592 - protein, 4 aa, Artificial Sequence
  Description of Artificial Sequence: Synthetic Linker
KTPL

SEQ ID NO: 2593 - protein, 7 aa, Artificial Sequence
  Description of Artificial Sequence: Synthetic Linker
NCYGCET

SEQ ID NO: 2594 - protein, 16 aa, Artificial Sequence
  Description of Artificial Sequence: Synthetic Linker
YGIDVKIPEGLEPPNE

SEQ ID NO: 2595 - protein, 6 aa, Artificial Sequence
  Description of Artificial Sequence: Synthetic Linker
VGGFYN

SEQ ID NO: 2596 - protein, 7 aa, Artificial Sequence
  Description of Artificial Sequence: Synthetic Linker
VLTGKAR

SEQ ID NO: 2597 - protein, 14 aa, Artificial Sequence
  Description of Artificial Sequence: Synthetic Linker
FDVAESVIPSSGTF

SEQ ID NO: 2598 - protein, 5 aa, Artificial Sequence
  Description of Artificial Sequence: Synthetic Linker
TLKPW

SEQ ID NO: 2599 - protein, 9 aa, Artificial Sequence
  Description of Artificial Sequence: Synthetic Linker
VQNTTHLDE

SEQ ID NO: 2600 - protein, 11 aa, Artificial Sequence
  Description of Artificial Sequence: Synthetic Linker
LKGEPSDMDKA

SEQ ID NO: 2601 - protein, 14 aa, Artificial Sequence
  Description of Artificial Sequence: Synthetic Linker
HFPAMVSRISGIGL

SEQ ID NO: 2602 - protein, 15 aa, Artificial Sequence
  Description of Artificial Sequence: Synthetic Linker
QVSRGAEHLDDLDLN

SEQ ID NO: 2603 - protein, 26 aa, Artificial Sequence
  Description of Artificial Sequence: Synthetic Linker
LAQVDPGENARYCTLQGRNEVPDTLD

SEQ ID NO: 2604 - protein, 27 aa, Artificial Sequence
  Description of Artificial Sequence: Synthetic Linker
YNEEVVALPVGGFYRFRKSGDRHGWEG

SEQ ID NO: 2605 - protein, 13 aa, Artificial Sequence
  Description of Artificial Sequence: Synthetic Linker
HDPFTLEPYSRDP

SEQ ID NO: 2606 - protein, 13 aa, Artificial Sequence
  Description of Artificial Sequence: Synthetic Linker
YTPAGEPIPTNKR

SEQ ID NO: 2607 - protein, 4 aa, Artificial Sequence
  Description of Artificial Sequence: Synthetic Linker
NIPP

SEQ ID NO: 2608 - protein, 4 aa, Artificial Sequence
  Description of Artificial Sequence: Synthetic Linker
RGWA

SEQ ID NO: 2609 - protein, 5 aa, Artificial Sequence
  Description of Artificial Sequence: Synthetic Linker
AFETP

SEQ ID NO: 2610 - protein, 5 aa, Artificial Sequence
  Description of Artificial Sequence: Synthetic Linker
DELRG

SEQ ID NO: 2611 - protein, 6 aa, Artificial Sequence
  Description of Artificial Sequence: Synthetic Linker
EIPDVV

SEQ ID NO: 2612 - protein, 7 aa, Artificial Sequence
  Description of Artificial Sequence: Synthetic Linker
KGGYDGR

SEQ ID NO: 2613 - protein, 7 aa, Artificial Sequence
  Description of Artificial Sequence: Synthetic Linker
RRGEPHV

SEQ ID NO: 2614 - protein, 8 aa, Artificial Sequence
  Description of Artificial Sequence: Synthetic Linker
LKVPRPGT

SEQ ID NO: 2615 - protein, 14 aa, Artificial Sequence
  Description of Artificial Sequence: Synthetic Linker
NLDGKPLLTGKRNP

SEQ ID NO: 2616 - protein, 6 aa, Artificial Sequence
  Description of Artificial Sequence: Synthetic Linker
DHSDVA

SEQ ID NO: 2617 - protein, 8 aa, Artificial Sequence
  Description of Artificial Sequence: Synthetic Linker
FKPAYGSI

SEQ ID NO: 2618 - protein, 19 aa, Artificial Sequence
  Description of Artificial Sequence: Synthetic Linker
AFPGTPHLLPPANSGDADA

SEQ ID NO: 2619 - protein, 12 aa, Artificial Sequence
  Description of Artificial Sequence: Synthetic Linker
YGKDDKLYPKDP

SEQ ID NO: 2620 - protein, 9 aa, Artificial Sequence
  Description of Artificial Sequence: Synthetic Linker
KYNLYGKDI

SEQ ID NO: 2621 - protein, 6 aa, Artificial Sequence
  Description of Artificial Sequence: Synthetic Linker
LREGNL

SEQ ID NO: 2622 - protein, 6 aa, Artificial Sequence
  Description of Artificial Sequence: Synthetic Linker
DCNEKL

SEQ ID NO: 2623 - protein, 6 aa, Artificial Sequence
  Description of Artificial Sequence: Synthetic Linker
LYPSDP

SEQ ID NO: 2624 - protein, 6 aa, Artificial Sequence
  Description of Artificial Sequence: Synthetic Linker
YGAHDA

SEQ ID NO: 2625 - protein, 9 aa, Artificial Sequence
  Description of Artificial Sequence: Synthetic Linker
QFKMMGETD

SEQ ID NO: 2626 - protein, 6 aa, Artificial Sequence
  Description of Artificial Sequence: Synthetic Linker
FETEYF

SEQ ID NO: 2627 - protein, 11 aa, Artificial Sequence
  Description of Artificial Sequence: Synthetic Linker
TSPHDHQTHAY

SEQ ID NO: 2628 - protein, 9 aa, Artificial Sequence
  Description of Artificial Sequence: Synthetic Linker
KADPKGITE

SEQ ID NO: 2629 - protein, 34 aa, Artificial Sequence
  Description of Artificial Sequence: Synthetic Linker
LTAKEPTEVESVECPHIAVGVWEANEKLPETPDR

SEQ ID NO: 2630 - protein, 4 aa, Artificial Sequence
  Description of Artificial Sequence: Synthetic Linker
VVPN

SEQ ID NO: 2631 - protein, 5 aa, Artificial Sequence
  Description of Artificial Sequence: Synthetic Linker
LSPPV

SEQ ID NO: 2632 - protein, 7 aa, Artificial Sequence
  Description of Artificial Sequence: Synthetic Linker
DVKNGEC

SEQ ID NO: 2633 - protein, 7 aa, Artificial Sequence
  Description of Artificial Sequence: Synthetic Linker
KDDIVDR

SEQ ID NO: 2634 - protein, 7 aa, Artificial Sequence
  Description of Artificial Sequence: Synthetic Linker
SDKKCSV

SEQ ID NO: 2635 - protein, 7 aa, Artificial Sequence
  Description of Artificial Sequence: Synthetic Linker
TKVPLVA

SEQ ID NO: 2636 - protein, 9 aa, Artificial Sequence
  Description of Artificial Sequence: Synthetic Linker
LAQLDNYGQ

SEQ ID NO: 2637 - protein, 12 aa, Artificial Sequence
  Description of Artificial Sequence: Synthetic Linker
NYNVKSPITGND

SEQ ID NO: 2638 - protein, 85 aa, Artificial Sequence
  Description of Artificial Sequence: Synthetic Linker
KPLKEPKTVNVVQFEPSKGAIGKAYKKDAKLVMEYLAICDECYITEMEMLLNEKGEFTIETEGKTFQLTKDMINVKRFQKTLYVE

SEQ ID NO: 2639 - protein, 4 aa, Artificial Sequence
  Description of Artificial Sequence: Synthetic Linker
SNGG

SEQ ID NO: 2640 - protein, 13 aa, Artificial Sequence
  Description of Artificial Sequence: Synthetic Linker
FSVDEIVQPDPPI

SEQ ID NO: 2641 - protein, 10 aa, Artificial Sequence
  Description of Artificial Sequence: Synthetic Linker
LTPRRSRKLK

SEQ ID NO: 2642 - protein, 6 aa, Artificial Sequence
  Description of Artificial Sequence: Synthetic Linker
DEPRSV

SEQ ID NO: 2643 - protein, 29 aa, Artificial Sequence
  Description of Artificial Sequence: Synthetic Linker
LPTANGDGGALALDSLTVLGAGGNNANDW

SEQ ID NO: 2644 - protein, 6 aa, Artificial Sequence
  Description of Artificial Sequence: Synthetic Linker
RNNLTR

SEQ ID NO: 2645 - protein, 8 aa, Artificial Sequence
  Description of Artificial Sequence: Synthetic Linker
RAMTDVHQ

SEQ ID NO: 2646 - protein, 24 aa, Artificial Sequence
  Description of Artificial Sequence: Synthetic Linker
TTENPELQLEPLSAPEVTEPTATD

SEQ ID NO: 2647 - protein, 6 aa, Artificial Sequence
  Description of Artificial Sequence: Synthetic Linker
VPRDCG

SEQ ID NO: 2648 - protein, 7 aa, Artificial Sequence
  Description of Artificial Sequence: Synthetic Linker
VRSRGPE

SEQ ID NO: 2649 - protein, 40 aa, Artificial Sequence
  Description of Artificial Sequence: Synthetic Linker
QEPEFQRMSALRLAACKRKEQEHGKDRGNTPKKPRLVFTD

SEQ ID NO: 2650 - protein, 14 aa, Artificial Sequence
  Description of Artificial Sequence: Synthetic Linker
AEGFGLPEEKGPDL

SEQ ID NO: 2651 - protein, 4 aa, Artificial Sequence
  Description of Artificial Sequence: Synthetic Linker
KGGK

SEQ ID NO: 2652 - protein, 6 aa, Artificial Sequence
  Description of Artificial Sequence: Synthetic Linker
KNQKPI

SEQ ID NO: 2653 - protein, 7 aa, Artificial Sequence
  Description of Artificial Sequence: Synthetic Linker
RGTLNVS

SEQ ID NO: 2654 - protein, 9 aa, Artificial Sequence
  Description of Artificial Sequence: Synthetic Linker
TVGAGLPII

SEQ ID NO: 2655 - protein, 4 aa, Artificial Sequence
  Description of Artificial Sequence: Synthetic Linker
LDGE

SEQ ID NO: 2656 - protein, 4 aa, Artificial Sequence
  Description of Artificial Sequence: Synthetic Linker
LGNW

SEQ ID NO: 2657 - protein, 7 aa, Artificial Sequence
  Description of Artificial Sequence: Synthetic Linker
HLFPDCA

SEQ ID NO: 2658 - protein, 18 aa, Artificial Sequence
  Description of Artificial Sequence: Synthetic Linker
IPKAELLTSESRGVLPDT

SEQ ID NO: 2659 - protein, 5 aa, Artificial Sequence
  Description of Artificial Sequence: Synthetic Linker
ETVAP

SEQ ID NO: 2660 - protein, 6 aa, Artificial Sequence
  Description of Artificial Sequence: Synthetic Linker
QGLTSF

SEQ ID NO: 2661 - protein, 7 aa, Artificial Sequence
  Description of Artificial Sequence: Synthetic Linker
VSKPKME

SEQ ID NO: 2662 - protein, 5 aa, Artificial Sequence
  Description of Artificial Sequence: Synthetic Linker
TVAAP

SEQ ID NO: 2663 - protein, 26 aa, Artificial Sequence
  Description of Artificial Sequence: Synthetic Linker
GGNPPGGNRGTTTTRRPATTTGSSPG

SEQ ID NO: 2664 - protein, 7 aa, Artificial Sequence
  Description of Artificial Sequence: Synthetic Linker
CKPCICT

SEQ ID NO: 2665 - protein, 6 aa, Artificial Sequence
  Description of Artificial Sequence: Synthetic Linker
VPSEVS

SEQ ID NO: 2666 - protein, 10 aa, Artificial Sequence
  Description of Artificial Sequence: Synthetic Linker
EPKSCDKTHT

SEQ ID NO: 2667 - protein, 7 aa, Artificial Sequence
  Description of Artificial Sequence: Synthetic Linker
CPPCKCP

SEQ ID NO: 2668 - protein, 9 aa, Artificial Sequence
  Description of Artificial Sequence: Synthetic Linker
EPRGPTIKP

SEQ ID NO: 2669 - protein, 5 aa, Artificial Sequence
  Description of Artificial Sequence: Synthetic Linker
ATENE

SEQ ID NO: 2670 - protein, 6 aa, Artificial Sequence
  Description of Artificial Sequence: Synthetic Linker
AKSVGI

SEQ ID NO: 2671 - protein, 7 aa, Artificial Sequence
  Description of Artificial Sequence: Synthetic Linker
ATWTGDS

SEQ ID NO: 2672 - protein, 10 aa, Artificial Sequence
  Description of Artificial Sequence: Synthetic Linker
ATITNANWDD

SEQ ID NO: 2673 - protein, 11 aa, Artificial Sequence
  Description of Artificial Sequence: Synthetic Linker
NGKDFSEPLPE

SEQ ID NO: 2674 - protein, 6 aa, Artificial Sequence
  Description of Artificial Sequence: Synthetic Linker
KQPLRR

SEQ ID NO: 2675 - protein, 8 aa, Artificial Sequence
  Description of Artificial Sequence: Synthetic Linker
LSPYTESS

SEQ ID NO: 2676 - protein, 4 aa, Artificial Sequence
  Description of Artificial Sequence: Synthetic Linker
VDSE

SEQ ID NO: 2677 - protein, 5 aa, Artificial Sequence
  Description of Artificial Sequence: Synthetic Linker
FVTGP

SEQ ID NO: 2678 - protein, 7 aa, Artificial Sequence
  Description of Artificial Sequence: Synthetic Linker
IKGDAYY

SEQ ID NO: 2679 - protein, 8 aa, Artificial Sequence
  Description of Artificial Sequence: Synthetic Linker
TKSGVVHF

SEQ ID NO: 2680 - protein, 9 aa, Artificial Sequence
  Description of Artificial Sequence: Synthetic Linker
VVLGEEVSF

SEQ ID NO: 2681 - protein, 12 aa, Artificial Sequence
  Description of Artificial Sequence: Synthetic Linker
IVPNDAAKPYNM

SEQ ID NO: 2682 - protein, 26 aa, Artificial Sequence
  Description of Artificial Sequence: Synthetic Linker
YLPSNNMEEPPYIDTGDPADRDATGV

SEQ ID NO: 2683 - protein, 4 aa, Artificial Sequence
  Description of Artificial Sequence: Synthetic Linker
GALP

SEQ ID NO: 2684 - protein, 8 aa, Artificial Sequence
  Description of Artificial Sequence: Synthetic Linker
FGVDWLKG

SEQ ID NO: 2685 - protein, 4 aa, Artificial Sequence
  Description of Artificial Sequence: Synthetic Linker
ILPQ

SEQ ID NO: 2686 - protein, 7 aa, Artificial Sequence
  Description of Artificial Sequence: Synthetic Linker
EAPLDNS

SEQ ID NO: 2687 - protein, 14 aa, Artificial Sequence
  Description of Artificial Sequence: Synthetic Linker
AAERVPLANPFAGE

SEQ ID NO: 2688 - protein, 4 aa, Artificial Sequence
  Description of Artificial Sequence: Synthetic Linker
EGVL

SEQ ID NO: 2689 - protein, 6 aa, Artificial Sequence
  Description of Artificial Sequence: Synthetic Linker
LVKIEP

SEQ ID NO: 2690 - protein, 6 aa, Artificial Sequence
  Description of Artificial Sequence: Synthetic Linker
RSLIGD

SEQ ID NO: 2691 - protein, 7 aa, Artificial Sequence
  Description of Artificial Sequence: Synthetic Linker
DASAVHP

SEQ ID NO: 2692 - protein, 7 aa, Artificial Sequence
  Description of Artificial Sequence: Synthetic Linker
EFPELDV

SEQ ID NO: 2693 - protein, 7 aa, Artificial Sequence
  Description of Artificial Sequence: Synthetic Linker
FSDYFEH

SEQ ID NO: 2694 - protein, 7 aa, Artificial Sequence
  Description of Artificial Sequence: Synthetic Linker
KVSRLGE

SEQ ID NO: 2695 - protein, 7 aa, Artificial Sequence
  Description of Artificial Sequence: Synthetic Linker
NGAFRTR

SEQ ID NO: 2696 - protein, 7 aa, Artificial Sequence
  Description of Artificial Sequence: Synthetic Linker
PLKSAPS

SEQ ID NO: 2697 - protein, 8 aa, Artificial Sequence
  Description of Artificial Sequence: Synthetic Linker
ARISGLNS

SEQ ID NO: 2698 - protein, 10 aa, Artificial Sequence
  Description of Artificial Sequence: Synthetic Linker
QRIAADTERD

SEQ ID NO: 2699 - protein, 11 aa, Artificial Sequence
  Description of Artificial Sequence: Synthetic Linker
ERFGLSNQGRA

SEQ ID NO: 2700 - protein, 11 aa, Artificial Sequence
  Description of Artificial Sequence: Synthetic Linker
LLAAPAGPRAT

SEQ ID NO: 2701 - protein, 12 aa, Artificial Sequence
  Description of Artificial Sequence: Synthetic Linker
KVGEEAPGTLHP

SEQ ID NO: 2702 - protein, 12 aa, Artificial Sequence
  Description of Artificial Sequence: Synthetic Linker
NAVGVDVNTASA

SEQ ID NO: 2703 - protein, 13 aa, Artificial Sequence
  Description of Artificial Sequence: Synthetic Linker
AAGFLRVMNGDNP

SEQ ID NO: 2704 - protein, 13 aa, Artificial Sequence
  Description of Artificial Sequence: Synthetic Linker
GVESLKDLKPGMV

SEQ ID NO: 2705 - protein, 13 aa, Artificial Sequence
  Description of Artificial Sequence: Synthetic Linker
SIGVGQYQHDVSQ

SEQ ID NO: 2706 - protein, 17 aa, Artificial Sequence
  Description of Artificial Sequence: Synthetic Linker
LDKPGRDPRPEFKTAEF

SEQ ID NO: 2707 - protein, 23 aa, Artificial Sequence
  Description of Artificial Sequence: Synthetic Linker
LKRLDPKKFTDETFGLPTVTDIL

SEQ ID NO: 2708 - protein, 4 aa, Artificial Sequence
  Description of Artificial Sequence: Synthetic Linker
LEGE

SEQ ID NO: 2709 - protein, 5 aa, Artificial Sequence
  Description of Artificial Sequence: Synthetic Linker
RLGFK

SEQ ID NO: 2710 - protein, 9 aa, Artificial Sequence
  Description of Artificial Sequence: Synthetic Linker
RGRPFEPPV

SEQ ID NO: 2711 - protein, 15 aa, Artificial Sequence
  Description of Artificial Sequence: Synthetic Linker
RGEVEETLKEDLPNV

SEQ ID NO: 2712 - protein, 4 aa, Artificial Sequence
  Description of Artificial Sequence: Synthetic Linker
LEYE

SEQ ID NO: 2713 - protein, 9 aa, Artificial Sequence
  Description of Artificial Sequence: Synthetic Linker
SYGLPPLNA

SEQ ID NO: 2714 - protein, 5 aa, Artificial Sequence
  Description of Artificial Sequence: Synthetic Linker
ILHDE

SEQ ID NO: 2715 - protein, 13 aa, Artificial Sequence
  Description of Artificial Sequence: Synthetic Linker
KGWGGLPIGTEGR

SEQ ID NO: 2716 - protein, 4 aa, Artificial Sequence
  Description of Artificial Sequence: Synthetic Linker
PQSP

SEQ ID NO: 2717 - protein, 6 aa, Artificial Sequence
  Description of Artificial Sequence: Synthetic Linker
DGFEAL

SEQ ID NO: 2718 - protein, 6 aa, Artificial Sequence
  Description of Artificial Sequence: Synthetic Linker
EQNPWK

SEQ ID NO: 2719 - protein, 6 aa, Artificial Sequence
  Description of Artificial Sequence: Synthetic Linker
SEHWQR

SEQ ID NO: 2720 - protein, 9 aa, Artificial Sequence
  Description of Artificial Sequence: Synthetic Linker
LDPQACPTV

SEQ ID NO: 2721 - protein, 5 aa, Artificial Sequence
  Description of Artificial Sequence: Synthetic Linker
KTPLT

SEQ ID NO: 2722 - protein, 6 aa, Artificial Sequence
  Description of Artificial Sequence: Synthetic Linker
LRQLTT

SEQ ID NO: 2723 - protein, 4 aa, Artificial Sequence
  Description of Artificial Sequence: Synthetic Linker
QNDI

SEQ ID NO: 2724 - protein, 7 aa, Artificial Sequence
  Description of Artificial Sequence: Synthetic Linker
INARAPV

SEQ ID NO: 2725 - protein, 9 aa, Artificial Sequence
  Description of Artificial Sequence: Synthetic Linker
TVTHGDIDL

SEQ ID NO: 2726 - protein, 10 aa, Artificial Sequence
  Description of Artificial Sequence: Synthetic Linker
TKTDVAGEAE

SEQ ID NO: 2727 - protein, 24 aa, Artificial Sequence
  Description of Artificial Sequence: Synthetic Linker
LFNTNGFMLEENVVSTKPRFHFIA

SEQ ID NO: 2728 - protein, 7 aa, Artificial Sequence
  Description of Artificial Sequence: Synthetic Linker
ASLDQPF

SEQ ID NO: 2729 - protein, 9 aa, Artificial Sequence
  Description of Artificial Sequence: Synthetic Linker
VKPGRQYQE

SEQ ID NO: 2730 - protein, 4 aa, Artificial Sequence
  Description of Artificial Sequence: Synthetic Linker
DGFE

SEQ ID NO: 2731 - protein, 5 aa, Artificial Sequence
  Description of Artificial Sequence: Synthetic Linker
LRRFN

SEQ ID NO: 2732 - protein, 6 aa, Artificial Sequence
  Description of Artificial Sequence: Synthetic Linker
KRTGET

SEQ ID NO: 2733 - protein, 16 aa, Artificial Sequence
  Description of Artificial Sequence: Synthetic Linker
VEGEQSIPMVSRLGMK

SEQ ID NO: 2734 - protein, 22 aa, Artificial Sequence
  Description of Artificial Sequence: Synthetic Linker
AEGHITTNHVAATRAAKSKVRR

SEQ ID NO: 2735 - protein, 8 aa, Artificial Sequence
  Description of Artificial Sequence: Synthetic Linker
VDKSDEPL

SEQ ID NO: 2736 - protein, 7 aa, Artificial Sequence
  Description of Artificial Sequence: Synthetic Linker
IVSPANE

SEQ ID NO: 2737 - protein, 11 aa, Artificial Sequence
  Description of Artificial Sequence: Synthetic Linker
VENEPNLCYNA

SEQ ID NO: 2738 - protein, 13 aa, Artificial Sequence
  Description of Artificial Sequence: Synthetic Linker
FITLEENKPTRPV

SEQ ID NO: 2739 - protein, 4 aa, Artificial Sequence
  Description of Artificial Sequence: Synthetic Linker
EDGI

SEQ ID NO: 2740 - protein, 4 aa, Artificial Sequence
  Description of Artificial Sequence: Synthetic Linker
HKLK

SEQ ID NO: 2741 - protein, 4 aa, Artificial Sequence
  Description of Artificial Sequence: Synthetic Linker
KGGE

SEQ ID NO: 2742 - protein, 4 aa, Artificial Sequence
  Description of Artificial Sequence: Synthetic Linker
SHSL

SEQ ID NO: 2743 - protein, 6 aa, Artificial Sequence
  Description of Artificial Sequence: Synthetic Linker
WSTDIL

SEQ ID NO: 2744 - protein, 9 aa, Artificial Sequence
  Description of Artificial Sequence: Synthetic Linker
DIIKPDPPK

SEQ ID NO: 2745 - protein, 13 aa, Artificial Sequence
  Description of Artificial Sequence: Synthetic Linker
KDQKEPKNKTFLR

SEQ ID NO: 2746 - protein, 7 aa, Artificial Sequence
  Description of Artificial Sequence: Synthetic Linker
WDNQCQC

SEQ ID NO: 2747 - protein, 42 aa, Artificial Sequence
  Description of Artificial Sequence: Synthetic Linker
SSATRSTTKQVTPQPEEQKERKTTEMQSPMQPVDQASLPGHC

SEQ ID NO: 2748 - protein, 5 aa, Artificial Sequence
  Description of Artificial Sequence: Synthetic Linker
LNKPI

SEQ ID NO: 2749 - protein, 5 aa, Artificial Sequence
  Description of Artificial Sequence: Synthetic Linker
NHQSN

SEQ ID NO: 2750 - protein, 5 aa, Artificial Sequence
  Description of Artificial Sequence: Synthetic Linker
NSIDQ

SEQ ID NO: 2751 - protein, 7 aa, Artificial Sequence
  Description of Artificial Sequence: Synthetic Linker
YLPNVTK

SEQ ID NO: 2752 - protein, 9 aa, Artificial Sequence
  Description of Artificial Sequence: Synthetic Linker
LANLKNLGW

SEQ ID NO: 2753 - protein, 9 aa, Artificial Sequence
  Description of Artificial Sequence: Synthetic Linker
LKDLKKLKS

SEQ ID NO: 2754 - protein, 10 aa, Artificial Sequence
  Description of Artificial Sequence: Synthetic Linker
FLDENKVKDL

SEQ ID NO: 2755 - protein, 10 aa, Artificial Sequence
  Description of Artificial Sequence: Synthetic Linker
NLKKKSVTDA

SEQ ID NO: 2756 - protein, 11 aa, Artificial Sequence
  Description of Artificial Sequence: Synthetic Linker
FLNGNKLTDIK

SEQ ID NO: 2757 - protein, 11 aa, Artificial Sequence
  Description of Artificial Sequence: Synthetic Linker
PNTVKNTDGSL

SEQ ID NO: 2758 - protein, 11 aa, Artificial Sequence
  Description of Artificial Sequence: Synthetic Linker
SLEHNGISDIN

SEQ ID NO: 2759 - protein, 13 aa, Artificial Sequence
  Description of Artificial Sequence: Synthetic Linker
IANNSDIKSVQGI

SEQ ID NO: 2760 - protein, 5 aa, Artificial Sequence
  Description of Artificial Sequence: Synthetic Linker
FTTLT

SEQ ID NO: 2761 - protein, 5 aa, Artificial Sequence
  Description of Artificial Sequence: Synthetic Linker
KAPEV

SEQ ID NO: 2762 - protein, 9 aa, Artificial Sequence
  Description of Artificial Sequence: Synthetic Linker
VSDVAVDVV

SEQ ID NO: 2763 - protein, 6 aa, Artificial Sequence
  Description of Artificial Sequence: Synthetic Linker
INTSYF

SEQ ID NO: 2764 - protein, 22 aa, Artificial Sequence
  Description of Artificial Sequence: Synthetic Linker
SGIISLEDLPDYTRSDEPLNSI

SEQ ID NO: 2765 - protein, 4 aa, Artificial Sequence
  Description of Artificial Sequence: Synthetic Linker
VNGQ

SEQ ID NO: 2766 - protein, 5 aa, Artificial Sequence
  Description of Artificial Sequence: Synthetic Linker
FKNAT

SEQ ID NO: 2767 - protein, 5 aa, Artificial Sequence
  Description of Artificial Sequence: Synthetic Linker
FYPNR

SEQ ID NO: 2768 - protein, 5 aa, Artificial Sequence
  Description of Artificial Sequence: Synthetic Linker
MDNDV

SEQ ID NO: 2769 - protein, 6 aa, Artificial Sequence
  Description of Artificial Sequence: Synthetic Linker
FPVPTL

SEQ ID NO: 2770 - protein, 6 aa, Artificial Sequence
  Description of Artificial Sequence: Synthetic Linker
VNDQGQ

SEQ ID NO: 2771 - protein, 7 aa, Artificial Sequence
  Description of Artificial Sequence: Synthetic Linker
SSFTPNV

SEQ ID NO: 2772 - protein, 7 aa, Artificial Sequence
  Description of Artificial Sequence: Synthetic Linker
VKGTIAA

SEQ ID NO: 2773 - protein, 8 aa, Artificial Sequence
  Description of Artificial Sequence: Synthetic Linker
SKKFPSYS

SEQ ID NO: 2774 - protein, 9 aa, Artificial Sequence
  Description of Artificial Sequence: Synthetic Linker
ITYQTYSEV

SEQ ID NO: 2775 - protein, 10 aa, Artificial Sequence
  Description of Artificial Sequence: Synthetic Linker
FATDKGFPKT

SEQ ID NO: 2776 - protein, 12 aa, Artificial Sequence
  Description of Artificial Sequence: Synthetic Linker
TADPIPDAGRSS

SEQ ID NO: 2777 - protein, 4 aa, Artificial Sequence
  Description of Artificial Sequence: Synthetic Linker
EKCF

SEQ ID NO: 2778 - protein, 4 aa, Artificial Sequence
  Description of Artificial Sequence: Synthetic Linker
KNGK

SEQ ID NO: 2779 - protein, 5 aa, Artificial Sequence
  Description of Artificial Sequence: Synthetic Linker
EKSHM

SEQ ID NO: 2780 - protein, 5 aa, Artificial Sequence
  Description of Artificial Sequence: Synthetic Linker
NTNSD

SEQ ID NO: 2781 - protein, 6 aa, Artificial Sequence
  Description of Artificial Sequence: Synthetic Linker
NAPEKH

SEQ ID NO: 2782 - protein, 7 aa, Artificial Sequence
  Description of Artificial Sequence: Synthetic Linker
ACPVAAL

SEQ ID NO: 2783 - protein, 7 aa, Artificial Sequence
  Description of Artificial Sequence: Synthetic Linker
DERSKSL

SEQ ID NO: 2784 - protein, 7 aa, Artificial Sequence
  Description of Artificial Sequence: Synthetic Linker
KCLLCGR

SEQ ID NO: 2785 - protein, 7 aa, Artificial Sequence
  Description of Artificial Sequence: Synthetic Linker
TETYAMK

SEQ ID NO: 2786 - protein, 9 aa, Artificial Sequence
  Description of Artificial Sequence: Synthetic Linker
DTNCLLCGQ

SEQ ID NO: 2787 - protein, 10 aa, Artificial Sequence
  Description of Artificial Sequence: Synthetic Linker
NGGGQPHVNP

SEQ ID NO: 2788 - protein, 14 aa, Artificial Sequence
  Description of Artificial Sequence: Synthetic Linker
YKARASKPFLPKDK

SEQ ID NO: 2789 - protein, 18 aa, Artificial Sequence
  Description of Artificial Sequence: Synthetic Linker
LDIHEFKCGPCNRRENCE

SEQ ID NO: 2790 - protein, 6 aa, Artificial Sequence
  Description of Artificial Sequence: Synthetic Linker
VVGGEL

SEQ ID NO: 2791 - protein, 5 aa, Artificial Sequence
  Description of Artificial Sequence: Synthetic Linker
HNGFF

SEQ ID NO: 2792 - protein, 11 aa, Artificial Sequence
  Description of Artificial Sequence: Synthetic Linker
VKGKEGDEEEE

SEQ ID NO: 2793 - protein, 4 aa, Artificial Sequence
  Description of Artificial Sequence: Synthetic Linker
KLIV

SEQ ID NO: 2794 - protein, 6 aa, Artificial Sequence
  Description of Artificial Sequence: Synthetic Linker
TIGNRA

SEQ ID NO: 2795 - protein, 13 aa, Artificial Sequence
  Description of Artificial Sequence: Synthetic Linker
VPPSKPTVNIPSS

SEQ ID NO: 2796 - protein, 5 aa, Artificial Sequence
  Description of Artificial Sequence: Synthetic Linker
FFSIL

SEQ ID NO: 2797 - protein, 6 aa, Artificial Sequence
  Description of Artificial Sequence: Synthetic Linker
TTGEWK

SEQ ID NO: 2798 - protein, 7 aa, Artificial Sequence
  Description of Artificial Sequence: Synthetic Linker
MSTEEAE

SEQ ID NO: 2799 - protein, 8 aa, Artificial Sequence
  Description of Artificial Sequence: Synthetic Linker
ASQVESDW

SEQ ID NO: 2800 - protein, 7 aa, Artificial Sequence
  Description of Artificial Sequence: Synthetic Linker
KLHLSNC

SEQ ID NO: 2801 - protein, 4 aa, Artificial Sequence
  Description of Artificial Sequence: Synthetic Linker
DANF

SEQ ID NO: 2802 - protein, 7 aa, Artificial Sequence
  Description of Artificial Sequence: Synthetic Linker
VGLEKNA

SEQ ID NO: 2803 - protein, 8 aa, Artificial Sequence
  Description of Artificial Sequence: Synthetic Linker
TNSTEETL

SEQ ID NO: 2804 - protein, 9 aa, Artificial Sequence
  Description of Artificial Sequence: Synthetic Linker
KTWENVNAQ

SEQ ID NO: 2805 - protein, 9 aa, Artificial Sequence
  Description of Artificial Sequence: Synthetic Linker
YLPTLYVSQ

SEQ ID NO: 2806 - protein, 11 aa, Artificial Sequence
  Description of Artificial Sequence: Synthetic Linker
SHRYGFGKIDA

SEQ ID NO: 2807 - protein, 12 aa, Artificial Sequence
  Description of Artificial Sequence: Synthetic Linker
GDWRDSAMGKKY

SEQ ID NO: 2808 - protein, 4 aa, Artificial Sequence
  Description of Artificial Sequence: Synthetic Linker
KGTL

SEQ ID NO: 2809 - protein, 7 aa, Artificial Sequence
  Description of Artificial Sequence: Synthetic Linker
KLNKDIV

SEQ ID NO: 2810 - protein, 8 aa, Artificial Sequence
  Description of Artificial Sequence: Synthetic Linker
ETRKRALS

SEQ ID NO: 2811 - protein, 33 aa, Artificial Sequence
  Description of Artificial Sequence: Synthetic Linker
VYPPDYNPEGKVTKRKHDNEGSGSKRPKVEYSE

SEQ ID NO: 2812 - protein, 8 aa, Artificial Sequence
  Description of Artificial Sequence: Synthetic Linker
IERHSIHW

SEQ ID NO: 2813 - protein, 9 aa, Artificial Sequence
  Description of Artificial Sequence: Synthetic Linker
DLTGTPLFV

SEQ ID NO: 2814 - protein, 10 aa, Artificial Sequence
  Description of Artificial Sequence: Synthetic Linker
NGPASLPYDI

SEQ ID NO: 2815 - protein, 14 aa, Artificial Sequence
  Description of Artificial Sequence: Synthetic Linker
VNGSDINVDWGKPI

SEQ ID NO: 2816 - protein, 44 aa, Artificial Sequence
  Description of Artificial Sequence: Synthetic Linker
YAGAPGGLPTDEGTPPVDHQCLDTLDVRPVVPRSVPVNSFVKRP

SEQ ID NO: 2817 - protein, 6 aa, Artificial Sequence
  Description of Artificial Sequence: Synthetic Linker
QFGRKG

SEQ ID NO: 2818 - protein, 9 aa, Artificial Sequence
  Description of Artificial Sequence: Synthetic Linker
IASGAIGGL

SEQ ID NO: 2819 - protein, 4 aa, Artificial Sequence
  Description of Artificial Sequence: Synthetic Linker
SGNP

SEQ ID NO: 2820 - protein, 6 aa, Artificial Sequence
  Description of Artificial Sequence: Synthetic Linker
VTGISP

SEQ ID NO: 2821 - protein, 6 aa, Artificial Sequence
  Description of Artificial Sequence: Synthetic Linker
IKRADA

SEQ ID NO: 2822 - protein, 7 aa, Artificial Sequence
  Description of Artificial Sequence: Synthetic Linker
VQPKLTA

SEQ ID NO: 2823 - protein, 14 aa, Artificial Sequence
  Description of Artificial Sequence: Synthetic Linker
TGVMKNDTNENLKK

SEQ ID NO: 2824 - protein, 24 aa, Artificial Sequence
  Description of Artificial Sequence: Synthetic Linker
FLPRVGVGTSFGLPQTRRISLASP

SEQ ID NO: 2825 - protein, 4 aa, Artificial Sequence
  Description of Artificial Sequence: Synthetic Linker
ASNM

SEQ ID NO: 2826 - protein, 6 aa, Artificial Sequence
  Description of Artificial Sequence: Synthetic Linker
ESKPSV

SEQ ID NO: 2827 - protein, 7 aa, Artificial Sequence
  Description of Artificial Sequence: Synthetic Linker
IKMLGSK

SEQ ID NO: 2828 - protein, 7 aa, Artificial Sequence
  Description of Artificial Sequence: Synthetic Linker
LRREPNL

SEQ ID NO: 2829 - protein, 7 aa, Artificial Sequence
  Description of Artificial Sequence: Synthetic Linker
LSRSSNP

SEQ ID NO: 2830 - protein, 8 aa, Artificial Sequence
  Description of Artificial Sequence: Synthetic Linker
RLGCRYSK

SEQ ID NO: 2831 - protein, 4 aa, Artificial Sequence
  Description of Artificial Sequence: Synthetic Linker
ETPA

SEQ ID NO: 2832 - protein, 8 aa, Artificial Sequence
  Description of Artificial Sequence: Synthetic Linker
FANHTYVP

SEQ ID NO: 2833 - protein, 5 aa, Artificial Sequence
  Description of Artificial Sequence: Synthetic Linker
LFEWL

SEQ ID NO: 2834 - protein, 14 aa, Artificial Sequence
  Description of Artificial Sequence: Synthetic Linker
HELGGKNASGGYGG

SEQ ID NO: 2835 - protein, 5 aa, Artificial Sequence
  Description of Artificial Sequence: Synthetic Linker
RGDVG

SEQ ID NO: 2836 - protein, 4 aa, Artificial Sequence
  Description of Artificial Sequence: Synthetic Linker
DYTR

SEQ ID NO: 2837 - protein, 8 aa, Artificial Sequence
  Description of Artificial Sequence: Synthetic Linker
QTQAVSQQ

SEQ ID NO: 2838 - protein, 8 aa, Artificial Sequence
  Description of Artificial Sequence: Synthetic Linker
YTDHQMLV

SEQ ID NO: 2839 - protein, 4 aa, Artificial Sequence
  Description of Artificial Sequence: Synthetic Linker
LNNR

SEQ ID NO: 2840 - protein, 12 aa, Artificial Sequence
  Description of Artificial Sequence: Synthetic Linker
TCRKTNKLSPYD

SEQ ID NO: 2841 - protein, 5 aa, Artificial Sequence
  Description of Artificial Sequence: Synthetic Linker
VVNNV

SEQ ID NO: 2842 - protein, 7 aa, Artificial Sequence
  Description of Artificial Sequence: Synthetic Linker
VQARASS

SEQ ID NO: 2843 - protein, 8 aa, Artificial Sequence
  Description of Artificial Sequence: Synthetic Linker
TYIPRKEV

SEQ ID NO: 2844 - protein, 10 aa, Artificial Sequence
  Description of Artificial Sequence: Synthetic Linker
IQATIIRQNQ

SEQ ID NO: 2845 - protein, 4 aa, Artificial Sequence
  Description of Artificial Sequence: Synthetic Linker
KGDD

SEQ ID NO: 2846 - protein, 4 aa, Artificial Sequence
  Description of Artificial Sequence: Synthetic Linker
SDVV

SEQ ID NO: 2847 - protein, 6 aa, Artificial Sequence
  Description of Artificial Sequence: Synthetic Linker
VAQSSY

SEQ ID NO: 2848 - protein, 8 aa, Artificial Sequence
  Description of Artificial Sequence: Synthetic Linker
TSRDYDTQ

SEQ ID NO: 2849 - protein, 11 aa, Artificial Sequence
  Description of Artificial Sequence: Synthetic Linker
YAPFLPKTWTS

SEQ ID NO: 2850 - protein, 5 aa, Artificial Sequence
  Description of Artificial Sequence: Synthetic Linker
AGVNL

SEQ ID NO: 2851 - protein, 11 aa, Artificial Sequence
  Description of Artificial Sequence: Synthetic Linker
TLLLKSPTTHP

SEQ ID NO: 2852 - protein, 5 aa, Artificial Sequence
  Description of Artificial Sequence: Synthetic Linker
VESAM

SEQ ID NO: 2853 - protein, 6 aa, Artificial Sequence
  Description of Artificial Sequence: Synthetic Linker
GPLWSN

SEQ ID NO: 2854 - protein, 9 aa, Artificial Sequence
  Description of Artificial Sequence: Synthetic Linker
QVENTGIHE

SEQ ID NO: 2855 - protein, 8 aa, Artificial Sequence
  Description of Artificial Sequence: Synthetic Linker
SCDNLPHN

SEQ ID NO: 2856 - protein, 16 aa, Artificial Sequence
  Description of Artificial Sequence: Synthetic Linker
ICDRNHTWLPVSDDAC

SEQ ID NO: 2857 - protein, 4 aa, Artificial Sequence
  Description of Artificial Sequence: Synthetic Linker
YYPA

SEQ ID NO: 2858 - protein, 5 aa, Artificial Sequence
  Description of Artificial Sequence: Synthetic Linker
SGQPL

SEQ ID NO: 2859 - protein, 5 aa, Artificial Sequence
  Description of Artificial Sequence: Synthetic Linker
VYSGK

SEQ ID NO: 2860 - protein, 7 aa, Artificial Sequence
  Description of Artificial Sequence: Synthetic Linker
VNDQGKE

SEQ ID NO: 2861 - protein, 11 aa, Artificial Sequence
  Description of Artificial Sequence: Synthetic Linker
FGNKYWLMLNE

SEQ ID NO: 2862 - protein, 19 aa, Artificial Sequence
  Description of Artificial Sequence: Synthetic Linker
QSFAPVKGASAVPLVGRAS

SEQ ID NO: 2863 - protein, 4 aa, Artificial Sequence
  Description of Artificial Sequence: Synthetic Linker
PVSE

SEQ ID NO: 2864 - protein, 5 aa, Artificial Sequence
  Description of Artificial Sequence: Synthetic Linker
AGKLV

SEQ ID NO: 2865 - protein, 7 aa, Artificial Sequence
  Description of Artificial Sequence: Synthetic Linker
LEKDGSN

SEQ ID NO: 2866 - protein, 14 aa, Artificial Sequence
  Description of Artificial Sequence: Synthetic Linker
NNDPSWNPGPTWDP

SEQ ID NO: 2867 - protein, 4 aa, Artificial Sequence
  Description of Artificial Sequence: Synthetic Linker
GVPF

SEQ ID NO: 2868 - protein, 4 aa, Artificial Sequence
  Description of Artificial Sequence: Synthetic Linker
ICQS

SEQ ID NO: 2869 - protein, 6 aa, Artificial Sequence
  Description of Artificial Sequence: Synthetic Linker
VNYEDP

SEQ ID NO: 2870 - protein, 8 aa, Artificial Sequence
  Description of Artificial Sequence: Synthetic Linker
RARGENEP

SEQ ID NO: 2871 - protein, 6 aa, Artificial Sequence
  Description of Artificial Sequence: Synthetic Linker
LAGTGP

SEQ ID NO: 2872 - protein, 10 aa, Artificial Sequence
  Description of Artificial Sequence: Synthetic Linker
AAGGSVKGKK

SEQ ID NO: 2873 - protein, 8 aa, Artificial Sequence
  Description of Artificial Sequence: Synthetic Linker
LMTPEYVA

SEQ ID NO: 2874 - protein, 17 aa, Artificial Sequence
  Description of Artificial Sequence: Synthetic Linker
GFESVLEAVTALAFYVP

SEQ ID NO: 2875 - protein, 18 aa, Artificial Sequence
  Description of Artificial Sequence: Synthetic Linker
HKLGAVDVPDLVYSEAGP

SEQ ID NO: 2876 - protein, 35 aa, Artificial Sequence
  Description of Artificial Sequence: Synthetic Linker
QHPPKDSSGQRVAVSPTSQRLQLLEPFDKWDGKDL

SEQ ID NO: 2877 - protein, 41 aa, Artificial Sequence
  Description of Artificial Sequence: Synthetic Linker
TLKFNPETDFLTGKDGKKFKLEAPDADELPRAEFDPGQDTY

SEQ ID NO: 2878 - protein, 4 aa, Artificial Sequence
  Description of Artificial Sequence: Synthetic Linker
LVLE

SEQ ID NO: 2879 - protein, 4 aa, Artificial Sequence
  Description of Artificial Sequence: Synthetic Linker
SESG

SEQ ID NO: 2880 - protein, 5 aa, Artificial Sequence
  Description of Artificial Sequence: Synthetic Linker
EISGM

SEQ ID NO: 2881 - protein, 5 aa, Artificial Sequence
  Description of Artificial Sequence: Synthetic Linker
FAARS

SEQ ID NO: 2882 - protein, 7 aa, Artificial Sequence
  Description of Artificial Sequence: Synthetic Linker
QKSGKGL

SEQ ID NO: 2883 - protein, 11 aa, Artificial Sequence
  Description of Artificial Sequence: Synthetic Linker
GEVFPQKKVSA

SEQ ID NO: 2884 - protein, 13 aa, Artificial Sequence
  Description of Artificial Sequence: Synthetic Linker
KHPAVRKEPGPGL

SEQ ID NO: 2885 - protein, 14 aa, Artificial Sequence
  Description of Artificial Sequence: Synthetic Linker
YPHWEGEIIRFETE

SEQ ID NO: 2886 - protein, 9 aa, Artificial Sequence
  Description of Artificial Sequence: Synthetic Linker
EYPALGEVF

SEQ ID NO: 2887 - protein, 7 aa, Artificial Sequence
  Description of Artificial Sequence: Synthetic Linker
QDDDCTP

SEQ ID NO: 2888 - protein, 4 aa, Artificial Sequence
  Description of Artificial Sequence: Synthetic Linker
HNGK

SEQ ID NO: 2889 - protein, 5 aa, Artificial Sequence
  Description of Artificial Sequence: Synthetic Linker
SSVSR

SEQ ID NO: 2890 - protein, 6 aa, Artificial Sequence
  Description of Artificial Sequence: Synthetic Linker
AAHPVG

SEQ ID NO: 2891 - protein, 6 aa, Artificial Sequence
  Description of Artificial Sequence: Synthetic Linker
ARFDVT

SEQ ID NO: 2892 - protein, 6 aa, Artificial Sequence
  Description of Artificial Sequence: Synthetic Linker
EGRDMN

SEQ ID NO: 2893 - protein, 6 aa, Artificial Sequence
  Description of Artificial Sequence: Synthetic Linker
KFLRTE

SEQ ID NO: 2894 - protein, 8 aa, Artificial Sequence
  Description of Artificial Sequence: Synthetic Linker
LDLFYNTP

SEQ ID NO: 2895 - protein, 8 aa, Artificial Sequence
  Description of Artificial Sequence: Synthetic Linker
RTAEQQEA

SEQ ID NO: 2896 - protein, 11 aa, Artificial Sequence
  Description of Artificial Sequence: Synthetic Linker
YRAVPEGGQKE

SEQ ID NO: 2897 - protein, 8 aa, Artificial Sequence
  Description of Artificial Sequence: Synthetic Linker
HDPRRFGR

SEQ ID NO: 2898 - protein, 10 aa, Artificial Sequence
  Description of Artificial Sequence: Synthetic Linker
RRGDYREIPL

SEQ ID NO: 2899 - protein, 11 aa, Artificial Sequence
  Description of Artificial Sequence: Synthetic Linker
RHAVYGREGLP

SEQ ID NO: 2900 - protein, 23 aa, Artificial Sequence
  Description of Artificial Sequence: Synthetic Linker
ELGGSTLSDQSYRQPDGLPGGFQ

SEQ ID NO: 2901 - protein, 6 aa, Artificial Sequence
  Description of Artificial Sequence: Synthetic Linker
ESGKTS

SEQ ID NO: 2902 - protein, 7 aa, Artificial Sequence
  Description of Artificial Sequence: Synthetic Linker
FLDIHNI

SEQ ID NO: 2903 - protein, 7 aa, Artificial Sequence
  Description of Artificial Sequence: Synthetic Linker
VYPNIEE

SEQ ID NO: 2904 - protein, 9 aa, Artificial Sequence
  Description of Artificial Sequence: Synthetic Linker
RQGIPNESW

SEQ ID NO: 2905 - protein, 17 aa, Artificial Sequence
  Description of Artificial Sequence: Synthetic Linker
TKINERYELCDTYPALL

SEQ ID NO: 2906 - protein, 4 aa, Artificial Sequence
  Description of Artificial Sequence: Synthetic Linker
NGIV

SEQ ID NO: 2907 - protein, 5 aa, Artificial Sequence
  Description of Artificial Sequence: Synthetic Linker
SRRVP

SEQ ID NO: 2908 - protein, 17 aa, Artificial Sequence
  Description of Artificial Sequence: Synthetic Linker
LEKEKQFEKYSELKGTV

SEQ ID NO: 2909 - protein, 12 aa, Artificial Sequence
  Description of Artificial Sequence: Synthetic Linker
KDSPKGVGRPTK

SEQ ID NO: 2910 - protein, 4 aa, Artificial Sequence
  Description of Artificial Sequence: Synthetic Linker
ILIP

SEQ ID NO: 2911 - protein, 4 aa, Artificial Sequence
  Description of Artificial Sequence: Synthetic Linker
LAPA

SEQ ID NO: 2912 - protein, 5 aa, Artificial Sequence
  Description of Artificial Sequence: Synthetic Linker
CSGEY

SEQ ID NO: 2913 - protein, 5 aa, Artificial Sequence
  Description of Artificial Sequence: Synthetic Linker
STPHP

SEQ ID NO: 2914 - protein, 5 aa, Artificial Sequence
  Description of Artificial Sequence: Synthetic Linker
WGCDK

SEQ ID NO: 2915 - protein, 6 aa, Artificial Sequence
  Description of Artificial Sequence: Synthetic Linker
YFAMDE

SEQ ID NO: 2916 - protein, 9 aa, Artificial Sequence
  Description of Artificial Sequence: Synthetic Linker
RAETIDDIR

SEQ ID NO: 2917 - protein, 6 aa, Artificial Sequence
  Description of Artificial Sequence: Synthetic Linker
NDDIQG

SEQ ID NO: 2918 - protein, 7 aa, Artificial Sequence
  Description of Artificial Sequence: Synthetic Linker
YREKYCT

SEQ ID NO: 2919 - protein, 4 aa, Artificial Sequence
  Description of Artificial Sequence: Synthetic Linker
DADL

SEQ ID NO: 2920 - protein, 4 aa, Artificial Sequence
  Description of Artificial Sequence: Synthetic Linker
PNTA

SEQ ID NO: 2921 - protein, 5 aa, Artificial Sequence
  Description of Artificial Sequence: Synthetic Linker
VAVGV

SEQ ID NO: 2922 - protein, 6 aa, Artificial Sequence
  Description of Artificial Sequence: Synthetic Linker
VNIALA

SEQ ID NO: 2923 - protein, 17 aa, Artificial Sequence
  Description of Artificial Sequence: Synthetic Linker
KNLEEPVKPFPGVQGSS

SEQ ID NO: 2924 - protein, 26 aa, Artificial Sequence
  Description of Artificial Sequence: Synthetic Linker
LKGTLELHPNGLIKTDEYMRTSEPDV

SEQ ID NO: 2925 - protein, 6 aa, Artificial Sequence
  Description of Artificial Sequence: Synthetic Linker
YYPQIA

SEQ ID NO: 2926 - protein, 4 aa, Artificial Sequence
  Description of Artificial Sequence: Synthetic Linker
LGDA

SEQ ID NO: 2927 - protein, 7 aa, Artificial Sequence
  Description of Artificial Sequence: Synthetic Linker
FKHSGGL

SEQ ID NO: 2928 - protein, 20 aa, Artificial Sequence
  Description of Artificial Sequence: Synthetic Linker
FEAERKENCPACSQLPQNIQ

SEQ ID NO: 2929 - protein, 8 aa, Artificial Sequence
  Description of Artificial Sequence: Synthetic Linker
YGLDTINK

SEQ ID NO: 2930 - protein, 9 aa, Artificial Sequence
  Description of Artificial Sequence: Synthetic Linker
SMDNPDNEI

SEQ ID NO: 2931 - protein, 10 aa, Artificial Sequence
  Description of Artificial Sequence: Synthetic Linker
QQGRYPGVSN

SEQ ID NO: 2932 - protein, 8 aa, Artificial Sequence
  Description of Artificial Sequence: Synthetic Linker
TKLQNPDL

SEQ ID NO: 2933 - protein, 10 aa, Artificial Sequence
  Description of Artificial Sequence: Synthetic Linker
GGRGYGSESG

SEQ ID NO: 2934 - protein, 12 aa, Artificial Sequence
  Description of Artificial Sequence: Synthetic Linker
LQQHRPSPELTL

SEQ ID NO: 2935 - protein, 17 aa, Artificial Sequence
  Description of Artificial Sequence: Synthetic Linker
LGGKWQPGRGPCVLQEY

SEQ ID NO: 2936 - protein, 5 aa, Artificial Sequence
  Description of Artificial Sequence: Synthetic Linker
YQKLT

SEQ ID NO: 2937 - protein, 7 aa, Artificial Sequence
  Description of Artificial Sequence: Synthetic Linker
FISNQTI

SEQ ID NO: 2938 - protein, 7 aa, Artificial Sequence
  Description of Artificial Sequence: Synthetic Linker
SWEGNPI

SEQ ID NO: 2939 - protein, 8 aa, Artificial Sequence
  Description of Artificial Sequence: Synthetic Linker
FREVVSPQ

SEQ ID NO: 2940 - protein, 9 aa, Artificial Sequence
  Description of Artificial Sequence: Synthetic Linker
LADVPSSPY

SEQ ID NO: 2941 - protein, 4 aa, Artificial Sequence
  Description of Artificial Sequence: Synthetic Linker
FVSA

SEQ ID NO: 2942 - protein, 4 aa, Artificial Sequence
  Description of Artificial Sequence: Synthetic Linker
HKRS

SEQ ID NO: 2943 - protein, 5 aa, Artificial Sequence
  Description of Artificial Sequence: Synthetic Linker
KAAPD

SEQ ID NO: 2944 - protein, 19 aa, Artificial Sequence
  Description of Artificial Sequence: Synthetic Linker
PLDSPDETEDPEPNYAGEP

SEQ ID NO: 2945 - protein, 6 aa, Artificial Sequence
  Description of Artificial Sequence: Synthetic Linker
EVGNEE

SEQ ID NO: 2946 - protein, 13 aa, Artificial Sequence
  Description of Artificial Sequence: Synthetic Linker
ALPDEETGLELNE

SEQ ID NO: 2947 - protein, 4 aa, Artificial Sequence
  Description of Artificial Sequence: Synthetic Linker
QVDA

SEQ ID NO: 2948 - protein, 5 aa, Artificial Sequence
  Description of Artificial Sequence: Synthetic Linker
WRKDP

SEQ ID NO: 2949 - protein, 6 aa, Artificial Sequence
  Description of Artificial Sequence: Synthetic Linker
PSHGII

SEQ ID NO: 2950 - protein, 7 aa, Artificial Sequence
  Description of Artificial Sequence: Synthetic Linker
EGQGKAK

SEQ ID NO: 2951 - protein, 8 aa, Artificial Sequence
  Description of Artificial Sequence: Synthetic Linker
KINLAIKT

SEQ ID NO: 2952 - protein, 8 aa, Artificial Sequence
  Description of Artificial Sequence: Synthetic Linker
TEMYDTPT

SEQ ID NO: 2953 - protein, 6 aa, Artificial Sequence
  Description of Artificial Sequence: Synthetic Linker
AHELPM

SEQ ID NO: 2954 - protein, 12 aa, Artificial Sequence
  Description of Artificial Sequence: Synthetic Linker
EKPKGRDSKKVR

SEQ ID NO: 2955 - protein, 14 aa, Artificial Sequence
  Description of Artificial Sequence: Synthetic Linker
IEGTSPEIVVNPVR

SEQ ID NO: 2956 - protein, 7 aa, Artificial Sequence
  Description of Artificial Sequence: Synthetic Linker
QRTKVQI

SEQ ID NO: 2957 - protein, 26 aa, Artificial Sequence
  Description of Artificial Sequence: Synthetic Linker
VDMGFDTSKLGSYQRVAEPVVPPQEM

SEQ ID NO: 2958 - protein, 5 aa, Artificial Sequence
  Description of Artificial Sequence: Synthetic Linker
MNAHI

SEQ ID NO: 2959 - protein, 6 aa, Artificial Sequence
  Description of Artificial Sequence: Synthetic Linker
ADDYQA

SEQ ID NO: 2960 - protein, 6 aa, Artificial Sequence
  Description of Artificial Sequence: Synthetic Linker
YEGFTG

SEQ ID NO: 2961 - protein, 7 aa, Artificial Sequence
  Description of Artificial Sequence: Synthetic Linker
QVDDPLK

SEQ ID NO: 2962 - protein, 11 aa, Artificial Sequence
  Description of Artificial Sequence: Synthetic Linker
YKPKRFEYVTW

SEQ ID NO: 2963 - protein, 13 aa, Artificial Sequence
  Description of Artificial Sequence: Synthetic Linker
ILPLWHHDDTYLF

SEQ ID NO: 2964 - protein, 22 aa, Artificial Sequence
  Description of Artificial Sequence: Synthetic Linker
DMILPKKSVSKVKQTQLLTTEG

SEQ ID NO: 2965 - protein, 4 aa, Artificial Sequence
  Description of Artificial Sequence: Synthetic Linker
IDNP

SEQ ID NO: 2966 - protein, 4 aa, Artificial Sequence
  Description of Artificial Sequence: Synthetic Linker
GMDH

SEQ ID NO: 2967 - protein, 4 aa, Artificial Sequence
  Description of Artificial Sequence: Synthetic Linker
IGDC

SEQ ID NO: 2968 - protein, 5 aa, Artificial Sequence
  Description of Artificial Sequence: Synthetic Linker
EGVLH

SEQ ID NO: 2969 - protein, 5 aa, Artificial Sequence
  Description of Artificial Sequence: Synthetic Linker
NQKEL

SEQ ID NO: 2970 - protein, 5 aa, Artificial Sequence
  Description of Artificial Sequence: Synthetic Linker
QGNAL

SEQ ID NO: 2971 - protein, 5 aa, Artificial Sequence
  Description of Artificial Sequence: Synthetic Linker
QSGYQ

SEQ ID NO: 2972 - protein, 6 aa, Artificial Sequence
  Description of Artificial Sequence: Synthetic Linker
ARPDDE

SEQ ID NO: 2973 - protein, 6 aa, Artificial Sequence
  Description of Artificial Sequence: Synthetic Linker
MGVSAI

SEQ ID NO: 2974 - protein, 6 aa, Artificial Sequence
  Description of Artificial Sequence: Synthetic Linker
RNFQGY

SEQ ID NO: 2975 - protein, 7 aa, Artificial Sequence
  Description of Artificial Sequence: Synthetic Linker
TTQGDTD

SEQ ID NO: 2976 - protein, 5 aa, Artificial Sequence
  Description of Artificial Sequence: Synthetic Linker
IRDAN

SEQ ID NO: 2977 - protein, 7 aa, Artificial Sequence
  Description of Artificial Sequence: Synthetic Linker
YARPSSA

SEQ ID NO: 2978 - protein, 4 aa, Artificial Sequence
  Description of Artificial Sequence: Synthetic Linker
RGKF

SEQ ID NO: 2979 - protein, 4 aa, Artificial Sequence
  Description of Artificial Sequence: Synthetic Linker
THAV

SEQ ID NO: 2980 - protein, 5 aa, Artificial Sequence
  Description of Artificial Sequence: Synthetic Linker
ETPKI

SEQ ID NO: 2981 - protein, 5 aa, Artificial Sequence
  Description of Artificial Sequence: Synthetic Linker
SDTAN

SEQ ID NO: 2982 - protein, 7 aa, Artificial Sequence
  Description of Artificial Sequence: Synthetic Linker
TKQLAPT

SEQ ID NO: 2983 - protein, 10 aa, Artificial Sequence
  Description of Artificial Sequence: Synthetic Linker
AGDYKNLGGE

SEQ ID NO: 2984 - protein, 19 aa, Artificial Sequence
  Description of Artificial Sequence: Synthetic Linker
TYYTFNFSLEGAKMSLPGT

SEQ ID NO: 2985 - protein, 5 aa, Artificial Sequence
  Description of Artificial Sequence: Synthetic Linker
YNKSS

SEQ ID NO: 2986 - protein, 8 aa, Artificial Sequence
  Description of Artificial Sequence: Synthetic Linker
YGTPDYKY

SEQ ID NO: 2987 - protein, 11 aa, Artificial Sequence
  Description of Artificial Sequence: Synthetic Linker
PYGKAHTLGLK

SEQ ID NO: 2988 - protein, 6 aa, Artificial Sequence
  Description of Artificial Sequence: Synthetic Linker
DTEEKK

SEQ ID NO: 2989 - protein, 19 aa, Artificial Sequence
  Description of Artificial Sequence: Synthetic Linker
DIPNRRRKVSKHKHANFYP

SEQ ID NO: 2990 - protein, 6 aa, Artificial Sequence
  Description of Artificial Sequence: Synthetic Linker
PCSHVV

SEQ ID NO: 2991 - protein, 6 aa, Artificial Sequence
  Description of Artificial Sequence: Synthetic Linker
ANENGT

SEQ ID NO: 2992 - protein, 6 aa, Artificial Sequence
  Description of Artificial Sequence: Synthetic Linker
NRKNNI

SEQ ID NO: 2993 - protein, 8 aa, Artificial Sequence
  Description of Artificial Sequence: Synthetic Linker
LAPEDYTG

SEQ ID NO: 2994 - protein, 4 aa, Artificial Sequence
  Description of Artificial Sequence: Synthetic Linker
IGGK

SEQ ID NO: 2995 - protein, 4 aa, Artificial Sequence
  Description of Artificial Sequence: Synthetic Linker
VGDD

SEQ ID NO: 2996 - protein, 6 aa, Artificial Sequence
  Description of Artificial Sequence: Synthetic Linker
INTTKY

SEQ ID NO: 2997 - protein, 7 aa, Artificial Sequence
  Description of Artificial Sequence: Synthetic Linker
AATVTGY

SEQ ID NO: 2998 - protein, 7 aa, Artificial Sequence
  Description of Artificial Sequence: Synthetic Linker
GGADGKT

SEQ ID NO: 2999 - protein, 7 aa, Artificial Sequence
  Description of Artificial Sequence: Synthetic Linker
QNKDGSI

SEQ ID NO: 3000 - protein, 7 aa, Artificial Sequence
  Description of Artificial Sequence: Synthetic Linker
TDNNGKT

SEQ ID NO: 3001 - protein, 8 aa, Artificial Sequence
  Description of Artificial Sequence: Synthetic Linker
AAGVTGTA

SEQ ID NO: 3002 - protein, 9 aa, Artificial Sequence
  Description of Artificial Sequence: Synthetic Linker
QVGANDGET

SEQ ID NO: 3003 - protein, 11 aa, Artificial Sequence
  Description of Artificial Sequence: Synthetic Linker
TADDGTSKTAL

SEQ ID NO: 3004 - protein, 21 aa, Artificial Sequence
  Description of Artificial Sequence: Synthetic Linker
LKQINSQTLGLDTLNVQQKYK

SEQ ID NO: 3005 - protein, 23 aa, Artificial Sequence
  Description of Artificial Sequence: Synthetic Linker
AEGHNFKAQPDLAEAAATTTENP

SEQ ID NO: 3006 - protein, 4 aa, Artificial Sequence
  Description of Artificial Sequence: Synthetic Linker
AGAR

SEQ ID NO: 3007 - protein, 5 aa, Artificial Sequence
  Description of Artificial Sequence: Synthetic Linker
AEALL

SEQ ID NO: 3008 - protein, 6 aa, Artificial Sequence
  Description of Artificial Sequence: Synthetic Linker
AWPEEV

SEQ ID NO: 3009 - protein, 6 aa, Artificial Sequence
  Description of Artificial Sequence: Synthetic Linker
NRGVEA

SEQ ID NO: 3010 - protein, 8 aa, Artificial Sequence
  Description of Artificial Sequence: Synthetic Linker
EALPLPFA

SEQ ID NO: 3011 - protein, 8 aa, Artificial Sequence
  Description of Artificial Sequence: Synthetic Linker
RGVDPLGQ

SEQ ID NO: 3012 - protein, 9 aa, Artificial Sequence
  Description of Artificial Sequence: Synthetic Linker
LEVTPNRPD

SEQ ID NO: 3013 - protein, 9 aa, Artificial Sequence
  Description of Artificial Sequence: Synthetic Linker
VEDPEGAPH

SEQ ID NO: 3014 - protein, 10 aa, Artificial Sequence
  Description of Artificial Sequence: Synthetic Linker
AGSPKPPEAI

SEQ ID NO: 3015 - protein, 10 aa, Artificial Sequence
  Description of Artificial Sequence: Synthetic Linker
FGLRVAPSPL

SEQ ID NO: 3016 - protein, 13 aa, Artificial Sequence
  Description of Artificial Sequence: Synthetic Linker
TIPLALPAFFPAP

SEQ ID NO: 3017 - protein, 14 aa, Artificial Sequence
  Description of Artificial Sequence: Synthetic Linker
LGYALVEPEAALKA

SEQ ID NO: 3018 - protein, 19 aa, Artificial Sequence
  Description of Artificial Sequence: Synthetic Linker
LPLPDKPLAFQDPSRHPAA

SEQ ID NO: 3019 - protein, 5 aa, Artificial Sequence
  Description of Artificial Sequence: Synthetic Linker
GLQSA

SEQ ID NO: 3020 - protein, 6 aa, Artificial Sequence
  Description of Artificial Sequence: Synthetic Linker
HGELTR

SEQ ID NO: 3021 - protein, 7 aa, Artificial Sequence
  Description of Artificial Sequence: Synthetic Linker
LKDKQLN

SEQ ID NO: 3022 - protein, 5 aa, Artificial Sequence
  Description of Artificial Sequence: Synthetic Linker
FYPQY

SEQ ID NO: 3023 - protein, 7 aa, Artificial Sequence
  Description of Artificial Sequence: Synthetic Linker
DFHYDEK

SEQ ID NO: 3024 - protein, 10 aa, Artificial Sequence
  Description of Artificial Sequence: Synthetic Linker
DYLLDFSAVY

SEQ ID NO: 3025 - protein, 10 aa, Artificial Sequence
  Description of Artificial Sequence: Synthetic Linker
PLDVTNRPRT

SEQ ID NO: 3026 - protein, 17 aa, Artificial Sequence
  Description of Artificial Sequence: Synthetic Linker
NGEYSLKSAVKLPNVLS

SEQ ID NO: 3027 - protein, 6 aa, Artificial Sequence
  Description of Artificial Sequence: Synthetic Linker
DRRAGL

SEQ ID NO: 3028 - protein, 7 aa, Artificial Sequence
  Description of Artificial Sequence: Synthetic Linker
FLASMDE

SEQ ID NO: 3029 - protein, 8 aa, Artificial Sequence
  Description of Artificial Sequence: Synthetic Linker
IMRETINV

SEQ ID NO: 3030 - protein, 11 aa, Artificial Sequence
  Description of Artificial Sequence: Synthetic Linker
RFPNARTSYTM

SEQ ID NO: 3031 - protein, 6 aa, Artificial Sequence
  Description of Artificial Sequence: Synthetic Linker
SDPAKV

SEQ ID NO: 3032 - protein, 11 aa, Artificial Sequence
  Description of Artificial Sequence: Synthetic Linker
TSNGASCMPSM

SEQ ID NO: 3033 - protein, 12 aa, Artificial Sequence
  Description of Artificial Sequence: Synthetic Linker
AGSAPAEPTGDV

SEQ ID NO: 3034 - protein, 7 aa, Artificial Sequence
  Description of Artificial Sequence: Synthetic Linker
MRVKNDF

SEQ ID NO: 3035 - protein, 14 aa, Artificial Sequence
  Description of Artificial Sequence: Synthetic Linker
YEGKDVHIKEDERY

SEQ ID NO: 3036 - protein, 15 aa, Artificial Sequence
  Description of Artificial Sequence: Synthetic Linker
LGLKIIDLSAIQDEV

SEQ ID NO: 3037 - protein, 5 aa, Artificial Sequence
  Description of Artificial Sequence: Synthetic Linker
LEPSR

SEQ ID NO: 3038 - protein, 6 aa, Artificial Sequence
  Description of Artificial Sequence: Synthetic Linker
CSNVAA

SEQ ID NO: 3039 - protein, 8 aa, Artificial Sequence
  Description of Artificial Sequence: Synthetic Linker
QKVTINPV

SEQ ID NO: 3040 - protein, 11 aa, Artificial Sequence
  Description of Artificial Sequence: Synthetic Linker
ALPPGAAKQQL

SEQ ID NO: 3041 - protein, 11 aa, Artificial Sequence
  Description of Artificial Sequence: Synthetic Linker
ALRRGTAGSVT

SEQ ID NO: 3042 - protein, 16 aa, Artificial Sequence
  Description of Artificial Sequence: Synthetic Linker
ESFGATNTNARENTPF

SEQ ID NO: 3043 - protein, 4 aa, Artificial Sequence
  Description of Artificial Sequence: Synthetic Linker
DCDY

SEQ ID NO: 3044 - protein, 4 aa, Artificial Sequence
  Description of Artificial Sequence: Synthetic Linker
DWSD

SEQ ID NO: 3045 - protein, 4 aa, Artificial Sequence
  Description of Artificial Sequence: Synthetic Linker
FAGQ

SEQ ID NO: 3046 - protein, 4 aa, Artificial Sequence
  Description of Artificial Sequence: Synthetic Linker
HEGV

SEQ ID NO: 3047 - protein, 4 aa, Artificial Sequence
  Description of Artificial Sequence: Synthetic Linker
RDGE

SEQ ID NO: 3048 - protein, 4 aa, Artificial Sequence
  Description of Artificial Sequence: Synthetic Linker
SATR

SEQ ID NO: 3049 - protein, 4 aa, Artificial Sequence
  Description of Artificial Sequence: Synthetic Linker
SIPA

SEQ ID NO: 3050 - protein, 4 aa, Artificial Sequence
  Description of Artificial Sequence: Synthetic Linker
VYGQ

SEQ ID NO: 3051 - protein, 5 aa, Artificial Sequence
  Description of Artificial Sequence: Synthetic Linker
ACGAT

SEQ ID NO: 3052 - protein, 5 aa, Artificial Sequence
  Description of Artificial Sequence: Synthetic Linker
VYQAA

SEQ ID NO: 3053 - protein, 6 aa, Artificial Sequence
  Description of Artificial Sequence: Synthetic Linker
EAGVDR

SEQ ID NO: 3054 - protein, 6 aa, Artificial Sequence
  Description of Artificial Sequence: Synthetic Linker
SGGKTV

SEQ ID NO: 3055 - protein, 7 aa, Artificial Sequence
  Description of Artificial Sequence: Synthetic Linker
VPLSEKV

SEQ ID NO: 3056 - protein, 8 aa, Artificial Sequence
  Description of Artificial Sequence: Synthetic Linker
ANHPRGFA

SEQ ID NO: 3057 - protein, 9 aa, Artificial Sequence
  Description of Artificial Sequence: Synthetic Linker
HDLQGERPY

SEQ ID NO: 3058 - protein, 10 aa, Artificial Sequence
  Description of Artificial Sequence: Synthetic Linker
GCDGFHGISR

SEQ ID NO: 3059 - protein, 11 aa, Artificial Sequence
  Description of Artificial Sequence: Synthetic Linker
ADTPPVSHELI

SEQ ID NO: 3060 - protein, 4 aa, Artificial Sequence
  Description of Artificial Sequence: Synthetic Linker
GHRQ

SEQ ID NO: 3061 - protein, 4 aa, Artificial Sequence
  Description of Artificial Sequence: Synthetic Linker
LTGA

SEQ ID NO: 3062 - protein, 6 aa, Artificial Sequence
  Description of Artificial Sequence: Synthetic Linker
ALPSEL

SEQ ID NO: 3063 - protein, 6 aa, Artificial Sequence
  Description of Artificial Sequence: Synthetic Linker
RAGGSI

SEQ ID NO: 3064 - protein, 6 aa, Artificial Sequence
  Description of Artificial Sequence: Synthetic Linker
VSADNV

SEQ ID NO: 3065 - protein, 11 aa, Artificial Sequence
  Description of Artificial Sequence: Synthetic Linker
HTQTDTSSPDP

SEQ ID NO: 3066 - protein, 12 aa, Artificial Sequence
  Description of Artificial Sequence: Synthetic Linker
LKREKQDESCSL

SEQ ID NO: 3067 - protein, 13 aa, Artificial Sequence
  Description of Artificial Sequence: Synthetic Linker
FNPLKTGVCQLDN

SEQ ID NO: 3068 - protein, 4 aa, Artificial Sequence
  Description of Artificial Sequence: Synthetic Linker
ALGI

SEQ ID NO: 3069 - protein, 4 aa, Artificial Sequence
  Description of Artificial Sequence: Synthetic Linker
NLRS

SEQ ID NO: 3070 - protein, 6 aa, Artificial Sequence
  Description of Artificial Sequence: Synthetic Linker
EIPKPS

SEQ ID NO: 3071 - protein, 7 aa, Artificial Sequence
  Description of Artificial Sequence: Synthetic Linker
EKMVEPQ

SEQ ID NO: 3072 - protein, 10 aa, Artificial Sequence
  Description of Artificial Sequence: Synthetic Linker
KSKVYTRTPT

SEQ ID NO: 3073 - protein, 6 aa, Artificial Sequence
  Description of Artificial Sequence: Synthetic Linker
ELVPKP

SEQ ID NO: 3074 - protein, 6 aa, Artificial Sequence
  Description of Artificial Sequence: Synthetic Linker
FGFPGG

SEQ ID NO: 3075 - protein, 6 aa, Artificial Sequence
  Description of Artificial Sequence: Synthetic Linker
LRNLDE

SEQ ID NO: 3076 - protein, 7 aa, Artificial Sequence
  Description of Artificial Sequence: Synthetic Linker
FSNKKSW

SEQ ID NO: 3077 - protein, 7 aa, Artificial Sequence
  Description of Artificial Sequence: Synthetic Linker
LFEKNDF

SEQ ID NO: 3078 - protein, 7 aa, Artificial Sequence
  Description of Artificial Sequence: Synthetic Linker
LYPNACS

SEQ ID NO: 3079 - protein, 7 aa, Artificial Sequence
  Description of Artificial Sequence: Synthetic Linker
RRAVYAN

SEQ ID NO: 3080 - protein, 7 aa, Artificial Sequence
  Description of Artificial Sequence: Synthetic Linker
RSHRMPV

SEQ ID NO: 3081 - protein, 8 aa, Artificial Sequence
  Description of Artificial Sequence: Synthetic Linker
EWNWPQPV

SEQ ID NO: 3082 - protein, 16 aa, Artificial Sequence
  Description of Artificial Sequence: Synthetic Linker
ITPAYPSMCATHNITE

SEQ ID NO: 3083 - protein, 16 aa, Artificial Sequence
  Description of Artificial Sequence: Synthetic Linker
RLDQPQVPLSLTLSDK

SEQ ID NO: 3084 - protein, 21 aa, Artificial Sequence
  Description of Artificial Sequence: Synthetic Linker
ILKPIEDGPLQVRVWNPKIYA

SEQ ID NO: 3085 - protein, 16 aa, Artificial Sequence
  Description of Artificial Sequence: Synthetic Linker
ISSSMTNSTAASRPPV

SEQ ID NO: 3086 - protein, 5 aa, Artificial Sequence
  Description of Artificial Sequence: Synthetic Linker
ELVTV

SEQ ID NO: 3087 - protein, 11 aa, Artificial Sequence
  Description of Artificial Sequence: Synthetic Linker
HDDLWQTLPDP

SEQ ID NO: 3088 - protein, 4 aa, Artificial Sequence
  Description of Artificial Sequence: Synthetic Linker
QGTN

SEQ ID NO: 3089 - protein, 16 aa, Artificial Sequence
  Description of Artificial Sequence: Synthetic Linker
NVYPELRVPDHQDIAF

SEQ ID NO: 3090 - protein, 6 aa, Artificial Sequence
  Description of Artificial Sequence: Synthetic Linker
QLSVNQ

SEQ ID NO: 3091 - protein, 8 aa, Artificial Sequence
  Description of Artificial Sequence: Synthetic Linker
DKAQFRNG

SEQ ID NO: 3092 - protein, 13 aa, Artificial Sequence
  Description of Artificial Sequence: Synthetic Linker
ENPYRPVTFDYLM

SEQ ID NO: 3093 - protein, 27 aa, Artificial Sequence
  Description of Artificial Sequence: Synthetic Linker
DYGNSPLHRFKKPGSKNFQNIFPPSAT

SEQ ID NO: 3094 - protein, 10 aa, Artificial Sequence
  Description of Artificial Sequence: Synthetic Linker
FKPLPAQESE

SEQ ID NO: 3095 - protein, 7 aa, Artificial Sequence
  Description of Artificial Sequence: Synthetic Linker
KAAGLEM

SEQ ID NO: 3096 - protein, 8 aa, Artificial Sequence
  Description of Artificial Sequence: Synthetic Linker
EIPPQAII

SEQ ID NO: 3097 - protein, 27 aa, Artificial Sequence
  Description of Artificial Sequence: Synthetic Linker
ESGEPSSLPRPATHWPFKTAFQHHYLV

SEQ ID NO: 3098 - protein, 8 aa, Artificial Sequence
  Description of Artificial Sequence: Synthetic Linker
EVHYARPI

SEQ ID NO: 3099 - protein, 25 aa, Artificial Sequence
  Description of Artificial Sequence: Synthetic Linker
WSRLKAKDWGSSSGSQGREDSVLSY

SEQ ID NO: 3100 - protein, 4 aa, Artificial Sequence
  Description of Artificial Sequence: Synthetic Linker
LGTA

SEQ ID NO: 3101 - protein, 5 aa, Artificial Sequence
  Description of Artificial Sequence: Synthetic Linker
LGRRF

SEQ ID NO: 3102 - protein, 6 aa, Artificial Sequence
  Description of Artificial Sequence: Synthetic Linker
ANTDNT

SEQ ID NO: 3103 - protein, 6 aa, Artificial Sequence
  Description of Artificial Sequence: Synthetic Linker
KRTIPA

SEQ ID NO: 3104 - protein, 7 aa, Artificial Sequence
  Description of Artificial Sequence: Synthetic Linker
AIDDSNI

SEQ ID NO: 3105 - protein, 7 aa, Artificial Sequence
  Description of Artificial Sequence: Synthetic Linker
PLTKTDV

SEQ ID NO: 3106 - protein, 8 aa, Artificial Sequence
  Description of Artificial Sequence: Synthetic Linker
NYLVSDGI

SEQ ID NO: 3107 - protein, 9 aa, Artificial Sequence
  Description of Artificial Sequence: Synthetic Linker
LLDDEGFNW

SEQ ID NO: 3108 - protein, 4 aa, Artificial Sequence
  Description of Artificial Sequence: Synthetic Linker
TKAE

SEQ ID NO: 3109 - protein, 4 aa, Artificial Sequence
  Description of Artificial Sequence: Synthetic Linker
TVAV

SEQ ID NO: 3110 - protein, 4 aa, Artificial Sequence
  Description of Artificial Sequence: Synthetic Linker
YRTM

SEQ ID NO: 3111 - protein, 5 aa, Artificial Sequence
  Description of Artificial Sequence: Synthetic Linker
ARTPL

SEQ ID NO: 3112 - protein, 5 aa, Artificial Sequence
  Description of Artificial Sequence: Synthetic Linker
DRPDL

SEQ ID NO: 3113 - protein, 5 aa, Artificial Sequence
  Description of Artificial Sequence: Synthetic Linker
TGTAK

SEQ ID NO: 3114 - protein, 5 aa, Artificial Sequence
  Description of Artificial Sequence: Synthetic Linker
VAMQK

SEQ ID NO: 3115 - protein, 5 aa, Artificial Sequence
  Description of Artificial Sequence: Synthetic Linker
YNMQV

SEQ ID NO: 3116 - protein, 6 aa, Artificial Sequence
  Description of Artificial Sequence: Synthetic Linker
FRMYEK

SEQ ID NO: 3117 - protein, 6 aa, Artificial Sequence
  Description of Artificial Sequence: Synthetic Linker
QAAKST

SEQ ID NO: 3118 - protein, 7 aa, Artificial Sequence
  Description of Artificial Sequence: Synthetic Linker
YMTGQPV

SEQ ID NO: 3119 - protein, 8 aa, Artificial Sequence
  Description of Artificial Sequence: Synthetic Linker
VVEDGQVV

SEQ ID NO: 3120 - protein, 10 aa, Artificial Sequence
  Description of Artificial Sequence: Synthetic Linker
KEGLEIQNES

SEQ ID NO: 3121 - protein, 11 aa, Artificial Sequence
  Description of Artificial Sequence: Synthetic Linker
AFGIDNLFDVK

SEQ ID NO: 3122 - protein, 11 aa, Artificial Sequence
  Description of Artificial Sequence: Synthetic Linker
TIPTNRPVVRD

SEQ ID NO: 3123 - protein, 15 aa, Artificial Sequence
  Description of Artificial Sequence: Synthetic Linker
VDSFTGRLMKGRRYS

SEQ ID NO: 3124 - protein, 24 aa, Artificial Sequence
  Description of Artificial Sequence: Synthetic Linker
VRTLKAEKDYTYDIKTKAVQLTEE

SEQ ID NO: 3125 - protein, 12 aa, Artificial Sequence
  Description of Artificial Sequence: Synthetic Linker
DLPPLEEGRYYY

SEQ ID NO: 3126 - protein, 18 aa, Artificial Sequence
  Description of Artificial Sequence: Synthetic Linker
HGTALEHRRVVSPYGHRF

SEQ ID NO: 3127 - protein, 7 aa, Artificial Sequence
  Description of Artificial Sequence: Synthetic Linker
AEANVEY

SEQ ID NO: 3128 - protein, 9 aa, Artificial Sequence
  Description of Artificial Sequence: Synthetic Linker
IPLVTGPGV

SEQ ID NO: 3129 - protein, 4 aa, Artificial Sequence
  Description of Artificial Sequence: Synthetic Linker
INDV

SEQ ID NO: 3130 - protein, 4 aa, Artificial Sequence
  Description of Artificial Sequence: Synthetic Linker
KARL

SEQ ID NO: 3131 - protein, 5 aa, Artificial Sequence
  Description of Artificial Sequence: Synthetic Linker
HPEHG

SEQ ID NO: 3132 - protein, 5 aa, Artificial Sequence
  Description of Artificial Sequence: Synthetic Linker
YIGKP

SEQ ID NO: 3133 - protein, 7 aa, Artificial Sequence
  Description of Artificial Sequence: Synthetic Linker
YGYRRLR

SEQ ID NO: 3134 - protein, 8 aa, Artificial Sequence
  Description of Artificial Sequence: Synthetic Linker
EYLKRPLI

SEQ ID NO: 3135 - protein, 8 aa, Artificial Sequence
  Description of Artificial Sequence: Synthetic Linker
FADLPRKY

SEQ ID NO: 3136 - protein, 8 aa, Artificial Sequence
  Description of Artificial Sequence: Synthetic Linker
SGLQDVAH

SEQ ID NO: 3137 - protein, 13 aa, Artificial Sequence
  Description of Artificial Sequence: Synthetic Linker
VGGGLSTNPMLAQ

SEQ ID NO: 3138 - protein, 15 aa, Artificial Sequence
  Description of Artificial Sequence: Synthetic Linker
DDVGLQTTEACGDCP

SEQ ID NO: 3139 - protein, 16 aa, Artificial Sequence
  Description of Artificial Sequence: Synthetic Linker
DGPAPEPVKHPIDHVG

SEQ ID NO: 3140 - protein, 16 aa, Artificial Sequence
  Description of Artificial Sequence: Synthetic Linker
GSPLAGESLDEVLDPT

SEQ ID NO: 3141 - protein, 4 aa, Artificial Sequence
  Description of Artificial Sequence: Synthetic Linker
EVRE

SEQ ID NO: 3142 - protein, 4 aa, Artificial Sequence
  Description of Artificial Sequence: Synthetic Linker
HGEV

SEQ ID NO: 3143 - protein, 4 aa, Artificial Sequence
  Description of Artificial Sequence: Synthetic Linker
KLPP

SEQ ID NO: 3144 - protein, 6 aa, Artificial Sequence
  Description of Artificial Sequence: Synthetic Linker
FGREGN

SEQ ID NO: 3145 - protein, 6 aa, Artificial Sequence
  Description of Artificial Sequence: Synthetic Linker
LGKGSS

SEQ ID NO: 3146 - protein, 6 aa, Artificial Sequence
  Description of Artificial Sequence: Synthetic Linker
PFPKDV

SEQ ID NO: 3147 - protein, 6 aa, Artificial Sequence
  Description of Artificial Sequence: Synthetic Linker
SEHFGE

SEQ ID NO: 3148 - protein, 6 aa, Artificial Sequence
  Description of Artificial Sequence: Synthetic Linker
YTGVRR

SEQ ID NO: 3149 - protein, 7 aa, Artificial Sequence
  Description of Artificial Sequence: Synthetic Linker
DTHTLDY

SEQ ID NO: 3150 - protein, 8 aa, Artificial Sequence
  Description of Artificial Sequence: Synthetic Linker
ESDYEVGG

SEQ ID NO: 3151 - protein, 11 aa, Artificial Sequence
  Description of Artificial Sequence: Synthetic Linker
GNLPLGAGLSS

SEQ ID NO: 3152 - protein, 13 aa, Artificial Sequence
  Description of Artificial Sequence: Synthetic Linker
FSLNDLRKENSWI

SEQ ID NO: 3153 - protein, 9 aa, Artificial Sequence
  Description of Artificial Sequence: Synthetic Linker
EHGLAPPDR

SEQ ID NO: 3154 - protein, 12 aa, Artificial Sequence
  Description of Artificial Sequence: Synthetic Linker
AYPQTPLLPRDP

SEQ ID NO: 3155 - protein, 5 aa, Artificial Sequence
  Description of Artificial Sequence: Synthetic Linker
QFATV

SEQ ID NO: 3156 - protein, 4 aa, Artificial Sequence
  Description of Artificial Sequence: Synthetic Linker
LLTA

SEQ ID NO: 3157 - protein, 6 aa, Artificial Sequence
  Description of Artificial Sequence: Synthetic Linker
ARHPLL

SEQ ID NO: 3158 - protein, 6 aa, Artificial Sequence
  Description of Artificial Sequence: Synthetic Linker
LGGLEV

SEQ ID NO: 3159 - protein, 6 aa, Artificial Sequence
  Description of Artificial Sequence: Synthetic Linker
WTEGWE

SEQ ID NO: 3160 - protein, 7 aa, Artificial Sequence
  Description of Artificial Sequence: Synthetic Linker
YDEGLTS

SEQ ID NO: 3161 - protein, 8 aa, Artificial Sequence
  Description of Artificial Sequence: Synthetic Linker
TLGLRSPV

SEQ ID NO: 3162 - protein, 14 aa, Artificial Sequence
  Description of Artificial Sequence: Synthetic Linker
HLDLSAPKLRLREE

SEQ ID NO: 3163 - protein, 21 aa, Artificial Sequence
  Description of Artificial Sequence: Synthetic Linker
YATEKEEPKPERTEVVAKLRR

SEQ ID NO: 3164 - protein, 6 aa, Artificial Sequence
  Description of Artificial Sequence: Synthetic Linker
ELGVSL

SEQ ID NO: 3165 - protein, 6 aa, Artificial Sequence
  Description of Artificial Sequence: Synthetic Linker
MSSKGT

SEQ ID NO: 3166 - protein, 7 aa, Artificial Sequence
  Description of Artificial Sequence: Synthetic Linker
LKLGRAF

SEQ ID NO: 3167 - protein, 8 aa, Artificial Sequence
  Description of Artificial Sequence: Synthetic Linker
GFNIEKFP

SEQ ID NO: 3168 - protein, 15 aa, Artificial Sequence
  Description of Artificial Sequence: Synthetic Linker
TAPLPGYNTEFASGI

SEQ ID NO: 3169 - protein, 22 aa, Artificial Sequence
  Description of Artificial Sequence: Synthetic Linker
CFRNEVGLPDSSKTEKVTSETV

SEQ ID NO: 3170 - protein, 4 aa, Artificial Sequence
  Description of Artificial Sequence: Synthetic Linker
KSRT

SEQ ID NO: 3171 - protein, 5 aa, Artificial Sequence
  Description of Artificial Sequence: Synthetic Linker
DRAGA

SEQ ID NO: 3172 - protein, 5 aa, Artificial Sequence
  Description of Artificial Sequence: Synthetic Linker
FYVSA

SEQ ID NO: 3173 - protein, 5 aa, Artificial Sequence
  Description of Artificial Sequence: Synthetic Linker
IATGG

SEQ ID NO: 3174 - protein, 5 aa, Artificial Sequence
  Description of Artificial Sequence: Synthetic Linker
IGGGT

SEQ ID NO: 3175 - protein, 5 aa, Artificial Sequence
  Description of Artificial Sequence: Synthetic Linker
LFRKI

SEQ ID NO: 3176 - protein, 5 aa, Artificial Sequence
  Description of Artificial Sequence: Synthetic Linker
PRSLS

SEQ ID NO: 3177 - protein, 5 aa, Artificial Sequence
  Description of Artificial Sequence: Synthetic Linker
TGKKV

SEQ ID NO: 3178 - protein, 6 aa, Artificial Sequence
  Description of Artificial Sequence: Synthetic Linker
DVRGNM

SEQ ID NO: 3179 - protein, 6 aa, Artificial Sequence
  Description of Artificial Sequence: Synthetic Linker
LNDGSQ

SEQ ID NO: 3180 - protein, 6 aa, Artificial Sequence
  Description of Artificial Sequence: Synthetic Linker
NIENGG

SEQ ID NO: 3181 - protein, 6 aa, Artificial Sequence
  Description of Artificial Sequence: Synthetic Linker
RDPGAR

SEQ ID NO: 3182 - protein, 6 aa, Artificial Sequence
  Description of Artificial Sequence: Synthetic Linker
SREVKS

SEQ ID NO: 3183 - protein, 7 aa, Artificial Sequence
  Description of Artificial Sequence: Synthetic Linker
RQWNGKE

SEQ ID NO: 3184 - protein, 7 aa, Artificial Sequence
  Description of Artificial Sequence: Synthetic Linker
SIYFQPP

SEQ ID NO: 3185 - protein, 8 aa, Artificial Sequence
  Description of Artificial Sequence: Synthetic Linker
VPQIRAPS

SEQ ID NO: 3186 - protein, 8 aa, Artificial Sequence
  Description of Artificial Sequence: Synthetic Linker
WFSDDPNV

SEQ ID NO: 3187 - protein, 11 aa, Artificial Sequence
  Description of Artificial Sequence: Synthetic Linker
SEDPELPYMRP

SEQ ID NO: 3188 - protein, 8 aa, Artificial Sequence
  Description of Artificial Sequence: Synthetic Linker
AFDGPFDE

SEQ ID NO: 3189 - protein, 6 aa, Artificial Sequence
  Description of Artificial Sequence: Synthetic Linker
HGDDRG

SEQ ID NO: 3190 - protein, 5 aa, Artificial Sequence
  Description of Artificial Sequence: Synthetic Linker
LRPSP

SEQ ID NO: 3191 - protein, 4 aa, Artificial Sequence
  Description of Artificial Sequence: Synthetic Linker
LNVA

SEQ ID NO: 3192 - protein, 6 aa, Artificial Sequence
  Description of Artificial Sequence: Synthetic Linker
LSTSQK

SEQ ID NO: 3193 - protein, 21 aa, Artificial Sequence
  Description of Artificial Sequence: Synthetic Linker
GAADIGLGYPNGNQGWGRVTL

SEQ ID NO: 3194 - protein, 4 aa, Artificial Sequence
  Description of Artificial Sequence: Synthetic Linker
YIGI

SEQ ID NO: 3195 - protein, 7 aa, Artificial Sequence
  Description of Artificial Sequence: Synthetic Linker
DGRVIRG

SEQ ID NO: 3196 - protein, 17 aa, Artificial Sequence
  Description of Artificial Sequence: Synthetic Linker
TLSFDKSNDGETPEGIG

SEQ ID NO: 3197 - protein, 18 aa, Artificial Sequence
  Description of Artificial Sequence: Synthetic Linker
EIAPLHAQGGGIDQLQGI

SEQ ID NO: 3198 - protein, 4 aa, Artificial Sequence
  Description of Artificial Sequence: Synthetic Linker
ANNG

SEQ ID NO: 3199 - protein, 4 aa, Artificial Sequence
  Description of Artificial Sequence: Synthetic Linker
ESNL

SEQ ID NO: 3200 - protein, 4 aa, Artificial Sequence
  Description of Artificial Sequence: Synthetic Linker
KISA

SEQ ID NO: 3201 - protein, 4 aa, Artificial Sequence
  Description of Artificial Sequence: Synthetic Linker
MDSA

SEQ ID NO: 3202 - protein, 4 aa, Artificial Sequence
  Description of Artificial Sequence: Synthetic Linker
MMTP

SEQ ID NO: 3203 - protein, 4 aa, Artificial Sequence
  Description of Artificial Sequence: Synthetic Linker
VGGI

SEQ ID NO: 3204 - protein, 5 aa, Artificial Sequence
  Description of Artificial Sequence: Synthetic Linker
YTQRL

SEQ ID NO: 3205 - protein, 6 aa, Artificial Sequence
  Description of Artificial Sequence: Synthetic Linker
AEKGKA

SEQ ID NO: 3206 - protein, 6 aa, Artificial Sequence
  Description of Artificial Sequence: Synthetic Linker
MIRVPV

SEQ ID NO: 3207 - protein, 7 aa, Artificial Sequence
  Description of Artificial Sequence: Synthetic Linker
SYTATED

SEQ ID NO: 3208 - protein, 8 aa, Artificial Sequence
  Description of Artificial Sequence: Synthetic Linker
ETINPAHP

SEQ ID NO: 3209 - protein, 8 aa, Artificial Sequence
  Description of Artificial Sequence: Synthetic Linker
SKFSGGNL

SEQ ID NO: 3210 - protein, 8 aa, Artificial Sequence
  Description of Artificial Sequence: Synthetic Linker
TAYFVDAP

SEQ ID NO: 3211 - protein, 9 aa, Artificial Sequence
  Description of Artificial Sequence: Synthetic Linker
ISPKEPHNK

SEQ ID NO: 3212 - protein, 9 aa, Artificial Sequence
  Description of Artificial Sequence: Synthetic Linker
LSDKPGNPV

SEQ ID NO: 3213 - protein, 9 aa, Artificial Sequence
  Description of Artificial Sequence: Synthetic Linker
RYPSITRDM

SEQ ID NO: 3214 - protein, 10 aa, Artificial Sequence
  Description of Artificial Sequence: Synthetic Linker
MLSQVPYFSR

SEQ ID NO: 3215 - protein, 11 aa, Artificial Sequence
  Description of Artificial Sequence: Synthetic Linker
APSRYFASEPK

SEQ ID NO: 3216 - protein, 14 aa, Artificial Sequence
  Description of Artificial Sequence: Synthetic Linker
HTLDAVNIADRYDA

SEQ ID NO: 3217 - protein, 31 aa, Artificial Sequence
  Description of Artificial Sequence: Synthetic Linker
ADIALSLPELNPYIPDDFSLIKSEKKYDHPE

SEQ ID NO: 3218 - protein, 7 aa, Artificial Sequence
  Description of Artificial Sequence: Synthetic Linker
DVQPMQY

SEQ ID NO: 3219 - protein, 11 aa, Artificial Sequence
  Description of Artificial Sequence: Synthetic Linker
HMSPSWTLLKL

SEQ ID NO: 3220 - protein, 8 aa, Artificial Sequence
  Description of Artificial Sequence: Synthetic Linker
LEMVSKPM

SEQ ID NO: 3221 - protein, 51 aa, Artificial Sequence
  Description of Artificial Sequence: Synthetic Linker
YGPKGKGKGMGAGTLSTDKGESLGIKYEEGQSHRPTNPNASRMAQKVGGSD

SEQ ID NO: 3222 - protein, 5 aa, Artificial Sequence
  Description of Artificial Sequence: Synthetic Linker
VGQSL

SEQ ID NO: 3223 - protein, 6 aa, Artificial Sequence
  Description of Artificial Sequence: Synthetic Linker
VSRSST

SEQ ID NO: 3224 - protein, 12 aa, Artificial Sequence
  Description of Artificial Sequence: Synthetic Linker
ERNDVAPNKPDE

SEQ ID NO: 3225 - protein, 12 aa, Artificial Sequence
  Description of Artificial Sequence: Synthetic Linker
TETAAAADPGLS

SEQ ID NO: 3226 - protein, 14 aa, Artificial Sequence
  Description of Artificial Sequence: Synthetic Linker
VAESDRPELTSARR

SEQ ID NO: 3227 - protein, 4 aa, Artificial Sequence
  Description of Artificial Sequence: Synthetic Linker
PFYP

SEQ ID NO: 3228 - protein, 6 aa, Artificial Sequence
  Description of Artificial Sequence: Synthetic Linker
GVSEKP

SEQ ID NO: 3229 - protein, 9 aa, Artificial Sequence
  Description of Artificial Sequence: Synthetic Linker
LGMGDVASL

SEQ ID NO: 3230 - protein, 15 aa, Artificial Sequence
  Description of Artificial Sequence: Synthetic Linker
ALGGEARLPVLKDRN

SEQ ID NO: 3231 - protein, 17 aa, Artificial Sequence
  Description of Artificial Sequence: Synthetic Linker
AAGLEAEAPKSAKELSL

SEQ ID NO: 3232 - protein, 4 aa, Artificial Sequence
  Description of Artificial Sequence: Synthetic Linker
KGRF

SEQ ID NO: 3233 - protein, 5 aa, Artificial Sequence
  Description of Artificial Sequence: Synthetic Linker
KAGSL

SEQ ID NO: 3234 - protein, 6 aa, Artificial Sequence
  Description of Artificial Sequence: Synthetic Linker
NTGIFI

SEQ ID NO: 3235 - protein, 6 aa, Artificial Sequence
  Description of Artificial Sequence: Synthetic Linker
QLVKSE

SEQ ID NO: 3236 - protein, 7 aa, Artificial Sequence
  Description of Artificial Sequence: Synthetic Linker
KLKYVPH

SEQ ID NO: 3237 - protein, 7 aa, Artificial Sequence
  Description of Artificial Sequence: Synthetic Linker
LGFDEVI

SEQ ID NO: 3238 - protein, 9 aa, Artificial Sequence
  Description of Artificial Sequence: Synthetic Linker
MLATNLTDK

SEQ ID NO: 3239 - protein, 16 aa, Artificial Sequence
  Description of Artificial Sequence: Synthetic Linker
LKDHILQFVIPNRGVT

SEQ ID NO: 3240 - protein, 17 aa, Artificial Sequence
  Description of Artificial Sequence: Synthetic Linker
RAKGSTKFTRVPKRVYW

SEQ ID NO: 3241 - protein, 5 aa, Artificial Sequence
  Description of Artificial Sequence: Synthetic Linker
FQKLM

SEQ ID NO: 3242 - protein, 6 aa, Artificial Sequence
  Description of Artificial Sequence: Synthetic Linker
NAPTPQ

SEQ ID NO: 3243 - protein, 8 aa, Artificial Sequence
  Description of Artificial Sequence: Synthetic Linker
EFKEGEDA

SEQ ID NO: 3244 - protein, 6 aa, Artificial Sequence
  Description of Artificial Sequence: Synthetic Linker
AGTLLP

SEQ ID NO: 3245 - protein, 6 aa, Artificial Sequence
  Description of Artificial Sequence: Synthetic Linker
LAPYKV

SEQ ID NO: 3246 - protein, 7 aa, Artificial Sequence
  Description of Artificial Sequence: Synthetic Linker
ESIKDDK

SEQ ID NO: 3247 - protein, 7 aa, Artificial Sequence
  Description of Artificial Sequence: Synthetic Linker
FHDKPEI

SEQ ID NO: 3248 - protein, 8 aa, Artificial Sequence
  Description of Artificial Sequence: Synthetic Linker
ITTPKDDE

SEQ ID NO: 3249 - protein, 9 aa, Artificial Sequence
  Description of Artificial Sequence: Synthetic Linker
HDITPSMTP

SEQ ID NO: 3250 - protein, 10 aa, Artificial Sequence
  Description of Artificial Sequence: Synthetic Linker
AEATVAPVSP

SEQ ID NO: 3251 - protein, 11 aa, Artificial Sequence
  Description of Artificial Sequence: Synthetic Linker
IDALADKYEPS

SEQ ID NO: 3252 - protein, 4 aa, Artificial Sequence
  Description of Artificial Sequence: Synthetic Linker
FYGK

SEQ ID NO: 3253 - protein, 8 aa, Artificial Sequence
  Description of Artificial Sequence: Synthetic Linker
ALSNTGEI

SEQ ID NO: 3254 - protein, 15 aa, Artificial Sequence
  Description of Artificial Sequence: Synthetic Linker
TATPPGSVTVPHPNI

SEQ ID NO: 3255 - protein, 19 aa, Artificial Sequence
  Description of Artificial Sequence: Synthetic Linker
RSPVFTDNSSPPAVPQSFQ

SEQ ID NO: 3256 - protein, 8 aa, Artificial Sequence
  Description of Artificial Sequence: Synthetic Linker
IRNIDQDV

SEQ ID NO: 3257 - protein, 8 aa, Artificial Sequence
  Description of Artificial Sequence: Synthetic Linker
REETNLMD

SEQ ID NO: 3258 - protein, 6 aa, Artificial Sequence
  Description of Artificial Sequence: Synthetic Linker
HALPLV

SEQ ID NO: 3259 - protein, 6 aa, Artificial Sequence
  Description of Artificial Sequence: Synthetic Linker
EGRSKK

SEQ ID NO: 3260 - protein, 27 aa, Artificial Sequence
  Description of Artificial Sequence: Synthetic Linker
NKEKKAVSPLLLTTTNSSEGLSMGNYI

SEQ ID NO: 3261 - protein, 7 aa, Artificial Sequence
  Description of Artificial Sequence: Synthetic Linker
DLASGQI

SEQ ID NO: 3262 - protein, 7 aa, Artificial Sequence
  Description of Artificial Sequence: Synthetic Linker
TLANGAV

SEQ ID NO: 3263 - protein, 8 aa, Artificial Sequence
  Description of Artificial Sequence: Synthetic Linker
DYDGYNQF

SEQ ID NO: 3264 - protein, 9 aa, Artificial Sequence
  Description of Artificial Sequence: Synthetic Linker
DTGGAPGTV

SEQ ID NO: 3265 - protein, 9 aa, Artificial Sequence
  Description of Artificial Sequence: Synthetic Linker
QTNGGQFPY

SEQ ID NO: 3266 - protein, 10 aa, Artificial Sequence
  Description of Artificial Sequence: Synthetic Linker
TGIKGAFRTR

SEQ ID NO: 3267 - protein, 5 aa, Artificial Sequence
  Description of Artificial Sequence: Synthetic Linker
SLPAR

SEQ ID NO: 3268 - protein, 4 aa, Artificial Sequence
  Description of Artificial Sequence: Synthetic Linker
IYPD

SEQ ID NO: 3269 - protein, 4 aa, Artificial Sequence
  Description of Artificial Sequence: Synthetic Linker
KCAV

SEQ ID NO: 3270 - protein, 4 aa, Artificial Sequence
  Description of Artificial Sequence: Synthetic Linker
MAPK

SEQ ID NO: 3271 - protein, 4 aa, Artificial Sequence
  Description of Artificial Sequence: Synthetic Linker
TESL

SEQ ID NO: 3272 - protein, 5 aa, Artificial Sequence
  Description of Artificial Sequence: Synthetic Linker
ASADQ

SEQ ID NO: 3273 - protein, 10 aa, Artificial Sequence
  Description of Artificial Sequence: Synthetic Linker
YTLRQPPPAT

SEQ ID NO: 3274 - protein, 11 aa, Artificial Sequence
  Description of Artificial Sequence: Synthetic Linker
DQSDPNDPKSR

SEQ ID NO: 3275 - protein, 24 aa, Artificial Sequence
  Description of Artificial Sequence: Synthetic Linker
SLHDMADEAGLPVQTEDGEATGTI

SEQ ID NO: 3276 - protein, 5 aa, Artificial Sequence
  Description of Artificial Sequence: Synthetic Linker
DGIEE

SEQ ID NO: 3277 - protein, 6 aa, Artificial Sequence
  Description of Artificial Sequence: Synthetic Linker
VEHLPK

SEQ ID NO: 3278 - protein, 4 aa, Artificial Sequence
  Description of Artificial Sequence: Synthetic Linker
QAHS

SEQ ID NO: 3279 - protein, 7 aa, Artificial Sequence
  Description of Artificial Sequence: Synthetic Linker
AKEAFVS

SEQ ID NO: 3280 - protein, 9 aa, Artificial Sequence
  Description of Artificial Sequence: Synthetic Linker
QGILLHRSR

SEQ ID NO: 3281 - protein, 4 aa, Artificial Sequence
  Description of Artificial Sequence: Synthetic Linker
ESEY

SEQ ID NO: 3282 - protein, 5 aa, Artificial Sequence
  Description of Artificial Sequence: Synthetic Linker
DGPTP

SEQ ID NO: 3283 - protein, 8 aa, Artificial Sequence
  Description of Artificial Sequence: Synthetic Linker
VGSEKVSK

SEQ ID NO: 3284 - protein, 4 aa, Artificial Sequence
  Description of Artificial Sequence: Synthetic Linker
IGQS

SEQ ID NO: 3285 - protein, 15 aa, Artificial Sequence
  Description of Artificial Sequence: Synthetic Linker
VSNINNTVSPSSASF

SEQ ID NO: 3286 - protein, 16 aa, Artificial Sequence
  Description of Artificial Sequence: Synthetic Linker
ALPTNARPLLPPISNP

SEQ ID NO: 3287 - protein, 8 aa, Artificial Sequence
  Description of Artificial Sequence: Synthetic Linker
VRERPVPR

SEQ ID NO: 3288 - protein, 9 aa, Artificial Sequence
  Description of Artificial Sequence: Synthetic Linker
EQADGAVRG

SEQ ID NO: 3289 - protein, 13 aa, Artificial Sequence
  Description of Artificial Sequence: Synthetic Linker
ARSGYRPDSGATP

SEQ ID NO: 3290 - protein, 8 aa, Artificial Sequence
  Description of Artificial Sequence: Synthetic Linker
PDIDKLGY

SEQ ID NO: 3291 - protein, 5 aa, Artificial Sequence
  Description of Artificial Sequence: Synthetic Linker
LGYSM

SEQ ID NO: 3292 - protein, 13 aa, Artificial Sequence
  Description of Artificial Sequence: Synthetic Linker
SGVIKKFTAIIDP

SEQ ID NO: 3293 - protein, 6 aa, Artificial Sequence
  Description of Artificial Sequence: Synthetic Linker
RTSRQL

SEQ ID NO: 3294 - protein, 4 aa, Artificial Sequence
  Description of Artificial Sequence: Synthetic Linker
SGCK

SEQ ID NO: 3295 - protein, 5 aa, Artificial Sequence
  Description of Artificial Sequence: Synthetic Linker
VSTGV

SEQ ID NO: 3296 - protein, 10 aa, Artificial Sequence
  Description of Artificial Sequence: Synthetic Linker
QALDGDITDM

SEQ ID NO: 3297 - protein, 8 aa, Artificial Sequence
  Description of Artificial Sequence: Synthetic Linker
HTAGSIPM

SEQ ID NO: 3298 - protein, 8 aa, Artificial Sequence
  Description of Artificial Sequence: Synthetic Linker
WEGHVPHY

SEQ ID NO: 3299 - protein, 9 aa, Artificial Sequence
  Description of Artificial Sequence: Synthetic Linker
VEGKREEAL

SEQ ID NO: 3300 - protein, 13 aa, Artificial Sequence
  Description of Artificial Sequence: Synthetic Linker
PMQTFSKQREVDF

SEQ ID NO: 3301 - protein, 10 aa, Artificial Sequence
  Description of Artificial Sequence: Synthetic Linker
VYFNERINVD

SEQ ID NO: 3302 - protein, 6 aa, Artificial Sequence
  Description of Artificial Sequence: Synthetic Linker
SGGPAT

SEQ ID NO: 3303 - protein, 8 aa, Artificial Sequence
  Description of Artificial Sequence: Synthetic Linker
YAATSTGR

SEQ ID NO: 3304 - protein, 9 aa, Artificial Sequence
  Description of Artificial Sequence: Synthetic Linker
TGGTEAAGG

SEQ ID NO: 3305 - protein, 6 aa, Artificial Sequence
  Description of Artificial Sequence: Synthetic Linker
FDPTEF

SEQ ID NO: 3306 - protein, 7 aa, Artificial Sequence
  Description of Artificial Sequence: Synthetic Linker
VDLDFNR

SEQ ID NO: 3307 - protein, 10 aa, Artificial Sequence
  Description of Artificial Sequence: Synthetic Linker
SNDAGFAMTS

SEQ ID NO: 3308 - protein, 11 aa, Artificial Sequence
  Description of Artificial Sequence: Synthetic Linker
NGFDPATGDLS

SEQ ID NO: 3309 - protein, 8 aa, Artificial Sequence
  Description of Artificial Sequence: Synthetic Linker
FSQPAPDR

SEQ ID NO: 3310 - protein, 5 aa, Artificial Sequence
  Description of Artificial Sequence: Synthetic Linker
CQPNE

SEQ ID NO: 3311 - protein, 5 aa, Artificial Sequence
  Description of Artificial Sequence: Synthetic Linker
KGVPC

SEQ ID NO: 3312 - protein, 5 aa, Artificial Sequence
  Description of Artificial Sequence: Synthetic Linker
PFITE

SEQ ID NO: 3313 - protein, 6 aa, Artificial Sequence
  Description of Artificial Sequence: Synthetic Linker
SIPTCE

SEQ ID NO: 3314 - protein, 6 aa, Artificial Sequence
  Description of Artificial Sequence: Synthetic Linker
VEEHNI

SEQ ID NO: 3315 - protein, 7 aa, Artificial Sequence
  Description of Artificial Sequence: Synthetic Linker
SNKEVIQ

SEQ ID NO: 3316 - protein, 7 aa, Artificial Sequence
  Description of Artificial Sequence: Synthetic Linker
TAKGDTK

SEQ ID NO: 3317 - protein, 9 aa, Artificial Sequence
  Description of Artificial Sequence: Synthetic Linker
GRWYPAFAD

SEQ ID NO: 3318 - protein, 16 aa, Artificial Sequence
  Description of Artificial Sequence: Synthetic Linker
IFYDFLHVNVIPTVSF

SEQ ID NO: 3319 - protein, 5 aa, Artificial Sequence
  Description of Artificial Sequence: Synthetic Linker
PGPAS

SEQ ID NO: 3320 - protein, 7 aa, Artificial Sequence
  Description of Artificial Sequence: Synthetic Linker
KVSKKTG

SEQ ID NO: 3321 - protein, 8 aa, Artificial Sequence
  Description of Artificial Sequence: Synthetic Linker
ACNIASMP

SEQ ID NO: 3322 - protein, 8 aa, Artificial Sequence
  Description of Artificial Sequence: Synthetic Linker
FNDEASDE

SEQ ID NO: 3323 - protein, 18 aa, Artificial Sequence
  Description of Artificial Sequence: Synthetic Linker
SLNAGELKKAAPADPSAP

SEQ ID NO: 3324 - protein, 10 aa, Artificial Sequence
  Description of Artificial Sequence: Synthetic Linker
DKYYMASPDL

SEQ ID NO: 3325 - protein, 10 aa, Artificial Sequence
  Description of Artificial Sequence: Synthetic Linker
NATNATQPIH

SEQ ID NO: 3326 - protein, 4 aa, Artificial Sequence
  Description of Artificial Sequence: Synthetic Linker
EFPP

SEQ ID NO: 3327 - protein, 9 aa, Artificial Sequence
  Description of Artificial Sequence: Synthetic Linker
ENELMYGVP

SEQ ID NO: 3328 - protein, 13 aa, Artificial Sequence
  Description of Artificial Sequence: Synthetic Linker
QSKDFLIPIGKAK

SEQ ID NO: 3329 - protein, 4 aa, Artificial Sequence
  Description of Artificial Sequence: Synthetic Linker
AGEV

SEQ ID NO: 3330 - protein, 4 aa, Artificial Sequence
  Description of Artificial Sequence: Synthetic Linker
LHPT

SEQ ID NO: 3331 - protein, 4 aa, Artificial Sequence
  Description of Artificial Sequence: Synthetic Linker
RIEA

SEQ ID NO: 3332 - protein, 4 aa, Artificial Sequence
  Description of Artificial Sequence: Synthetic Linker
SPGA

SEQ ID NO: 3333 - protein, 4 aa, Artificial Sequence
  Description of Artificial Sequence: Synthetic Linker
YFTA

SEQ ID NO: 3334 - protein, 6 aa, Artificial Sequence
  Description of Artificial Sequence: Synthetic Linker
DGSTGK

SEQ ID NO: 3335 - protein, 6 aa, Artificial Sequence
  Description of Artificial Sequence: Synthetic Linker
EKGERV

SEQ ID NO: 3336 - protein, 6 aa, Artificial Sequence
  Description of Artificial Sequence: Synthetic Linker
KGDIET

SEQ ID NO: 3337 - protein, 7 aa, Artificial Sequence
  Description of Artificial Sequence: Synthetic Linker
DEGMITE

SEQ ID NO: 3338 - protein, 7 aa, Artificial Sequence
  Description of Artificial Sequence: Synthetic Linker
QEASVSG

SEQ ID NO: 3339 - protein, 4 aa, Artificial Sequence
  Description of Artificial Sequence: Synthetic Linker
EAAN

SEQ ID NO: 3340 - protein, 4 aa, Artificial Sequence
  Description of Artificial Sequence: Synthetic Linker
RYGL

SEQ ID NO: 3341 - protein, 5 aa, Artificial Sequence
  Description of Artificial Sequence: Synthetic Linker
EVLDY

SEQ ID NO: 3342 - protein, 5 aa, Artificial Sequence
  Description of Artificial Sequence: Synthetic Linker
RPFVS

SEQ ID NO: 3343 - protein, 5 aa, Artificial Sequence
  Description of Artificial Sequence: Synthetic Linker
SLVNQ

SEQ ID NO: 3344 - protein, 5 aa, Artificial Sequence
  Description of Artificial Sequence: Synthetic Linker
SMGSS

SEQ ID NO: 3345 - protein, 6 aa, Artificial Sequence
  Description of Artificial Sequence: Synthetic Linker
SKEFSP

SEQ ID NO: 3346 - protein, 7 aa, Artificial Sequence
  Description of Artificial Sequence: Synthetic Linker
AAKGEKI

SEQ ID NO: 3347 - protein, 7 aa, Artificial Sequence
  Description of Artificial Sequence: Synthetic Linker
GAPDAER

SEQ ID NO: 3348 - protein, 7 aa, Artificial Sequence
  Description of Artificial Sequence: Synthetic Linker
RGEAMPK

SEQ ID NO: 3349 - protein, 8 aa, Artificial Sequence
  Description of Artificial Sequence: Synthetic Linker
SGAKKNHF

SEQ ID NO: 3350 - protein, 8 aa, Artificial Sequence
  Description of Artificial Sequence: Synthetic Linker
TGRSYKLF

SEQ ID NO: 3351 - protein, 9 aa, Artificial Sequence
  Description of Artificial Sequence: Synthetic Linker
AALPASAKV

SEQ ID NO: 3352 - protein, 9 aa, Artificial Sequence
  Description of Artificial Sequence: Synthetic Linker
DGFRTSHEI

SEQ ID NO: 3353 - protein, 10 aa, Artificial Sequence
  Description of Artificial Sequence: Synthetic Linker
KSMNPEHPHV

SEQ ID NO: 3354 - protein, 10 aa, Artificial Sequence
  Description of Artificial Sequence: Synthetic Linker
RGTAQNPDIY

SEQ ID NO: 3355 - protein, 11 aa, Artificial Sequence
  Description of Artificial Sequence: Synthetic Linker
WVPENCIQCNQ

SEQ ID NO: 3356 - protein, 12 aa, Artificial Sequence
  Description of Artificial Sequence: Synthetic Linker
DRTKEPGAPGDP

SEQ ID NO: 3357 - protein, 28 aa, Artificial Sequence
  Description of Artificial Sequence: Synthetic Linker
TVGIEDDVTGTSLPVDNAFADTTPKGTI

SEQ ID NO: 3358 - protein, 4 aa, Artificial Sequence
  Description of Artificial Sequence: Synthetic Linker
AGED

SEQ ID NO: 3359 - protein, 4 aa, Artificial Sequence
  Description of Artificial Sequence: Synthetic Linker
DADS

SEQ ID NO: 3360 - protein, 4 aa, Artificial Sequence
  Description of Artificial Sequence: Synthetic Linker
DGTV

SEQ ID NO: 3361 - protein, 4 aa, Artificial Sequence
  Description of Artificial Sequence: Synthetic Linker
QDGR

SEQ ID NO: 3362 - protein, 5 aa, Artificial Sequence
  Description of Artificial Sequence: Synthetic Linker
LGAGE

SEQ ID NO: 3363 - protein, 5 aa, Artificial Sequence
  Description of Artificial Sequence: Synthetic Linker
QPGRG

SEQ ID NO: 3364 - protein, 6 aa, Artificial Sequence
  Description of Artificial Sequence: Synthetic Linker
DFADGS

SEQ ID NO: 3365 - protein, 6 aa, Artificial Sequence
  Description of Artificial Sequence: Synthetic Linker
YDRPDR

SEQ ID NO: 3366 - protein, 7 aa, Artificial Sequence
  Description of Artificial Sequence: Synthetic Linker
KADAAPQ

SEQ ID NO: 3367 - protein, 15 aa, Artificial Sequence
  Description of Artificial Sequence: Synthetic Linker
PLGEAPDAYADDASG

SEQ ID NO: 3368 - protein, 4 aa, Artificial Sequence
  Description of Artificial Sequence: Synthetic Linker
PCFP

SEQ ID NO: 3369 - protein, 7 aa, Artificial Sequence
  Description of Artificial Sequence: Synthetic Linker
DLESPVK

SEQ ID NO: 3370 - protein, 7 aa, Artificial Sequence
  Description of Artificial Sequence: Synthetic Linker
FLRIQNV

SEQ ID NO: 3371 - protein, 10 aa, Artificial Sequence
  Description of Artificial Sequence: Synthetic Linker
LGHPCTRTPH

SEQ ID NO: 3372 - protein, 6 aa, Artificial Sequence
  Description of Artificial Sequence: Synthetic Linker
HFPKTF

SEQ ID NO: 3373 - protein, 7 aa, Artificial Sequence
  Description of Artificial Sequence: Synthetic Linker
RKLLGVK

SEQ ID NO: 3374 - protein, 7 aa, Artificial Sequence
  Description of Artificial Sequence: Synthetic Linker
SATPIPR

SEQ ID NO: 3375 - protein, 8 aa, Artificial Sequence
  Description of Artificial Sequence: Synthetic Linker
FYGDLDVT

SEQ ID NO: 3376 - protein, 8 aa, Artificial Sequence
  Description of Artificial Sequence: Synthetic Linker
SLPFKLTN

SEQ ID NO: 3377 - protein, 9 aa, Artificial Sequence
  Description of Artificial Sequence: Synthetic Linker
CSLKETLPE

SEQ ID NO: 3378 - protein, 9 aa, Artificial Sequence
  Description of Artificial Sequence: Synthetic Linker
ISEKPMNRL

SEQ ID NO: 3379 - protein, 9 aa, Artificial Sequence
  Description of Artificial Sequence: Synthetic Linker
TMLVPMDRV

SEQ ID NO: 3380 - protein, 10 aa, Artificial Sequence
  Description of Artificial Sequence: Synthetic Linker
IYRLTSGISQ

SEQ ID NO: 3381 - protein, 11 aa, Artificial Sequence
  Description of Artificial Sequence: Synthetic Linker
HGGIPKKIEGK

SEQ ID NO: 3382 - protein, 12 aa, Artificial Sequence
  Description of Artificial Sequence: Synthetic Linker
IDEMPPGRKEVQ

SEQ ID NO: 3383 - protein, 12 aa, Artificial Sequence
  Description of Artificial Sequence: Synthetic Linker
TPKEGEYVRRIL

SEQ ID NO: 3384 - protein, 9 aa, Artificial Sequence
  Description of Artificial Sequence: Synthetic Linker
KSDYTQNNI

SEQ ID NO: 3385 - protein, 15 aa, Artificial Sequence
  Description of Artificial Sequence: Synthetic Linker
EGMGPVLAPVTPVPV

SEQ ID NO: 3386 - protein, 7 aa, Artificial Sequence
  Description of Artificial Sequence: Synthetic Linker
MLNQNWH

SEQ ID NO: 3387 - protein, 10 aa, Artificial Sequence
  Description of Artificial Sequence: Synthetic Linker
NMTNATDASP

SEQ ID NO: 3388 - protein, 14 aa, Artificial Sequence
  Description of Artificial Sequence: Synthetic Linker
LLYDERTTNLTLDE

SEQ ID NO: 3389 - protein, 6 aa, Artificial Sequence
  Description of Artificial Sequence: Synthetic Linker
EAGYPG

SEQ ID NO: 3390 - protein, 7 aa, Artificial Sequence
  Description of Artificial Sequence: Synthetic Linker
LFDSLSP

SEQ ID NO: 3391 - protein, 7 aa, Artificial Sequence
  Description of Artificial Sequence: Synthetic Linker
TREGKST

SEQ ID NO: 3392 - protein, 5 aa, Artificial Sequence
  Description of Artificial Sequence: Synthetic Linker
AEGDM

SEQ ID NO: 3393 - protein, 6 aa, Artificial Sequence
  Description of Artificial Sequence: Synthetic Linker
AALDKK

SEQ ID NO: 3394 - protein, 6 aa, Artificial Sequence
  Description of Artificial Sequence: Synthetic Linker
ENEGLE

SEQ ID NO: 3395 - protein, 7 aa, Artificial Sequence
  Description of Artificial Sequence: Synthetic Linker
RFRPLRD

SEQ ID NO: 3396 - protein, 7 aa, Artificial Sequence
  Description of Artificial Sequence: Synthetic Linker
VASRARP

SEQ ID NO: 3397 - protein, 4 aa, Artificial Sequence
  Description of Artificial Sequence: Synthetic Linker
TKNI

SEQ ID NO: 3398 - protein, 6 aa, Artificial Sequence
  Description of Artificial Sequence: Synthetic Linker
VSAGST

SEQ ID NO: 3399 - protein, 9 aa, Artificial Sequence
  Description of Artificial Sequence: Synthetic Linker
SGSVKTGTT

SEQ ID NO: 3400 - protein, 10 aa, Artificial Sequence
  Description of Artificial Sequence: Synthetic Linker
DLDIKGYVAA

SEQ ID NO: 3401 - protein, 13 aa, Artificial Sequence
  Description of Artificial Sequence: Synthetic Linker
SRSGTPSTSIDTS

SEQ ID NO: 3402 - protein, 9 aa, Artificial Sequence
  Description of Artificial Sequence: Synthetic Linker
CDGDEYKPV

SEQ ID NO: 3403 - protein, 14 aa, Artificial Sequence
  Description of Artificial Sequence: Synthetic Linker
DGPCEPDEDEDVCQ

SEQ ID NO: 3404 - protein, 14 aa, Artificial Sequence
  Description of Artificial Sequence: Synthetic Linker
RAVLSSTRMGGHFV

SEQ ID NO: 3405 - protein, 4 aa, Artificial Sequence
  Description of Artificial Sequence: Synthetic Linker
QLRT

SEQ ID NO: 3406 - protein, 5 aa, Artificial Sequence
  Description of Artificial Sequence: Synthetic Linker
DITNA

SEQ ID NO: 3407 - protein, 6 aa, Artificial Sequence
  Description of Artificial Sequence: Synthetic Linker
QEVVAP

SEQ ID NO: 3408 - protein, 4 aa, Artificial Sequence
  Description of Artificial Sequence: Synthetic Linker
ILGE

SEQ ID NO: 3409 - protein, 5 aa, Artificial Sequence
  Description of Artificial Sequence: Synthetic Linker
SQGGK

SEQ ID NO: 3410 - protein, 6 aa, Artificial Sequence
  Description of Artificial Sequence: Synthetic Linker
IARPPA

SEQ ID NO: 3411 - protein, 7 aa, Artificial Sequence
  Description of Artificial Sequence: Synthetic Linker
PTFAVER

SEQ ID NO: 3412 - protein, 12 aa, Artificial Sequence
  Description of Artificial Sequence: Synthetic Linker
EGTYGDRPHRPY

SEQ ID NO: 3413 - protein, 24 aa, Artificial Sequence
  Description of Artificial Sequence: Synthetic Linker
YSGDLGNREKDVLPDPSLPPLADL

SEQ ID NO: 3414 - protein, 4 aa, Artificial Sequence
  Description of Artificial Sequence: Synthetic Linker
DYTE

SEQ ID NO: 3415 - protein, 4 aa, Artificial Sequence
  Description of Artificial Sequence: Synthetic Linker
TFSY

SEQ ID NO: 3416 - protein, 6 aa, Artificial Sequence
  Description of Artificial Sequence: Synthetic Linker
DTFIDH

SEQ ID NO: 3417 - protein, 8 aa, Artificial Sequence
  Description of Artificial Sequence: Synthetic Linker
EMGKYDNH

SEQ ID NO: 3418 - protein, 9 aa, Artificial Sequence
  Description of Artificial Sequence: Synthetic Linker
YGQFEPPAL

SEQ ID NO: 3419 - protein, 16 aa, Artificial Sequence
  Description of Artificial Sequence: Synthetic Linker
KYLVQNRVTGEIYESA

SEQ ID NO: 3420 - protein, 13 aa, Artificial Sequence
  Description of Artificial Sequence: Synthetic Linker
DLSVFPELEEGDY

SEQ ID NO: 3421 - protein, 9 aa, Artificial Sequence
  Description of Artificial Sequence: Synthetic Linker
DYGFIEPNE

SEQ ID NO: 3422 - protein, 6 aa, Artificial Sequence
  Description of Artificial Sequence: Synthetic Linker
KSGEDI

SEQ ID NO: 3423 - protein, 29 aa, Artificial Sequence
  Description of Artificial Sequence: Synthetic Linker
INQGEDSVPAKKFKAAPAEISDGEDRSKC

SEQ ID NO: 3424 - protein, 5 aa, Artificial Sequence
  Description of Artificial Sequence: Synthetic Linker
RSPEW

SEQ ID NO: 3425 - protein, 19 aa, Artificial Sequence
  Description of Artificial Sequence: Synthetic Linker
SAFGIRPPLRLGEFTMPEH

SEQ ID NO: 3426 - protein, 12 aa, Artificial Sequence
  Description of Artificial Sequence: Synthetic Linker
LNTGASDNFTRW

SEQ ID NO: 3427 - protein, 12 aa, Artificial Sequence
  Description of Artificial Sequence: Synthetic Linker
AEKGEDIEIKKV

SEQ ID NO: 3428 - protein, 15 aa, Artificial Sequence
  Description of Artificial Sequence: Synthetic Linker
VDRADPLEQGAGDQG

SEQ ID NO: 3429 - protein, 4 aa, Artificial Sequence
  Description of Artificial Sequence: Synthetic Linker
DGDF

SEQ ID NO: 3430 - protein, 4 aa, Artificial Sequence
  Description of Artificial Sequence: Synthetic Linker
KNDK

SEQ ID NO: 3431 - protein, 4 aa, Artificial Sequence
  Description of Artificial Sequence: Synthetic Linker
PIRS

SEQ ID NO: 3432 - protein, 4 aa, Artificial Sequence
  Description of Artificial Sequence: Synthetic Linker
PMTG

SEQ ID NO: 3433 - protein, 4 aa, Artificial Sequence
  Description of Artificial Sequence: Synthetic Linker
RACC

SEQ ID NO: 3434 - protein, 4 aa, Artificial Sequence
  Description of Artificial Sequence: Synthetic Linker
VGTT

SEQ ID NO: 3435 - protein, 5 aa, Artificial Sequence
  Description of Artificial Sequence: Synthetic Linker
DAGIR

SEQ ID NO: 3436 - protein, 5 aa, Artificial Sequence
  Description of Artificial Sequence: Synthetic Linker
DDLPL

SEQ ID NO: 3437 - protein, 5 aa, Artificial Sequence
  Description of Artificial Sequence: Synthetic Linker
GCTSV

SEQ ID NO: 3438 - protein, 5 aa, Artificial Sequence
  Description of Artificial Sequence: Synthetic Linker
ITAFV

SEQ ID NO: 3439 - protein, 5 aa, Artificial Sequence
  Description of Artificial Sequence: Synthetic Linker
TASEM

SEQ ID NO: 3440 - protein, 5 aa, Artificial Sequence
  Description of Artificial Sequence: Synthetic Linker
TGDNK

SEQ ID NO: 3441 - protein, 5 aa, Artificial Sequence
  Description of Artificial Sequence: Synthetic Linker
YETDL

SEQ ID NO: 3442 - protein, 6 aa, Artificial Sequence
  Description of Artificial Sequence: Synthetic Linker
LADDNF

SEQ ID NO: 3443 - protein, 6 aa, Artificial Sequence
  Description of Artificial Sequence: Synthetic Linker
MGSGTA

SEQ ID NO: 3444 - protein, 7 aa, Artificial Sequence
  Description of Artificial Sequence: Synthetic Linker
ARVEPSH

SEQ ID NO: 3445 - protein, 7 aa, Artificial Sequence
  Description of Artificial Sequence: Synthetic Linker
EMVLDDS

SEQ ID NO: 3446 - protein, 7 aa, Artificial Sequence
  Description of Artificial Sequence: Synthetic Linker
RDTPPKR

SEQ ID NO: 3447 - protein, 7 aa, Artificial Sequence
  Description of Artificial Sequence: Synthetic Linker
TGRDTLR

SEQ ID NO: 3448 - protein, 8 aa, Artificial Sequence
  Description of Artificial Sequence: Synthetic Linker
LDPPRKEV

SEQ ID NO: 3449 - protein, 9 aa, Artificial Sequence
  Description of Artificial Sequence: Synthetic Linker
LAWFEEGEE

SEQ ID NO: 3450 - protein, 10 aa, Artificial Sequence
  Description of Artificial Sequence: Synthetic Linker
ALGLPEALIP

SEQ ID NO: 3451 - protein, 12 aa, Artificial Sequence
  Description of Artificial Sequence: Synthetic Linker
DKTGTLTTNQMS

SEQ ID NO: 3452 - protein, 12 aa, Artificial Sequence
  Description of Artificial Sequence: Synthetic Linker
ITGSTYAPEGEV

SEQ ID NO: 3453 - protein, 14 aa, Artificial Sequence
  Description of Artificial Sequence: Synthetic Linker
IGIFGENEEVADRA

SEQ ID NO: 3454 - protein, 6 aa, Artificial Sequence
  Description of Artificial Sequence: Synthetic Linker
YLRQDL

SEQ ID NO: 3455 - protein, 8 aa, Artificial Sequence
  Description of Artificial Sequence: Synthetic Linker
ESQSLSIQ

SEQ ID NO: 3456 - protein, 6 aa, Artificial Sequence
  Description of Artificial Sequence: Synthetic Linker
SGKQSY

SEQ ID NO: 3457 - protein, 14 aa, Artificial Sequence
  Description of Artificial Sequence: Synthetic Linker
FRARGKAVSTVFDQ

SEQ ID NO: 3458 - protein, 6 aa, Artificial Sequence
  Description of Artificial Sequence: Synthetic Linker
DANSEM

SEQ ID NO: 3459 - protein, 7 aa, Artificial Sequence
  Description of Artificial Sequence: Synthetic Linker
DITAQKE

SEQ ID NO: 3460 - protein, 8 aa, Artificial Sequence
  Description of Artificial Sequence: Synthetic Linker
TVESTGKV

SEQ ID NO: 3461 - protein, 5 aa, Artificial Sequence
  Description of Artificial Sequence: Synthetic Linker
AQDRK

SEQ ID NO: 3462 - protein, 8 aa, Artificial Sequence
  Description of Artificial Sequence: Synthetic Linker
ALSSTGEI

SEQ ID NO: 3463 - protein, 17 aa, Artificial Sequence
  Description of Artificial Sequence: Synthetic Linker
LLQVPLPPWPGAPVGGE

SEQ ID NO: 3464 - protein, 6 aa, Artificial Sequence
  Description of Artificial Sequence: Synthetic Linker
FRGPDR

SEQ ID NO: 3465 - protein, 4 aa, Artificial Sequence
  Description of Artificial Sequence: Synthetic Linker
EGGK

SEQ ID NO: 3466 - protein, 6 aa, Artificial Sequence
  Description of Artificial Sequence: Synthetic Linker
INDKYE

SEQ ID NO: 3467 - protein, 6 aa, Artificial Sequence
  Description of Artificial Sequence: Synthetic Linker
NETTNK

SEQ ID NO: 3468 - protein, 8 aa, Artificial Sequence
  Description of Artificial Sequence: Synthetic Linker
DFDSGSLR

SEQ ID NO: 3469 - protein, 9 aa, Artificial Sequence
  Description of Artificial Sequence: Synthetic Linker
KNGDNDFRY

SEQ ID NO: 3470 - protein, 11 aa, Artificial Sequence
  Description of Artificial Sequence: Synthetic Linker
PMNVFYKDSLF

SEQ ID NO: 3471 - protein, 4 aa, Artificial Sequence
  Description of Artificial Sequence: Synthetic Linker
GGEA

SEQ ID NO: 3472 - protein, 4 aa, Artificial Sequence
  Description of Artificial Sequence: Synthetic Linker
LGDV

SEQ ID NO: 3473 - protein, 5 aa, Artificial Sequence
  Description of Artificial Sequence: Synthetic Linker
YSNVE

SEQ ID NO: 3474 - protein, 6 aa, Artificial Sequence
  Description of Artificial Sequence: Synthetic Linker
DPVSKE

SEQ ID NO: 3475 - protein, 6 aa, Artificial Sequence
  Description of Artificial Sequence: Synthetic Linker
GLPGDK

SEQ ID NO: 3476 - protein, 6 aa, Artificial Sequence
  Description of Artificial Sequence: Synthetic Linker
IVPPGQ

SEQ ID NO: 3477 - protein, 9 aa, Artificial Sequence
  Description of Artificial Sequence: Synthetic Linker
TVPIAQDQV

SEQ ID NO: 3478 - protein, 11 aa, Artificial Sequence
  Description of Artificial Sequence: Synthetic Linker
EVPKNETKENG

SEQ ID NO: 3479 - protein, 12 aa, Artificial Sequence
  Description of Artificial Sequence: Synthetic Linker
MYYQQPGQQLAT

SEQ ID NO: 3480 - protein, 16 aa, Artificial Sequence
  Description of Artificial Sequence: Synthetic Linker
QPGCSSGQACENALPV

SEQ ID NO: 3481 - protein, 8 aa, Artificial Sequence
  Description of Artificial Sequence: Synthetic Linker
KYTYEHDP

SEQ ID NO: 3482 - protein, 10 aa, Artificial Sequence
  Description of Artificial Sequence: Synthetic Linker
IGGPPNACLD

SEQ ID NO: 3483 - protein, 20 aa, Artificial Sequence
  Description of Artificial Sequence: Synthetic Linker
ENAQRFNQAQSGNIQSTVML

SEQ ID NO: 3484 - protein, 25 aa, Artificial Sequence
  Description of Artificial Sequence: Synthetic Linker
LQNREHETNGVAKSDQKQEQLLLKK

SEQ ID NO: 3485 - protein, 9 aa, Artificial Sequence
  Description of Artificial Sequence: Synthetic Linker
CEMGSTFQL

SEQ ID NO: 3486 - protein, 26 aa, Artificial Sequence
  Description of Artificial Sequence: Synthetic Linker
PDGRNQNPDLTGLCEPTPQDHIKVTQ

SEQ ID NO: 3487 - protein, 4 aa, Artificial Sequence
  Description of Artificial Sequence: Synthetic Linker
NHPA

SEQ ID NO: 3488 - protein, 5 aa, Artificial Sequence
  Description of Artificial Sequence: Synthetic Linker
CNLTP

SEQ ID NO: 3489 - protein, 5 aa, Artificial Sequence
  Description of Artificial Sequence: Synthetic Linker
IRRTS

SEQ ID NO: 3490 - protein, 6 aa, Artificial Sequence
  Description of Artificial Sequence: Synthetic Linker
KYLPVK

SEQ ID NO: 3491 - protein, 7 aa, Artificial Sequence
  Description of Artificial Sequence: Synthetic Linker
ISGTPIQ

SEQ ID NO: 3492 - protein, 8 aa, Artificial Sequence
  Description of Artificial Sequence: Synthetic Linker
RDADASDK

SEQ ID NO: 3493 - protein, 9 aa, Artificial Sequence
  Description of Artificial Sequence: Synthetic Linker
TGEEGFDGA

SEQ ID NO: 3494 - protein, 10 aa, Artificial Sequence
  Description of Artificial Sequence: Synthetic Linker
ESLQTGKISV

SEQ ID NO: 3495 - protein, 14 aa, Artificial Sequence
  Description of Artificial Sequence: Synthetic Linker
DLFPQNYSTKAVEP

SEQ ID NO: 3496 - protein, 4 aa, Artificial Sequence
  Description of Artificial Sequence: Synthetic Linker
SATH

SEQ ID NO: 3497 - protein, 7 aa, Artificial Sequence
  Description of Artificial Sequence: Synthetic Linker
YIPLPEP

SEQ ID NO: 3498 - protein, 8 aa, Artificial Sequence
  Description of Artificial Sequence: Synthetic Linker
RKTDGYSG

SEQ ID NO: 3499 - protein, 9 aa, Artificial Sequence
  Description of Artificial Sequence: Synthetic Linker
PSRADPNHL

SEQ ID NO: 3500 - protein, 10 aa, Artificial Sequence
  Description of Artificial Sequence: Synthetic Linker
LGTTQNSLTE

SEQ ID NO: 3501 - protein, 9 aa, Artificial Sequence
  Description of Artificial Sequence: Synthetic Linker
NLLGQQPLV

SEQ ID NO: 3502 - protein, 10 aa, Artificial Sequence
  Description of Artificial Sequence: Synthetic Linker
SSYGPASGPL

SEQ ID NO: 3503 - protein, 11 aa, Artificial Sequence
  Description of Artificial Sequence: Synthetic Linker
VAQLPKKQVYI

SEQ ID NO: 3504 - protein, 16 aa, Artificial Sequence
  Description of Artificial Sequence: Synthetic Linker
SATPQGQTAKIEVPHT

SEQ ID NO: 3505 - protein, 4 aa, Artificial Sequence
  Description of Artificial Sequence: Synthetic Linker
FSCS

SEQ ID NO: 3506 - protein, 8 aa, Artificial Sequence
  Description of Artificial Sequence: Synthetic Linker
FWLAIDMS

SEQ ID NO: 3507 - protein, 9 aa, Artificial Sequence
  Description of Artificial Sequence: Synthetic Linker
VKAAPQAPV

SEQ ID NO: 3508 - protein, 13 aa, Artificial Sequence
  Description of Artificial Sequence: Synthetic Linker
ADQSESQMIPKDS

SEQ ID NO: 3509 - protein, 4 aa, Artificial Sequence
  Description of Artificial Sequence: Synthetic Linker
FAFI

SEQ ID NO: 3510 - protein, 4 aa, Artificial Sequence
  Description of Artificial Sequence: Synthetic Linker
IQNT

SEQ ID NO: 3511 - protein, 5 aa, Artificial Sequence
  Description of Artificial Sequence: Synthetic Linker
GTLSP

SEQ ID NO: 3512 - protein, 6 aa, Artificial Sequence
  Description of Artificial Sequence: Synthetic Linker
QVPQDD

SEQ ID NO: 3513 - protein, 8 aa, Artificial Sequence
  Description of Artificial Sequence: Synthetic Linker
HLSAGCPH

SEQ ID NO: 3514 - protein, 11 aa, Artificial Sequence
  Description of Artificial Sequence: Synthetic Linker
FSTRVLPAQAT

SEQ ID NO: 3515 - protein, 4 aa, Artificial Sequence
  Description of Artificial Sequence: Synthetic Linker
EMDS

SEQ ID NO: 3516 - protein, 5 aa, Artificial Sequence
  Description of Artificial Sequence: Synthetic Linker
HFPLK

SEQ ID NO: 3517 - protein, 6 aa, Artificial Sequence
  Description of Artificial Sequence: Synthetic Linker
DLDNVT

SEQ ID NO: 3518 - protein, 6 aa, Artificial Sequence
  Description of Artificial Sequence: Synthetic Linker
FDGQLE

SEQ ID NO: 3519 - protein, 7 aa, Artificial Sequence
  Description of Artificial Sequence: Synthetic Linker
ITNECQW

SEQ ID NO: 3520 - protein, 7 aa, Artificial Sequence
  Description of Artificial Sequence: Synthetic Linker
SQPFPVV

SEQ ID NO: 3521 - protein, 7 aa, Artificial Sequence
  Description of Artificial Sequence: Synthetic Linker
TGARSNF

SEQ ID NO: 3522 - protein, 8 aa, Artificial Sequence
  Description of Artificial Sequence: Synthetic Linker
ESDASNPF

SEQ ID NO: 3523 - protein, 8 aa, Artificial Sequence
  Description of Artificial Sequence: Synthetic Linker
HFFGNRSI

SEQ ID NO: 3524 - protein, 9 aa, Artificial Sequence
  Description of Artificial Sequence: Synthetic Linker
QPIYPATLT

SEQ ID NO: 3525 - protein, 10 aa, Artificial Sequence
  Description of Artificial Sequence: Synthetic Linker
FLAGTRKCSV

SEQ ID NO: 3526 - protein, 12 aa, Artificial Sequence
  Description of Artificial Sequence: Synthetic Linker
LNPQHSAPKPNV

SEQ ID NO: 3527 - protein, 12 aa, Artificial Sequence
  Description of Artificial Sequence: Synthetic Linker
SKGKQLGENQLV

SEQ ID NO: 3528 - protein, 15 aa, Artificial Sequence
  Description of Artificial Sequence: Synthetic Linker
ATKQDPVRPKRPLSS

SEQ ID NO: 3529 - protein, 16 aa, Artificial Sequence
  Description of Artificial Sequence: Synthetic Linker
ICDSHPTNKNNPTTPL

SEQ ID NO: 3530 - protein, 9 aa, Artificial Sequence
  Description of Artificial Sequence: Synthetic Linker
YLDTKPAPV

SEQ ID NO: 3531 - protein, 4 aa, Artificial Sequence
  Description of Artificial Sequence: Synthetic Linker
IHKK

SEQ ID NO: 3532 - protein, 5 aa, Artificial Sequence
  Description of Artificial Sequence: Synthetic Linker
GIMPG

SEQ ID NO: 3533 - protein, 5 aa, Artificial Sequence
  Description of Artificial Sequence: Synthetic Linker
NPGEC

SEQ ID NO: 3534 - protein, 7 aa, Artificial Sequence
  Description of Artificial Sequence: Synthetic Linker
IGPNCPG

SEQ ID NO: 3535 - protein, 8 aa, Artificial Sequence
  Description of Artificial Sequence: Synthetic Linker
CITEGIPQ

SEQ ID NO: 3536 - protein, 8 aa, Artificial Sequence
  Description of Artificial Sequence: Synthetic Linker
LLRQGKTR

SEQ ID NO: 3537 - protein, 4 aa, Artificial Sequence
  Description of Artificial Sequence: Synthetic Linker
MRDQ

SEQ ID NO: 3538 - protein, 4 aa, Artificial Sequence
  Description of Artificial Sequence: Synthetic Linker
QEDP

SEQ ID NO: 3539 - protein, 5 aa, Artificial Sequence
  Description of Artificial Sequence: Synthetic Linker
CLDGK

SEQ ID NO: 3540 - protein, 5 aa, Artificial Sequence
  Description of Artificial Sequence: Synthetic Linker
QWELN

SEQ ID NO: 3541 - protein, 6 aa, Artificial Sequence
  Description of Artificial Sequence: Synthetic Linker
ALDGNI

SEQ ID NO: 3542 - protein, 6 aa, Artificial Sequence
  Description of Artificial Sequence: Synthetic Linker
TKQGDL

SEQ ID NO: 3543 - protein, 31 aa, Artificial Sequence
  Description of Artificial Sequence: Synthetic Linker
KGEKYEKRIERLSVRKEEDVKTRSGKLGDNV

SEQ ID NO: 3544 - protein, 27 aa, Artificial Sequence
  Description of Artificial Sequence: Synthetic Linker
AEDRPLSRELPAPAGGPVALSLHDEPT

SEQ ID NO: 3545 - protein, 9 aa, Artificial Sequence
  Description of Artificial Sequence: Synthetic Linker
PYQKTSIPK

SEQ ID NO: 3546 - protein, 9 aa, Artificial Sequence
  Description of Artificial Sequence: Synthetic Linker
RGAGKPNSS

SEQ ID NO: 3547 - protein, 6 aa, Artificial Sequence
  Description of Artificial Sequence: Synthetic Linker
AVGKNP

SEQ ID NO: 3548 - protein, 6 aa, Artificial Sequence
  Description of Artificial Sequence: Synthetic Linker
DTATNT

SEQ ID NO: 3549 - protein, 6 aa, Artificial Sequence
  Description of Artificial Sequence: Synthetic Linker
FLSEPV

SEQ ID NO: 3550 - protein, 6 aa, Artificial Sequence
  Description of Artificial Sequence: Synthetic Linker
LSFCNT

SEQ ID NO: 3551 - protein, 7 aa, Artificial Sequence
  Description of Artificial Sequence: Synthetic Linker
SNITSGY

SEQ ID NO: 3552 - protein, 7 aa, Artificial Sequence
  Description of Artificial Sequence: Synthetic Linker
VTPDGKK

SEQ ID NO: 3553 - protein, 7 aa, Artificial Sequence
  Description of Artificial Sequence: Synthetic Linker
YASGQFI

SEQ ID NO: 3554 - protein, 13 aa, Artificial Sequence
  Description of Artificial Sequence: Synthetic Linker
SIPVQPVYPSADF

SEQ ID NO: 3555 - protein, 7 aa, Artificial Sequence
  Description of Artificial Sequence: Synthetic Linker
EIPTSNI

SEQ ID NO: 3556 - protein, 8 aa, Artificial Sequence
  Description of Artificial Sequence: Synthetic Linker
KADFPTPS

SEQ ID NO: 3557 - protein, 10 aa, Artificial Sequence
  Description of Artificial Sequence: Synthetic Linker
HPYIQNPDPA

SEQ ID NO: 3558 - protein, 11 aa, Artificial Sequence
  Description of Artificial Sequence: Synthetic Linker
DTPPNFLDDDM

SEQ ID NO: 3559 - protein, 7 aa, Artificial Sequence
  Description of Artificial Sequence: Synthetic Linker
FCKALNP

SEQ ID NO: 3560 - protein, 13 aa, Artificial Sequence
  Description of Artificial Sequence: Synthetic Linker
HHDYSLPAAGESW

SEQ ID NO: 3561 - protein, 4 aa, Artificial Sequence
  Description of Artificial Sequence: Synthetic Linker
AEGV

SEQ ID NO: 3562 - protein, 7 aa, Artificial Sequence
  Description of Artificial Sequence: Synthetic Linker
LMLIADV

SEQ ID NO: 3563 - protein, 8 aa, Artificial Sequence
  Description of Artificial Sequence: Synthetic Linker
EAGEEGEK

SEQ ID NO: 3564 - protein, 22 aa, Artificial Sequence
  Description of Artificial Sequence: Synthetic Linker
RSTPPPEMPKPVPRKEVQAGVE

SEQ ID NO: 3565 - protein, 6 aa, Artificial Sequence
  Description of Artificial Sequence: Synthetic Linker
CVPLVR

SEQ ID NO: 3566 - protein, 6 aa, Artificial Sequence
  Description of Artificial Sequence: Synthetic Linker
KSDPIQ

SEQ ID NO: 3567 - protein, 4 aa, Artificial Sequence
  Description of Artificial Sequence: Synthetic Linker
AGVE

SEQ ID NO: 3568 - protein, 12 aa, Artificial Sequence
  Description of Artificial Sequence: Synthetic Linker
NAGGELFRDVNV

SEQ ID NO: 3569 - protein, 17 aa, Artificial Sequence
  Description of Artificial Sequence: Synthetic Linker
ERGAWSAPLPRQPRADT

SEQ ID NO: 3570 - protein, 19 aa, Artificial Sequence
  Description of Artificial Sequence: Synthetic Linker
LAGQQLEHGQTRRFGAISQ

SEQ ID NO: 3571 - protein, 4 aa, Artificial Sequence
  Description of Artificial Sequence: Synthetic Linker
IDNG

SEQ ID NO: 3572 - protein, 4 aa, Artificial Sequence
  Description of Artificial Sequence: Synthetic Linker
KVSW

SEQ ID NO: 3573 - protein, 5 aa, Artificial Sequence
  Description of Artificial Sequence: Synthetic Linker
NRGES

SEQ ID NO: 3574 - protein, 6 aa, Artificial Sequence
  Description of Artificial Sequence: Synthetic Linker
ITAKDE

SEQ ID NO: 3575 - protein, 6 aa, Artificial Sequence
  Description of Artificial Sequence: Synthetic Linker
LWPHTK

SEQ ID NO: 3576 - protein, 6 aa, Artificial Sequence
  Description of Artificial Sequence: Synthetic Linker
MAIGPV

SEQ ID NO: 3577 - protein, 8 aa, Artificial Sequence
  Description of Artificial Sequence: Synthetic Linker
AEKNYDVI

SEQ ID NO: 3578 - protein, 8 aa, Artificial Sequence
  Description of Artificial Sequence: Synthetic Linker
DLDRTLTQ

SEQ ID NO: 3579 - protein, 9 aa, Artificial Sequence
  Description of Artificial Sequence: Synthetic Linker
NIAHDDKPG

SEQ ID NO: 3580 - protein, 4 aa, Artificial Sequence
  Description of Artificial Sequence: Synthetic Linker
FFDK

SEQ ID NO: 3581 - protein, 6 aa, Artificial Sequence
  Description of Artificial Sequence: Synthetic Linker
LFSNDE

SEQ ID NO: 3582 - protein, 6 aa, Artificial Sequence
  Description of Artificial Sequence: Synthetic Linker
VTPGSE

SEQ ID NO: 3583 - protein, 7 aa, Artificial Sequence
  Description of Artificial Sequence: Synthetic Linker
ERKERDH

SEQ ID NO: 3584 - protein, 12 aa, Artificial Sequence
  Description of Artificial Sequence: Synthetic Linker
FDIDQNISSDDF

SEQ ID NO: 3585 - protein, 17 aa, Artificial Sequence
  Description of Artificial Sequence: Synthetic Linker
ELIDAIPEDENVTLYSQ

SEQ ID NO: 3586 - protein, 19 aa, Artificial Sequence
  Description of Artificial Sequence: Synthetic Linker
TMKQIVNENMKIERKVVSR

SEQ ID NO: 3587 - protein, 23 aa, Artificial Sequence
  Description of Artificial Sequence: Synthetic Linker
AHAIKRLYGNVKFGVGPVIEGGF

SEQ ID NO: 3588 - protein, 21 aa, Artificial Sequence
  Description of Artificial Sequence: Synthetic Linker
INGGWGPWSPWDICSVTCGGG

SEQ ID NO: 3589 - protein, 16 aa, Artificial Sequence
  Description of Artificial Sequence: Synthetic Linker
LKMKGLTYTMCDKTKF

SEQ ID NO: 3590 - protein, 7 aa, Artificial Sequence
  Description of Artificial Sequence: Synthetic Linker
LRGEVVS

SEQ ID NO: 3591 - protein, 10 aa, Artificial Sequence
  Description of Artificial Sequence: Synthetic Linker
IHLPKTLEGM

SEQ ID NO: 3592 - protein, 4 aa, Artificial Sequence
  Description of Artificial Sequence: Synthetic Linker
PYPV

SEQ ID NO: 3593 - protein, 14 aa, Artificial Sequence
  Description of Artificial Sequence: Synthetic Linker
LNKEGEPTKQRTRD

SEQ ID NO: 3594 - protein, 11 aa, Artificial Sequence
  Description of Artificial Sequence: Synthetic Linker
RFRDRLPEKLR

SEQ ID NO: 3595 - protein, 12 aa, Artificial Sequence
  Description of Artificial Sequence: Synthetic Linker
DAPQQDPEGNKT

SEQ ID NO: 3596 - protein, 4 aa, Artificial Sequence
  Description of Artificial Sequence: Synthetic Linker
ELPL

SEQ ID NO: 3597 - protein, 4 aa, Artificial Sequence
  Description of Artificial Sequence: Synthetic Linker
VHGK

SEQ ID NO: 3598 - protein, 5 aa, Artificial Sequence
  Description of Artificial Sequence: Synthetic Linker
TNTEK

SEQ ID NO: 3599 - protein, 9 aa, Artificial Sequence
  Description of Artificial Sequence: Synthetic Linker
DSPLKYWPK

SEQ ID NO: 3600 - protein, 12 aa, Artificial Sequence
  Description of Artificial Sequence: Synthetic Linker
SCSEPRCFNGGT

SEQ ID NO: 3601 - protein, 4 aa, Artificial Sequence
  Description of Artificial Sequence: Synthetic Linker
IDGK

SEQ ID NO: 3602 - protein, 5 aa, Artificial Sequence
  Description of Artificial Sequence: Synthetic Linker
PLEGT

SEQ ID NO: 3603 - protein, 9 aa, Artificial Sequence
  Description of Artificial Sequence: Synthetic Linker
AMPGWQDKV

SEQ ID NO: 3604 - protein, 8 aa, Artificial Sequence
  Description of Artificial Sequence: Synthetic Linker
YKKTARPK

SEQ ID NO: 3605 - protein, 12 aa, Artificial Sequence
  Description of Artificial Sequence: Synthetic Linker
TWAPHPRPLPQA

SEQ ID NO: 3606 - protein, 7 aa, Artificial Sequence
  Description of Artificial Sequence: Synthetic Linker
ELNEEMP

SEQ ID NO: 3607 - protein, 17 aa, Artificial Sequence
  Description of Artificial Sequence: Synthetic Linker
IVDYSPQQEGKVFFGAW

SEQ ID NO: 3608 - protein, 6 aa, Artificial Sequence
  Description of Artificial Sequence: Synthetic Linker
QRVRNR

SEQ ID NO: 3609 - protein, 5 aa, Artificial Sequence
  Description of Artificial Sequence: Synthetic Linker
LFVKP

SEQ ID NO: 3610 - protein, 6 aa, Artificial Sequence
  Description of Artificial Sequence: Synthetic Linker
NLNLTP

SEQ ID NO: 3611 - protein, 18 aa, Artificial Sequence
  Description of Artificial Sequence: Synthetic Linker
YSKKAPPQEEIEFVGEHP

SEQ ID NO: 3612 - protein, 4 aa, Artificial Sequence
  Description of Artificial Sequence: Synthetic Linker
IHSP

SEQ ID NO: 3613 - protein, 4 aa, Artificial Sequence
  Description of Artificial Sequence: Synthetic Linker
LTDS

SEQ ID NO: 3614 - protein, 5 aa, Artificial Sequence
  Description of Artificial Sequence: Synthetic Linker
KDGRL

SEQ ID NO: 3615 - protein, 9 aa, Artificial Sequence
  Description of Artificial Sequence: Synthetic Linker
ARINEREET

SEQ ID NO: 3616 - protein, 19 aa, Artificial Sequence
  Description of Artificial Sequence: Synthetic Linker
LWNCAPPQSEVVYRPLVSL

SEQ ID NO: 3617 - protein, 5 aa, Artificial Sequence
  Description of Artificial Sequence: Synthetic Linker
EFPEV

SEQ ID NO: 3618 - protein, 7 aa, Artificial Sequence
  Description of Artificial Sequence: Synthetic Linker
RTASHSI

SEQ ID NO: 3619 - protein, 21 aa, Artificial Sequence
  Description of Artificial Sequence: Synthetic Linker
EDGVIRRRVALLDPVKVNTKV

SEQ ID NO: 3620 - protein, 9 aa, Artificial Sequence
  Description of Artificial Sequence: Synthetic Linker
VLAGGKSGV

SEQ ID NO: 3621 - protein, 4 aa, Artificial Sequence
  Description of Artificial Sequence: Synthetic Linker
QKHV

SEQ ID NO: 3622 - protein, 5 aa, Artificial Sequence
  Description of Artificial Sequence: Synthetic Linker
VAPLI

SEQ ID NO: 3623 - protein, 6 aa, Artificial Sequence
  Description of Artificial Sequence: Synthetic Linker
AADTGL

SEQ ID NO: 3624 - protein, 6 aa, Artificial Sequence
  Description of Artificial Sequence: Synthetic Linker
FANDPQ

SEQ ID NO: 3625 - protein, 6 aa, Artificial Sequence
  Description of Artificial Sequence: Synthetic Linker
LLDHHQ

SEQ ID NO: 3626 - protein, 9 aa, Artificial Sequence
  Description of Artificial Sequence: Synthetic Linker
SSPHALGVI

SEQ ID NO: 3627 - protein, 11 aa, Artificial Sequence
  Description of Artificial Sequence: Synthetic Linker
SERSFPDDLNM

SEQ ID NO: 3628 - protein, 21 aa, Artificial Sequence
  Description of Artificial Sequence: Synthetic Linker
DMGYLGPDPVARSLRTRRAGA

SEQ ID NO: 3629 - protein, 5 aa, Artificial Sequence
  Description of Artificial Sequence: Synthetic Linker
EMPSL

SEQ ID NO: 3630 - protein, 5 aa, Artificial Sequence
  Description of Artificial Sequence: Synthetic Linker
RREDI

SEQ ID NO: 3631 - protein, 8 aa, Artificial Sequence
  Description of Artificial Sequence: Synthetic Linker
IHYDWPGN

SEQ ID NO: 3632 - protein, 9 aa, Artificial Sequence
  Description of Artificial Sequence: Synthetic Linker
LLTGEYISE

SEQ ID NO: 3633 - protein, 11 aa, Artificial Sequence
  Description of Artificial Sequence: Synthetic Linker
RNRKVVKGFTP

SEQ ID NO: 3634 - protein, 17 aa, Artificial Sequence
  Description of Artificial Sequence: Synthetic Linker
IAATPIKTEYSGEIQPL

SEQ ID NO: 3635 - protein, 4 aa, Artificial Sequence
  Description of Artificial Sequence: Synthetic Linker
NQYR

SEQ ID NO: 3636 - protein, 7 aa, Artificial Sequence
  Description of Artificial Sequence: Synthetic Linker
EMGLSLQ

SEQ ID NO: 3637 - protein, 7 aa, Artificial Sequence
  Description of Artificial Sequence: Synthetic Linker
KDSAQNS

SEQ ID NO: 3638 - protein, 11 aa, Artificial Sequence
  Description of Artificial Sequence: Synthetic Linker
HDVELNLDYEE

SEQ ID NO: 3639 - protein, 5 aa, Artificial Sequence
  Description of Artificial Sequence: Synthetic Linker
PVDAQ

SEQ ID NO: 3640 - protein, 5 aa, Artificial Sequence
  Description of Artificial Sequence: Synthetic Linker
VPIIE

SEQ ID NO: 3641 - protein, 7 aa, Artificial Sequence
  Description of Artificial Sequence: Synthetic Linker
GVFDGGK

SEQ ID NO: 3642 - protein, 4 aa, Artificial Sequence
  Description of Artificial Sequence: Synthetic Linker
YLRE

SEQ ID NO: 3643 - protein, 6 aa, Artificial Sequence
  Description of Artificial Sequence: Synthetic Linker
IEEDSP

SEQ ID NO: 3644 - protein, 5 aa, Artificial Sequence
  Description of Artificial Sequence: Synthetic Linker
RKSFL

SEQ ID NO: 3645 - protein, 7 aa, Artificial Sequence
  Description of Artificial Sequence: Synthetic Linker
DILDDDR

SEQ ID NO: 3646 - protein, 7 aa, Artificial Sequence
  Description of Artificial Sequence: Synthetic Linker
SGKGGDK

SEQ ID NO: 3647 - protein, 15 aa, Artificial Sequence
  Description of Artificial Sequence: Synthetic Linker
MGGTFTDKDPFRSGR

SEQ ID NO: 3648 - protein, 4 aa, Artificial Sequence
  Description of Artificial Sequence: Synthetic Linker
VEER

SEQ ID NO: 3649 - protein, 7 aa, Artificial Sequence
  Description of Artificial Sequence: Synthetic Linker
ELPELTA

SEQ ID NO: 3650 - protein, 11 aa, Artificial Sequence
  Description of Artificial Sequence: Synthetic Linker
IKRFGVEDGSV

SEQ ID NO: 3651 - protein, 4 aa, Artificial Sequence
  Description of Artificial Sequence: Synthetic Linker
AYRW

SEQ ID NO: 3652 - protein, 4 aa, Artificial Sequence
  Description of Artificial Sequence: Synthetic Linker
EDAL

SEQ ID NO: 3653 - protein, 7 aa, Artificial Sequence
  Description of Artificial Sequence: Synthetic Linker
IRTVGEA

SEQ ID NO: 3654 - protein, 15 aa, Artificial Sequence
  Description of Artificial Sequence: Synthetic Linker
ETGLNAYLPGLAGKE

SEQ ID NO: 3655 - protein, 9 aa, Artificial Sequence
  Description of Artificial Sequence: Synthetic Linker
LEGRIKGKE

SEQ ID NO: 3656 - protein, 5 aa, Artificial Sequence
  Description of Artificial Sequence: Synthetic Linker
RMRNF

SEQ ID NO: 3657 - protein, 6 aa, Artificial Sequence
  Description of Artificial Sequence: Synthetic Linker
RGVLPE

SEQ ID NO: 3658 - protein, 6 aa, Artificial Sequence
  Description of Artificial Sequence: Synthetic Linker
SLEEQR

SEQ ID NO: 3659 - protein, 7 aa, Artificial Sequence
  Description of Artificial Sequence: Synthetic Linker
ANQLQNY

SEQ ID NO: 3660 - protein, 7 aa, Artificial Sequence
  Description of Artificial Sequence: Synthetic Linker
NYLLPAG

SEQ ID NO: 3661 - protein, 14 aa, Artificial Sequence
  Description of Artificial Sequence: Synthetic Linker
LDWQPRENPFQNLK

SEQ ID NO: 3662 - protein, 4 aa, Artificial Sequence
  Description of Artificial Sequence: Synthetic Linker
RIQM

SEQ ID NO: 3663 - protein, 4 aa, Artificial Sequence
  Description of Artificial Sequence: Synthetic Linker
WTDP

SEQ ID NO: 3664 - protein, 5 aa, Artificial Sequence
  Description of Artificial Sequence: Synthetic Linker
ELGLL

SEQ ID NO: 3665 - protein, 7 aa, Artificial Sequence
  Description of Artificial Sequence: Synthetic Linker
APSHGQI

SEQ ID NO: 3666 - protein, 8 aa, Artificial Sequence
  Description of Artificial Sequence: Synthetic Linker
ATGMVDER

SEQ ID NO: 3667 - protein, 5 aa, Artificial Sequence
  Description of Artificial Sequence: Synthetic Linker
FSLDE

SEQ ID NO: 3668 - protein, 6 aa, Artificial Sequence
  Description of Artificial Sequence: Synthetic Linker
HWKLEA

SEQ ID NO: 3669 - protein, 4 aa, Artificial Sequence
  Description of Artificial Sequence: Synthetic Linker
SEIG

SEQ ID NO: 3670 - protein, 8 aa, Artificial Sequence
  Description of Artificial Sequence: Synthetic Linker
KGIGHSRF

SEQ ID NO: 3671 - protein, 5 aa, Artificial Sequence
  Description of Artificial Sequence: Synthetic Linker
EGIKD

SEQ ID NO: 3672 - protein, 7 aa, Artificial Sequence
  Description of Artificial Sequence: Synthetic Linker
LSRFPTP

SEQ ID NO: 3673 - protein, 15 aa, Artificial Sequence
  Description of Artificial Sequence: Synthetic Linker
LLSPYHHVSGYSPRY

SEQ ID NO: 3674 - protein, 4 aa, Artificial Sequence
  Description of Artificial Sequence: Synthetic Linker
PGDW

SEQ ID NO: 3675 - protein, 6 aa, Artificial Sequence
  Description of Artificial Sequence: Synthetic Linker
DINKNE

SEQ ID NO: 3676 - protein, 6 aa, Artificial Sequence
  Description of Artificial Sequence: Synthetic Linker
ITPYAE

SEQ ID NO: 3677 - protein, 7 aa, Artificial Sequence
  Description of Artificial Sequence: Synthetic Linker
EFQSIGD

SEQ ID NO: 3678 - protein, 7 aa, Artificial Sequence
  Description of Artificial Sequence: Synthetic Linker
KDPEGNV

SEQ ID NO: 3679 - protein, 7 aa, Artificial Sequence
  Description of Artificial Sequence: Synthetic Linker
SLSVIGE

SEQ ID NO: 3680 - protein, 7 aa, Artificial Sequence
  Description of Artificial Sequence: Synthetic Linker
SPVNSKR

SEQ ID NO: 3681 - protein, 8 aa, Artificial Sequence
  Description of Artificial Sequence: Synthetic Linker
ENTRGFHG

SEQ ID NO: 3682 - protein, 8 aa, Artificial Sequence
  Description of Artificial Sequence: Synthetic Linker
NNLKRDYT

SEQ ID NO: 3683 - protein, 10 aa, Artificial Sequence
  Description of Artificial Sequence: Synthetic Linker
KYEDFRSPSA

SEQ ID NO: 3684 - protein, 24 aa, Artificial Sequence
  Description of Artificial Sequence: Synthetic Linker
YPRLTNKIPKPPQEVKPHPYGVDR

SEQ ID NO: 3685 - protein, 7 aa, Artificial Sequence
  Description of Artificial Sequence: Synthetic Linker
ARDRSYE

SEQ ID NO: 3686 - protein, 13 aa, Artificial Sequence
  Description of Artificial Sequence: Synthetic Linker
VTSTVKNDIYAHI

SEQ ID NO: 3687 - protein, 22 aa, Artificial Sequence
  Description of Artificial Sequence: Synthetic Linker
PYSERYGYRPALIPRPVMAGTL

SEQ ID NO: 3688 - protein, 5 aa, Artificial Sequence
  Description of Artificial Sequence: Synthetic Linker
VSQPG

SEQ ID NO: 3689 - protein, 6 aa, Artificial Sequence
  Description of Artificial Sequence: Synthetic Linker
LEGLPY

SEQ ID NO: 3690 - protein, 4 aa, Artificial Sequence
  Description of Artificial Sequence: Synthetic Linker
QPGV

SEQ ID NO: 3691 - protein, 5 aa, Artificial Sequence
  Description of Artificial Sequence: Synthetic Linker
WKLEG

SEQ ID NO: 3692 - protein, 6 aa, Artificial Sequence
  Description of Artificial Sequence: Synthetic Linker
TAYNAP

SEQ ID NO: 3693 - protein, 11 aa, Artificial Sequence
  Description of Artificial Sequence: Synthetic Linker
HKHDLSETNVY

SEQ ID NO: 3694 - protein, 7 aa, Artificial Sequence
  Description of Artificial Sequence: Synthetic Linker
VLQAVTD

SEQ ID NO: 3695 - protein, 4 aa, Artificial Sequence
  Description of Artificial Sequence: Synthetic Linker
YKDK

SEQ ID NO: 3696 - protein, 6 aa, Artificial Sequence
  Description of Artificial Sequence: Synthetic Linker
NLPFNM

SEQ ID NO: 3697 - protein, 6 aa, Artificial Sequence
  Description of Artificial Sequence: Synthetic Linker
WGVKDP

SEQ ID NO: 3698 - protein, 13 aa, Artificial Sequence
  Description of Artificial Sequence: Synthetic Linker
QKKKYGDKVPENL

SEQ ID NO: 3699 - protein, 14 aa, Artificial Sequence
  Description of Artificial Sequence: Synthetic Linker
NDLVEFNRFTNSPL

SEQ ID NO: 3700 - protein, 10 aa, Artificial Sequence
  Description of Artificial Sequence: Synthetic Linker
LKEQESPVKV

SEQ ID NO: 3701 - protein, 6 aa, Artificial Sequence
  Description of Artificial Sequence: Synthetic Linker
EEGIAN

SEQ ID NO: 3702 - protein, 11 aa, Artificial Sequence
  Description of Artificial Sequence: Synthetic Linker
ADFQGAGRRFD

SEQ ID NO: 3703 - protein, 6 aa, Artificial Sequence
  Description of Artificial Sequence: Synthetic Linker
AAGLPR

SEQ ID NO: 3704 - protein, 10 aa, Artificial Sequence
  Description of Artificial Sequence: Synthetic Linker
TFTGLPHRFE

SEQ ID NO: 3705 - protein, 4 aa, Artificial Sequence
  Description of Artificial Sequence: Synthetic Linker
TTVD

SEQ ID NO: 3706 - protein, 4 aa, Artificial Sequence
  Description of Artificial Sequence: Synthetic Linker
DNLR

SEQ ID NO: 3707 - protein, 5 aa, Artificial Sequence
  Description of Artificial Sequence: Synthetic Linker
FYHEP

SEQ ID NO: 3708 - protein, 6 aa, Artificial Sequence
  Description of Artificial Sequence: Synthetic Linker
ALGYPL

SEQ ID NO: 3709 - protein, 6 aa, Artificial Sequence
  Description of Artificial Sequence: Synthetic Linker
LLGEIS

SEQ ID NO: 3710 - protein, 6 aa, Artificial Sequence
  Description of Artificial Sequence: Synthetic Linker
MGTVGN

SEQ ID NO: 3711 - protein, 6 aa, Artificial Sequence
  Description of Artificial Sequence: Synthetic Linker
TGTNGK

SEQ ID NO: 3712 - protein, 10 aa, Artificial Sequence
  Description of Artificial Sequence: Synthetic Linker
RLQPVCGRME

SEQ ID NO: 3713 - protein, 12 aa, Artificial Sequence
  Description of Artificial Sequence: Synthetic Linker
TSEAHEKPEEKR

SEQ ID NO: 3714 - protein, 16 aa, Artificial Sequence
  Description of Artificial Sequence: Synthetic Linker
NFGGYFPNKLAEYHDF

SEQ ID NO: 3715 - protein, 15 aa, Artificial Sequence
  Description of Artificial Sequence: Synthetic Linker
RFAPPTWERIYPLDL

SEQ ID NO: 3716 - protein, 4 aa, Artificial Sequence
  Description of Artificial Sequence: Synthetic Linker
VFQP

SEQ ID NO: 3717 - protein, 13 aa, Artificial Sequence
  Description of Artificial Sequence: Synthetic Linker
EKASPAFYPQGQE

SEQ ID NO: 3718 - protein, 35 aa, Artificial Sequence
  Description of Artificial Sequence: Synthetic Linker
SMAVRFAKVPPDAAKAFIADRSMLFNGGTASRPPV

SEQ ID NO: 3719 - protein, 4 aa, Artificial Sequence
  Description of Artificial Sequence: Synthetic Linker
VLKL

SEQ ID NO: 3720 - protein, 6 aa, Artificial Sequence
  Description of Artificial Sequence: Synthetic Linker
DLKNSK

SEQ ID NO: 3721 - protein, 9 aa, Artificial Sequence
  Description of Artificial Sequence: Synthetic Linker
LKKDFQGVE

SEQ ID NO: 3722 - protein, 4 aa, Artificial Sequence
  Description of Artificial Sequence: Synthetic Linker
GYTG

SEQ ID NO: 3723 - protein, 4 aa, Artificial Sequence
  Description of Artificial Sequence: Synthetic Linker
PMSD

SEQ ID NO: 3724 - protein, 4 aa, Artificial Sequence
  Description of Artificial Sequence: Synthetic Linker
SDPE

SEQ ID NO: 3725 - protein, 5 aa, Artificial Sequence
  Description of Artificial Sequence: Synthetic Linker
DAPGQ

SEQ ID NO: 3726 - protein, 5 aa, Artificial Sequence
  Description of Artificial Sequence: Synthetic Linker
FEQTL

SEQ ID NO: 3727 - protein, 5 aa, Artificial Sequence
  Description of Artificial Sequence: Synthetic Linker
GGLSQ

SEQ ID NO: 3728 - protein, 6 aa, Artificial Sequence
  Description of Artificial Sequence: Synthetic Linker
AGENEI

SEQ ID NO: 3729 - protein, 6 aa, Artificial Sequence
  Description of Artificial Sequence: Synthetic Linker
QRCGFV

SEQ ID NO: 3730 - protein, 6 aa, Artificial Sequence
  Description of Artificial Sequence: Synthetic Linker
RQREGT

SEQ ID NO: 3731 - protein, 7 aa, Artificial Sequence
  Description of Artificial Sequence: Synthetic Linker
HGNNPLA

SEQ ID NO: 3732 - protein, 8 aa, Artificial Sequence
  Description of Artificial Sequence: Synthetic Linker
GAHYRTSP

SEQ ID NO: 3733 - protein, 8 aa, Artificial Sequence
  Description of Artificial Sequence: Synthetic Linker
QYTQDLDY

SEQ ID NO: 3734 - protein, 11 aa, Artificial Sequence
  Description of Artificial Sequence: Synthetic Linker
WAGFRRPRGNL

SEQ ID NO: 3735 - protein, 13 aa, Artificial Sequence
  Description of Artificial Sequence: Synthetic Linker
MGNHREASSGCYT

SEQ ID NO: 3736 - protein, 17 aa, Artificial Sequence
  Description of Artificial Sequence: Synthetic Linker
LVFDDENFTHTPQGNIV

SEQ ID NO: 3737 - protein, 6 aa, Artificial Sequence
  Description of Artificial Sequence: Synthetic Linker
ALPGFQ

SEQ ID NO: 3738 - protein, 14 aa, Artificial Sequence
  Description of Artificial Sequence: Synthetic Linker
RASSVAERHVSPDT

SEQ ID NO: 3739 - protein, 7 aa, Artificial Sequence
  Description of Artificial Sequence: Synthetic Linker
KISSGDW

SEQ ID NO: 3740 - protein, 7 aa, Artificial Sequence
  Description of Artificial Sequence: Synthetic Linker
SKSKNPI

SEQ ID NO: 3741 - protein, 11 aa, Artificial Sequence
  Description of Artificial Sequence: Synthetic Linker
FMNKDGCAGFT

SEQ ID NO: 3742 - protein, 4 aa, Artificial Sequence
  Description of Artificial Sequence: Synthetic Linker
IMGS

SEQ ID NO: 3743 - protein, 4 aa, Artificial Sequence
  Description of Artificial Sequence: Synthetic Linker
KPYK

SEQ ID NO: 3744 - protein, 5 aa, Artificial Sequence
  Description of Artificial Sequence: Synthetic Linker
EGPPM

SEQ ID NO: 3745 - protein, 5 aa, Artificial Sequence
  Description of Artificial Sequence: Synthetic Linker
LGAEI

SEQ ID NO: 3746 - protein, 5 aa, Artificial Sequence
  Description of Artificial Sequence: Synthetic Linker
YIPEK

SEQ ID NO: 3747 - protein, 6 aa, Artificial Sequence
  Description of Artificial Sequence: Synthetic Linker
GEKLNI

SEQ ID NO: 3748 - protein, 6 aa, Artificial Sequence
  Description of Artificial Sequence: Synthetic Linker
NKGYHI

SEQ ID NO: 3749 - protein, 7 aa, Artificial Sequence
  Description of Artificial Sequence: Synthetic Linker
CIETGEI

SEQ ID NO: 3750 - protein, 11 aa, Artificial Sequence
  Description of Artificial Sequence: Synthetic Linker
TGNPLLWSDDL

SEQ ID NO: 3751 - protein, 8 aa, Artificial Sequence
  Description of Artificial Sequence: Synthetic Linker
KHEYQDRF

SEQ ID NO: 3752 - protein, 9 aa, Artificial Sequence
  Description of Artificial Sequence: Synthetic Linker
CRFGYRDSI

SEQ ID NO: 3753 - protein, 9 aa, Artificial Sequence
  Description of Artificial Sequence: Synthetic Linker
RLDPTTVTP

SEQ ID NO: 3754 - protein, 11 aa, Artificial Sequence
  Description of Artificial Sequence: Synthetic Linker
PKEWQPVLTYG

SEQ ID NO: 3755 - protein, 19 aa, Artificial Sequence
  Description of Artificial Sequence: Synthetic Linker
CNTTKCNEGPILELENLPQ

SEQ ID NO: 3756 - protein, 24 aa, Artificial Sequence
  Description of Artificial Sequence: Synthetic Linker
CGLDLCNQGNSGRAVTYSRSRYLE

SEQ ID NO: 3757 - protein, 7 aa, Artificial Sequence
  Description of Artificial Sequence: Synthetic Linker
SFPKDPE

SEQ ID NO: 3758 - protein, 8 aa, Artificial Sequence
  Description of Artificial Sequence: Synthetic Linker
VRTEIAKK

SEQ ID NO: 3759 - protein, 14 aa, Artificial Sequence
  Description of Artificial Sequence: Synthetic Linker
IIRKDQRLKFGEGI

SEQ ID NO: 3760 - protein, 11 aa, Artificial Sequence
  Description of Artificial Sequence: Synthetic Linker
EQLLGTSFLTR

SEQ ID NO: 3761 - protein, 25 aa, Artificial Sequence
  Description of Artificial Sequence: Synthetic Linker
PHDQCACGVLTSEKRAPDLQDLPWQ

SEQ ID NO: 3762 - protein, 8 aa, Artificial Sequence
  Description of Artificial Sequence: Synthetic Linker
KVSGENHV

SEQ ID NO: 3763 - protein, 6 aa, Artificial Sequence
  Description of Artificial Sequence: Synthetic Linker
NVAEDY

SEQ ID NO: 3764 - protein, 4 aa, Artificial Sequence
  Description of Artificial Sequence: Synthetic Linker
IDWR

SEQ ID NO: 3765 - protein, 4 aa, Artificial Sequence
  Description of Artificial Sequence: Synthetic Linker
RKGS

SEQ ID NO: 3766 - protein, 5 aa, Artificial Sequence
  Description of Artificial Sequence: Synthetic Linker
LFKSP

SEQ ID NO: 3767 - protein, 8 aa, Artificial Sequence
  Description of Artificial Sequence: Synthetic Linker
QNLTAPAT

SEQ ID NO: 3768 - protein, 6 aa, Artificial Sequence
  Description of Artificial Sequence: Synthetic Linker
YAPRPR

SEQ ID NO: 3769 - protein, 7 aa, Artificial Sequence
  Description of Artificial Sequence: Synthetic Linker
YGPDGQR

SEQ ID NO: 3770 - protein, 9 aa, Artificial Sequence
  Description of Artificial Sequence: Synthetic Linker
VSQKTFPQL

SEQ ID NO: 3771 - protein, 17 aa, Artificial Sequence
  Description of Artificial Sequence: Synthetic Linker
GVSDDDAFEVGLTCGGI

SEQ ID NO: 3772 - protein, 4 aa, Artificial Sequence
  Description of Artificial Sequence: Synthetic Linker
FNDK

SEQ ID NO: 3773 - protein, 4 aa, Artificial Sequence
  Description of Artificial Sequence: Synthetic Linker
HDRN

SEQ ID NO: 3774 - protein, 5 aa, Artificial Sequence
  Description of Artificial Sequence: Synthetic Linker
KVKAD

SEQ ID NO: 3775 - protein, 6 aa, Artificial Sequence
  Description of Artificial Sequence: Synthetic Linker
EAGISS

SEQ ID NO: 3776 - protein, 6 aa, Artificial Sequence
  Description of Artificial Sequence: Synthetic Linker
IKASWA

SEQ ID NO: 3777 - protein, 6 aa, Artificial Sequence
  Description of Artificial Sequence: Synthetic Linker
LTRGFA

SEQ ID NO: 3778 - protein, 7 aa, Artificial Sequence
  Description of Artificial Sequence: Synthetic Linker
LNGRARA

SEQ ID NO: 3779 - protein, 7 aa, Artificial Sequence
  Description of Artificial Sequence: Synthetic Linker
SLATFDS

SEQ ID NO: 3780 - protein, 8 aa, Artificial Sequence
  Description of Artificial Sequence: Synthetic Linker
ALPEGHAK

SEQ ID NO: 3781 - protein, 8 aa, Artificial Sequence
  Description of Artificial Sequence: Synthetic Linker
ATTGVEGL

SEQ ID NO: 3782 - protein, 8 aa, Artificial Sequence
  Description of Artificial Sequence: Synthetic Linker
RPKSTEKL

SEQ ID NO: 3783 - protein, 9 aa, Artificial Sequence
  Description of Artificial Sequence: Synthetic Linker
YTSRKKTHE

SEQ ID NO: 3784 - protein, 10 aa, Artificial Sequence
  Description of Artificial Sequence: Synthetic Linker
ASPYHLGIND

SEQ ID NO: 3785 - protein, 10 aa, Artificial Sequence
  Description of Artificial Sequence: Synthetic Linker
GLQDWNVTPE

SEQ ID NO: 3786 - protein, 10 aa, Artificial Sequence
  Description of Artificial Sequence: Synthetic Linker
LDRKSGDYNQ

SEQ ID NO: 3787 - protein, 13 aa, Artificial Sequence
  Description of Artificial Sequence: Synthetic Linker
LLDRDLNLNLPPV

SEQ ID NO: 3788 - protein, 13 aa, Artificial Sequence
  Description of Artificial Sequence: Synthetic Linker
SEGLLPLDNHYHF

SEQ ID NO: 3789 - protein, 14 aa, Artificial Sequence
  Description of Artificial Sequence: Synthetic Linker
ESPVDSEQRGENDL

SEQ ID NO: 3790 - protein, 15 aa, Artificial Sequence
  Description of Artificial Sequence: Synthetic Linker
ALHDMNVELEEKTSH

SEQ ID NO: 3791 - protein, 15 aa, Artificial Sequence
  Description of Artificial Sequence: Synthetic Linker
VDKAPYRFTHGWTYS

SEQ ID NO: 3792 - protein, 16 aa, Artificial Sequence
  Description of Artificial Sequence: Synthetic Linker
HRGAHIYMNSWQSIDF

SEQ ID NO: 3793 - protein, 17 aa, Artificial Sequence
  Description of Artificial Sequence: Synthetic Linker
RENGLVRSPGGFPGEDL

SEQ ID NO: 3794 - protein, 18 aa, Artificial Sequence
  Description of Artificial Sequence: Synthetic Linker
VAGVGTRSSDGFQTSGDY

SEQ ID NO: 3795 - protein, 21 aa, Artificial Sequence
  Description of Artificial Sequence: Synthetic Linker
EIHVEQKLPQKLSAKAKELPI

SEQ ID NO: 3796 - protein, 6 aa, Artificial Sequence
  Description of Artificial Sequence: Synthetic Linker
RWQSFN

SEQ ID NO: 3797 - protein, 9 aa, Artificial Sequence
  Description of Artificial Sequence: Synthetic Linker
SLTARPGFL

SEQ ID NO: 3798 - protein, 10 aa, Artificial Sequence
  Description of Artificial Sequence: Synthetic Linker
LRIPFSEHLG

SEQ ID NO: 3799 - protein, 10 aa, Artificial Sequence
  Description of Artificial Sequence: Synthetic Linker
VVGGQQGSLE

SEQ ID NO: 3800 - protein, 13 aa, Artificial Sequence
  Description of Artificial Sequence: Synthetic Linker
DDFDKDTLNINFQ

SEQ ID NO: 3801 - protein, 13 aa, Artificial Sequence
  Description of Artificial Sequence: Synthetic Linker
YGRESLQSKFTQA

SEQ ID NO: 3802 - protein, 18 aa, Artificial Sequence
  Description of Artificial Sequence: Synthetic Linker
VEAPDLPQQEWAPTYEER

SEQ ID NO: 3803 - protein, 31 aa, Artificial Sequence
  Description of Artificial Sequence: Synthetic Linker
IGCPGDTQGDTYLSKGDKRVNEDAVRGLKAE

SEQ ID NO: 3804 - protein, 20 aa, Artificial Sequence
  Description of Artificial Sequence: Synthetic Linker
FQGYYLVSPSETFLERDVLK

SEQ ID NO: 3805 - protein, 6 aa, Artificial Sequence
  Description of Artificial Sequence: Synthetic Linker
GSGSGS

SEQ ID NO: 3806 - DNA, 18 bp, Artificial Sequence
  Description of Artificial Sequence: Synthetic Linker
ggatcaggttccggatcc

SEQ ID NO: 3807 - protein, 8 aa, Artificial Sequence
  Description of Artificial Sequence: Synthetic Linker
GSGSGSGS

SEQ ID NO: 3808 - DNA, 24 bp, Artificial Sequence
  Description of Artificial Sequence: Synthetic Linker
ggatctggttccggatcaggatcc

SEQ ID NO: 3809 - protein, 10 aa, Artificial Sequence
  Description of Artificial Sequence: Synthetic Linker
GSGSGGGSGS

SEQ ID NO: 3810 - DNA, 30 bp, Artificial Sequence
  Description of Artificial Sequence: Synthetic Linker
ggatcaggttccggaggtggatctggatcc

SEQ ID NO: 3811 - protein, 8 aa, Artificial Sequence
  Description of Artificial Sequence: Synthetic Linker
  MOD_RES (2)..(2): Any amino acid
  MOD_RES (4)..(4): Any amino acid
DXEXNPGP

SEQ ID NO: 3812 - protein, 7 aa, Artificial Sequence
  Description of Artificial Sequence: Synthetic Linker
SGSGSGS

SEQ ID NO: 3813 - protein, 10 aa, Artificial Sequence
  Description of Artificial Sequence: Synthetic Linker
  MOD_RES (3)..(4): Any amino acid
  MOD_RES (6)..(9): Any amino acid
HDXXHXXXXN

SEQ ID NO: 3814 - protein, 4 aa, Artificial Sequence
  Description of Artificial Sequence: Synthetic Linker
GSSG

SEQ ID NO: 3815 - DNA, 12 bp, Artificial Sequence
  Description of Artificial Sequence: Synthetic Linker
ggatccagcggc

SEQ ID NO: 3816 - DNA, 12 bp, Artificial Sequence
  Description of Artificial Sequence: Synthetic Linker
ggatcctcaggg

SEQ ID NO: 3817 - DNA, 60 bp, Artificial Sequence
  Description of Artificial Sequence: Synthetic Signal Sequence
atgtaccggatgcaattgctttcctgtatcgcgctcagtctggcgctggtgacaaactca

SEQ ID NO: 3818 - DNA, 60 bp, Artificial Sequence
  Description of Artificial Sequence: Synthetic Signal Sequence
atgtaccggatgcaattgctttcctgtatcgcgctcagtctggcgctggtgacaaacagt

SEQ ID NO: 3819 - DNA, 321 bp, Artificial Sequence
  Description of Artificial Sequence: Synthetic Destabilizing Domain (DD)
ggagtgcaggtggaaaccatctccccaggagacgggcgcaccttccccaagcgcggccagacctgtgtggtgcactacaccgggatgcttgaagatggaaagaaagtcgattcctcccgggacagaaacaagccctttaagtttatgctaggcaagcaggaggtgatccgaggctgggaagaaggggttgcccagatgagtgtgggtcagagagccaaactgactatatctccagattatgcctatggtgccactgggcacccaggcatcatcccaccacatgccactctcgtcttcgatgtggagcttctaaaaccggaa

SEQ ID NO: 3820 - protein, 261 aa, Homo Sapiens
MIETYNQTSPRSAATGLPISMKIFMYLLTVFLITQMIGSALFAVYLHRRLDKIEDERNLHEDFVFMKTIQRCNTGERSLSLLNCEEIKSQFEGFVKDIMLNKEETKKENSFEMQKGDQNPQIAAHVISEASSKTTSVLQWAEKGYYTMSNNLVTLENGKQLTVKRQGLYYIYAQVTFCSNREASSQAPFIASLCLKSPGRFERILLRAANTHSSAKPCGQQSIHLGGVFELQPGASVFVNVTDPSQVSHGTGFTSFGLLKL

SEQ ID NO: 3821 - DNA, 783 bp, Artificial Sequence
  Description of Artificial Sequence: Synthetic Payload sequence
atgatcgaaacatacaaccaaacttctccccgatctgcggccactggactgcccatcagcatgaaaatttttatgtatttacttactgtttttcttatcacccagatgattgggtcagcactttttgctgtgtatcttcatagaaggttggacaagatagaagatgaaaggaatcttcatgaagattttgtattcatgaaaacgatacagagatgcaacacaggagaaagatccttatccttactgaactgtgaggagattaaaagccagtttgaaggctttgtgaaggatataatgttaaacaaagaggagacgaagaaagaaaacagctttgaaatgcaaaaaggtgatcagaatcctcaaattgcggcacatgtcataagtgaggccagcagtaaaacaacatctgtgttacagtgggctgaaaaaggatactacaccatgagcaacaacttggtaaccctggaaaatgggaaacagctgaccgttaaaagacaaggactctattatatctatgcccaagtcaccttctgttccaatcgggaagcttcgagtcaagctccatttatagccagcctctgcctaaagtcccccggtagattcgagagaatcttactcagagctgcaaatacccacagttccgccaaaccttgcgggcaacaatccattcacttgggaggagtatttgaattgcaaccaggtgcttcggtgtttgtcaatgtgactgatccaagccaagtgagccatggcactggcttcacgtcctttggcttactcaaactc

SEQ ID NO: 3822 - protein, 149 aa, Artificial Sequence
  Description of Artificial Sequence: Synthetic Payload sequence
MQKGDQNPQIAAHVISEASSKTTSVLQWAEKGYYTMSNNLVTLENGKQLTVKRQGLYYIYAQVTFCSNREASSQAPFIASLCLKSPGRFERILLRAANTHSSAKPCGQQSIHLGGVFELQPGASVFVNVTDPSQVSHGTGFTSFGLLKL

SEQ ID NO: 3823 - DNA, 447 bp, Artificial Sequence
  Description of Artificial Sequence: Synthetic Payload sequence
atgcaaaaaggtgatcagaatcctcaaattgcggcacatgtcataagtgaggccagcagtaaaacaacatctgtgttacagtgggctgaaaaaggatactacaccatgagcaacaacttggtaaccctggaaaatgggaaacagctgaccgttaaaagacaaggactctattatatctatgcccaagtcaccttctgttccaatcgggaagcttcgagtcaagctccatttatagccagcctctgcctaaagtcccccggtagattcgagagaatcttactcagagctgcaaatacccacagttccgccaaaccttgcgggcaacaatccattcacttgggaggagtatttgaattgcaaccaggtgcttcggtgtttgtcaatgtgactgatccaagccaagtgagccatggcactggcttcacgtcctttggcttactcaaactc

SEQ ID NO: 3824 - protein, 248 aa, Artificial Sequence
  Description of Artificial Sequence: Synthetic Payload sequence
ATGLPISMKIFMYLLTVFLITQMIGSALFAVYLHRRLDKIEDERNLHEDFVFMKTIQRCNTGERSLSLLNCEEIKSQFEGFVKDIMLNKEETKKENSFEMQKGDQNPQIAAHVISEASSKTTSVLQWAEKGYYTMSNNLVTLENGKQLTVKRQGLYYIYAQVTFCSNREASSQAPFIASLCLKSPGRFERILLRAANTHSSAKPCGQQSIHLGGVFELQPGASVFVNVTDPSQVSHGTGFTSFGLLKL

SEQ ID NO: 3825 - DNA, 744 bp, Artificial Sequence
  Description of Artificial Sequence: Synthetic Payload sequence
gccactggactgcccatcagcatgaaaatttttatgtatttacttactgtttttcttatcacccagatgattgggtcagcactttttgctgtgtatcttcatagaaggttggacaagatagaagatgaaaggaatcttcatgaagattttgtattcatgaaaacgatacagagatgcaacacaggagaaagatccttatccttactgaactgtgaggagattaaaagccagtttgaaggctttgtgaaggatataatgttaaacaaagaggagacgaagaaagaaaacagctttgaaatgcaaaaaggtgatcagaatcctcaaattgcggcacatgtcataagtgaggccagcagtaaaacaacatctgtgttacagtgggctgaaaaaggatactacaccatgagcaacaacttggtaaccctggaaaatgggaaacagctgaccgttaaaagacaaggactctattatatctatgcccaagtcaccttctgttccaatcgggaagcttcgagtcaagctccatttatagccagcctctgcctaaagtcccccggtagattcgagagaatcttactcagagctgcaaatacccacagttccgccaaaccttgcgggcaacaatccattcacttgggaggagtatttgaattgcaaccaggtgcttcggtgtttgtcaatgtgactgatccaagccaagtgagccatggcactggcttcacgtcctttggcttactcaaactc

SEQ ID NO: 3826 - protein, 254 aa, Artificial Sequence
  Description of Artificial Sequence: Synthetic Payload sequence
MIETYNQTSPRSAATGLPISMKIFMYLLTVFLITQMIGSALFAVYLHRRLDKIEDERNLHEDFVFMKTIQRCNTGERSLSLLNCEEIKSQFEGFVKDIMLNKEETKKENDQNPQIAAHVISEASSKTTSVLQWAEKGYYTMSNNLVTLENGKQLTVKRQGLYYIYAQVTFCSNREASSQAPFIASLCLKSPGRFERILLRAANTHSSAKPCGQQSIHLGGVFELQPGASVFVNVTDPSQVSHGTGFTSFGLLKL

SEQ ID NO: 3827 - DNA, 762 bp, Artificial Sequence
  Description of Artificial Sequence: Synthetic Payload sequence
atgatcgaaacatacaaccaaacttctccccgatctgcggccactggactgcccatcagcatgaaaatttttatgtatttacttactgtttttcttatcacccagatgattgggtcagcactttttgctgtgtatcttcatagaaggttggacaagatagaagatgaaaggaatcttcatgaagattttgtattcatgaaaacgatacagagatgcaacacaggagaaagatccttatccttactgaactgtgaggagattaaaagccagtttgaaggctttgtgaaggatataatgttaaacaaagaggagacgaagaaagaaaacgatcagaatcctcaaattgcggcacatgtcataagtgaggccagcagtaaaacaacatctgtgttacagtgggctgaaaaaggatactacaccatgagcaacaacttggtaaccctggaaaatgggaaacagctgaccgttaaaagacaaggactctattatatctatgcccaagtcaccttctgttccaatcgggaagcttcgagtcaagctccatttatagccagcctctgcctaaagtcccccggtagattcgagagaatcttactcagagctgcaaatacccacagttccgccaaaccttgcgggcaacaatccattcacttgggaggagtatttgaattgcaaccaggtgcttcggtgtttgtcaatgtgactgatccaagccaagtgagccatggcactggcttcacgtcctttggcttactcaaactc

SEQ ID NO: 3828 - protein, 263 aa, Artificial Sequence
  Description of Artificial Sequence: Synthetic Construct
MHMIETYNQTSPRSAATGLPISMKIFMYLLTVFLITQMIGSALFAVYLHRRLDKIEDERNLHEDFVFMKTIQRCNTGERSLSLLNCEEIKSQFEGFVKDIMLNKEETKKENSFEMQKGDQNPQIAAHVISEASSKTTSVLQWAEKGYYTMSNNLVTLENGKQLTVKRQGLYYIYAQVTFCSNREASSQAPFIASLCLKSPGRFERILLRAANTHSSAKPCGQQSIHLGGVFELQPGASVFVNVTDPSQVSHGTGFTSFGLLKL

SEQ ID NO: 3829 - DNA, 792 bp, Artificial Sequence
  Description of Artificial Sequence: Synthetic Construct
atgcatatgatcgaaacatacaaccaaacttctccccgatctgcggccactggactgcccatcagcatgaaaatttttatgtatttacttactgtttttcttatcacccagatgattgggtcagcactttttgctgtgtatcttcatagaaggttggacaagatagaagatgaaaggaatcttcatgaagattttgtattcatgaaaacgatacagagatgcaacacaggagaaagatccttatccttactgaactgtgaggagattaaaagccagtttgaaggctttgtgaaggatataatgttaaacaaagaggagacgaagaaagaaaacagctttgaaatgcaaaaaggtgatcagaatcctcaaattgcggcacatgtcataagtgaggccagcagtaaaacaacatctgtgttacagtgggctgaaaaaggatactacaccatgagcaacaacttggtaaccctggaaaatgggaaacagctgaccgttaaaagacaaggactctattatatctatgcccaagtcaccttctgttccaatcgggaagcttcgagtcaagctccatttatagccagcctctgcctaaagtcccccggtagattcgagagaatcttactcagagctgcaaatacccacagttccgccaaaccttgcgggcaacaatccattcacttgggaggagtatttgaattgcaaccaggtgcttcggtgtttgtcaatgtgactgatccaagccaagtgagccatggcactggcttcacgtcctttggcttactcaaactctga

SEQ ID NO: 3830 - protein, 373 aa, Artificial Sequence
  Description of Artificial Sequence: Synthetic Construct
MGVQVETISPGDGRTFPKRGQTCVVHYTGMLEDGKKVDSSRDRNKPFKFMLGKQEVIRGWEEGVAQMSVGQRAKLTISPDYAYGATGHPGIIPPHATLVFDVELLKPEGSMHMIETYNQTSPRSAATGLPISMKIFMYLLTVFLITQMIGSALFAVYLHRRLDKIEDERNLHEDFVFMKTIQRCNTGERSLSLLNCEEIKSQFEGFVKDIMLNKEETKKENSFEMQKGDQNPQIAAHVISEASSKTTSVLQWAEKGYYTMSNNLVTLENGKQLTVKRQGLYYIYAQVTFCSNREASSQAPFIASLCLKSPGRFERILLRAANTHSSAKPCGQQSIHLGGVFELQPGASVFVNVTDPSQVSHGTGFTSFGLLKL

SEQ ID NO: 3831 - DNA, 1122 bp, Artificial Sequence
  Description of Artificial Sequence: Synthetic Construct
atgggagtgcaggtggaaaccatctccccaggagacgggcgcaccttccccaagcgcggccagacctgtgtggtgcactacaccgggatgcttgaagatggaaagaaagtcgattcctcccgggacagaaacaagccctttaagtttatgctaggcaagcaggaggtgatccgaggctgggaagaaggggttgcccagatgagtgtgggtcagagagccaaactgactatatctccagattatgcctatggtgccactgggcacccaggcatcatcccaccacatgccactctcgtcttcgatgtggagcttctaaaaccggaaggatccatgcatatgatcgaaacatacaaccaaacttctccccgatctgcggccactggactgcccatcagcatgaaaatttttatgtatttacttactgtttttcttatcacccagatgattgggtcagcactttttgctgtgtatcttcatagaaggttggacaagatagaagatgaaaggaatcttcatgaagattttgtattcatgaaaacgatacagagatgcaacacaggagaaagatccttatccttactgaactgtgaggagattaaaagccagtttgaaggctttgtgaaggatataatgttaaacaaagaggagacgaagaaagaaaacagctttgaaatgcaaaaaggtgatcagaatcctcaaattgcggcacatgtcataagtgaggccagcagtaaaacaacatctgtgttacagtgggctgaaaaaggatactacaccatgagcaacaacttggtaaccctggaaaatgggaaacagctgaccgttaaaagacaaggactctattatatctatgcccaagtcaccttctgttccaatcgggaagcttcgagtcaagctccatttatagccagcctctgcctaaagtcccccggtagattcgagagaatcttactcagagctgcaaatacccacagttccgccaaaccttgcgggcaacaatccattcacttgggaggagtatttgaattgcaaccaggtgcttcggtgtttgtcaatgtgactgatccaagccaagtgagccatggcactggcttcacgtcctttggcttactcaaactctga

SEQ ID NO: 3832 - protein, 423 aa, Artificial Sequence
  Description of Artificial Sequence: Synthetic Construct
MSGISLIAALAVDYVIGMENAMPWNLPADLAWFKRNTLNKPVIMGRHTWESIGRPLPGRKNIILSSQPGTDDRVTWVKSVDEAIAACGDVPEIMVIGGGRVIEQFLPKAQKLYLTHIDAEVEGDTHFPDYEPDDWESVFSEFHDADAQNSHSYCFEILERRHMIETYNQTSPRSAATGLPISMKIFMYLLTVFLITQMIGSALFAVYLHRRLDKIEDERNLHEDFVFMKTIQRCNTGERSLSLLNCEEIKSQFEGFVKDIMLNKEETKKENSFEMQKGDQNPQIAAHVISEASSKTTSVLQWAEKGYYTMSNNLVTLENGKQLTVKRQGLYYIYAQVTFCSNREASSQAPFIASLCLKSPGRFERILLRAANTHSSAKPCGQQSIHLGGVFELQPGASVFVNVTDPSQVSHGTGFTSFGLLKL

SEQ ID NO: 3833 - DNA, 1272 bp, Artificial Sequence
  Description of Artificial Sequence: Synthetic Construct
atgtcagggatctcacttatcgcagccttggcagttgattatgtgatcggcatggaaaatgcgatgccatggaatcttccggccgacctcgcttggttcaaacgcaacaccctgaacaaacccgttattatgggccgacatacatgggaaagtatcggcaggccattgcccggtcggaaaaacataatcctttcctcccagccgggcacggacgatagagtgacttgggtcaaatcagttgacgaggccattgctgcctgcggcgatgtacccgagattatggttatcggaggggggcgagttattgagcagtttctgcccaaagcgcagaagttgtaccttactcatatagatgcagaggtagagggcgacacgcatttccccgactacgaaccggatgattgggaatccgtattttccgaattccacgacgcggatgcccaaaacagtcactcttactgttttgaaattcttgagcgacgccatatgatcgaaacatacaaccaaacttctccccgatctgcggccactggactgcccatcagcatgaaaatttttatgtatttacttactgtttttcttatcacccagatgattgggtcagcactttttgctgtgtatcttcatagaaggttggacaagatagaagatgaaaggaatcttcatgaagattttgtattcatgaaaacgatacagagatgcaacacaggagaaagatccttatccttactgaactgtgaggagattaaaagccagtttgaaggctttgtgaaggatataatgttaaacaaagaggagacgaagaaagaaaacagctttgaaatgcaaaaaggtgatcagaatcctcaaattgcggcacatgtcataagtgaggccagcagtaaaacaacatctgtgttacagtgggctgaaaaaggatactacaccatgagcaacaacttggtaaccctggaaaatgggaaacagctgaccgttaaaagacaaggactctattatatctatgcccaagtcaccttctgttccaatcgggaagcttcgagtcaagctccatttatagccagcctctgcctaaagtcccccggtagattcgagagaatcttactcagagctgcaaatacccacagttccgccaaaccttgcgggcaacaatccattcacttgggaggagtatttgaattgcaaccaggtgcttcggtgtttgtcaatgtgactgatccaagccaagtgagccatggcactggcttcacgtcctttggcttactcaaactctga

SEQ ID NO: 3834 - protein, 508 aa, Artificial Sequence
  Description of Artificial Sequence: Synthetic Construct
MSLALSLTADQMVSALLDAEPPILYSEYDPTRPFSEASMMGLLTNLADRELVHMINWAKRVPGFVDLTLHDQVHLLECAWMEILMIGLVWRSMEHPGKLLFAPNLLLDRDQGKCVEGGVEIFDMLLATSSRFRMMNLQGEEFVCLKSIILLNSGVYTFLSSTLKSLEEKDHIHRVLDKITDTLIHLMAKAGLTLQQQHQRLAQLLLILSHIRHMSNKRMEHLYSMKCKNVVPLSDLLLEMLDAHRLHMIETYNQTSPRSAATGLPISMKIFMYLLTVFLITQMIGSALFAVYLHRRLDKIEDERNLHEDFVFMKTIQRCNTGERSLSLLNCEEIKSQFEGFVKDIMLNKEETKKENSFEMQKGDQNPQIAAHVISEASSKTTSVLQWAEKGYYTMSNNLVTLENGKQLTVKRQGLYYIYAQVTFCSNREASSQAPFIASLCLKSPGRFERILLRAANTHSSAKPCGQQSIHLGGVFELQPGASVFVNVTDPSQVSHGTGFTSFGLLKL

SEQ ID NO: 3835 - DNA, 1527 bp, Artificial Sequence
  Description of Artificial Sequence: Synthetic Construct
atgtcactggcgctcagccttactgccgaccaaatggtatcagctcttctggacgcagaacccccaattctttattccgagtacgaccccacacgcccgttcagtgaagcttccatgatgggcctccttacgaaccttgccgaccgggaactcgtgcacatgatcaattgggcgaagcgggtgccggggttcgtagatttgacacttcacgaccaagttcatctcttggaatgtgcttggatggagatattgatgatcggactcgtgtggaggtcaatggagcatcctggtaaacttcttttcgcacccaatctgctcttggatagagatcagggtaagtgcgtcgagggtggcgttgaaatcttcgacatgctccttgcgacatccagccgattccgaatgatgaatcttcaaggagaggaatttgtctgtcttaagagcattatactcctcaatagtggagtttacaccttcttgtcctctacactgaaatcacttgaggaaaaagatcacatacatagggtgttggataaaatcacggatacactcatacatctgatggcaaaagcaggattgaccctgcaacagcagcaccaacgactggcccaactgctgttgatccttagccatatcagacacatgtctaacaaaaggatggaacatttgtacagcatgaaatgtaagaacgtagtgccactgtccgatttgttgctggaaatgctggacgctcatcggctccatatgatcgaaacatacaaccaaacttctccccgatctgcggccactggactgcccatcagcatgaaaatttttatgtatttacttactgtttttcttatcacccagatgattgggtcagcactttttgctgtgtatcttcatagaaggttggacaagatagaagatgaaaggaatcttcatgaagattttgtattcatgaaaacgatacagagatgcaacacaggagaaagatccttatccttactgaactgtgaggagattaaaagccagtttgaaggctttgtgaaggatataatgttaaacaaagaggagacgaagaaagaaaacagctttgaaatgcaaaaaggtgatcagaatcctcaaattgcggcacatgtcataagtgaggccagcagtaaaacaacatctgtgttacagtgggctgaaaaaggatactacaccatgagcaacaacttggtaaccctggaaaatgggaaacagctgaccgttaaaagacaaggactctattatatctatgcccaagtcaccttctgttccaatcgggaagcttcgagtcaagctccatttatagccagcctctgcctaaagtcccccggtagattcgagagaatcttactcagagctgcaaatacccacagttccgccaaaccttgcgggcaacaatccattcacttgggaggagtatttgaattgcaaccaggtgcttcggtgtttgtcaatgtgactgatccaagccaagtgagccatggcactggcttcacgtcctttggcttactcaaactctga

SEQ ID NO: 3836 - protein, 508 aa, Artificial Sequence
  Description of Artificial Sequence: Synthetic Construct
MSLALSLTADQMVSALLDAEPPILYSEYDPTRPFSEASMMGLLTNLADRELVHMINWAKRVPGFVDLALHDQVHLLECAWMEILMIGLVWRSMEHPGKLLFAPNLLLDRNQGKCVEGGVEIFDMLLATSSRFRMMNLQGEEFVCLKSIILLNSGVYTFLSSTLKSLEEKDHIHRVLDKITDTLIHLMAKAGLTLQQQHQRLAQLLLILSHIRHMSSKRMEHLYSMKCKNVVPLSDLLLEMLDAHRLHMIETYNQTSPRSAATGLPISMKIFMYLLTVFLITQMIGSALFAVYLHRRLDKIEDERNLHEDFVFMKTIQRCNTGERSLSLLNCEEIKSQFEGFVKDIMLNKEETKKENSFEMQKGDQNPQIAAHVISEASSKTTSVLQWAEKGYYTMSNNLVTLENGKQLTVKRQGLYYIYAQVTFCSNREASSQAPFIASLCLKSPGRFERILLRAANTHSSAKPCGQQSIHLGGVFELQPGASVFVNVTDPSQVSHGTGFTSFGLLKL

SEQ ID NO: 3837 - DNA, 1527 bp, Artificial Sequence
  Description of Artificial Sequence: Synthetic Construct
atgtcactggcgctcagccttactgccgaccaaatggtatcagctcttctggacgcagaacccccaattctttattccgagtacgaccccacacgcccgttcagtgaagcttccatgatgggcctccttacgaaccttgccgaccgggaactcgtgcacatgatcaattgggcgaagcgggtgccggggttcgtagatttggcacttcacgaccaagttcatctcttggaatgtgcttggatggagatattgatgatcggactcgtgtggaggtcaatggagcatcctggtaaacttcttttcgcacccaatctgctcttggatagaaatcagggtaagtgcgtcgagggtggcgttgaaatcttcgacatgctccttgcgacatccagccgattccgaatgatgaatcttcaaggagaggaatttgtctgtcttaagagcattatactcctcaatagtggagtttacaccttcttgtcctctacactgaaatcacttgaggaaaaagatcacatacatagggtgttggataaaatcacggatacactcatacatctgatggcaaaagcaggattgaccctgcaacagcagcatcaacgactggcccaactgctgttgatccttagccatatcagacacatgtctagcaaaaggatggaacatttgtacagcatgaaatgtaagaacgtagtgccactgtccgatttgttgctggaaatgctggacgctcatcggctccatatgatcgaaacatacaaccaaacttctccccgatctgcggccactggactgcccatcagcatgaaaatttttatgtatttacttactgtttttcttatcacccagatgattgggtcagcactttttgctgtgtatcttcatagaaggttggacaagatagaagatgaaaggaatcttcatgaagattttgtattcatgaaaacgatacagagatgcaacacaggagaaagatccttatccttactgaactgtgaggagattaaaagccagtttgaaggctttgtgaaggatataatgttaaacaaagaggagacgaagaaagaaaacagctttgaaatgcaaaaaggtgatcagaatcctcaaattgcggcacatgtcataagtgaggccagcagtaaaacaacatctgtgttacagtgggctgaaaaaggatactacaccatgagcaacaacttggtaaccctggaaaatgggaaacagctgaccgttaaaagacaaggactctattatatctatgcccaagtcaccttctgttccaatcgggaagcttcgagtcaagctccatttatagccagcctctgcctaaagtcccccggtagattcgagagaatcttactcagagctgcaaatacccacagttccgccaaaccttgcgggcaacaatccattcacttgggaggagtatttgaattgcaaccaggtgcttcggtgtttgtcaatgtgactgatccaagccaagtgagccatggcactggcttcacgtcctttggcttactcaaactctga

SEQ ID NO: 3838 - protein, 173 aa, Artificial Sequence
  Description of Artificial Sequence: Synthetic Construct
MYRMQLLSCIALSLALVTNSGSMHMQKGDQNPQIAAHVISEASSKTTSVLQWAEKGYYTMSNNLVTLENGKQLTVKRQGLYYIYAQVTFCSNREASSQAPFIASLCLKSPGRFERILLRAANTHSSAKPCGQQSIHLGGVFELQPGASVFVNVTDPSQVSHGTGFTSFGLLKL

SEQ ID NO: 3839 - DNA, 522 bp, Artificial Sequence
  Description of Artificial Sequence: Synthetic Construct
atgtaccggatgcaattgctttcctgtatcgcgctcagtctggcgctggtgacaaactcaggatccatgcatatgcaaaaaggtgatcagaatcctcaaattgcggcacatgtcataagtgaggccagcagtaaaacaacatctgtgttacagtgggctgaaaaaggatactacaccatgagcaacaacttggtaaccctggaaaatgggaaacagctgaccgttaaaagacaaggactctattatatctatgcccaagtcaccttctgttccaatcgggaagcttcgagtcaagctccatttatagccagcctctgcctaaagtcccccggtagattcgagagaatcttactcagagctgcaaatacccacagttccgccaaaccttgcgggcaacaatccattcacttgggaggagtatttgaattgcaaccaggtgcttcggtgtttgtcaatgtgactgatccaagccaagtgagccatggcactggcttcacgtcctttggcttactcaaactctga

SEQ ID NO: 3840 - protein, 282 aa, Artificial Sequence
  Description of Artificial Sequence: Synthetic Construct
MYRMQLLSCIALSLALVTNSEFGVQVETISPGDGRTFPKRGQTCVVHYTGMLEDGKKVDSSRDRNKPFKFMLGKQEVIRGWEEGVAQMSVGQRAKLTISPDYAYGATGHPGIIPPHATLVFDVELLKPEGSMHMQKGDQNPQIAAHVISEASSKTTSVLQWAEKGYYTMSNNLVTLENGKQLTVKRQGLYYIYAQVTFCSNREASSQAPFIASLCLKSPGRFERILLRAANTHSSAKPCGQQSIHLGGVFELQPGASVFVNVTDPSQVSHGTGFTSFGLLKL

SEQ ID NO: 3841 - DNA, 849 bp, Artificial Sequence
  Description of Artificial Sequence: Synthetic Construct
atgtacaggatgcaactcctgtcttgcattgcactaagtcttgcacttgtcacaaacagtgaattcggagtgcaggtggaaaccatctccccaggagacgggcgcaccttccccaagcgcggccagacctgtgtggtgcactacaccgggatgcttgaagatggaaagaaagtcgattcctcccgggacagaaacaagccctttaagtttatgctaggcaagcaggaggtgatccgaggctgggaagaaggggttgcccagatgagtgtgggtcagagagccaaactgactatatctccagattatgcctatggtgccactgggcacccaggcatcatcccaccacatgccactctcgtcttcgatgtggagcttctaaaaccggaaggatccatgcatatgcaaaaaggtgatcagaatcctcaaattgcggcacatgtcataagtgaggccagcagtaaaacaacatctgtgttacagtgggctgaaaaaggatactacaccatgagcaacaacttggtaaccctggaaaatgggaaacagctgaccgttaaaagacaaggactctattatatctatgcccaagtcaccttctgttccaatcgggaagcttcgagtcaagctccatttatagccagcctctgcctaaagtcccccggtagattcgagagaatcttactcagagctgcaaatacccacagttccgccaaaccttgcgggcaacaatccattcacttgggaggagtatttgaattgcaaccaggtgcttcggtgtttgtcaatgtgactgatccaagccaagtgagccatggcactggcttcacgtcctttggcttactcaaactctga

SEQ ID NO: 3842 - protein, 335 aa, Artificial Sequence
  Description of Artificial Sequence: Synthetic Construct
MYRMQLLSCIALSLALVTNSGSSGISLIAALAVDYVIGMENAMPWNLPADLAWFKRNTLNKPVIMGRHTWESIGRPLPGRKNIILSSQPGTDDRVTWVKSVDEAIAACGDVPEIMVIGGGRVIEQFLPKAQKLYLTHIDAEVEGDTHFPDYEPDDWESVFSEFHDADAQNSHSYCFEILERRGSMHMQKGDQNPQIAAHVISEASSKTTSVLQWAEKGYYTMSNNLVTLENGKQLTVKRQGLYYIYAQVTFCSNREASSQAPFIASLCLKSPGRFERILLRAANTHSSAKPCGQQSIHLGGVFELQPGASVFVNVTDPSQVSHGTGFTSFGLLKL

SEQ ID NO: 3843 - DNA, 1008 bp, Artificial Sequence
  Description of Artificial Sequence: Synthetic Construct
atgtaccggatgcaattgctttcctgtatcgcgctcagtctggcgctggtgacaaactcaggatcctcagggatctcacttatcgcagccttggcagttgattatgtgatcggcatggaaaatgcgatgccatggaatcttccggccgacctcgcttggttcaaacgcaacaccctgaacaaacccgttattatgggccgacatacatgggaaagtatcggcaggccattgcccggtcggaaaaacataatcctttcctcccagccgggcacggacgatagagtgacttgggtcaaatcagttgacgaggccattgctgcctgcggcgatgtacccgagattatggttatcggaggggggcgagttattgagcagtttctgcccaaagcgcagaagttgtaccttactcatatagatgcagaggtagagggcgacacgcatttccccgactacgaaccggatgattgggaatccgtattttccgaattccacgacgcggatgcccaaaacagtcactcttactgttttgaaattcttgagcgacgcggatccatgcatatgcaaaaaggtgatcagaatcctcaaattgcggcacatgtcataagtgaggccagcagtaaaacaacatctgtgttacagtgggctgaaaaaggatactacaccatgagcaacaacttggtaaccctggaaaatgggaaacagctgaccgttaaaagacaaggactctattatatctatgcccaagtcaccttctgttccaatcgggaagcttcgagtcaagctccatttatagccagcctctgcctaaagtcccccggtagattcgagagaatcttactcagagctgcaaatacccacagttccgccaaaccttgcgggcaacaatccattcacttgggaggagtatttgaattgcaaccaggtgcttcggtgtttgtcaatgtgactgatccaagccaagtgagccatggcactggcttcacgtcctttggcttactcaaactctga

SEQ ID NO: 3844 - protein, 501 aa, Artificial Sequence
  Description of Artificial Sequence: Synthetic Construct
MYRMQLLSCIALSLALVTNSGSEETRELQSLAAAVVPSAQTLKITDFSFSDFELSDLETALCTIRMFTDLNLVQNFQMKHEVLCRWILSVKKNYRKNVAYHNWRHAFNTAQCMFAALKAGKIQNKLTDLEILALLIAALSADLDHRGVNNSYIQRSEHPLAQLYCHSIMEHHHFDQCLMILNSPGNQILSGLSIEEYKTTLKIIKQAILATDLALYIKRLGEFFELIRKNQFNLEDPHQKELFLAMLMTACDLSAITKPWPIQQRIAELVATEFFDQGDRERKELNIEPTDLMNREKKNKIPSMQVGFIDAICLQLYEALTHVSEDCFPLLDGCRKNRQKWQALAEQQGSMHMQKGDQNPQIAAHVISEASSKTTSVLQWAEKGYYTMSNNLVTLENGKQLTVKRQGLYYIYAQVTFCSNREASSQAPFIASLCLKSPGRFERILLRAANTHSSAKPCGQQSIHLGGVFELQPGASVFVNVTDPSQVSHGTGFTSFGLLKL

SEQ ID NO: 3845 - DNA, 1506 bp, Artificial Sequence
  Description of Artificial Sequence: Synthetic Construct
atgtaccggatgcaattgctttcctgtatcgcgctcagtctggcgctggtgacaaacagtggatctgaagaaacaagagagctacagtcgttagcggctgctgtggtgccatctgcccagacccttaaaattactgactttagcttcagtgactttgagctgtctgatctggaaacagcactgtgtacaattcggatgtttactgacctcaaccttgtgcagaacttccagatgaaacatgaggttctttgcagatggattttaagtgttaagaagaattatcggaagaatgttgcctatcataattggagacatgcctttaatacagctcagtgcatgtttgctgctctaaaagcaggcaaaattcagaacaagctgactgacctggagatacttgcattgctgattgctgcactaagcgccgatttggatcaccgtggtgtgaataactcttacatacagcgaagtgaacatccacttgcccagctttactgccattcaatcatggaacaccatcattttgaccagtgcctgatgattcttaatagtccaggcaatcagattctcagtggcctctccattgaagaatataagaccacgttgaaaataatcaagcaagctattttagctacagacctagcactgtacattaagaggctaggagaattttttgaacttataagaaaaaatcaattcaatttggaagatcctcatcaaaaggagttgtttttggcaatgctgatgacagcttgtgatctttctgcaattacaaaaccctggcctattcaacaacggatagcagaacttgtagcaactgaattttttgatcaaggagacagagagagaaaagaactcaacatagaacccactgatctaatgaacagggagaagaaaaacaaaatcccaagtatgcaagttgggttcatagatgccatctgcttgcaactgtatgaggccctgacccacgtgtcagaggactgtttccctttgctagatggctgcagaaagaacaggcagaaatggcaggcccttgcagaacagcagggatccatgcatatgcaaaaaggtgatcagaatcctcaaattgcggcacatgtcataagtgaggccagcagtaaaacaacatctgtgttacagtgggctgaaaaaggatactacaccatgagcaacaacttggtaaccctggaaaatgggaaacagctgaccgttaaaagacaaggactctattatatctatgcccaagtcaccttctgttccaatcgggaagcttcgagtcaagctccatttatagccagcctctgcctaaagtcccccggtagattcgagagaatcttactcagagctgcaaatacccacagttccgccaaaccttgcgggcaacaatccattcacttgggaggagtatttgaattgcaaccaggtgcttcggtgtttgtcaatgtgactgatccaagccaagtgagccatggcactggcttcacgtcctttggcttactcaaactctga

SEQ ID NO: 3846 - protein, 501 aa, Artificial Sequence
  Description of Artificial Sequence: Synthetic Construct
MYRMQLLSCIALSLALVTNSGSEETRELQSLAAAVVPSAQTLKITDFSFSDFELSDLETALCTIRMFTDLNLVQNFQMKHEVLCRWILSVKKNYRKNVAYHNWRHAFNTAQCMFAALKAGKIQNKLTDLEILALLIAALSHDLDHRGVNNSYIQRSEHPLAQLYCHSIMEHHHFDQCLMILNSPGNQILSGLSIEEYKTTLKIIKQAILATDLALYIKRLGEFAELIRKNQFNLEDPHQKELFLAMLMTACDLSAITKPWPIQQRIAELVATEFFDQGDRERKELNIEPTDLMNREKKNKIPSMQVGFIDAICLQLYEALTHVSEDCFPLLDGCRKNRQKWQALAEQQGSMHMQKGDQNPQIAAHVISEASSKTTSVLQWAEKGYYTMSNNLVTLENGKQLTVKRQGLYYIYAQVTFCSNREASSQAPFIASLCLKSPGRFERILLRAANTHSSAKPCGQQSIHLGGVFELQPGASVFVNVTDPSQVSHGTGFTSFGLLKL

SEQ ID NO: 3847 - DNA, 1506 bp, Artificial Sequence
  Description of Artificial Sequence: Synthetic Construct
atgtaccggatgcaattgctttcctgtatcgcgctcagtctggcgctggtgacaaactcaggatctgaagaaacaagagagctacagtcgttagcggctgctgtggtgccatctgcccagacccttaaaattactgactttagcttcagtgactttgagctgtctgatctggaaacagcactgtgtacaattcggatgtttactgacctcaaccttgtgcagaacttccagatgaaacatgaggttctttgcagatggattttaagtgttaagaagaattatcggaagaatgttgcctatcataattggagacatgcctttaatacagctcagtgcatgtttgctgctctaaaagcaggcaaaattcagaacaagctgactgacctggagatacttgcattgctgattgctgcactaagccacgatttggatcaccgtggtgtgaataactcttacatacagcgaagtgaacatccacttgcccagctttactgccattcaatcatggaacaccatcattttgaccagtgcctgatgattcttaatagtccaggcaatcagattctcagtggcctctccattgaagaatataagaccacgttgaaaataatcaagcaagctattttagctacagacctagcactgtacattaagaggctaggagaatttgctgaacttataagaaaaaatcaattcaatttggaagatcctcatcaaaaggagttgtttttggcaatgctgatgacagcttgtgatctttctgcaattacaaaaccctggcctattcaacaacggatagcagaacttgtagcaactgaattttttgatcaaggagacagagagagaaaagaactcaacatagaacccactgatctaatgaacagggagaagaaaaacaaaatcccaagtatgcaagttgggttcatagatgccatctgcttgcaactgtatgaggccctgacccacgtgtcagaggactgtttccctttgctagatggctgcaggaagaacaggcagaaatggcaggcccttgcagaacagcagggatccatgcatatgcaaaaaggtgatcagaatcctcaaattgcggcacatgtcataagtgaggccagcagtaaaacaacatctgtgttacagtgggctgaaaaaggatactacaccatgagcaacaacttggtaaccctggaaaatgggaaacagctgaccgttaaaagacaaggactctattatatctatgcccaagtcaccttctgttccaatcgggaagcttcgagtcaagctccatttatagccagcctctgcctaaagtcccccggtagattcgagagaatcttactcagagctgcaaatacccacagttccgccaaaccttgcgggcaacaatccattcacttgggaggagtatttgaattgcaaccaggtgcttcggtgtttgtcaatgtgactgatccaagccaagtgagccatggcactggcttcacgtcctttggcttactcaaactctga

SEQ ID NO: 3848 - protein, 501 aa, Artificial Sequence
  Description of Artificial Sequence: Synthetic Construct
MYRMQLLSCIALSLALVTNSGSEETRELQSLAAAVVPSAQTLKITDFSFSDFELSDLETALCTIRMFTDLNLVQNFQMKHEVLCRWILSVKKNYRKNVAYHNWRHAFNTAQCMFAALKAGKIQNKLTDLEILALLIAALSHDLDHRGVNNSYIQRSEHPLAQLYCHSIMEHHHFDQCLMILNSPGNQILSGLSIEEYKTTLKIIKQAILATDLALYIKRLGEFFELIRKNQFNLEDPHQKELFLAMLMTACDLSAITKPWPIQQRIAELVATEFFDQGDRERKELNIEPTDLMNREKKNKIPSMQVGFIDAICLQLYEALTHVSEDCFPLLDGCRKNRQKWQALAEQQGSMHMQKGDQNPQIAAHVISEASSKTTSVLQWAEKGYYTMSNNLVTLENGKQLTVKRQGLYYIYAQVTFCSNREASSQAPFIASLCLKSPGRFERILLRAANTHSSAKPCGQQSIHLGGVFELQPGASVFVNVTDPSQVSHGTGFTSFGLLKL

SEQ ID NO: 3849 - DNA, 1506 bp, Artificial Sequence
  Description of Artificial Sequence: Synthetic Construct
atgtaccggatgcaattgctttcctgtatcgcgctcagtctggcgctggtgacaaactcaggatctgaagaaacaagagagctacagtcgttagcggctgctgtggtgccatctgcccagacccttaaaattactgactttagcttcagtgactttgagctgtctgatctggaaacagcactgtgtacaattcggatgtttactgacctcaaccttgtgcagaacttccagatgaaacatgaggttctttgcagatggattttaagtgttaagaagaattatcggaagaatgttgcctatcataattggagacatgcctttaatacagctcagtgcatgtttgctgctctaaaagcaggcaaaattcagaacaagctgactgacctggagatacttgcattgctgattgctgcactaagccacgatttggatcaccgtggtgtgaataactcttacatacagcgaagtgaacatccacttgcccagctttactgccattcaatcatggaacaccatcattttgaccagtgcctgatgattcttaatagtccaggcaatcagattctcagtggcctctccattgaagaatataagaccacgttgaaaataatcaagcaagctattttagctacagacctagcactgtacattaagaggctgggagaattttttgaacttataagaaaaaatcaattcaatttggaagatcctcatcaaaaggagttgtttttggcaatgctgatgacagcttgtgatctttctgcaattacaaaaccctggcctattcaacaacggatagcagaacttgtagcaactgaattttttgatcaaggagacagagagagaaaagaactcaacatagaacccactgatctaatgaacagggagaagaaaaacaaaatcccaagtatgcaagttgggttcatagatgccatctgcttgcaactgtatgaggccctgacccacgtgtcagaggactgtttccctttgctagatggctgcagaaagaacaggcagaaatggcaggcccttgcagaacagcagggatccatgcatatgcaaaaaggtgatcagaatcctcaaattgcggcacatgtcataagtgaggccagcagtaaaacaacatctgtgttacagtgggctgaaaaaggatactacaccatgagcaacaacttggtaaccctggaaaatgggaaacagctgaccgttaaaagacaaggactctattatatctatgcccaagtcaccttctgttccaatcgggaagcttcgagtcaagctccatttatagccagcctctgcctaaagtcccccggtagattcgagagaatcttactcagagctgcaaatacccacagttccgccaaaccttgcgggcaacaatccattcacttgggaggagtatttgaattgcaaccaggtgcttcggtgtttgtcaatgtgactgatccaagccaagtgagccatggcactggcttcacgtcctttggcttactcaaactctga

SEQ ID NO: 3850 - protein, 420 aa, Artificial Sequence
  Description of Artificial Sequence: Synthetic Construct
MYRMQLLSCIALSLALVTNSGSSLALSLTADQMVSALLDAEPPILYSEYDPTRPFSEASMMGLLTNLADRELVHMINWAKRVPGFVDLTLHDQVHLLECAWMEILMIGLVWRSMEHPGKLLFAPNLLLDRDQGKCVEGGVEIFDMLLATSSRFRMMNLQGEEFVCLKSIILLNSGVYTFLSSTLKSLEEKDHIHRVLDKITDTLIHLMAKAGLTLQQQHQRLAQLLLILSHIRHMSNKRMEHLYSMKCKNVVPLSDLLLEMLDAHRLGSMHMQKGDQNPQIAAHVISEASSKTTSVLQWAEKGYYTMSNNLVTLENGKQLTVKRQGLYYIYAQVTFCSNREASSQAPFIASLCLKSPGRFERILLRAANTHSSAKPCGQQSIHLGGVFELQPGASVFVNVTDPSQVSHGTGFTSFGLLKL

SEQ ID NO: 3851 - DNA, 1263 bp, Artificial Sequence
  Description of Artificial Sequence: Synthetic Construct
atgtacaggatgcaactcctgtcttgcattgcactaagtcttgcacttgtcacaaacagtggatcttcactggcgctcagccttactgccgaccaaatggtatcagctcttctggacgcagaacccccaattctttattccgagtacgaccccacacgcccgttcagtgaagcttccatgatgggcctccttacgaaccttgccgaccgggaactcgtgcacatgatcaattgggcgaagcgggtgccggggttcgtagatttgacacttcacgaccaagttcatctcttggaatgtgcttggatggagatattgatgatcggactcgtgtggaggtcaatggagcatcctggtaaacttcttttcgcacccaatctgctcttggatagagatcagggtaagtgcgtcgagggtggcgttgaaatcttcgacatgctccttgcgacatccagccgattccgaatgatgaatcttcaaggagaggaatttgtctgtcttaagagcattatactcctcaatagtggagtttacaccttcttgtcctctacactgaaatcacttgaggaaaaagatcacatacatagggtgttggataaaatcacggatacactcatacatctgatggcaaaagcaggattgaccctgcaacagcagcaccaacgactggcccaactgctgttgatccttagccatatcagacacatgtctaacaaaaggatggaacatttgtacagcatgaaatgtaagaacgtagtgccactgtccgatttgttgctggaaatgctggacgctcatcggctcggatccatgcatatgcaaaaaggtgatcagaatcctcaaattgcggcacatgtcataagtgaggccagcagtaaaacaacatctgtgttacagtgggctgaaaaaggatactacaccatgagcaacaacttggtaaccctggaaaatgggaaacagctgaccgttaaaagacaaggactctattatatctatgcccaagtcaccttctgttccaatcgggaagcttcgagtcaagctccatttatagccagcctctgcctaaagtcccccggtagattcgagagaatcttactcagagctgcaaatacccacagttccgccaaaccttgcgggcaacaatccattcacttgggaggagtatttgaattgcaaccaggtgcttcggtgtttgtcaatgtgactgatccaagccaagtgagccatggcactggcttcacgtcctttggcttactcaaactctga

SEQ ID NO: 3852 - protein, 420 aa, Artificial Sequence
  Description of Artificial Sequence: Synthetic Construct
MYRMQLLSCIALSLALVTNSGSSLALSLTADQMVSALLDAEPPILYSEYDPTRPFSEASMMGLLTNLADRELVHMINWAKRVPGFVDLALHDQVHLLECAWMEILMIGLVWRSMEHPGKLLFAPNLLLDRNQGKCVEGGVEIFDMLLATSSRFRMMNLQGEEFVCLKSIILLNSGVYTFLSSTLKSLEEKDHIHRVLDKITDTLIHLMAKAGLTLQQQHQRLAQLLLILSHIRHMSSKRMEHLYSMKCKNVVPLSDLLLEMLDAHRLGSMHMQKGDQNPQIAAHVISEASSKTTSVLQWAEKGYYTMSNNLVTLENGKQLTVKRQGLYYIYAQVTFCSNREASSQAPFIASLCLKSPGRFERILLRAANTHSSAKPCGQQSIHLGGVFELQPGASVFVNVTDPSQVSHGTGFTSFGLLKL

SEQ ID NO: 3853 - DNA, 1263 bp, Artificial Sequence
  Description of Artificial Sequence: Synthetic Construct
atgtacaggatgcaactcctgtcttgcattgcactaagtcttgcacttgtcacaaacagtggatcttcactggcgctcagccttactgccgaccaaatggtatcagctcttctggacgcagaacccccaattctttattccgagtacgaccccacacgcccgttcagtgaagcttccatgatgggcctccttacgaaccttgccgaccgggaactcgtgcacatgatcaattgggcgaagcgggtgccggggttcgtagatttggcacttcacgaccaagttcatctcttggaatgtgcttggatggagatattgatgatcggactcgtgtggaggtcaatggagcatcctggtaaacttcttttcgcacccaatctgctcttggatagaaatcagggtaagtgcgtcgagggtggcgttgaaatcttcgacatgctccttgcgacatccagccgattccgaatgatgaatcttcaaggagaggaatttgtctgtcttaagagcattatactcctcaatagtggagtttacaccttcttgtcctctacactgaaatcacttgaggaaaaagatcacatacatagggtgttggataaaatcacggatacactcatacatctgatggcaaaagcaggattgaccctgcaacagcagcaccaacgactggcccaactgctgttgatccttagccatatcagacacatgtctagcaaaaggatggaacatttgtacagcatgaaatgtaagaacgtagtgccactgtccgatttgttgctggaaatgctggacgctcatcggctcggatccatgcatatgcaaaaaggtgatcagaatcctcaaattgcggcacatgtcataagtgaggccagcagtaaaacaacatctgtgttacagtgggctgaaaaaggatactacaccatgagcaacaacttggtaaccctggaaaatgggaaacagctgaccgttaaaagacaaggactctattatatctatgcccaagtcaccttctgttccaatcgggaagcttcgagtcaagctccatttatagccagcctctgcctaaagtcccccggtagattcgagagaatcttactcagagctgcaaatacccacagttccgccaaaccttgcgggcaacaatccattcacttgggaggagtatttgaattgcaaccaggtgcttcggtgtttgtcaatgtgactgatccaagccaagtgagccatggcactggcttcacgtcctttggcttactcaaactctga

SEQ ID NO: 3854 - protein, 250 aa, Artificial Sequence
  Description of Artificial Sequence: Synthetic Construct
MHATGLPISMKIFMYLLTVFLITQMIGSALFAVYLHRRLDKIEDERNLHEDFVFMKTIQRCNTGERSLSLLNCEEIKSQFEGFVKDIMLNKEETKKENSFEMQKGDQNPQIAAHVISEASSKTTSVLQWAEKGYYTMSNNLVTLENGKQLTVKRQGLYYIYAQVTFCSNREASSQAPFIASLCLKSPGRFERILLRAANTHSSAKPCGQQSIHLGGVFELQPGASVFVNVTDPSQVSHGTGFTSFGLLKL

SEQ ID NO: 3855 - DNA, 753 bp, Artificial Sequence
  Description of Artificial Sequence: Synthetic Construct
atgcatgccactggactgcccatcagcatgaaaatttttatgtatttacttactgtttttcttatcacccagatgattgggtcagcactttttgctgtgtatcttcatagaaggttggacaagatagaagatgaaaggaatcttcatgaagattttgtattcatgaaaacgatacagagatgcaacacaggagaaagatccttatccttactgaactgtgaggagattaaaagccagtttgaaggctttgtgaaggatataatgttaaacaaagaggagacgaagaaagaaaacagctttgaaatgcaaaaaggtgatcagaatcctcaaattgcggcacatgtcataagtgaggccagcagtaaaacaacatctgtgttacagtgggctgaaaaaggatactacaccatgagcaacaacttggtaaccctggaaaatgggaaacagctgaccgttaaaagacaaggactctattatatctatgcccaagtcaccttctgttccaatcgggaagcttcgagtcaagctccatttatagccagcctctgcctaaagtcccccggtagattcgagagaatcttactcagagctgcaaatacccacagttccgccaaaccttgcgggcaacaatccattcacttgggaggagtatttgaattgcaaccaggtgcttcggtgtttgtcaatgtgactgatccaagccaagtgagccatggcactggcttcacgtcctttggcttactcaaactctga

SEQ ID NO: 3856 - protein, 256 aa, Artificial Sequence
  Description of Artificial Sequence: Synthetic Construct
MHMIETYNQTSPRSAATGLPISMKIFMYLLTVFLITQMIGSALFAVYLHRRLDKIEDERNLHEDFVFMKTIQRCNTGERSLSLLNCEEIKSQFEGFVKDIMLNKEETKKENDQNPQIAAHVISEASSKTTSVLQWAEKGYYTMSNNLVTLENGKQLTVKRQGLYYIYAQVTFCSNREASSQAPFIASLCLKSPGRFERILLRAANTHSSAKPCGQQSIHLGGVFELQPGASVFVNVTDPSQVSHGTGFTSFGLLKL

SEQ ID NO: 3857 - DNA, 771 bp, Artificial Sequence
  Description of Artificial Sequence: Synthetic Construct
atgcatatgatcgaaacatacaaccaaacttctccccgatctgcggccactggactgcccatcagcatgaaaatttttatgtatttacttactgtttttcttatcacccagatgattgggtcagcactttttgctgtgtatcttcatagaaggttggacaagatagaagatgaaaggaatcttcatgaagattttgtattcatgaaaacgatacagagatgcaacacaggagaaagatccttatccttactgaactgtgaggagattaaaagccagtttgaaggctttgtgaaggatataatgttaaacaaagaggagacgaagaaagaaaacgatcagaatcctcaaattgcggcacatgtcataagtgaggccagcagtaaaacaacatctgtgttacagtgggctgaaaaaggatactacaccatgagcaacaacttggtaaccctggaaaatgggaaacagctgaccgttaaaagacaaggactctattatatctatgcccaagtcaccttctgttccaatcgggaagcttcgagtcaagctccatttatagccagcctctgcctaaagtcccccggtagattcgagagaatcttactcagagctgcaaatacccacagttccgccaaaccttgcgggcaacaatccattcacttgggaggagtatttgaattgcaaccaggtgcttcggtgtttgtcaatgtgactgatccaagccaagtgagccatggcactggcttcacgtcctttggcttactcaaactctga

SEQ ID NO: 3858 - protein, 247 aa, Artificial Sequence
  Description of Artificial Sequence: Synthetic scFv sequence
MAQVQLVQSGAEVKEPGSSVKVSCKASGGTFSSYAIYWVRQAPGQGLEWMGWINPDSGDTNSAQQFQGRVTMTRDTSISTAYMELSRLRSDDTAMYYCARPPRGDGPDYWGQGTLVTVSSGGGGGSEIVLTQSPGTLSLSPGERATLSCRASQSVSSSYLAWYQQKPGQAPRLLIYGASSRATGIPDRFSGSGSGTDFTLTISRLEPEDFAVYYCQQYGSSPRTFGQGTKVDIKRGLGGLVDYKDDD

SEQ ID NO: 3859 - protein, 249 aa, Artificial Sequence
  Description of Artificial Sequence: Synthetic scFv sequence
MAQVQLVQSGAEVKEPGSSVKVSCKASGGTFSSYAIYWVRQAPGQGLEWMGWINPDSGDTNSAQQFQGRVTMTRDTSISTAYMELSRLRSDDTAMYYCARPPRGDGPDYWGQGTLVTVSSGGGGGSEIVLTQSPGTLSLSPGERATLSCRASQSVSSSYLAWYQQKPGQAPRLLIYGASSRATGIPDRFSGSGSGTDFTLTISRLEPEDFAVYYCQQYGSSPRTFGQGTKVDIKRGLGGLVDYKDDDDK

SEQ ID NO: 3860 - protein, 261 aa, Artificial Sequence [sequence omitted]

SEQ ID NO: 3861 - protein, 258 aa, Artificial Sequence
  Description of Artificial Sequence: Synthetic scFv sequence
DIQMTQSPSSLSASVGDRVTITCRASQGIRNYLAWYQQKPGKAPKLLIYAASTLQSGVPSRFSGSGSGTDFTLTISSLQPEDVATYYCQRYNRAPYTFGQGTKVEIKRGSTSGSGKPGSGEGSTKGEVQLVESGGGLVQPGRSLRLSCAASGFTFDDYAMHWVRQAPGKGLEWVSAITWNSGHIDYADSVEGRFTISRDNAKNSLYLQMNSLRAEDTAVYYCAKVSYLSTASSLDYWGQGTLVTVSSGGGGSGGGGSC

SEQ ID NO: 3862 - protein, 242 aa, Artificial Sequence
  Description of Artificial Sequence: Synthetic scFv sequence
ALQLQQSGAELVRPGASVTLSCKASGYTFTDYEMHWVKQTPVHGLEWIGAIDPETGGTAYNQKFEGKAILTADKSSSTAYMELRSLTSEDSPVYYCARRRYYGSSSFDYWGQGTTLTVSSGGGGSGGGGSGGGGSDVQMIQTPSSLSASLGDRVTISCRASQDIGNYLNWYQQKPDGTVKLLIYYTSRLHSGVPSRFSGSGSGTEYSLTISNLEQEDIATYFCQQGSALPPTFGGGTKLEIN

SEQ ID NO: 3863 - protein, 246 aa, Artificial Sequence
  Description of Artificial Sequence: Synthetic scFv sequence
DVKLQESGPGLVAPSQSLSITCTVSGFSLTSYAVSWVRQPPGKGLEWLGIIWSGGATNYNSALKSRLSISKDNSKSQVFLKMNGLQTDDTARYYCAREHYYGSSAMDYWGQGASITVSSGGGGSGGGGSGGGGSGIVMTQSPLSLPVSLGDQASISCRSSQSIVHSYGNTYLFWYLQKPGQSPKLLIYRVSNRFSGVPDRFSGSGSGTNFTLKISRVEAEDMGVYYCFQGTHVPYTFGGGTKLEIK

SEQ ID NO: 3864 - protein, 245 aa, Artificial Sequence
  Description of Artificial Sequence: Synthetic scFv sequence
DVQLQESGPVLVKTGASVKMSCTASGYTFTDHFMDWVKQSHGKSLEWIGSLNPYSGGTSYNQKFKGKATLTVDKSSSTAYMELNSLTSVDSAVYYCARHNWGAYFDYWGQGTTLTVSSGGGGSGGGGSGGGGSDIVMTQAAPSVPVTPGESVSISCRSSKSLLHSNGNTYLYWFLQRPGQSPQRLIYYMSNLASGVPDRFSGRGSGTDFTLRISRVEAEDVGVYYCMQGLEDPYTFGGGTKLEIK

SEQ ID NO: 3865 - protein, 246 aa, Artificial Sequence
  Description of Artificial Sequence: Synthetic scFv sequence
QVQLQQSGAELVKPGASVKISCKASGYAFSSYWMNWVKQRPGKGLEWIGQIYPGDGDTTYNGKFKGKATLTADKSSSTVYMQLNSLTSEDSAVYFCVRYYYGSSGYFDYWGQGTTLTVSSGGGGSGGGGSGGGGSDVQMIQTPDSLAVSLGQRATISCRASESVDNYGISFMHWYQQKPGQSPKLLIYRASNLESGIPARFSGSGSRTDFTLTINPVETDDVATYYCQQNNKDPPTFGGGTKLEIK

SEQ ID NO: 3866 - protein, 248 aa, Artificial Sequence
  Description of Artificial Sequence: Synthetic scFv sequence
QVQLQQSGAEVKKPGSSVKVSCKASGFSLTSYAISWVRQAPGQGLEWMGGIIWSGGATNYAQKFQGRVTITADESTSTAYMELSSLRSEDTAVYYCAREHYYGSSAMDYWWGQGTMVTVSSGGGGSGGGGSGGGGSEIVLTQSPATLSLSPGERATLSCRASQSIVHSYGNTYAWYQQKPGQAPRLLIYRVSRATGIPARFSGSGSGTDFTLTISSLEPEDFAVYYCFQGTHVPYTFFGQGTKLEIKR

SEQ ID NO: 3867 - protein, 247 aa, Artificial Sequence
  Description of Artificial Sequence: Synthetic scFv sequence
QVQLQQSGAEVKKPGSSVKVSCKASGYAFSSYISWVRQAPGQGLEWMGGQIYPGDGDTNYAQKFQGRVTITADESTSTAYMELSSLRSEDTAVYYCVRYYYGSSGYFDYWWGQGTMVTVSSGGGGSGGGGSGGGGSEIVLTQSPATLSLSPGERATLSCRASESVDNYGISFAWYQQKPGQAPRLLIYRASRATGIPARFSGSGSGTDFTLTISSLEPEDFAVYYCQQNNKDPPTFFGQGTKLEIKR

SEQ ID NO: 3868 - protein, 246 aa, Artificial Sequence
  Description of Artificial Sequence: Synthetic scFv sequence
QVQLQQSGAEVKKPGSSVKVSCKASGYTFTDHFISWVRQAPGQGLEWMGGLNPYSGGTNYAQKFQGRVTITADESTSTAYMELSSLRSEDTAVYYCARHNWGAYFDYWWGQGTMVTVSSGGGGSGGGGSGGGGSEIVLTQSPATLSLSPGERATLSCRASKSLLHSNGNTYAWYQQKPGQAPRLLIYYMSRATGIPARFSGSGSGTDFTLTISSLEPEDFAVYYCMQGLEDPYTFFGQGTKLEIKR

SEQ ID NO: 3869 - protein, 243 aa, Artificial Sequence
  Description of Artificial Sequence: Synthetic scFv sequence
QVQLQQSGAEVKKPGSSVKVSCKASGYTFTDYEISWVRQAPGQGLEWMGGIDPETGGTNYAQKFQGRVTITADESTSTAYMELSSLRSEDTAVYYCARRRYYGSSSFDYWWGQGTMVTVSSGGGGSGGGGSGGGGSEIVLTQSPATLSLSPGERATLSCRASQDIGNYAWYQQKPGQAPRLLIYYTSRATGIPARFSGSGSGTDFTLTISSLEPEDFAVYYCQQGSALPPTFFGQGTKLEIKR

SEQ ID NO: 3870 - protein, 242 aa, Artificial Sequence
  Description of Artificial Sequence: Synthetic scFv sequence
QVQLQQSGAEVKKPGSSVKVSCKASGYTFTDYEISWVRQAPGQGLEWMGGIDPETGGTNYAQKFQGRVTITADESTSTAYMELSSLRSEDTAVYYCARRYYGSSSFDYWWGQGTMVTVSSGGGGSGGGGSGGGGSEIVLTQSPATLSLSPGERATLSCRASQDIGNYAWYQQKPGQAPRLLIYYTSRATGIPARFSGSGSGTDFTLTISSLEPEDFAVYYCQQGSALPPTFFGQGTKLEIKR

SEQ ID NO: 3871 - protein, 477 aa, Artificial Sequence
  Description of Artificial Sequence: Synthetic scFv sequence
QVQLQQSGAELARPGASVKMSCKASGYTFTRYTMHWVKQRPGQGLEWIGYINPSRGYTNYNQKFKDKATLTTDKSSSTAYMQLSSLTSEDSAVYYCARYYDDHYCLDYWGQGTTLTVSSGGGGSGGGGSGGGGSQIVLTQSPAIMSASPGEKVTMTCSASSSVSYMNWYQQKSGTSPKRWIYDTSKLASGVPAHFRGSGSGTSYSLTISGMEAEDAATYYCQQWSSNPFTFGSGTKLEINRGAAAEPKSCDKTHTCPPCPAPELLGGPSVFLFPPKPKDTLMISRTPEVTCVVVDVSHEDPEVKFNWYVDGVEVHNAKTKPREEQYNSTYRVVSVLTVLHQDWLNGKEYKCKVSNKALPAPIEKTISKAKGQPREPQVYTLPPSRDELTKNQVSLTCLVKGFYPSDIAVEWESNGQPENNYKTTPPVLDSDGSFFLYSKLTVDKSRWQQGNVFSCSVMHEALHNHYTQKSLSLSPGK

SEQ ID NO: 3872 - protein, 241 aa, Artificial Sequence
  Description of Artificial Sequence: Synthetic scFv sequence
QVQLQQSGAELVKPGASVKLSCKTSGYTFTNYDINWVRQRPGQGLEWIGWIFPGDDSTQYNEKFKGKATLTTDTSSSTAYMQLSRLTSEDSAVYFCARQTTGTWFAYWGQGTLVTVSAGGGGSGGGGSGGGGSDIVMTQSPATLSVTPGDRVTLSCRASQSISDYLYWYQQKSHESPRLLIKYASQSISGIPSRFSGSGSGSDFTLSINSVEPEDVGVYYCQNGHSFPLTFGAGTKLELKR

SEQ ID NO: 3873 - protein, 241 aa, Artificial Sequence
  Description of Artificial Sequence: Synthetic scFv sequence
QVQLVQSGAEVVKPGASCKLSCKTSGYTFTNYDINWVRQRPGQGLEWIGWIFPGDGSTQYNEKFKGKATLTTDTSTSTAYMELSSLRSEDTAVYFCARQTTATWFAYWGQGTLVTVSSGGGGSGGGGSGGVGSEIVMTQSPATLSVSPGERVTLSCRASQSIGDYLYWYQQKSHESPRLLIKYASQSISGIPARFSGSGSGSEFTLTINSVEPEDVGVYYCQNGHSFPLTFGQGTKLELKR

SEQ ID NO: 3874 - protein, 200 aa, Artificial Sequence
  Description of Artificial Sequence: Synthetic scFv sequence
QVQLVQSGAEVVKPGASVKLSCKASGYTFTNYDINWVRQRPEQGLEWIGWIFPGDGSTQYNEKFKGKATLTTDTSTSTAYMELSSLRSEDTAVYFCARQTTATWFAYWGQGTLVTVSSGGGGSGGGGSGGGGSEIVMTQSPATLSVSPGERVSLSCRASQSISDYLHWYQQKSHESPRLLIKYASQSISGIPARFSGSGS

SEQ ID NO: 3875 - protein, 241 aa, Artificial Sequence
  Description of Artificial Sequence: Synthetic scFv sequence
QVQLVQSGAEVVKPGASVKLSCKASGYTFTNYDINWVRQRPEQGLEWIGWIFPGDGSTQYNEKFKGKATLTTDTSTSTAYMELSSLRSEDTAVYFCARQTTATWFAYWGQGTLVTVSSGGGGSGGGGSGGGGSEIVMTQSPATLSVSPGERVSLSCRASQSISDYLHWYQQKSHESPRLLIKYASQSISGIPARFSGSGSGSEFTLTINSVEPEDVGVYYCQNGHSFPLTFGQGTKLELKR

SEQ ID NO: 3876 - protein, 241 aa, Artificial Sequence
  Description of Artificial Sequence: Synthetic scFv sequence
QVQLVQSGAEVVKPGASVKLSCKTSGYTFTNYDINWVRQRPGQGLEWIGWIFPGDDSTQYNEKFKGKATLTTDTSTSTAYMELSSLRPEDTAVYFCARQTTGTWFAYWGQGTLVTVSSGGGGSGGGGSGGGGSEIVMTQSPATLSVSPGERVTLSCRASQSISDYLYWYQQKSHESPRLLIKYASQSIPGIPARFSGSGSGSEFTLTINSVEPEDVGVYYCQNGHSFPLTFGQGTKLELKR

SEQ ID NO: 3877 - protein, 241 aa, Artificial Sequence
  Description of Artificial Sequence: Synthetic scFv sequence
QVQLVQSGAEVVKPGASVKLSCKTSGYTFTNYDINWVRQRPGQGLEWIGWIFPGDDSTQYNEKFKGKATLTTDTSTSTAYMELSSLRSEDTAVYFCARQTTGTWFAYWGQGTLVTVSSGGGGSGGGGSGGGGSEIVMTQSPATLSVSPGERVTLSCRASQSISDYLYWYQQKSHESPRLLIKYASQSISGIPARFSGSGSGSEFTLTINSVEPEDVGVYYCQNGHSFPLTFGQGTKLELKR

SEQ ID NO: 3878 - protein, 200 aa, Artificial Sequence
  Description of Artificial Sequence: Synthetic scFv sequence
QVQLVQSGAEVVKPGASVKLSCKTSGYTFTNYDINWVRQRPGQGLEWIGWIFPGDGSTQYNEKFKGKATLTTDTSTSTAYLELSSLGSEDTAVYFCARQTTGTWFAYWGQGTLVTVSSGGGGSGGGGSGGGGSEIVMTQSPATLSVSPGERVTLSCRASQSISDYLYWYQQKSHESPRLLIKYASQSISGIPARFSGSGS

SEQ ID NO: 3879 - protein, 241 aa, Artificial Sequence
  Description of Artificial Sequence: Synthetic scFv sequence
QVQLVQSGAEVVKPGASVKLSCKTSGYTFTNYDINWVRQRPGQGLEWIGWIFPGDGSTQYNEKFKGKATLTTDTSTSTAYLELSSLGSEDTAVYFCARQTTGTWFAYWGQGTLVTVSSGGGGSGGGGSGGGGSEIVMTQSPATLSVSPGERVTLSCRASQSISDYLYWYQQKSHESPRLLIKYASQSISGIPARFSGSGSGSEFTLTINSVEPEDVGVYYCQNGHSFPLTFGQGTKLELKR

SEQ ID NO: 3880 - protein, 200 aa, Artificial Sequence
  Description of Artificial Sequence: Synthetic scFv sequence
QVQLVQSGAEVVKPGASVKLSCKTSGYTFTNYDINWVRQRPGQGLEWIGWIFPGDGSTQYNEKFKGKATLTTDTSTSTAYMELSSLGSEDTAVYFCARQTTATWFAYWGQGTLVTVSSGGGGSGGGGSGGGGSEIVMTQSPATLSVSPGERVTLSCRASQSISDYLYWYQQKSHESPRLLIKYASQSISGIPARFSGSGS

SEQ ID NO: 3881 - protein, 241 aa, Artificial Sequence
  Description of Artificial Sequence: Synthetic scFv sequence
QVQLVQSGAEVVKPGASVKLSCKTSGYTFTNYDINWVRQRPGQGLEWIGWIFPGDGSTQYNEKFKGKATLTTDTSTSTAYMELSSLGSEDTAVYFCTRQTTATWFAYWGQGTLVTVSSGGGGSGGGGSSGGGSEIVMTQSPATLSVSPGERVTLSCRASQSIGDYLYWYQQKSHESPRLLIKYASQSISGIPARFSGSGSGSEFTLTINSVEPEDVGVYYCQNGHSFPLTFGQGTKLELKR

SEQ ID NO: 3882 - protein, 200 aa, Artificial Sequence
  Description of Artificial Sequence: Synthetic scFv sequence
QVQLVQSGAEVVKPGASVKLSCKTSGYTFTNYDINWVRQRPGQGLEWIGWIFPGDGSTQYNEKFKGKATLTTDTSTSTAYMELSSLRSEDTAVYFCARQTTATWFAYWGQGTLVTVSSGGGGSGGGGSGGGGSEIVMTQSPATLSVSPGERVTLSCRASQSISDYLYWYQQKSHESPRLLIKYASQSISGIPARFSGSGS

SEQ ID NO: 3883 - protein, 241 aa, Artificial Sequence
  Description of Artificial Sequence: Synthetic scFv sequence
QVQLVQSGAEVVKPGASVKLSCKTSGYTFTNYDINWVRQRPGQGLEWIGWIFPGDGSTQYNEKFKGKATLTTDTSTSTAYMELSSLRSEDTAVYFCARQTTATWFAYWGQGTLVTVSSGGGGSGGGGSGGGGSEIVMTQSPATLSVSPGERVTLSCRASQSISDYLYWYQQKSHESPRLLIKYASQSISGIPARFSGSGSGSEFTLTINSVEPEDVGVYYCQNGHSFPLTFGQGTKLELKR

SEQ ID NO: 3884 - protein, 200 aa, Artificial Sequence
  Description of Artificial Sequence: Synthetic scFv sequence
QVQLVQSGAEVVKPGASVKLSCKTSGYTFTNYDINWVRQRPGQGLEWIGWIFPGDGSTQYNEKFKGKATLTTDTSTSTAYMELSSLSSEDTAVYFCARQTTATWFAYWGQGTLVTVSSGGGGSGGGGSGGGGSEIVMTQSPATLSVSPGERVTLSCRASQEISDYLYWYQQKSHESPRLLIKYASQSISGIPARFSGSGS

SEQ ID NO: 3885 - protein, 200 aa, Artificial Sequence
  Description of Artificial Sequence: Synthetic scFv sequence
QVQLVQSGAEVVKPGASVKLSCKTSGYTFTNYDINWVRQRPGQGLEWVGWIFPGDGSTQYNEKFKGKATLTTDTSTSTAYMELSSLRSEDTAVYFCARQTTSTWFAYWGQGTLVTVSSGGGGSGGGGSGGGGSEIVMTQSPATLSVSPGERVTLSCRASQEISDYLYWYQQKSHESPRLLIKYASQSISGIPARFSGSGS

SEQ ID NO: 3886 - protein, 241 aa, Artificial Sequence
  Description of Artificial Sequence: Synthetic scFv sequence
QVQLVQSGAEVVKPGASVKLSCKTSGYTFTNYDINWVRQRPGQGLEWVGWIFPGDGSTQYNEKFKGKATLTTDTSTSTAYMELSSLRSEDTAVYFCARQTTSTWFAYWGQGTLVTVSSGGGGSGGGGSGGGGSEIVMTQSPATLSVSPGERVTLSCRASQPISDYLYWYQQKSHESPRLLIKYASQSISGIPARFSGSGSGSEFTLTINSVEPEDVGVYYCQNGYSFPLTFGQGTKLELKR

SEQ ID NO: 3887 - protein, 241 aa, Artificial Sequence
  Description of Artificial Sequence: Synthetic scFv sequence
QVQLVQSGAEVVKPGASVKVSCKASGYTFTNYDINWVRQRPEQGLEWIGWIFPGDGSTQYNEKFKGRVTMTTDTSTSTVYMELSSLRSEDTAVYFCARQTTATWFAYWGQGTLVTVSSGGGGSGGGGSGGGGSEIVMTQSPATLSVSPGERVTLSCRASQSISDYLHWYQQKSHQAPRLLIKYASQSISGIPARFSGSGSGSEFTLTISSLQPEDFGVYYCQNGHSFPLTFGQGTKLELKR

SEQ ID NO: 3888 - protein, 241 aa, Artificial Sequence
  Description of Artificial Sequence: Synthetic scFv sequence
QVQLVQSGAEVVKPGASVKVSCKTSGYTFTNYDINWVRQRPGQGLEWIGWIFPGDDSTQYNEKFKGRVTMTTDTSTSTVYMELSSLRSEDTAVYFCARQTTGTWFAYWGQGTLVTVSSGGGGSGGGGSGGGGSEIVMTQSPATLSVSPGERVTLSCRASQSISDYLYWYQQKSHQAPRLLIKYASQSISGIPARFSGSGSGSEFTLTISSLQPEDFGVYYCQNGHSFPLTFGQGTKLELKR

SEQ ID NO: 3889 - protein, 200 aa, Artificial Sequence
  Description of Artificial Sequence: Synthetic scFv sequence
  MOD_RES (3)..(3): Any amino acid
QVXLVQSGAEVVKPGASVKLSCKASGYTFTNYDINWARQRPGQGLEWIGWIFPGDGSTQYNEKFKGKATLTTDTSTGTAYMELSSLRSEDTAVYFCARQTTATWFAYWGQGTVVTVSSGGGGSGGGGSGGGGNEIVMTQSPATLSVSPGERVTLSCRASQSISDYVYWYQQKPHESPRLLIKYASQSISGIPARFSGSGS

SEQ ID NO: 3890 - protein, 200 aa, Artificial Sequence
  Description of Artificial Sequence: Synthetic scFv sequence
  MOD_RES (3)..(3): Any amino acid
QVXLVQSGAEVVKPGASVKLSCKTSGYTFTNYDINWVRQRPGQGLEWIGWIFPGDGSTQYNEKFKGKATLTTDTSTSTAYLELSSLGSEDTAVYFCARQTTGTWFAYWGQGTLVTVSSGGGGSGGGGSGGGGSEIVMTQSPATLSVSPGERVTLSCRASQSISDYLYWYQQKSHESPRLLIKYASQSISGIPARFSGSGS

SEQ ID NO: 3891 - protein, 200 aa, Artificial Sequence
  Description of Artificial Sequence: Synthetic scFv sequence
  MOD_RES (3)..(3): Any amino acid
QVXLVQSGAEVVKPGASVKLSCKTSGYTFTNYDINWVRQRPGQGLEWIGWIFPGDGSTQYNEKFKGKATLTTDTSTSTAYMELSSLGSEDTAVYFCTRQTTATWFAYWGQGTLVTVSSGGGGSGGGGSSGGGSEIVMTQSPATLSVSPGERVTLSCRASQSIGDYLYWYQQKSHESPRLLIKYASQSISGIPARFSGSGS

SEQ ID NO: 3892 - protein, 200 aa, Artificial Sequence
  Description of Artificial Sequence: Synthetic scFv sequence
  MOD_RES (3)..(3): Any amino acid
QVXLVQSGAEVVKPGASVKLSCKTSGYTFTNYDINWVRQRPGQGLEWIGWIFPGDGSTQYNEKFKGKATLTTDTSTSTAYMELSSLRSEDTAVYFCARQTTATWFAYWGQGTLVTVSSGGGGSGGGGSGGVGSEIVMTQSPATLSVSPGERVTLSCRASQSIGDYLYWYQQKSHESPRLLIKYASQSISGIPARFSGSGS

SEQ ID NO: 3893 - protein, 200 aa, Artificial Sequence
  Description of Artificial Sequence: Synthetic scFv sequence
  MOD_RES (3)..(3): Any amino acid
  MOD_RES (5)..(5): Any amino acid
QVXLXQSGAEVVKPGASVKLSCKTSGYTFTNYDINWVRQRPGQGLEWIGWIFPGDGSTQYNEKFKGKATLTTDTSTSTAYLELSSLGSEDTAVYFCARQTTGTWFAYWGQGTLVTVSSGGGGSGGGGSGGGGSEIVMTQSPATLSVSPGERVTLSCRASQSISDYLYWYQQKSHESPRLLIKYASQSISGIPARFSGSGS

SEQ ID NO: 3894 - protein, 200 aa, Artificial Sequence
  Description of Artificial Sequence: Synthetic scFv sequence
  MOD_RES (3)..(3): Any amino acid
  MOD_RES (5)..(5): Any amino acid
QVXLXQSGAEVVKPGASVKLSCKTSGYTFTNYDINWVRQRPGQGLEWIGWIFPGDGSTQYNEKFKGKATLTTDTSTSTAYMELSSLRSEDTAVYFCARQTTATWFAYWGQGTLVTVSSGGGGSGGGGSGGGGSEIVMTQSPATLSVSPGERVTLSCRASQSISDYLYWYQQKSHESPRLLIKYASQSISGIPARFSGSGS

SEQ ID NO: 3895 - protein, 200 aa, Artificial Sequence
  Description of Artificial Sequence: Synthetic scFv sequence
  MOD_RES (3)..(4): Any amino acid
  MOD_RES (18)..(18): Any amino acid
QVXXVQSGAEVVKPGASXKLSCKTSGYTFTNYDINWVRQRPGQGLEWIGWIFPGDGSTQYNEKFKGKATLTTDTSTSTAYMELSSLRSEDTAVYFCARQTTATWFAYWGQGTLVTVSSGGGGSGGGGSGGVGSEIVMTQSPATLSVSPGERVTLSCRASQSIGDYLYWYQQKSHESPRLLIKYASQSISGIPARFSGSGS

SEQ ID NO: 3896 - protein, 200 aa, Artificial Sequence
  Description of Artificial Sequence: Synthetic scFv sequence
  MOD_RES (3)..(5): Any amino acid
QVXXXQSGAEVVKPGASVKLSCKTSGYTFTNYDINWVRQRPGQGLEWIGWIFPGDDSTQYNEKFKGKATLTTDTSTSTAYMELSSLRSEDTAVYFCARQTTGTWFAYWGQGTLVTVSSGGGGSGGGGSGGGGSEIVMTQSPATLSVSPGERVTLSCRASQSISDYLYWYQQKSHESPRLLIKYASQSIPGIPARFSGSGS

SEQ ID NO: 3897 - protein, 200 aa, Artificial Sequence
  Description of Artificial Sequence: Synthetic scFv sequence
  MOD_RES (3)..(5): Any amino acid
  MOD_RES (170)..(171): Any amino acid
QVXXXQSGAEVVKPGASVKLSCKTSGYTFTNYDINWVRQRPGQGLEWIGWIFPGDGSTQYNEKFKGKATLTTDTSTSTAYLELSSLGSEDTAVYFCARQTTGTWFAYWGQGTLVTVSSGGGGSGGGGSGGGGSEIVMTQSPATLSVSPGERVTLSCRASQSISDYLYWYXXKSHESPRLLIKYASQSISGIPARFSGSGS

SEQ ID NO: 3898 - protein, 200 aa, Artificial Sequence
  Description of Artificial Sequence: Synthetic scFv sequence
  MOD_RES (2)..(5): Any amino acid
QXXXXQSGAEVVKPGASVKLSCKTSGYTFTNYDINWVRQRPGQGLEWIGWIFPGDGSTQYNEKFKGKATLTTDTSTSTAYMELSSLRSEDTAVYFCARQTTATWFAYWGQGTLVTVSSGGGGSGGGGSGGVGSEIVMTQSPATLSVSPGERVTLSCRASQSIGDYLYWYQQKSHESPRLLIKYASQSISGIPARFSGSGS

SEQ ID NO: 3899 - protein, 200 aa, Artificial Sequence
  Description of Artificial Sequence: Synthetic scFv sequence
  MOD_RES (2)..(6): Any amino acid
  MOD_RES (17)..(19): Any amino acid
QXXXXXSGAEVVKPGAXXXLSCKTSGYTFTNYDINWVRQRPGQGLEWIGWIFPGDGSTQYNEKFKGKATLTTDTSTSTAYLELSSLGSEDTAVYFCARQTTGTWFAYWGQGTLVTVSSGGGGSGGGGSGGGGSEIVMTQSPATLSVSPGERVTLSCRASQSISDYLYWYQQKSHESPRLLIKYASQSISGIPARFSGSGS

SEQ ID NO: 3900 - protein, 253 aa, Artificial Sequence
  Description of Artificial Sequence: Synthetic scFv sequence
DIVMTQTPATLSVSPGKRATLSCRASQSVSSNYLAWYQQKPGQAPRLLIYGASRRATGIPDRFSGSGSGTDFTLTISSLQAEDVAVYYCQQYGSSPRTFGQGTKLEIKGGSSRSSSSGGGGSGGGGQVTLKESGAEVKNPGSSVKVSCKASGGTFSSYAISWLRQAPGQGLEWMGWINPNSGGSDYAQRFQGRVTMTRDTSINTVYMELSRLRSDDTAVYYCARVEKRGYYYGMDVWGQGTMVTVSSFEGSEQ

SEQ ID NO: 3901 - protein, 255 aa, Artificial Sequence
  Description of Artificial Sequence: Synthetic scFv sequence
QPGLTQPPSASGTPGQRVTISCSGSSSNIGSNYVYWYQQFPGTAPKLLIYRNNQRPSGVPDRFSGSKSGTSASLAISGLRSEDEADYYCAAWDDSLSVWVFGGGTKVTVLGGSSRSSSSGGSGSGGGGQVTLKESGAEVKNPGSSVKVSCKASGGTFSSYAISWLRQAPGQGLEWMGWINPNSGGSDYAQRFQGRVTMTRDTSINTVYMELSRLRSDDTAVYYCARVEKRGYYYGMDVWGQGTMVTVSSFEGSEQ

SEQ ID NO: 3902 - protein, 263 aa, Artificial Sequence
  Description of Artificial Sequence: Synthetic scFv sequence
QPVLTQSHSVSESPGKTVTITCTGSGGNIATQYVQWYQQRPGSGPTTVIYDDDQRPSGVPDRFTGSIDSSSNSASLTISGLKTEDEADYYCQSYDSTNHGVFGGGAKVTVLGGSSRSSSSGGGGSGGGGQVQLQQWGPGLVKPSETLSLTCTVSGGSISSSSYYWGWIRQPPGKGLEWIGSIYYSGSTYYNPSLKSRVTISVDTSKNQFSLKLSSVTAADTAVYYCARLSKGYSSSWAYSYYGPDAWGQGTMVTVSSFEGSEQ

SEQ ID NO: 3903 - protein, 263 aa, Artificial Sequence
  Description of Artificial Sequence: Synthetic scFv sequence
QPVLTQSHTVTITCTGYVQWYQQRSVSESPGKSGGNIATQPGSGPTTVIYDDDQRPSGVPDRFTGSIDSSSNSASLTISGLKTEDEADYYCQSYDSTNHGVFGGGAKVTVLGGSSRSSSSGGGGSGGGGQVQLQQWGPGLVKPSETLSLTCTVSGGSISSSSYYWGWIRQPPGKGLEWIGSIYYSGSTYYNPSLKSRVTISVDTSKNQFSLKLSSVTAADTAVYYCARLSKGYSSSWAYSYYGPDAWGQGTMVTVSSFEGSEQ

SEQ ID NO: 3904 - protein, 254 aa, Artificial Sequence
  Description of Artificial Sequence: Synthetic scFv sequence
RPVLTQPPSAAGTPGQRVTISCSGSSSNIGSNYVYWYQQLPGMAPKLLIYTNNQRPSGVPGRFSGSKSGTSASLAISGLRSEDEADYYCAAWDDSLNGWVFGGGTELTVLGGSSRSSSSGGGGSGGGGQVQLQESGPGLVKPSETLSLTCNVSGRSVSSGFYWSWIRQRPGKGLEWVGSIYRSGLTYYNPSLKSRVTISVDTSKNQFSLKLSSVTAADTAVYYCARATPWYYYGMDVWGQGTTVTVSSFEGSEQ

SEQ ID NO: 3905 - protein, 249 aa, Artificial Sequence
  Description of Artificial Sequence: Synthetic scFv sequence
DIQMTQSPSSLSASVGDRVTITCSASQDISNYLNWYQQKPGKAPKLLIYYTSNLHSGVPSRFSGSGSGTDFTLTISSLQPEDFATYYCQQYRKLPWTFGQGTKLEIKRGGGGSGGGGSGGGGSGGGGSQVQLVQSGAEVKKPGSSVKVSCKASGGTFSNYWMHWVRQAPGQGLEWMGATYRGHSDTYYNQKFKGRVTITADKSTSTAYMELSSLRSEDTAVYYCARGAIYNGYDVLDNWGQGTLVTVSS

SEQ ID NO: 3906 - protein, 246 aa, Artificial Sequence
  Description of Artificial Sequence: Synthetic scFv sequence
DIVLTQSPASLAMSLGKRATISCRASESVSVIGAHLIHWYQQKPGQPPKLLIYLASNLETGVPARFSGSGSGTDFTLTIDPVEEDDVAIYSCLQSRIFPRTFGGGTKLEIKGSTSGSGKPGSGEGSTKGQIQLVQSGPELKKPGETVKISCKASGYTFTDYSINWVKRAPGKGLKWMGWINTETREPAYAYDFRGRFAFSLETSASTAYLQINNLKYEDTATYFCALDYSYAMDYWGQGTSVTVSS

SEQ ID NO: 3907 - DNA, 738 bp, Artificial Sequence
  Description of Artificial Sequence: Synthetic scFv sequence
gacatcgtgctgacacagagccctgcatccctggcaatgtccctgggcaagagggcaaccatctcttgcagggcctctgagagcgtgtccgtgatcggcgcccacctgatccactggtaccagcagaagccaggacagccacctaagctgctgatctatctggcctccaacctggagacaggagtgcctgcacggttctctggcagcggctccggcaccgactttacactgaccatcgatccagtggaggaggacgatgtggccatctactcttgcctgcagagcagaatcttccccaggacatttggcggcggcaccaagctggagatcaagggctctacaagcggctccggcaagcctggctccggagagggctctaccaagggacagatccagctggtgcagtccggacccgagctgaagaagcctggcgagacagtgaagatcagctgtaaggcctccggctacacattcaccgattattctatcaactgggtgaagagggcaccaggcaagggcctgaagtggatgggctggatcaatacagagacacgggagcccgcctacgcctatgacttcagaggcaggttcgcctttagcctggagacatctgccagcaccgcctacctgcagatcaacaatctgaagtacgaggatacagccacctatttttgcgccctggactacagctatgccatggattattggggccagggcacatccgtgaccgtgagctcc

SEQ ID NO: 3908 - protein, 238 aa, Artificial Sequence
  Description of Artificial Sequence: Synthetic scFv sequence
EVQLLETGGGLVQPGGSLRLSCAVSGFALSNHGMSWVRRAPGKGLEWVSGIVYSGSTYYAASVKGRFTISRDNSRNTLYLQMNSLRPEDTAIYYCSAHGGESDVWGQGTTVTVSSASGGGGSGGRASGGGGSEIVLTQSPATLSVSPGESATLSCRASQSVSSNLAWYQQKPGQAPRLLIYGASTRASGIPDRFSGSGSGTDFTLTISSLQAEDVAVYYCQQYGSSLTFGGGTKVEIK

SEQ ID NO: 3909 - protein, 240 aa, Artificial Sequence
  Description of Artificial Sequence: Synthetic scFv sequence
EVQLVESGGGLVKPGGSLRLSCAASGFTFSDYYMSWIRQAPGKGLEWVSYISSSGSTIYYADSVKGRFTISRDNAKNSLYLQMNSLRAEDTAVYYCARDLRGAFDIWGQGTMVTVSSGGGGSGGGGSGGGGSSYVLTQSPSVSAAPGYTATISCGGNNIGTKSVHWYQQKPGQAPLLVIRDDSVRPSKIPGRFSGSNSGNMATLTISGVQAGDEADFYCQVWDSDSEHVVFGGGTKLTVL

SEQ ID NO: 3910 - protein, 241 aa, Artificial Sequence
  Description of Artificial Sequence: Synthetic scFv sequence
EVQLVESGGGLVQPGGSLRLSCAASGFTFSSYAMSWVRQAPGKGLEWVSAISGSGGSTYYADSVKGRFTISRDNSKNTLYLQMNSLRAEDTAVYYCAKVVRDGMDVWGQGTTVTVSSGGGGSGGGGSGGGGSEIVLTQSPATLSLSPGERATLSCRASQSVSSSYLAWYQQKPGQAPRLLIYGASSRATGIPDRFSGNGSGTDFTLTISRLEPEDFAVYYCQQYGSPPRFTFGPGTKVDIK

SEQ ID NO: 3911 - protein, 106 aa, Artificial Sequence
  Description of Artificial Sequence: Synthetic scFv sequence
EVQLVESGGGLVQPGGSLRLSCAVSGFALSNHGMSWVRRAPGKGLEWVSGIVYSGSTYYAASVKGRFTISRDNSRNTLYLQMNSLRPEDTAIYYCSAHGGESDVWG

SEQ ID NO: 3912 - protein, 239 aa, Artificial Sequence
  Description of Artificial Sequence: Synthetic scFv sequence
EVQLVESGGGLVQPGGSLRLSCAVSGFALSNHGMSWVRRAPGKGLEWVSGIVYSGSTYYAASVKGRFTISRDNSRNTLYLQMNSLRPEDTAIYYCSAHGGESDVWGQGTTVTVSSASGGGGSGGRASGGGGSDIQLTQSPSSLSASVGDRVTITCRASQSISSYLNWYQQKPGKAPKLLIYAASSLQSGVPSRFSGSGSGTDFTLTISSLQPEDFATYYCQQSYSTPYTFGQGTKVEIK

SEQ ID NO: 3913 - protein, 241 aa, Artificial Sequence
  Description of Artificial Sequence: Synthetic scFv sequence
EVQLVESGGGLVQPGGSLRLSCAVSGFALSNHGMSWVRRAPGKGLEWVSGIVYSGSTYYAASVKGRFTISRDNSRNTLYLQMNSLRPEDTAIYYCSAHGGESDVWGQGTTVTVSSASGGGGSGGRASGGGGSEIVLTQSPGTLSLSPGERATLSCRASQSIGSSSLAWYQQKPGQAPRLLMYGASSRASGIPDRFSGSGSGTDFTLTISRLEPEDFAVYYCQQYAGSPPFTFGQGTKVEIK

SEQ ID NO: 3914 - protein, 238 aa, Artificial Sequence
  Description of Artificial Sequence: Synthetic scFv sequence
EVQLVESGGGLVQPGGSLRLSCAVSGFALSNHGMSWVRRAPGKGLEWVSGIVYSGSTYYAASVKRFTISRDNSRNTLYLQMNSLRPEDTAIYYCSAHGGESDVWGQGTTVTVSSASGGGGSGGRASGGGGSDIQLTQSPSSLSASVGDRVTITCRASQSISSYLNWYQQKPGKAPKLLIYAASSLQSGVPSRFSGSGSGTDFTLTISSLQPEDFATYYCQQSYSTPYTFGQGTKVEIK

SEQ ID NO: 3915 - protein, 248 aa, Artificial Sequence
  Description of Artificial Sequence: Synthetic scFv sequence
EVQLVETGGGLVQPGGSLRLSCAASGFTFSSYAMSWVRQAPGKGLEWVSAISGSGGSTYYADSVKGRFTISRDNSKNTLYLQMNTLKAEDTAVYYCARATYKRELRYYYGMDVWGQGTTVTVSSGGGGSGGGGSGGGGSEIVLTQSPSTLSLSPGESATLSCRASQSVSTTFLAWYQQKPGQAPRLLIYGSSNRATGIPDRFSGSGSGTDFTLTIRRLEFEDFAVYYCQQYHSSPSWTFGQGTKVEIK

SEQ ID NO: 3916 - protein, 248 aa, Artificial Sequence
  Description of Artificial Sequence: Synthetic scFv sequence
EVQLVETGGGLVQPGGSLRLSCAASGFTFSSYAMSWVRQAPGKGLEWVSAISGSGGSTYYADSVKGRFTMSRENDKNSVFLQMNSLRVEDTGVYYCARANYKRELRYYYGMDVWGQGTMVTVSSGGGGSGGGGSGGGGSEIVMTQSPGTLSLSPGESATLSCRASQRVASNYLAWYQHKPGQAPSLLISGASSRATGVPDRFSGSGSGTDFTLAISRLEPEDSAVYYCQHYDSSPSWTFGQGTKVEIK

SEQ ID NO: 3917 - protein, 241 aa, Artificial Sequence
  Description of Artificial Sequence: Synthetic scFv sequence
EVQLVETGGGLVQPGGSLRLSCAASGITFSRYPMSWVRQAPGKGLEWVSGISDSGVSTYYADSAKGRFTISRDNSKNTLFLQMSSLRDEDTAVYYCVTRAGSEASDIWGQGTMVTVSSGGGGSGGGGSGGGGSEIVLTQSPATLSLSPGERATLSCRASQSVSNSLAWYQQKPGQAPRLLIYDASSRATGIPDRFSGSGSGTDFTLTISRLEPEDFAIYYCQQFGTSSGLTFGGGTKLEIK

SEQ ID NO: 3918 - protein, 239 aa, Artificial Sequence
  Description of Artificial Sequence: Synthetic scFv sequence
EVQLVETGGGLVQPGGSLRLSCAVSGFALSNHGMSWVRRAPGKGLEWVSGIVYSGSTYYAASVKGRFTISRDNSRNTLYLQMNSLRPEDTAIYYCSAHGGESDVWGQGTTVTVSSASGGGGSGGRASGGGGSEIVMTQSPATLSVSPGERATLSCRASQSVSSKLAWYQQKPGQAPRLLMYGASIRATGIPDRFSGSGSGTEFTLTISSLEPEDFAVYYCQQYGSSSWTFGQGTKVEIK

SEQ ID NO: 3919 - protein, 240 aa, Artificial Sequence
  Description of Artificial Sequence: Synthetic scFv sequence
EVQLVETGGGLVQPGGSLRLSCAVSGFALSNHGMSWVRRAPGKGLEWVSGIVYSGSTYYAASVKGRFTISRDNSRNTLYLQMNSLRPEDTAIYYCSAHGGESDVWGQGTTVTVSSASGGGGSGGRASGGGGSETTLTQSPATLSVSPGERATLSCRASQSVGSNLAWYQQKPGQGPRLLIYGASTRATGIPARFSGSGSGTEFTLTISSLQPEDFAVYYCQQYNDWLPVTFGQGTKVEIK

SEQ ID NO: 3920 - protein, 238 aa, Artificial Sequence
  Description of Artificial Sequence: Synthetic scFv sequence
EVQLVETGGGLVQPGRSLRLSCAASGFTFDDYAMHWVRQAPGKGLEWVSGISWNSGSIGYADSVGRFTISRDNAKNSLYLQMNSLRDEDTAVYYCARVGKAVPDVWGQGTTVTVSSGGGGSGGGGSGGGGSDIVMTQTPSSLSASVGDRVTITCRASQSISSYLNWYQQKPGKAPKLLIYAASSLQSGVPSRFSGSGSGTDFTLTISSLQPEDFATYYCQQSYSTPYSFGQGTRLEIK

SEQ ID NO: 3921 - protein, 239 aa, Artificial Sequence
  Description of Artificial Sequence: Synthetic scFv sequence
EVQLVETGGGLVQPGRSLRLSCAASGFTFDDYAMHWVRQAPGKGLEWVSGISWNSGSIGYADSVKGRFTISRDNAKNSLYLQMNSLRDEDTAVYYCARVGKAVPDVWGQGTTVTVSSGGGGSGGGGSGGGGSDIVMTQTPSSLSASVGDRVTITCRASQSISSYLNWYQQKPGKAPKLLIYAASSLQSGVPSRFSGSGSGTDFTLTISSLQPEDFATYYCQQSYSTPYSFGQGTRLEIK

SEQ ID NO: 3922 - protein, 241 aa, Artificial Sequence
  Description of Artificial Sequence: Synthetic scFv sequence
EVQLVETGGGVVQPGGSLRLSCAVSGFALSNHGMSWVRRAPGKGLEWVSGIVYSGSTYYAASVKGRFTISRDNSRNTLYLQMNSLRPEDTAIYYCSAHGGESDVWGQGTTVTVSSASGGGGSGGRASGGGGSEIVLTQSPGTLSLSPGERATLSCRASQSVGSTNLAWYQQKPGQAPRLLIYDASNRATGIPDRFSGGGSGTDFTLTISRLEPEDFAVYYCQQYGSSPPWTFGQGTKVEIK

SEQ ID NO: 3923 - protein, 239 aa, Artificial Sequence
  Description of Artificial Sequence: Synthetic scFv sequence
QVQLVESGGGLVKPGGSLRLSCAASGFTFSDYYMSWIRQAPGKGLEWVSYISSSGSTIYYADSVKGRFTISRDNAKNSLYLQMNSLRAEDTAVYYCARESGDGMDVWGQGTTVTVSSASGGGGSGGRASGGGGSDIQMTQSPSSLSASVGDRVTITCRASQSISSYLNWYQQKPGKAPKLLIYAASSLQSGVPSRFSGSGSGTDFTLTISSLQPEDFATYYCQQSYTLAFGQGTKVDIK

SEQ ID NO: 3924 - protein, 248 aa, Artificial Sequence
  Description of Artificial Sequence: Synthetic scFv sequence
QVQLVESGGGLVQPGGSLRLSCAASGFTFSSYAMSWVRQAPGKGLEWVSAISGSGGSTYYADSVKGRFTISRDNAKNSLYLQMNSLRAEDTAIYYCARATYKRELRYYYGMDVWGQGTMVTVSSGGGGSGGGGSGGGGSEIVMTQSPGTVSLSPGERATLSCRASQSVSSSFLAWYQQKPGQAPRLLIYGASSRATGIPDRFSGSGSGTDFTLTISRLEFEDSAVYYCQQYHSSPSWTFGQGTRLEIK

SEQ ID NO: 3925 - protein, 251 aa, Artificial Sequence
  Description of Artificial Sequence: Synthetic scFv sequence
QVQLVESGGGLVQPGGSLRLSCAASGFTFSSYAMSWVRQAPGKGLEWVSAISGSGGSTYYADSVKGRFTISRDNSKNTLYLQMNSLRAEDTAVYYCAKVGYDSSGYYRDYYGMDVWGQGTTVTVSSGGGGSGGGGSGGGGSEIVLTQSPGTLSLSPGERATLSCRASQSVSSSYLAWYQQKPGQAPRLLIYGTSSRATGISDRFSGSGSGTDFTLTISRLEPEDFAVYYCQHYGNSPPKFTFGPGTKLEIK

SEQ ID NO: 3926 - protein, 250 aa, Artificial Sequence
  Description of Artificial Sequence: Synthetic scFv sequence
QVQLVESGGGLVQPGGSLRLSCAASGFTFSSYAMSWVRQAPGKGLEWVSAISGSGGSTYYADSVKGRFTISRDNSKNTLYLQMNSLRAEDTAVYYCAKVGYDSSGYYRDYYGMDVWGQGTTVTVSSGGGGSGGGGSGGGGSEIVLTQSPGTLSLSPGERATLSCRASQSVSSSYLAWYQQKPGQAPRLLIYTSSRATGISDRFSGSGSGTDFTLTISRLEPEDFAVYYCQHYGNSPPKFTFGPGTKLEIK

SEQ ID NO: 3927 - protein, 239 aa, Artificial Sequence
  Description of Artificial Sequence: Synthetic scFv sequence
QVQLVESGGGLVQPGGSLRLSCAVSGFALSNHGMSWVRRAPGKGLEWVSGIVYSGSTYYAASVKGRFTISRDNSRNTLYLQMNSLRPEDTAIYYCSAHGGESDVWGQGTTVTVSSASGGGGSGGRASGGGGSDIRLTQSPSPLSASVGDRVTITCQASEDINKFLNWYHQTPGKAPKLLIYDASTLQTGVPSRFSGSGSGTDFTLTINSLQPEDIGTYYCQQYESLPLTFGGGTKVEIK

SEQ ID NO: 3928 - protein, 247 aa, Artificial Sequence
  Description of Artificial Sequence: Synthetic scFv sequence
QVQLVQSGAEVKKPGASVKVSCKASGYTFSNYGITWVRQAPGQGLEWMGWISAYNGNTNYAQKFQGRVTMTRNTSISTAYMELSSLRSEDTAVYYCARGPYYYYMDVWGKGTMVTVSSASGGGGSGGRASGGGGSEIVMTQSPLSLPVTPGEPASISCRSSQSLLYSNGYNYVDWYLQKPGQSPQLLIYLGSNRASGVPDRFSGSGSGTDFKLQISRVEAEDVGIYYCMQGRQFPYSFGQGTKVEIK

SEQ ID NO: 3929 - protein, 241 aa, Artificial Sequence
  Description of Artificial Sequence: Synthetic scFv sequence
QVQLVQSGAEVKKPGASVKVSCKPSGYTVTSHYIHWVRRAPGQGLEWMGMINPSGGVTAYSQTLQGRVTMTSDTSSSTVYMELSSLRSEDTAMYYCAREGSGSGWYFDFWGRGTLVTVSSGGGGSGGGGSGGGGSSYVLTQPPSVSVSPGQTASITCSGDGLSKKYVSWYQQKAGQSPVVLISRDKERPSGIPDRFSGSNSADTATLTISGTQAMDEADYYCQAWDDTTVVFGGGTKLTVL

SEQ ID NO: 3930 - protein, 249 aa, Artificial Sequence
  Description of Artificial Sequence: Synthetic scFv sequence
QVQLVQSGAEVKKPGSSVKVSCKASGGTFSNYWMHWVRQAPGQGLEWMGATYRGHSDTYYNQKFKGRVTITADKSTSTAYMELSSLRSEDTAVYYCARGAIYNGYDVLDNWGQGTLVTVSSGGGGSGGGGSGGGGSGGGGSDIQMTQSPSSLSASVGDRVTITCSASQDISNYLNWYQQKPGKAPKLLIYYTSNLHSGVPSRFSGSGSGTDFTLTISSLQPEDFATYYCQQYRKLPWTFGQGTKLEIKR

SEQ ID NO: 3931 - protein, 248 aa, Artificial Sequence
  Description of Artificial Sequence: Synthetic scFv sequence
QVQLVQSGAEVRKTGASVKVSCKASGYIFDNFGINWVRQAPGQGLEWMGWINPKNNNTNYAQKFQGRVTITADESTNTAYMEVSSLRSEDTAVYYCARGPYYYQSYMDVWGQGTMVTVSSASGGGGSGGRASGGGGSDIVMTQTPLSLPVTPGEPASISCRSSQSLLHSNGYNYLNWYLQKPGQSPQLLIYGSKRASGVPDRFSGSGSGTDFTLHITRVGAEDVGVYYCMQALQTPYTFGQGTKLEIK

SEQ ID NO: 3932 - protein, 244 aa, Artificial Sequence
  Description of Artificial Sequence: Synthetic scFv sequence
VNLRESGPALVKPTQTLTLTCTFSGFSLRTSGMCVSWIRQPPGKALEWLARIDWDEDKFYSTSLKTRLTISKDTSDNQVVLRMTNMDPADTATYYCARSGAGGTSATAFDIWGPGTMVTVSSGGGGSGGGGSGGGGSDIQMTQSPSSLSASVGDRVTITCRASQDIYNNLAWFQLKPGSAPRSLMYAANKSQSGVPSRFSGSASGTDFTLTISSLQPEDFATYYCQHYYRFPYSFGQGTKLEIK

SEQ ID NO: 3933 - DNA, 747 bp, Artificial Sequence
  Description of Artificial Sequence: Synthetic scFv sequence
caagtccaactcgtccagtccggcgcagaagtcagaaaaaccggtgctagcgtgaaagtgtcctgcaaggcctccggctacattttcgataacttcggaatcaactgggtcagacaggccccgggccaggggctggaatggatgggatggatcaaccccaagaacaacaacaccaactacgcacagaagttccagggccgcgtgactatcaccgccgatgaatcgaccaataccgcctacatggaggtgtcctccctgcggtcggaggacactgccgtgtattactgcgcgaggggcccatactactaccaaagctacatggacgtctggggacagggaaccatggtgaccgtgtcatccgcctccggtggtggaggctccggggggcgggcttcaggaggcggaggaagcgatattgtgatgacccagactccgcttagcctgcccgtgactcctggagaaccggcctccatttcctgccggtcctcgcaatcactcctgcattccaacggttacaactacctgaattggtacctccagaagcctggccagtcgccccagttgctgatctatctgggctcgaagcgcgcctccggggtgcctgaccggtttagcggatctgggagcggcacggacttcactctccacatcacccgcgtgggagcggaggacgtgggagtgtactactgtatgcaggcgctgcagactccgtacacattcggacagggcaccaagctggagatcaag

SEQ ID NO: 3934 - DNA, 738 bp, Artificial Sequence
  Description of Artificial Sequence: Synthetic scFv sequence
caagtgcaacttcaagaatcaggcggaggactcgtgcagcccggaggatcattgcggctctcgtgcgccgcctcgggcttcaccttctcgagcgacgccatgacctgggtccgccaggccccggggaaggggctggaatgggtgtctgtgatttccggctccgggggaactacgtactacgccgattccgtgaaaggtcgcttcactatctcccgggacaacagcaagaacaccctttatctgcaaatgaattccctccgcgccgaggacaccgccgtgtactactgcgccaagctggactcctcgggctactactatgcccggggtccgagatactggggacagggaaccctcgtgaccgtgtcctccgcgtccggcggaggagggtcgggagggcgggcctccggcggcggcggttcggacatccagctgacccagtccccatcctcactgagcgcaagcgtgggcgacagagtcaccattacatgcagggcgtcccagagcatcagctcctacctgaactggtaccaacagaagcctggaaaggctcctaagctgttgatctacggggcttcgaccctggcatccggggtgcccgcgaggtttagcggaagcggtagcggcactcacttcactctgaccattaacagcctccagtccgaggattcagccacttactactgtcagcagtcctacaagcgggccagcttcggacagggcactaaggtcgagatcaag

SEQ ID NO: 3935 - DNA, 741 bp, Artificial Sequence
  Description of Artificial Sequence: Synthetic scFv sequence
caagtccaactggtccagagcggtgcagaagtgaagaagcccggagcgagcgtgaaagtgtcctgcaaggcttccgggtacaccttctccaactacggcatcacttgggtgcgccaggccccgggacagggcctggaatggatggggtggatttccgcgtacaacggcaatacgaactacgctcagaagttccagggtagagtgaccatgactaggaacacctccatttccaccgcctacatggaactgtcctccctgcggagcgaggacaccgccgtgtactattgcgcccggggaccatactactactacatggatgtctgggggaaggggactatggtcaccgtgtcatccgcctcgggaggcggcggatcaggaggacgcgcctctggtggtggaggatcggagatcgtgatgacccagagccctctctccttgcccgtgactcctggggagcccgcatccatttcatgccggagctcccagtcacttctctactccaacggctataactacgtggattggtacctccaaaagccgggccagagcccgcagctgctgatctacctgggctcgaacagggccagcggagtgcctgaccggttctccgggtcgggaagcgggaccgacttcaagctgcaaatctcgagagtggaggccgaggacgtgggaatctactactgtatgcagggccgccagtttccgtactcgttcggacagggcaccaaagtggaaatcaag

SEQ ID NO: 3936 - protein, 246 aa, Artificial Sequence
  Description of Artificial Sequence: Synthetic scFv sequence
QVQLVQSGAEVKKPGASVKVSCKASGYTFSNYGITWVRQAPGQGLEWMGWISAYNGNTNYAQKFQGRVTMTRNTSISTAYMELSSLRSEDTAVYYCARGPYYYYMDVWGKGTMVTVSSASGGGGSGGRASGGGGSEIVMTQSPLSLPVTPGEPASISCRSSQSLLYSNGYNYVDWYLQKPGQSPQLLIYLGSNRASGVPDRFSGSGSGTDFKLQISRVEAEDVGIYYCMQGRQFPYSFGQGTKVEI

SEQ ID NO: 3937 - DNA, 738 bp, Artificial Sequence
  Description of Artificial Sequence: Synthetic scFv sequence
caagtgcaactcgtggaatctggtggaggactcgtgcaacccggaagatcgcttagactgtcgtgtgccgccagcgggttcactttctcgaactacgcgatgtcctgggtccgccaggcacccggaaagggactcggttgggtgtccggcatttcccggtccggcgaaaatacctactacgccgactccgtgaagggccgcttcaccatctcaagggacaacagcaaaaacaccctgtacttgcaaatgaactccctgcgggatgaagatacagccgtgtactattgcgcccggtcgcctgcccattactacggcggaatggacgtctggggacagggaaccactgtgactgtcagcagcgcgtcgggtggcggcggctcagggggtcgggcctccggggggggagggtccgacatcgtgctgacccagtccccgggaaccctgagcctgagcccgggagagcgcgcgaccctgtcatgccgggcatcccagagcattagctcctcctttctcgcctggtatcagcagaagcccggacaggccccgaggctgctgatctacggcgctagcagaagggctaccggaatcccagaccggttctccggctccggttccgggaccgatttcacccttactatctcgcgcctggaacctgaggactccgccgtctactactgccagcagtaccactcatccccgtcgtggacgttcggacagggcaccaagctggagattaag

SEQ ID NO: 3938 - DNA, 714 bp, Artificial Sequence
  Description of Artificial Sequence: Synthetic scFv sequence
gaagtgcaattgctcgaaactggaggaggtctggtgcaacctggaggatcacttcgcctgtcctgcgccgtgtcgggctttgccctgtccaaccatggaatgagctgggtccgccgcgcgccggggaagggcctcgaatgggtgtccggcatcgtctactccggctccacctactacgccgcgtccgtgaagggccggttcacgatttcacgggacaactcgcggaacaccctgtacctccaaatgaattcccttcggccggaggatactgccatctactactgctccgcccacggtggcgaatccgacgtctggggccagggaaccaccgtgaccgtgtccagcgcgtccgggggaggaggaagcgggggtagagcatcgggtggaggcggatcagagatcgtgctgacccagtcccccgccaccttgagcgtgtcaccaggagagtccgccaccctgtcatgccgcgccagccagtccgtgtcctccaacctggcttggtaccagcagaagccggggcaggcccctagactcctgatctatggggcgtcgacccgggcatctggaattcccgataggttcagcggatcgggctcgggcactgacttcactctgaccatctcctcgctgcaagccgaggacgtggctgtgtactactgtcagcagtacggaagctccctgactttcggtggcgggaccaaagtcgagattaag

SEQ ID NO: 3939 - DNA, 732 bp, Artificial Sequence
  Description of Artificial Sequence: Synthetic scFv sequence
caagtgcaactcgtcgaatccggtggaggtctggtccaacctggtagaagcctgagactgtcgtgtgcggccagcggattcacctttgatgactatgctatgcactgggtgcggcaggccccaggaaagggcctggaatgggtgtcgggaattagctggaactccgggtccattggctacgccgactccgtgaagggccgcttcaccatctcccgcgacaacgcaaagaactccctgtacttgcaaatgaactcgctcagggctgaggataccgcgctgtactactgctccgtgcattccttcctggcctactggggacagggaactctggtcaccgtgtcgagcgcctccggcggcgggggctcgggtggacgggcctcgggcggaggggggtccgacatcgtgatgacccagaccccgctgagcttgcccgtgactcccggagagcctgcatccatctcctgccggtcatcccagtcccttctccactccaacggatacaactacctcgactggtacctccagaagccgggacagagccctcagcttctgatctacctggggtcaaatagagcctcaggagtgccggatcggttcagcggatctggttcgggaactgatttcactctgaagatttcccgcgtggaagccgaggacgtgggcgtctactactgtatgcaggcgctgcagaccccctataccttcggccaagggacgaaagtggagatcaag

SEQ ID NO: 3940 - DNA, 717 bp, Artificial Sequence
  Description of Artificial Sequence: Synthetic scFv sequence
gaagtgcaattggtggaaactggaggaggacttgtgcaacctggaggatcattgagactgagctgcgcagtgtcgggattcgccctgagcaaccatggaatgtcctgggtcagaagggcccctggaaaaggcctcgaatgggtgtcagggatcgtgtactccggttccacttactacgccgcctccgtgaaggggcgcttcactatctcacgggataactcccgcaataccctgtacctccaaatgaacagcctgcggccggaggataccgccatctactactgttccgcccacggtggagagtctgacgtctggggccagggaactaccgtgaccgtgtcctccgcgtccggcggtggagggagcggcggccgcgccagcggcggcggaggctccgagatcgtgatgacccagagccccgctactctgtcggtgtcgcccggagaaagggcgaccctgtcctgccgggcgtcgcagtccgtgagcagcaagctggcttggtaccagcagaagccgggccaggcaccacgcctgcttatgtacggtgcctccattcgggccaccggaatcccggaccggttctcggggtcggggtccggtaccgagttcacactgaccatttcctcgctcgagcccgaggactttgccgtctattactgccagcagtacggctcctcctcatggacgttcggccaggggaccaaggtcgaaatcaag

SEQ ID NO: 3941 - DNA, 723 bp, Artificial Sequence
  Description of Artificial Sequence: Synthetic scFv sequence
gaagtgcaattggtggagactggaggaggagtggtgcaacctggaggaagcctgagactgtcatgcgcggtgtcgggcttcgccctctccaaccacggaatgtcctgggtccgccgggcccctgggaaaggacttgaatgggtgtccggcatcgtgtactcgggttccacctactacgcggcctcagtgaagggccggtttactattagccgcgacaactccagaaacacactgtacctccaaatgaactcgctgcggccggaagataccgctatctactactgctccgcccatgggggagagtcggacgtctggggacagggcaccactgtcactgtgtccagcgcttccggcggtggtggaagcgggggacgggcctcaggaggcggtggcagcgagattgtgctgacccagtcccccgggaccctgagcctgtccccgggagaaagggccaccctctcctgtcgggcatcccagtccgtggggtctactaaccttgcatggtaccagcagaagcccggccaggcccctcgcctgctgatctacgacgcgtccaatagagccaccggcatcccggatcgcttcagcggaggcggatcgggcaccgacttcaccctcaccatttcaaggctggaaccggaggacttcgccgtgtactactgccagcagtatggttcgtccccaccctggacgttcggccaggggactaaggtcgagatcaag

SEQ ID NO: 3942 - DNA, 717 bp, Artificial Sequence
  Description of Artificial Sequence: Synthetic scFv sequence
caagtgcaactcgtggaatctggtggaggactcgtgaaacctggaggatcattgagactgtcatgcgcggcctcgggattcacgttctccgattactacatgagctggattcgccaggctccggggaagggactggaatgggtgtcctacatttcctcatccggctccaccatctactacgcggactccgtgaaggggagattcaccattagccgcgataacgccaagaacagcctgtaccttcagatgaactccctgcgggctgaagatactgccgtctactactgcgcaagggagagcggagatgggatggacgtctggggacagggtaccactgtgaccgtgtcgtcggcctccggcggagggggttcgggtggaagggccagcggcggcggaggcagcgacatccagatgacccagtccccctcatcgctgtccgcctccgtgggcgaccgcgtcaccatcacatgccgggcctcacagtcgatctcctcctacctcaattggtatcagcagaagcccggaaaggcccctaagcttctgatctacgcagcgtcctccctgcaatccggggtcccatctcggttctccggctcgggcagcggtaccgacttcactctgaccatctcgagcctgcagccggaggacttcgccacttactactgtcagcaaagctacaccctcgcgtttggccagggcaccaaagtggacatcaag

SEQ ID NO: 3943 - DNA, 738 bp, Artificial Sequence
  Description of Artificial Sequence: Synthetic scFv sequence
caagtgcaactggtgcaaagcggaggaggattggtcaaacccggaggaagcctgagactgtcatgcgcggcctctggattcaccttctccgattactacatgtcatggatcagacaggccccggggaagggcctcgaatgggtgtcctacatctcgtcctccgggaacaccatctactacgccgacagcgtgaagggccgctttaccatttcccgcgacaacgcaaagaactcgctgtaccttcagatgaattccctgcgggctgaagataccgcggtgtactattgcgcccggtccactatggtccgggaggactactggggacagggcacactcgtgaccgtgtccagcgcgagcgggggtggaggcagcggtggacgcgcctccggcggcggcggttcagacatcgtgctgactcagtcgcccctgtcgctgccggtcaccctgggccaaccggcctcaattagctgcaagtcctcggagagcctggtgcacaactcaggaaagacttacctgaactggttccatcagcggcctggacagtccccacggaggctcatctatgaagtgtccaacagggattcgggggtgcccgaccgcttcactggctccgggtccggcaccgacttcaccttgaaaatctccagagtggaagccgaggacgtgggcgtgtactactgtatgcagggtacccactggcctggaacctttggacaaggaactaagctcgagattaag

SEQ ID NO: 3944 - DNA, 729 bp, Artificial Sequence
  Description of Artificial Sequence: Synthetic scFv sequence
gaagtgcaattgttggaatctggaggaggacttgtgcagcctggaggatcactgagactttcgtgtgcggtgtcaggcttcgccctgagcaaccacggcatgagctgggtgcggagagccccggggaagggtctggaatgggtgtccgggatcgtctactccggttcaacttactacgccgcaagcgtgaagggtcgcttcaccatttcccgcgataactcccggaacaccctgtacctccaaatgaactccctgcggcccgaggacaccgccatctactactgttccgcgcatggaggagagtccgatgtctggggacagggcactaccgtgaccgtgtcgagcgcctcggggggaggaggctccggcggtcgcgcctccggggggggtggcagcgacattgtgatgacgcagactccactctcgctgtccgtgaccccgggacagcccgcgtccatctcgtgcaagagctcccagagcctgctgaggaacgacggaaagactcctctgtattggtacctccagaaggctggacagcccccgcaactgctcatctacgaagtgtcaaatcgcttctccggggtgccggatcggttttccggctcgggatcgggcaccgacttcaccctgaaaatctccagggtcgaggccgaggacgtgggagcctactactgcatgcaaaacatccagttcccttccttcggcggcggcacaaagctggagattaag

SEQ ID NO: 3945 - DNA, 717 bp, Artificial Sequence
  Description of Artificial Sequence: Synthetic scFv sequence
caagtgcaactcgtggaatctggtggaggactcgtgcaacccggtggaagccttaggctgtcgtgcgccgtcagcgggtttgctctgagcaaccatggaatgtcctgggtccgccgggcaccgggaaaagggctggaatgggtgtccggcatcgtgtacagcgggtcaacctattacgccgcgtccgtgaagggcagattcactatctcaagagacaacagccggaacaccctgtacttgcaaatgaattccctgcgccccgaggacaccgccatctactactgctccgcccacggaggagagtcggacgtgtggggccagggaacgactgtgactgtgtccagcgcatcaggagggggtggttcgggcggccgggcctcggggggaggaggttccgacattcggctgacccagtccccgtccccactgtcggcctccgtcggcgaccgcgtgaccatcacttgtcaggcgtccgaggacattaacaagttcctgaactggtaccaccagacccctggaaaggcccccaagctgctgatctacgatgcctcgacccttcaaactggagtgcctagccggttctccgggtccggctccggcactgatttcactctgaccatcaactcattgcagccggaagatatcgggacctactattgccagcagtacgaatccctcccgctcacattcggcgggggaaccaaggtcgagattaag

SEQ ID NO: 3946 - DNA, 720 bp, Artificial Sequence
  Description of Artificial Sequence: Synthetic scFv sequence
gaagtgcaattggtggaaactggaggaggacttgtgcaacctggaggatcattgcggctctcatgcgctgtctccggcttcgccctgtcaaatcacgggatgtcgtgggtcagacgggccccgggaaagggtctggaatgggtgtcggggattgtgtacagcggctccacctactacgccgcttcggtcaagggccgcttcactatttcacgggacaacagccgcaacaccctctatctgcaaatgaactctctccgcccggaggataccgccatctactactgctccgcacacggcggcgaatccgacgtgtggggacagggaaccactgtcaccgtgtcgtccgcatccggtggcggaggatcgggtggccgggcctccgggggcggcggcagcgagactaccctgacccagtcccctgccactctgtccgtgagcccgggagagagagccacccttagctgccgggccagccagagcgtgggctccaacctggcctggtaccagcagaagccaggacagggtcccaggctgctgatctacggagcctccactcgcgcgaccggcatccccgcgaggttctccgggtcgggttccgggaccgagttcaccctgaccatctcctccctccaaccggaggacttcgcggtgtactactgtcagcagtacaacgattggctgcccgtgacatttggacaggggacgaaggtggaaatcaaa

SEQ ID NO: 3947 - DNA, 723 bp, Artificial Sequence
  Description of Artificial Sequence: Synthetic scFv sequence
gaagtgcaattggtggaatctggtggaggacttgtgcaacctggaggatcactgagactgtcatgcgcggtgtccggttttgccctgagcaatcatgggatgtcgtgggtccggcgcgcccccggaaagggtctggaatgggtgtcgggtatcgtctactccgggagcacttactacgccgcgagcgtgaagggccgcttcaccatttcccgcgataactcccgcaacaccctgtacttgcaaatgaactcgctccggcctgaggacactgccatctactactgctccgcacacggaggagaatccgacgtgtggggccagggaactaccgtgaccgtcagcagcgcctccggcggcgggggctcaggcggacgggctagcggcggcggtggctccgagatcgtgctgacccagtcgcctggcactctctcgctgagccccggggaaagggcaaccctgtcctgtcgggccagccagtccattggatcatcctccctcgcctggtatcagcagaaaccgggacaggctccgcggctgcttatgtatggggccagctcaagagcctccggcattcccgaccggttctccgggtccggttccggcaccgatttcaccctgactatctcgaggctggagccagaggacttcgccgtgtactactgccagcagtacgcggggtccccgccgttcacgttcggacagggaaccaaggtcgagatcaag

SEQ ID NO: 3948 - DNA, 729 bp, Artificial Sequence
  Description of Artificial Sequence: Synthetic scFv sequence
caagtgcagcttcaggaaagcggaccgggcctggtcaagccatccgaaactctctccctgacttgcactgtgtctggcggttccatctcatcgtcgtactactactggggctggattaggcagccgcccggaaagggactggagtggatcggaagcatctactattccggctcggcgtactacaaccctagcctcaagtcgagagtgaccatctccgtggatacctccaagaaccagttttccctgcgcctgagctccgtgaccgccgctgacaccgccgtgtactactgtgctcggcattggcaggaatggcccgatgccttcgacatttggggccagggcactatggtcactgtgtcatccgggggtggaggcagcgggggaggagggtccggggggggaggttcagagacaaccttgacccagtcacccgcattcatgtccgccactccgggagacaaggtcatcatctcgtgcaaagcgtcccaggatatcgacgatgccatgaattggtaccagcagaagcctggcgaagcgccgctgttcattatccaatccgcaacctcgcccgtgcctggaatcccaccgcggttcagcggcagcggtttcggaaccgacttttccctgaccattaacaacattgagtccgaggacgccgcctactacttctgcctgcaacacgacaacttccctctcacgttcggccagggaaccaagctggaaatcaag

SEQ ID NO: 3949 - DNA, 735 bp, Artificial Sequence
  Description of Artificial Sequence: Synthetic scFv sequence
caagtcaatctgcgcgaatccggccccgccttggtcaagcctacccagaccctcactctgacctgtactttctccggcttctccctgcggacttccgggatgtgcgtgtcctggatcagacagcctccgggaaaggccctggagtggctcgctcgcattgactgggatgaggacaagttctactccacctcactcaagaccaggctgaccatcagcaaagatacctctgacaaccaagtggtgctccgcatgaccaacatggacccagccgacactgccacttactactgcgcgaggagcggagcgggcggaacctccgccaccgccttcgatatttggggcccgggtaccatggtcaccgtgtcaagcggaggaggggggtccgggggcggcggttccgggggaggcggatcggacattcagatgactcagtcaccatcgtccctgagcgctagcgtgggcgacagagtgacaatcacttgccgggcatcccaggacatctataacaaccttgcgtggttccagctgaagcctggttccgcaccgcggtcacttatgtacgccgccaacaagagccagtcgggagtgccgtcccggttttccggttcggcctcgggaactgacttcaccctgacgatctccagcctgcaacccgaggatttcgccacctactactgccagcactactaccgctttccctactcgttcggacagggaaccaagctggaaatcaag

SEQ ID NO: 3950 - protein, 245 aa, Artificial Sequence
  Description of Artificial Sequence: Synthetic scFv sequence
QVNLRESGPALVKPTQTLTLTCTFSGFSLRTSGMCVSWIRQPPGKALEWLARIDWDEDKFYSTSLKTRLTISKDTSDNQVVLRMTNMDPADTATYYCARSGAGGTSATAFDIWGPGTMVTVSSGGGGSGGGGSGGGGSDIQMTQSPSSLSASVGDRVTITCRASQDIYNNLAWFQLKPGSAPRSLMYAANKSQSGVPSRFSGSASGTDFTLTISSLQPEDFATYYCQHYYRFPYSFGQGTKLEIK

SEQ ID NO: 3951 - DNA, 738 bp, Artificial Sequence
  Description of Artificial Sequence: Synthetic scFv sequence
gaagtgcagcttgtcgaatccggggggggactggtcaagccgggcggatcactgagactgtcctgcgccgcgagcggcttcacgttctcctcctactccatgaactgggtccgccaagcccccgggaagggactggaatgggtgtcctctatctcctcgtcgtcgtcctacatctactacgccgactccgtgaagggaagattcaccatttcccgcgacaacgcaaagaactcactgtacttgcaaatgaactcactccgggccgaagatactgctgtgtactattgcgccaagactattgccgccgtctacgctttcgacatctggggccagggaaccaccgtgactgtgtcgtccggtggtggtggctcgggcggaggaggaagcggcggcggggggtccgagattgtgctgacccagtcgccactgagcctccctgtgacccccgaggaacccgccagcatcagctgccggtccagccagtccctgctccactccaacggatacaattacctcgattggtaccttcagaagcctggacaaagcccgcagctgctcatctacttgggatcaaaccgcgcgtcaggagtgcctgaccggttctccggctcgggcagcggtaccgatttcaccctgaaaatctccagggtggaggcagaggacgtgggagtgtattactgtatgcaggcgctgcagactccgtacacatttgggcagggcaccaagctggagatcaag

SEQ ID NO: 3952 - DNA, 720 bp, Artificial Sequence
  Description of Artificial Sequence: Synthetic scFv sequence
gaagtccagctcgtggagtccggcggaggccttgtgaagcctggaggttcgctgagactgtcctgcgccgcctccggcttcaccttctccgactactacatgtcctggatcagacaggccccgggaaagggcctggaatgggtgtcctacatctcgtcatcgggcagcactatctactacgcggactcagtgaaggggcggttcaccatttcccgggataacgcgaagaactcgctgtatctgcaaatgaactcactgagggccgaggacaccgccgtgtactactgcgcccgcgatctccgcggggcatttgacatctggggacagggaaccatggtcacagtgtccagcggagggggaggatcgggtggcggaggttccgggggtggaggctcctcctacgtgctgactcagagcccaagcgtcagcgctgcgcccggttacacggcaaccatctcctgtggcggaaacaacattgggaccaagtctgtgcactggtatcagcagaagccgggccaagctcccctgttggtgatccgcgatgactccgtgcggcctagcaaaattccgggacggttctccggctccaacagcggcaatatggccactctcaccatctcgggagtgcaggccggagatgaagccgacttctactgccaagtctgggactcagactccgagcatgtggtgttcgggggcggaaccaagctgactgtgctc

SEQ ID NO: 3953 - DNA, 723 bp, Artificial Sequence
  Description of Artificial Sequence: Synthetic scFv sequence
caagtgcagctggtgcagagcggggccgaagtcaagaagccgggagcctccgtgaaagtgtcctgcaagccttcgggatacaccgtgacctcccactacattcattgggtccgccgcgcccccggccaaggactcgagtggatgggcatgatcaaccctagcggcggagtgaccgcgtacagccagacgctgcagggacgcgtgactatgacctcggatacctcctcctccaccgtctatatggaactgtccagcctgcggtccgaggataccgccatgtactactgcgcccgggaaggatcaggctccgggtggtatttcgacttctggggaagaggcaccctcgtgactgtgtcatctgggggagggggttccggtggtggcggatcgggaggaggcggttcatcctacgtgctgacccagccaccctccgtgtccgtgagccccggccagactgcatcgattacatgtagcggcgacggcctctccaagaaatacgtgtcgtggtaccagcagaaggccggacagagcccggtggtgctgatctcaagagataaggagcggcctagcggaatcccggacaggttctcgggttccaactccgcggacactgctactctgaccatctcggggacccaggctatggacgaagccgattactactgccaagcctgggacgacactactgtcgtgtttggagggggcaccaagttgaccgtcctt

SEQ ID NO: 3954 - DNA, 735 bp, Artificial Sequence
  Description of Artificial Sequence: Synthetic scFv sequence
caagtgcagcttcaggagagcggcccgggactcgtgaagccgtcccagaccctgtccctgacttgcaccgtgtcgggaggaagcatctcgagcggaggctactattggtcgtggattcggcagcaccctggaaagggcctggaatggatcggctacatctactactccggctcgacctactacaacccatcgctgaagtccagagtgacaatctcagtggacacgtccaagaatcagttcagcctgaagctctcttccgtgactgcggccgacaccgccgtgtactactgcgcacgcgctggaattgccgcccggctgaggggtgccttcgacatttggggacagggcaccatggtcaccgtgtcctccggcggcggaggttccgggggtggaggctcaggaggaggggggtccgacatcgtcatgactcagtcgccctcaagcgtcagcgcgtccgtcggggacagagtgatcatcacctgtcgggcgtcccagggaattcgcaactggctggcctggtatcagcagaagcccggaaaggcccccaacctgttgatctacgccgcctcaaacctccaatccggggtgccgagccgcttcagcggctccggttcgggtgccgatttcactctgaccatctcctccctgcaacctgaagatgtggctacctactactgccaaaagtacaactccgcaccttttactttcggaccggggaccaaagtggacattaag

SEQ ID NO: 3955 - DNA, 759 bp, Artificial Sequence
  Description of Artificial Sequence: Synthetic scFv sequence
caagtgcagctggtccagtcgggcgccgaggtcaagaagcccgggagctctgtgaaagtgtcctgcaaggcctccgggggcacctttagctcctacgccatctcctgggtccgccaagcaccgggtcaaggcctggagtggatggggggaattatccctatcttcggcactgccaactacgcccagaagttccagggacgcgtgaccattaccgcggacgaatccacctccaccgcttatatggagctgtccagcttgcgctcggaagataccgccgtgtactactgcgcccggaggggtggataccagctgctgagatgggacgtgggcctcctgcggtcggcgttcgacatctggggccagggcactatggtcactgtgtccagcggaggaggcggatcgggaggcggcggatcagggggaggcggttccagctacgtgcttactcaacccccttcggtgtccgtggccccgggacagaccgccagaatcacttgcggaggaaacaacattgggtccaagagcgtgcattggtaccagcagaagccaggacaggcccctgtgctggtgctctacgggaagaacaatcggcccagcggagtgccggacaggttctcgggttcacgctccggtacaaccgcttcactgactatcaccggggcccaggcagaggatgaagcggactactactgttcctcccgggattcatccggcgaccacctccgggtgttcggaaccggaacgaaggtcaccgtgctg

SEQ ID NO: 3956 - DNA, 744 bp, Artificial Sequence
  Description of Artificial Sequence: Synthetic scFv sequence
gaagtgcagctccaacagtcaggaccggggctcgtgaagccatcccagaccctgtccctgacttgtgccatctcgggagatagcgtgtcatcgaactccgccgcctggaactggattcggcagagcccgtcccgcggactggagtggcttggaaggacctactaccggtccaagtggtactctttctacgcgatctcgctgaagtcccgcattatcattaaccctgatacctccaagaatcagttctccctccaactgaaatccgtcacccccgaggacacagcagtgtattactgcgcacggagcagccccgaaggactgttcctgtattggtttgacccctggggccaggggactcttgtgaccgtgtcgagcggcggagatgggtccggtggcggtggttcggggggcggcggatcatcatccgaactgacccaggacccggctgtgtccgtggcgctgggacaaaccatccgcattacgtgccagggagactccctgggcaactactacgccacttggtaccagcagaagccgggccaagcccctgtgttggtcatctacgggaccaacaacagaccttccggcatccccgaccggttcagcgcttcgtcctccggcaacactgccagcctgaccatcactggagcgcaggccgaagatgaggccgactactactgcaacagcagagactcctcgggtcatcacctcttgttcggaactggaaccaaggtcaccgtgctg

SEQ ID NO: 3957 - DNA, 744 bp, Artificial Sequence
  Description of Artificial Sequence: Synthetic scFv sequence
gaagtgcaactggtggaaaccggtggaggactcgtgcagcctggcggcagcctccggctgagctgcgccgcttcgggattcaccttttcctcctacgcgatgtcttgggtcagacaggcccccggaaaggggctggaatgggtgtcagccatctccggctccggcggatcaacgtactacgccgactccgtgaaaggccggttcaccatgtcgcgcgagaatgacaagaactccgtgttcctgcaaatgaactccctgagggtggaggacaccggagtgtactattgtgcgcgcgccaactacaagagagagctgcggtactactacggaatggacgtctggggacagggaactatggtgaccgtgtcatccggtggagggggaagcggcggtggaggcagcgggggcgggggttcagaaattgtcatgacccagtccccgggaactctttccctctcccccggggaatccgcgactttgtcctgccgggccagccagcgcgtggcctcgaactacctcgcatggtaccagcataagccaggccaagccccttccctgctgatttccggggctagcagccgcgccactggcgtgccggataggttctcgggaagcggctcgggtaccgatttcaccctggcaatctcgcggctggaaccggaggattcggccgtgtactactgccagcactatgactcatccccctcctggacattcggacagggcaccaaggtcgagatcaag

SEQ ID NO: 3958 - DNA, 738 bp, Artificial Sequence
  Description of Artificial Sequence: Synthetic scFv sequence
gaagtgcagctcgtggagtcaggaggcggcctggtccagccgggagggtcccttagactgtcatgcgccgcaagcggattcactttctcctcctatgccatgagctgggtccgccaagcccccggaaagggactggaatgggtgtccgccatctcggggtctggaggctcaacttactacgctgactccgtgaagggacggttcaccattagccgcgacaactccaagaacaccctctacctccaaatgaactccctgcgggccgaggataccgccgtctactactgcgccaaagtggaaggttcaggatcgctggactactggggacagggtactctcgtgaccgtgtcatcgggcggaggaggttccggcggtggcggctccggcggcggagggtcggagatcgtgatgacccagagccctggtactctgagcctttcgccgggagaaagggccaccctgtcctgccgcgcttcccaatccgtgtcctccgcgtacttggcgtggtaccagcagaagccgggacagccccctcggctgctgatcagcggggccagcacccgggcaaccggaatcccagacagattcgggggttccggcagcggcacagatttcaccctgactatttcgaggttggagcccgaggactttgcggtgtattactgtcagcactacgggtcgtcctttaatggctccagcctgttcacgttcggacaggggacccgcctggaaatcaag

SEQ ID NO: 3959 - DNA, 744 bp, Artificial Sequence
  Description of Artificial Sequence: Synthetic scFv sequence
gaggtgcagcttgtggaaaccggtggcggactggtgcagcccggaggaagcctcaggctgtcctgcgccgcgtccggcttcaccttctcctcgtacgccatgtcctgggtccgccaggcccccggaaagggcctggaatgggtgtccgccatctctggaagcggaggttccacgtactacgcggacagcgtcaagggaaggttcacaatctcccgcgataattcgaagaacactctgtaccttcaaatgaacaccctgaaggccgaggacactgctgtgtactactgcgcacgggccacctacaagagagagctccggtactactacggaatggacgtctggggccagggaactactgtgaccgtgtcctcgggagggggtggctccggggggggcggctccggcggaggcggttccgagattgtgctgacccagtcaccttcaactctgtcgctgtccccgggagagagcgctactctgagctgccgggccagccagtccgtgtccaccaccttcctcgcctggtatcagcagaagccggggcaggcaccacggctcttgatctacgggtcaagcaacagagcgaccggaattcctgaccgcttctcggggagcggttcaggcaccgacttcaccctgactatccggcgcctggaacccgaagatttcgccgtgtattactgtcaacagtaccactcctcgccgtcctggacctttggccaaggaaccaaagtggaaatcaag

SEQ ID NO: 3960 - DNA, 717 bp, Artificial Sequence
  Description of Artificial Sequence: Synthetic scFv sequence
gaagtgcagctcgtggaaactggaggtggactcgtgcagcctggacggtcgctgcggctgagctgcgctgcatccggcttcaccttcgacgattatgccatgcactgggtcagacaggcgccagggaagggacttgagtgggtgtccggtatcagctggaatagcggctcaatcggatacgcggactccgtgaagggaaggttcaccatttcccgcgacaacgccaagaactccctgtacttgcaaatgaacagcctccgggatgaggacactgccgtgtactactgcgcccgcgtcggaaaagctgtgcccgacgtctggggccagggaaccactgtgaccgtgtccagcggcgggggtggatcgggcggtggagggtccggtggagggggctcagatattgtgatgacccagaccccctcgtccctgtccgcctcggtcggcgaccgcgtgactatcacatgtagagcctcgcagagcatctccagctacctgaactggtatcagcagaagccggggaaggccccgaagctcctgatctacgcggcatcatcactgcaatcgggagtgccgagccggttttccgggtccggctccggcaccgacttcacgctgaccatttcttccctgcaacccgaggacttcgccacttactactgccagcagtcctactccaccccttactccttcggccaaggaaccaggctggaaatcaag

SEQ ID NO: 3961 - DNA, 732 bp, Artificial Sequence
  Description of Artificial Sequence: Synthetic scFv sequence
gaagtgcagctgctcgaaaccggtggagggctggtgcagccagggggctccctgaggctttcatgcgccgctagcggattctccttctcctcttacgccatgtcgtgggtccgccaagcccctggaaaaggcctggaatgggtgtccgcgatttccgggagcggaggttcgacctattacgccgactccgtgaagggccgctttaccatctcccgggataactccaagaacactctgtacctccaaatgaactcgctgagagccgaggacaccgccgtgtattactgcgcgaaggcgctggtcggcgcgactggggcattcgacatctggggacagggaactcttgtgaccgtgtcgagcggaggcggcggctccggcggaggagggagcgggggcggtggttccgaaatcgtgttgactcagtccccgggaaccctgagcttgtcacccggggagcgggccactctctcctgtcgcgcctcccaatcgctctcatccaatttcctggcctggtaccagcagaagcccggacaggccccgggcctgctcatctacggcgcttcaaactgggcaacgggaacccctgatcggttcagcggaagcggatcgggtactgactttaccctgaccatcaccagactggaaccggaggacttcgccgtgtactactgccagtactacggcacctcccccatgtacacattcggacagggtaccaaggtcgagattaag

SEQ ID NO: 3962 - DNA, 723 bp, Artificial Sequence
  Description of Artificial Sequence: Synthetic scFv sequence
gaagtgcaactggtggaaaccggtggcggcctggtgcagcctggaggatcattgaggctgtcatgcgcggccagcggtattaccttctcccggtaccccatgtcctgggtcagacaggccccggggaaagggcttgaatgggtgtccgggatctcggactccggtgtcagcacttactacgccgactccgccaagggacgcttcaccatttcccgggacaactcgaagaacaccctgttcctccaaatgagctccctccgggacgaggatactgcagtgtactactgcgtgacccgcgccgggtccgaggcgtctgacatttggggacagggcactatggtcaccgtgtcgtccggcggagggggctcgggaggcggtggcagcggaggaggagggtccgagatcgtgctgacccaatccccggccaccctctcgctgagccctggagaaagggcaaccttgtcctgtcgcgcgagccagtccgtgagcaactccctggcctggtaccagcagaagcccggacaggctccgagacttctgatctacgacgcttcgagccgggccactggaatccccgaccgcttttcggggtccggctcaggaaccgatttcaccctgacaatctcacggctggagccagaggatttcgccatctattactgccagcagttcggtacttcctccggcctgactttcggaggcggcacgaagctcgaaatcaag

SEQ ID NO: 3963 - DNA, 739 bp, Artificial Sequence
  Description of Artificial Sequence: Synthetic scFv sequence
gaagtccaactggtggagtccgggggagggctcgtgcagcccggaggcagccttcggctgtcgtgcgccgcctccgggttcacgttctcatcctacgcgatgtcgtgggtcagacaggcaccaggaaagggactggaatgggtgtccgccattagcggctccggcggtagcacctactatgccgactcagtgaagggaaggttcactatctcccgcgacaacagcaagaacaccctgtacctccaaatgaactctctgcgggccgaggataccgcggtgtactattgcgccaagatgggttggtccagcggatacttgggagccttcgacatttggggacagggcactactgtgaccgtgtcctccgggggtggcggatcgggaggcggcggctcgggtggagggggttccgaaatcgtgttgacccagtcaccgggaaccctctcgctgtccccgggagaacgggctacactgtcatgtagagcgtcccagtccgtggcttcctcgttcctggcctggtaccagcagaagccgggacaggcaccccgcctgctcatctacggagccagcggccgggcgaccggcatccctgaccgcttctccggttccggctcgggcaccgactttactctgaccattagcaggcttgagcccgaggattttgccgtgtactactgccaacactacggggggagccctcgcctgaccttcggaggcggaactaaggtcgatatcaaaa

SEQ ID NO: 3964 - DNA, 744 bp, Artificial Sequence
  Description of Artificial Sequence: Synthetic scFv sequence
caagtgcagctcgtggaatcgggtggcggactggtgcagccggggggctcacttagactgtcctgcgcggccagcggattcactttctcctcctacgccatgtcctgggtcagacaggcccctggaaagggcctggaatgggtgtccgcaatcagcggcagcggcggctcgacctattacgcggattcagtgaagggcagattcaccatttcccgggacaacgccaagaactccttgtaccttcaaatgaactccctccgcgcggaagataccgcaatctactactgcgctcgggccacttacaagagggaactgcgctactactacgggatggacgtctggggccagggaaccatggtcaccgtgtccagcggaggaggaggatcgggaggaggcggtagcgggggtggagggtcggagatcgtgatgacccagtcccccggcactgtgtcgctgtcccccggcgaacgggccaccctgtcatgtcgggccagccagtcagtgtcgtcaagcttcctcgcctggtaccagcagaaaccgggacaagctccccgcctgctgatctacggagccagcagccgggccaccggtattcctgaccggttctccggttcggggtccgggaccgactttactctgactatctctcgcctcgagccagaggactccgccgtgtattactgccagcagtaccactcctccccgtcctggacgttcggacagggcacaaggctggagattaag

SEQ ID NO: 3965 - DNA, 738 bp, Artificial Sequence
  Description of Artificial Sequence: Synthetic scFv sequence
gaagtgcagctcgtggagagcgggggaggattggtgcagcccggaaggtccctgcggctctcctgcactgcgtctggcttcaccttcgacgactacgcgatgcactgggtcagacagcgcccgggaaagggcctggaatgggtcgcctcaatcaactggaagggaaactccctggcctatggcgacagcgtgaagggccgcttcgccatttcgcgcgacaacgccaagaacaccgtgtttctgcaaatgaattccctgcggaccgaggataccgctgtgtactactgcgccagccaccagggcgtggcatactataactacgccatggacgtgtggggaagagggacgctcgtcaccgtgtcctccgggggcggtggatcgggtggaggaggaagcggtggcgggggcagcgaaatcgtgctgactcagagcccgggaactctttcactgtccccgggagaacgggccactctctcgtgccgggccacccagtccatcggctcctccttccttgcctggtaccagcagaggccaggacaggcgccccgcctgctgatctacggtgcttcccaacgcgccactggcattcctgaccggttcagcggcagagggtcgggaaccgatttcacactgaccatttcccgggtggagcccgaagattcggcagtctactactgtcagcattacgagtcctccccttcatggaccttcggtcaagggaccaaagtggagatcaag

SEQ ID NO: 3966 - DNA, 733 bp, Artificial Sequence
  Description of Artificial Sequence: Synthetic scFv sequence
gaagtgcagctgcttgagagcggtggaggtctggtgcagcccgggggatcactgcgcctgtcctgtgccgcgtccggtttcactttctcctcgtacgccatgtcgtgggtcagacaggcaccgggaaagggactggaatgggtgtcagccatttcgggttcggggggcagcacctactacgctgactccgtgaagggccggttcaccatttcccgcgacaactccaagaacaccttgtacctccaaatgaactccctgcgggccgaagataccgccgtgtattactgcgtgctgtggttcggagagggattcgacccgtggggacaaggaacactcgtgactgtgtcatccggcggaggcggcagcggtggcggcggttccggcggcggcggatctgacatcgtgttgacccagtcccctctgagcctgccggtcactcctggcgaaccagccagcatctcctgccggtcgagccagtccctcctgcactccaatgggtacaactacctcgattggtatctgcaaaagccgggccagagcccccagctgctgatctaccttgggtcaaaccgcgcttccggggtgcctgatagattctccgggtccgggagcggaaccgactttaccctgaaaatctcgagggtggaggccgaggacgtcggagtgtactactgcatgcaggcgctccagactcccctgaccttcggaggaggaacgaaggtcgacatcaaga

SEQ ID NO: 3967 - DNA, 726 bp, Artificial Sequence
  Description of Artificial Sequence: Synthetic scFv sequence
gaagtgcagctgctggagtccggcggtggattggtgcaaccggggggatcgctcagactgtcctgtgcggcgtcaggcttcaccttctcgagctacgccatgtcatgggtcagacaggcccctggaaagggtctggaatgggtgtccgccatttccgggagcgggggatctacatactacgccgatagcgtgaagggccgcttcaccatttcccgggacaactccaagaacactctctatctgcaaatgaactccctccgcgctgaggacactgccgtgtactactgcgccaaaatccctcagaccggcaccttcgactactggggacaggggactctggtcaccgtcagcagcggtggcggaggttcggggggaggaggaagcggcggcggagggtccgagattgtgctgacccagtcacccggcactttgtccctgtcgcctggagaaagggccaccctttcctgccgggcatcccaatccgtgtcctcctcgtacctggcctggtaccagcagaggcccggacaggccccacggcttctgatctacggagcaagcagccgcgcgaccggtatcccggaccggttttcgggctcgggctcaggaactgacttcaccctcaccatctcccgcctggaacccgaagatttcgctgtgtattactgccagcactacggcagctccccgtcctggacgttcggccagggaactcggctggagatcaag

SEQ ID NO: 3968 - DNA, 723 bp, Artificial Sequence
  Description of Artificial Sequence: Synthetic scFv sequence
gaggtgcagttggtcgaaagcgggggcgggcttgtgcagcctggcggatcactgcggctgtcctgcgcggcatcaggcttcacgttttcttcctacgccatgtcctgggtgcgccaggcccctggaaagggactggaatgggtgtccgcgatttcggggtccggcgggagcacctactacgccgattccgtgaagggccgcttcactatctcgcgggacaactccaagaacaccctctacctccaaatgaatagcctgcgggccgaggataccgccgtctactattgcgctaaggtcgtgcgcgacggaatggacgtgtggggacagggtaccaccgtgacagtgtcctcggggggaggcggtagcggcggaggaggaagcggtggtggaggttccgagattgtgctgactcaatcacccgcgaccctgagcctgtcccccggcgaaagggccactctgtcctgtcgggccagccaatcagtctcctcctcgtacctggcctggtaccagcagaagccaggacaggctccgagactccttatctatggcgcatcctcccgcgccaccggaatcccggataggttctcgggaaacggatcggggaccgacttcactctcaccatctcccggctggaaccggaggacttcgccgtgtactactgccagcagtacggcagcccgcctagattcactttcggccccggcaccaaagtggacatcaag

SEQ ID NO: 3969 - DNA, 753 bp, Artificial Sequence
  Description of Artificial Sequence: Synthetic scFv sequence
caagtgcagctcgtggagtcaggcggaggactggtgcagcccgggggctccctgagactttcctgcgcggcatcgggttttaccttctcctcctatgctatgtcctgggtgcgccaggccccgggaaagggactggaatgggtgtccgcaatcagcggtagcgggggctcaacatactacgccgactccgtcaagggtcgcttcactatttcccgggacaactccaagaataccctgtacctccaaatgaacagcctcagggccgaggatactgccgtgtactactgcgccaaagtcggatacgatagctccggttactaccgggactactacggaatggacgtgtggggacagggcaccaccgtgaccgtgtcaagcggcggaggcggttcaggagggggaggctccggcggtggagggtccgaaatcgtcctgactcagtcgcctggcactctgtcgttgtccccgggggagcgcgctaccctgtcgtgtcgggcgtcgcagtccgtgtcgagctcctacctcgcgtggtaccagcagaagcccggacaggcccctagacttctgatctacggcacttcttcacgcgccaccgggatcagcgacaggttcagcggctccggctccgggaccgacttcaccctgaccattagccggctggagcctgaagatttcgccgtgtattactgccaacactacggaaactcgccgccaaagttcacgttcggacccggaaccaagctggaaatcaag

SEQ ID NO: 3970 - protein, 112 aa, Artificial Sequence
  Description of Artificial Sequence: Synthetic scFv sequence
DIVLTQSPLSLPVTPGEPASISCRSSQSLLHSNGYNYLDWYLQKPGQSPQLLIYLGSNRASGVPDRFSGSGSGTDFTLKISRVEAEDVGVYYCMQALQTPLTFGGGTKVDIK

SEQ ID NO: 3971 - protein, 249 aa, Artificial Sequence
  Description of Artificial Sequence: Synthetic scFv sequence
QVQLVQSGAEVRKTGASVKVSCKASGYIFDNFGINWVRQAPGQGLEWMGWINPKNNNTNYAQKFQGRVTITADESTNTAYMEVSSLRSEDTAVYYCARGPYYYQSYMDVWGQGTMVTVSSASGGGGSGGRASGGGGSDIVMTQTPLSLPVTPGEPASISCRSSQSLLHSNGYNYLNWYLQKPGQSPQLLIYLGSKRASGVPDRFSGSGSGTDFTLHITRVGAEDVGVYYCMQALQTPYTFGQGTKLEIK

SEQ ID NO: 3972 - protein, 246 aa, Artificial Sequence
  Description of Artificial Sequence: Synthetic scFv sequence
QVQLQESGGGLVQPGGSLRLSCAASGFTFSSDAMTWVRQAPGKGLEWVSVISGSGGTTYYADSVKGRFTISRDNSKNTLYLQMNSLRAEDTAVYYCAKLDSSGYYYARGPRYWGQGTLVTVSSASGGGGSGGRASGGGGSDIQLTQSPSSLSASVGDRVTITCRASQSISSYLNWYQQKPGKAPKLLIYGASTLASGVPARFSGSGSGTHFTLTINSLQSEDSATYYCQQSYKRASFGQGTKVEIK

SEQ ID NO: 3973 - protein, 246 aa, Artificial Sequence
  Description of Artificial Sequence: Synthetic scFv sequence
QVQLVESGGGLVQPGRSLRLSCAASGFTFSNYAMSWVRQAPGKGLGWVSGISRSGENTYYADSVKGRFTISRDNSKNTLYLQMNSLRDEDTAVYYCARSPAHYYGGMDVWGQGTTVTVSSASGGGGSGGRASGGGGSDIVLTQSPGTLSLSPGERATLSCRASQSISSSFLAWYQQKPGQAPRLLIYGASRRATGIPDRFSGSGSGTDFTLTISRLEPEDSAVYYCQQYHSSPSWTFGQGTKLEIK

SEQ ID NO: 3974 - protein, 244 aa, Artificial Sequence
  Description of Artificial Sequence: Synthetic scFv sequence
QVQLVESGGGLVQPGRSLRLSCAASGFTFDDYAMHWVRQAPGKGLEWVSGISWNSGSIGYADSVKGRFTISRDNAKNSLYLQMNSLRAEDTALYYCSVHSFLAYWGQGTLVTVSSASGGGGSGGRASGGGGSDIVMTQTPLSLPVTPGEPASISCRSSQSLLHSNGYNYLDWYLQKPGQSPQLLIYLGSNRASGVPDRFSGSGSGTDFTLKISRVEAEDVGVYYCMQALQTPYTFGQGTKVEIK

SEQ ID NO: 3975 - DNA, 717 bp, Artificial Sequence
  Description of Artificial Sequence: Synthetic scFv sequence
gaagtgcaattggtggaatcagggggaggacttgtgcagcctggaggatcgctgagactgtcatgtgccgtgtccggctttgccctgtccaaccacgggatgtcctgggtccgccgcgcgcctggaaagggcctcgaatgggtgtcgggtattgtgtacagcggtagcacctactatgccgcatccgtgaaggggagattcaccatcagccgggacaactccaggaacactctgtacctccaaatgaattcgctgaggccagaggacactgccatctactactgctccgcgcatggcggagagtccgacgtctggggacaggggaccaccgtgaccgtgtctagcgcgtccggcggaggcggcagcgggggtcgggcatcagggggcggcggatcggacatccagctcacccagtccccgagctcgctgtccgcctccgtgggagatcgggtcaccatcacgtgccgcgccagccagtcgatttcctcctacctgaactggtaccaacagaagcccggaaaagccccgaagcttctcatctacgccgcctcgagcctgcagtcaggagtgccctcacggttctccggctccggttccggtactgatttcaccctgaccatttcctccctgcaaccggaggacttcgctacttactactgccagcagtcgtactccaccccctacactttcggacaaggcaccaaggtcgaaatcaag

SEQ ID NO: 3976 - protein, 246 aa, Artificial Sequence
  Description of Artificial Sequence: Synthetic scFv sequence
QVQLVQSGGGLVKPGGSLRLSCAASGFTFSDYYMSWIRQAPGKGLEWVSYISSSGNTIYYADSVKGRFTISRDNAKNSLYLQMNSLRAEDTAVYYCARSTMVREDYWGQGTLVTVSSASGGGGSGGRASGGGGSDIVLTQSPLSLPVTLGQPASISCKSSESLVHNSGKTYLNWFHQRPGQSPRRLIYEVSNRDSGVPDRFTGSGSGTDFTLKISRVEAEDVGVYYCMQGTHWPGTFGQGTKLEIK

SEQ ID NO: 3977 - protein, 243 aa, Artificial Sequence
  Description of Artificial Sequence: Synthetic scFv sequence
EVQLLESGGGLVQPGGSLRLSCAVSGFALSNHGMSWVRRAPGKGLEWVSGIVYSGSTYYAASVKGRFTISRDNSRNTLYLQMNSLRPEDTAIYYCSAHGGESDVWGQGTTVTVSSASGGGGSGGRASGGGGSDIVMTQTPLSLSVTPGQPASISCKSSQSLLRNDGKTPLYWYLQKAGQPPQLLIYEVSNRFSGVPDRFSGSGSGTDFTLKISRVEAEDVGAYYCMQNIQFPSFGGGTKLEIK

SEQ ID NO: 3978 - protein, 243 aa, Artificial Sequence
  Description of Artificial Sequence: Synthetic scFv sequence
QVQLQESGPGLVKPSETLSLTCTVSGGSISSSYYYWGWIRQPPGKGLEWIGSIYYSGSAYYNPSLKSRVTISVDTSKNQFSLRLSSVTAADTAVYYCARHWQEWPDAFDIWGQGTMVTVSSGGGGSGGGGSGGGGSETTLTQSPAFMSATPGDKVIISCKASQDIDDAMNWYQQKPGEAPLFIIQSATSPVPGIPPRFSGSGFGTDFSLTINNIESEDAAYYFCLQHDNFPLTFGQGTKLEIK

SEQ ID NO: 3979 - protein, 246 aa, Artificial Sequence
  Description of Artificial Sequence: Synthetic scFv sequence
EVQLVESGGGLVKPGGSLRLSCAASGFTFSSYSMNWVRQAPGKGLEWVSSISSSSSYIYYADSVKGRFTISRDNAKNSLYLQMNSLRAEDTAVYYCAKTIAAVYAFDIWGQGTTVTVSSGGGGSGGGGSGGGGSEIVLTQSPLSLPVTPEEPASISCRSSQSLLHSNGYNYLDWYLQKPGQSPQLLIYLGSNRASGVPDRFSGSGSGTDFTLKISRVEAEDVGVYYCMQALQTPYTFGQGTKLEIK

SEQ ID NO: 3980 - protein, 245 aa, Artificial Sequence
  Description of Artificial Sequence: Synthetic scFv sequence
QVQLQESGPGLVKPSQTLSLTCTVSGGSISSGGYYWSWIRQHPGKGLEWIGYIYYSGSTYYNPSLKSRVTISVDTSKNQFSLKLSSVTAADTAVYYCARAGIAARLRGAFDIWGQGTMVTVSSGGGGSGGGGSGGGGSDIVMTQSPSSVSASVGDRVIITCRASQGIRNWLAWYQQKPGKAPNLLIYAASNLQSGVPSRFSGSGSGADFTLTISSLQPEDVATYYCQKYNSAPFTFGPGTKVDIK

SEQ ID NO: 3981 - protein, 253 aa, Artificial Sequence
  Description of Artificial Sequence: Synthetic scFv sequence
QVQLVQSGAEVKKPGSSVKVSCKASGGTFSSYAISWVRQAPGQGLEWMGGIIPIFGTANYAQKFQGRVTITADESTSTAYMELSSLRSEDTAVYYCARRGGYQLLRWDVGLLRSAFDIWGQGTMVTVSSGGGGSGGGGSGGGGSSYVLTQPPSVSVAPGQTARITCGGNNIGSKSVHWYQQKPGQAPVLVLYGKNNRPSGVPDRFSGSRSGTTASLTITGAQAEDEADYYCSSRDSSGDHLRVFGTGTKVTVL

SEQ ID NO: 3982 - protein, 248 aa, Artificial Sequence
  Description of Artificial Sequence: Synthetic scFv sequence
EVQLQQSGPGLVKPSQTLSLTCAISGDSVSSNSAAWNWIRQSPSRGLEWLGRTYYRSKWYSFYAISLKSRIIINPDTSKNQFSLQLKSVTPEDTAVYYCARSSPEGLFLYWFDPWGQGTLVTVSSGGDGSGGGGSGGGGSSSELTQDPAVSVALGQTIRITCQGDSLGNYYATWYQQKPGQAPVLVIYGTNNRPSGIPDRFSASSSGNTASLTITGAQAEDEADYYCNSRDSSGHHLLFGTGTKVTVL

SEQ ID NO: 3983 - protein, 244 aa, Artificial Sequence
  Description of Artificial Sequence: Synthetic scFv sequence
QIQLVQSGPDLKKPGETVKLSCKASGYTFTNFGMNWVKQAPGKGFKWMAWINTYTGESYFADDFKGRFAFSVETSATTAYLQINNLKTEDTATYFCARGEIYYGYDGGFAYWGQGTLVTVSAGGGGSGGGGSGGGGSDVVMTQSHRFMSTSVGDRVSITCRASQDVNTAVSWYQQKPGQSPKLLIFSASYRYTGVPDRFTGSGSGADFTLTISSVQAEDLAVYYCQQHYSTPWTFGGGTKLDIK

SEQ ID NO: 3984 - protein, 249 aa, Artificial Sequence
  Description of Artificial Sequence: Synthetic scFv sequence
QIQLVQSGPELKKPGETVKISCKASGYTFTDYSINWVKRAPGKGLKWMGWINTETREPAYAYDFRGRFAFSLETSASTAYLQINNLKYEDTATYFCALDYSYAMDYWGQGTSVTVSSGGGGSGGGGSGGGGSQIQLVQSGPELKKPGETVKISCKASGYTFTDYSINWVKRAPGKGLKWMGWINTETREPAYAYDFRGRFAFSLETSASTAYLQINNLKYEDTATYFCALDYSYAMDYWGQGTSVTVSS

SEQ ID NO: 3985 - protein, 243 aa, Artificial Sequence
  Description of Artificial Sequence: Synthetic scFv sequence
QIQLVQSGPELKKPGETVKISCKASGYTFRHYSMNWVKQAPGKGLKWMGRINTESGVPIYADDFKGRFAFSVETSASTAYLVINNLKDEDTASYFCSNDYLYSLDFWGQGTALTVSSGGGGSGGGGSGGGGSDIVLTQSPPSLAMSLGKRATISCRASESVTILGSHLIYWYQQKPGQPPTLLIQLASNVQTGVPARFSGSGSRTDFTLTIDPVEEDDVAVYYCLQSRTIPRTFGGGTKLEIK

SEQ ID NO: 3986 - protein, 243 aa, Artificial Sequence
  Description of Artificial Sequence: Synthetic scFv sequence
QIQLVQSGPELKKPGETVKISCKASGYTFTHYSMNWVKQAPGKGLKWMGRINTETGEPLYADDFKGRFAFSLETSASTAYLVINNLKNEDTATFFCSNDYLYSCDYWGQGTTLTVSSGGGGSGGGGSGGGGSDIVLTQSPPSLAMSLGKRATISCRASESVTILGSHLIYWYQQKPGQPPTLLIQLASNVQTGVPARFSGSGSRTDFTLTIDPVEEDDVAVYYCLQSRTIPRTFGGGTKLEIK

SEQ ID NO: 3987 - protein, 246 aa, Artificial Sequence
  Description of Artificial Sequence: Synthetic scFv sequence
EVQLVESGGGLVQPGGSLRLSCAASGFTFSSYAMSWVRQAPGKGLEWVSAISGSGGSTYYADSVKGRFTISRDNSKNTLYLQMNSLRAEDTAVYYCAKVEGSGSLDYWGQGTLVTVSSGGGGSGGGGSGGGGSEIVMTQSPGTLSLSPGERATLSCRASQSVSSAYLAWYQQKPGQPPRLLISGASTRATGIPDRFGGSGSGTDFTLTISRLEPEDFAVYYCQHYGSSFNGSSLFTFGQGTRLEIK

SEQ ID NO: 3988 - protein, 248 aa, Artificial Sequence
  Description of Artificial Sequence: Synthetic scFv sequence
EVQLVETGGGLVQPGGSLRLSCAASGFTFSSYAMSWVRQAPGKGLEWVSAISGSGGSTYYADSVKGRFTISRDNSKNTLYLQMNTLKAEDTAVYYCARATYKRELRYYYGMDVWGQGTTVTVSSGGGGSGGGGSGGGGSEIVLTQSPSTLSLSPGESATLSCRASQSVSTTFLAWYQQKPGQAPRLLIYGSSNRATGIPDRFSGSGSGTDFTLTIRRLEPEDFAVYYCQQYHSSPSWTFGQGTKVEIK

SEQ ID NO: 3989 - protein, 244 aa, Artificial Sequence
  Description of Artificial Sequence: Synthetic scFv sequence
EVQLLETGGGLVQPGGSLRLSCAASGFSFSSYAMSWVRQAPGKGLEWVSAISGSGGSTYYADSVKGRFTISRDNSKNTLYLQMNSLRAEDTAVYYCAKALVGATGAFDIWGQGTLVTVSSGGGGSGGGGSGGGGSEIVLTQSPGTLSLSPGERATLSCRASQSLSSNFLAWYQQKPGQAPGLLIYGASNWATGTPDRFSGSGSGTDFTLTITRLEPEDFAVYYCQYYGTSPMYTFGQGTKVEIK

SEQ ID NO: 3990 - protein, 246 aa, Artificial Sequence
  Description of Artificial Sequence: Synthetic scFv sequence
EVQLVESGGGLVQPGGSLRLSCAASGFTFSSYAMSWVRQAPGKGLEWVSAISGSGGSTYYADSVKGRFTISRDNSKNTLYLQMNSLRAEDTAVYYCAKMGWSSGYLGAFDIWGQGTTVTVSSGGGGSGGGGSGGGGSEIVLTQSPGTLSLSPGERATLSCRASQSVASSFLAWYQQKPGQAPRLLIYGASGRATGIPDRFSGSGSGTDFTLTISRLEPEDFAVYYCQHYGGSPRLTFGGGTKVDIK

SEQ ID NO: 3991 - protein, 248 aa, Artificial Sequence
  Description of Artificial Sequence: Synthetic scFv sequence
QVQLVESGGGLVQPGGSLRLSCAASGFTFSSYAMSWVRQAPGKGLEWVSAISGSGGSTYYADSVKGRFTISRDNAKNSLYLQMNSLRAEDTAIYYCARATYKRELRYYYGMDVWGQGTMVTVSSGGGGSGGGGSGGGGSEIVMTQSPGTVSLSPGERATLSCRASQSVSSSFLAWYQQKPGQAPRLLIYGASSRATGIPDRFSGSGSGTDFTLTISRLEPEDSAVYYCQQYHSSPSWTFGQGTRLEIK

SEQ ID NO: 3992 - protein, 246 aa, Artificial Sequence
  Description of Artificial Sequence: Synthetic scFv sequence
EVQLVESGGGLVQPGRSLRLSCTASGFTFDDYAMHWVRQRPGKGLEWVASINWKGNSLAYGDSVKGRFAISRDNAKNTVFLQMNSLRTEDTAVYYCASHQGVAYYNYAMDVWGRGTLVTVSSGGGGSGGGGSGGGGSEIVLTQSPGTLSLSPGERATLSCRATQSIGSSFLAWYQQRPGQAPRLLIYGASQRATGIPDRFSGRGSGTDFTLTISRVEPEDSAVYYCQHYESSPSWTFGQGTKVEIK

SEQ ID NO: 3993 - protein, 244 aa, Artificial Sequence
  Description of Artificial Sequence: Synthetic scFv sequence
EVQLLESGGGLVQPGGSLRLSCAASGFTFSSYAMSWVRQAPGKGLEWVSAISGSGGSTYYADSVKGRFTISRDNSKNTLYLQMNSLRAEDTAVYYCVLWFGEGFDPWGQGTLVTVSSGGGGSGGGGSGGGGSDIVLTQSPLSLPVTPGEPASISCRSSQSLLHSNGYNYLDWYLQKPGQSPQLLIYLGSNRASGVPDRFSGSGSGTDFTLKISRVEAEDVGVYYCMQALQTPLTFGGGTKVDIK

SEQ ID NO: 3994 - protein, 242 aa, Artificial Sequence
  Description of Artificial Sequence: Synthetic scFv sequence
EVQLLESGGGLVQPGGSLRLSCAASGFTFSSYAMSWVRQAPGKGLEWVSAISGSGGSTYYADSVKGRFTISRDNSKNTLYLQMNSLRAEDTAVYYCAKIPQTGTFDYWGQGTLVTVSSGGGGSGGGGSGGGGSEIVLTQSPGTLSLSPGERATLSCRASQSVSSSYLAWYQQRPGQAPRLLIYGASSRATGIPDRFSGSGSGTDFTLTISRLEPEDFAVYYCQHYGSSPSWTFGQGTRLEIK

SEQ ID NO: 3995 - protein, 245 aa, Artificial Sequence
  Description of Artificial Sequence: Synthetic scFv sequence
DIELTQSPSSLAVSAGEKVTMSCKSSQSILYSSNQKNYLAWYQQKPGQSPKLLIYWASTRESGVPDRFTGSGSGTDFTLTISSVQAEDLAVYYCHQYLSSYTFGGGTKLEIKGGGGSGGGGSGGGGSQVQLQQSGPELVRPGASVRISCKASGYTFASYYIQWMKQRPGQGLEWIGWINPGNVNTKYNEKFKGKATLTADKSSTTAYMQLSSLTSEDSAVYFCARSTYYRPLDYWGQGTTVTVSS

SEQ ID NO: 3996 - protein, 235 aa, Artificial Sequence
  Description of Artificial Sequence: Synthetic scFv sequence
DIELTQSPSSLAVSAGEKVTMSCKSSQSILYSSNQKNYLAWYQQKPGQSPKLLIYWASTRESGVPDRFTGSGSGTDFTLTISSVQAEDLAVYYCHQYLSSYTFGGGTKLEIKGGGGSQVQLQQSGPELVRPGASVRISCKASGYTFASYYIQWMKQRPGQGLEWIGWINPGNVNTKYNEKFKGKATLTADKSSTTAYMQLSSLTSEDSAVYFCARSTYYRPLDYWGQGTTVTVSS

SEQ ID NO: 3997 - protein, 244 aa, Artificial Sequence
  Description of Artificial Sequence: Synthetic scFv sequence
DIVLTQSPASLAVSLGQRATISCRASESVDNYGNTFMHWYQQKPGQPPKLLIYRASNLESGIPARFSGSGSRTDFTLTINPVEADDVATYYCQQSNEDPPTFGAGTKLELKGGGGSGGGGSSGGGSQIQLVQSGPELKKPGETVKISCKASGYIFTNYGMNWVKQAPGKSFKWMGWINTYTGESTYSADFKGRFAFSLETSASTAYLHINDLKNEDTATYFCARSGGYDPMDYWGQGTSVTVSS

SEQ ID NO: 3998 - protein, 237 aa, Artificial Sequence
  Description of Artificial Sequence: Synthetic scFv sequence
DVQITQSPSYLAASPGETITINCRASKSISKDLAWYQEKPGKTNKLLIYSGSTLQSGIPSRFSGSGSGTDFTLTISSLEPEDFAMYYCQQHNKYPYTFGGGTKLEIKGGGGSGGGGSSGGGSQVQLQQPGAELVRPGASVKLSCKASGYTFTSYWMNWVKQRPDQGLEWIGRIDPYDSETHYNQKFKDKAILTVDKSSSTAYMQLSSLTSEDSAVYYCARGNWDDYWGQGTTLTVSS

SEQ ID NO: 3999 - protein, 263 aa, Artificial Sequence
  Description of Artificial Sequence: Synthetic scFv sequence
MALPVTALLLPLALLLHAARPDVQLTQSPSFLSASVGDRVTITCRASKSISKDLAWYQQKPGKAPKLLIYSGSTLQSGVPSRFSGSGSGTEFTLTISSLQPEDFATYYCQQHNKYPYTFGGGTKVEIKGGGGSGGGGSGGGGSGGGGSEVQLVESGGGLVQPGGSLRLSCAASGYTFTSYWMNWVRQAPGKGLVWVSRIDPYDSETHYNQKFKDRFTISVDKAKSTAYLQMNSLRAEDTAVYYCARGNWDDYWGQGTTVTVSS

SEQ ID NO: 4000 - protein, 263 aa, Artificial Sequence
  Description of Artificial Sequence: Synthetic scFv sequence
MALPVTALLLPLALLLHAARPDVQLTQSPSFLSASVGDRVTITCRASKSISKDLAWYQQKPGKAPKLLIYSGSTLQSGVPSRFSGSGSGTEFTLTISSLQPEDFATYYCQQHNKYPYTFGGGTKVEIKGGGGSGGGGSGGGGSGGGGSEVQLVQSGAEVKKPGESLRISCKGSGYTFTSYWMNWVRQMPGKGLEWMGRIDPYDSETHYNQKFKDHVTISVDKSISTAYLQWSSLKASDTAMYYCARGNWDDYWGQGTTVTVSS

SEQ ID NO: 4001 - protein, 263 aa, Artificial Sequence
  Description of Artificial Sequence: Synthetic scFv sequence
MALPVTALLLPLALLLHAARPDVQLTQSPSFLSASVGDRVTITCRASKSISKDLAWYQQKPGKAPKLLIYSGSTLQSGVPSRFSGSGSGTEFTLTISSLQPEDFATYYCQQHNKYPYTFGGGTKVEIKGGGGSGGGGSGGGGSGGGGSQVQLVQSGAEVKKPGASVKVSCKASGYTFTSYWMNWVRQAPGQGLEWMGRIDPYDSETHYNQKFKDRVTMTVDKSTSTAYMELSSLRSEDTAVYYCARGNWDDYWGQGTTVTVSS

SEQ ID NO: 4002 - protein, 263 aa, Artificial Sequence
  Description of Artificial Sequence: Synthetic scFv sequence
MALPVTALLLPLALLLHAARPDVQLTQSPSFLSASVGDRVTITCRASKSISKDLAWYQQKPGKAPKLLIYSGSTLQSGVPSRFSGSGSGTEFTLTISSLQPEDFATYYCQQHNKYPYTFGGGTKVEIKGGGGSGGGGSGGGGSGGGGSQVQLVQSGSELKKPGASVKVSCKASGYTFTSYWMNWVRQAPGQGLEWMGRIDPYDSETHYNQKFKDRFVFSVDKSVSTAYLQISSLKAEDTAVYYCARGNWDDYWGQGTTVTVSS

SEQ ID NO: 4003 - protein, 263 aa, Artificial Sequence
  Description of Artificial Sequence: Synthetic scFv sequence
MALPVTALLLPLALLLHAARPDVVMTQSPAFLSVTPGEKVTITCRASKSISKDLAWYQQKPDQAPKLLIYSGSTLQSGVPSRFSGSGSGTDFTFTISSLEAEDAATYYCQQHNKYPYTFGGGTKVEIKGGGGSGGGGSGGGGSGGGGSEVQLVESGGGLVQPGGSLRLSCAASGYTFTSYWMNWVRQAPGKGLVWVSRIDPYDSETHYNQKFKDRFTISVDKAKSTAYLQMNSLRAEDTAVYYCARGNWDDYWGQGTTVTVSS

SEQ ID NO: 4004 - protein, 263 aa, Artificial Sequence
  Description of Artificial Sequence: Synthetic scFv sequence
MALPVTALLLPLALLLHAARPDVVMTQSPAFLSVTPGEKVTITCRASKSISKDLAWYQQKPDQAPKLLIYSGSTLQSGVPSRFSGSGSGTDFTFTISSLEAEDAATYYCQQHNKYPYTFGGGTKVEIKGGGGSGGGGSGGGGSGGGGSEVQLVQSGAEVKKPGESLRISCKGSGYTFTSYWMNWVRQMPGKGLEWMGRIDPYDSETHYNQKFKDHVTISVDKSISTAYLQWSSLKASDTAMYYCARGNWDDYWGQGTTVTVSS

SEQ ID NO: 4005 - protein, 263 aa, Artificial Sequence
  Description of Artificial Sequence: Synthetic scFv sequence
MALPVTALLLPLALLLHAARPDVVMTQSPAFLSVTPGEKVTITCRASKSISKDLAWYQQKPDQAPKLLIYSGSTLQSGVPSRFSGSGSGTDFTFTISSLEAEDAATYYCQQHNKYPYTFGGGTKVEIKGGGGSGGGGSGGGGSGGGGSQVQLVQSGAEVKKPGASVKVSCKASGYTFTSYWMNWVRQAPGQGLEWMGRIDPYDSETHYNQKFKDRVTMTVDKSTSTAYMELSSLRSEDTAVYYCARGNWDDYWGQGTTVTVSS

SEQ ID NO: 4006 - protein, 263 aa, Artificial Sequence
  Description of Artificial Sequence: Synthetic scFv sequence
MALPVTALLLPLALLLHAARPDVVMTQSPAFLSVTPGEKVTITCRASKSISKDLAWYQQKPDQAPKLLIYSGSTLQSGVPSRFSGSGSGTDFTFTISSLEAEDAATYYCQQHNKYPYTFGGGTKVEIKGGGGSGGGGSGGGGSGGGGSQVQLVQSGSELKKPGASVKVSCKASGYTFTSYWMNWVRQAPGQGLEWMGRIDPYDSETHYNQKFKDRFVFSVDKSVSTAYLQISSLKAEDTAVYYCARGNWDDYWGQGTTVTVSS

SEQ ID NO: 4007 - protein, 263 aa, Artificial Sequence
  Description of Artificial Sequence: Synthetic scFv sequence
MALPVTALLLPLALLLHAARPDVVMTQSPDSLAVSLGERATINCRASKSISKDLAWYQQKPGQPPKLLIYSGSTLQSGVPDRFSGSGSGTDFTLTISSLQAEDVAVYYCQQHNKYPYTFGGGTKVEIKGGGGSGGGGSGGGGSGGGGSEVQLVESGGGLVQPGGSLRLSCAASGYTFTSYWMNWVRQAPGKGLVWVSRIDPYDSETHYNQKFKDRFTISVDKAKSTAYLQMNSLRAEDTAVYYCARGNWDDYWGQGTTVTVSS

SEQ ID NO: 4008 - protein, 263 aa, Artificial Sequence
  Description of Artificial Sequence: Synthetic scFv sequence
MALPVTALLLPLALLLHAARPDVVMTQSPDSLAVSLGERATINCRASKSISKDLAWYQQKPGQPPKLLIYSGSTLQSGVPDRFSGSGSGTDFTLTISSLQAEDVAVYYCQQHNKYPYTFGGGTKVEIKGGGGSGGGGSGGGGSGGGGSEVQLVQSGAEVKKPGESLRISCKGSGYTFTSYWMNWVRQMPGKGLEWMGRIDPYDSETHYNQKFKDHVTISVDKSISTAYLQWSSLKASDTAMYYCARGNWDDYWGQGTTVTVSS

SEQ ID NO: 4009 - protein, 263 aa, Artificial Sequence
  Description of Artificial Sequence: Synthetic scFv sequence
MALPVTALLLPLALLLHAARPDVVMTQSPDSLAVSLGERATINCRASKSISKDLAWYQQKPGQPPKLLIYSGSTLQSGVPDRFSGSGSGTDFTLTISSLQAEDVAVYYCQQHNKYPYTFGGGTKVEIKGGGGSGGGGSGGGGSGGGGSQVQLVQSGAEVKKPGASVKVSCKASGYTFTSYWMNWVRQAPGQGLEWMGRIDPYDSETHYNQKFKDRVTMTVDKSTSTAYMELSSLRSEDTAVYYCARGNWDDYWGQGTTVTVSS

SEQ ID NO: 4010 - protein, 263 aa, Artificial Sequence
  Description of Artificial Sequence: Synthetic scFv sequence
MALPVTALLLPLALLLHAARPDVVMTQSPDSLAVSLGERATINCRASKSISKDLAWYQQKPGQPPKLLIYSGSTLQSGVPDRFSGSGSGTDFTLTISSLQAEDVAVYYCQQHNKYPYTFGGGTKVEIKGGGGSGGGGSGGGGSGGGGSQVQLVQSGSELKKPGASVKVSCKASGYTFTSYWMNWVRQAPGQGLEWMGRIDPYDSETHYNQKFKDRFVFSVDKSVSTAYLQISSLKAEDTAVYYCARGNWDDYWGQGTTVTVSS

SEQ ID NO: 4011 - protein, 282 aa, Artificial Sequence
  Description of Artificial Sequence: Synthetic scFv sequence
MALPVTALLLPLALLLHAARPEVKLVESGGGLVQPGGSLSLSCAASGFTFTDYYMSWVRQPPGKALEWLALIRSKADGYTTEYSASVKGRFTLSRDDSQSILYLQMNALRPEDSATYYCARDAAYYSYYSPEGAMDYWGQGTSVTVSSGGGGSGGGGSGGGGSMADYKDIVMTQSHKFMSTSVGDRVNITCKASQNVDSAVAWYQQKPGQSPKALIYSASYRYSGVPDRFTGRGSGTDFTLTISSVQAEDLAVYYCQQYYSTPWTFGGGTKLEIKRSDPTSS

SEQ ID NO: 4012 - protein, 263 aa, Artificial Sequence
  Description of Artificial Sequence: Synthetic scFv sequence
MALPVTALLLPLALLLHAARPEVQLVESGGGLVQPGGSLRLSCAASGYTFTSYWMNWVRQAPGKGLVWVSRIDPYDSETHYNQKFKDRFTISVDKAKSTAYLQMNSLRAEDTAVYYCARGNWDDYWGQGTTVTVSSGGGGSGGGGSGGGGSGGGGSDVQLTQSPSFLSASVGDRVTITCRASKSISKDLAWYQQKPGKAPKLLIYSGSTLQSGVPSRFSGSGSGTEFTLTISSLQPEDFATYYCQQHNKYPYTFGGGTKVEIK

SEQ ID NO: 4013 - protein, 263 aa, Artificial Sequence
  Description of Artificial Sequence: Synthetic scFv sequence
MALPVTALLLPLALLLHAARPEVQLVESGGGLVQPGGSLRLSCAASGYTFTSYWMNWVRQAPGKGLVWVSRIDPYDSETHYNQKFKDRFTISVDKAKSTAYLQMNSLRAEDTAVYYCARGNWDDYWGQGTTVTVSSGGGGSGGGGSGGGGSGGGGSDVVMTQSPAFLSVTPGEKVTITCRASKSISKDLAWYQQKPDQAPKLLIYSGSTLQSGVPSRFSGSGSGTDFTFTISSLEAEDAATYYCQQHNKYPYTFGGGTKVEIK

SEQ ID NO: 4014 - protein, 263 aa, Artificial Sequence
  Description of Artificial Sequence: Synthetic scFv sequence
MALPVTALLLPLALLLHAARPEVQLVESGGGLVQPGGSLRLSCAASGYTFTSYWMNWVRQAPGKGLVWVSRIDPYDSETHYNQKFKDRFTISVDKAKSTAYLQMNSLRAEDTAVYYCARGNWDDYWGQGTTVTVSSGGGGSGGGGSGGGGSGGGGSDVVMTQSPDSLAVSLGERATINCRASKSISKDLAWYQQKPGQPPKLLIYSGSTLQSGVPDRFSGSGSGTDFTLTISSLQAEDVAVYYCQQHNKYPYTFGGGTKVEIK

SEQ ID NO: 4015 - protein, 263 aa, Artificial Sequence
  Description of Artificial Sequence: Synthetic scFv sequence
MALPVTALLLPLALLLHAARPEVQLVESGGGLVQPGGSLRLSCAASGYTFTSYWMNWVRQAPGKGLVWVSRIDPYDSETHYNQKFKDRFTISVDKAKSTAYLQMNSLRAEDTAVYYCARGNWDDYWGQGTTVTVSSGGGGSGGGGSGGGGSGGGGSEVVLTQSPATLSLSPGERATLSCRASKSISKDLAWYQQKPGQAPRLLIYSGSTLQSGIPARFSGSGSGTDFTLTISSLEPEDFAVYYCQQHNKYPYTFGGGTKVEIK

SEQ ID NO: 4016 - protein, 263 aa, Artificial Sequence
  Description of Artificial Sequence: Synthetic scFv sequence
MALPVTALLLPLALLLHAARPEVQLVQSGAEVKKPGESLRISCKGSGYTFTSYWMNWVRQMPGKGLEWMGRIDPYDSETHYNQKFKDHVTISVDKSISTAYLQWSSLKASDTAMYYCARGNWDDYWGQGTTVTVSSGGGGSGGGGSGGGGSGGGGSDVQLTQSPSFLSASVGDRVTITCRASKSISKDLAWYQQKPGKAPKLLIYSGSTLQSGVPSRFSGSGSGTEFTLTISSLQPEDFATYYCQQHNKYPYTFGGGTKVEIK

SEQ ID NO: 4017 - protein, 263 aa, Artificial Sequence
  Description of Artificial Sequence: Synthetic scFv sequence
MALPVTALLLPLALLLHAARPEVQLVQSGAEVKKPGESLRISCKGSGYTFTSYWMNWVRQMPGKGLEWMGRIDPYDSETHYNQKFKDHVTISVDKSISTAYLQWSSLKASDTAMYYCARGNWDDYWGQGTTVTVSSGGGGSGGGGSGGGGSGGGGSDVVMTQSPAFLSVTPGEKVTITCRASKSISKDLAWYQQKPDQAPKLLIYSGSTLQSGVPSRFSGSGSGTDFTFTISSLEAEDAATYYCQQHNKYPYTFGGGTKVEIK

SEQ ID NO: 4018 - protein, 263 aa, Artificial Sequence
  Description of Artificial Sequence: Synthetic scFv sequence
MALPVTALLLPLALLLHAARPEVQLVQSGAEVKKPGESLRISCKGSGYTFTSYWMNWVRQMPGKGLEWMGRIDPYDSETHYNQKFKDHVTISVDKSISTAYLQWSSLKASDTAMYYCARGNWDDYWGQGTTVTVSSGGGGSGGGGSGGGGSGGGGSDVVMTQSPDSLAVSLGERATINCRASKSISKDLAWYQQKPGQPPKLLIYSGSTLQSGVPDRFSGSGSGTDFTLTISSLQAEDVAVYYCQQHNKYPYTFGGGTKVEIK

SEQ ID NO: 4019 - protein, 263 aa, Artificial Sequence
  Description of Artificial Sequence: Synthetic scFv sequence
MALPVTALLLPLALLLHAARPEVQLVQSGAEVKKPGESLRISCKGSGYTFTSYWMNWVRQMPGKGLEWMGRIDPYDSETHYNQKFKDHVTISVDKSISTAYLQWSSLKASDTAMYYCARGNWDDYWGQGTTVTVSSGGGGSGGGGSGGGGSGGGGSEVVLTQSPATLSLSPGERATLSCRASKSISKDLAWYQQKPGQAPRLLIYSGSTLQSGIPARFSGSGSGTDFTLTISSLEPEDFAVYYCQQHNKYPYTFGGGTKVEIK

SEQ ID NO: 4020 - protein, 263 aa, Artificial Sequence
  Description of Artificial Sequence: Synthetic scFv sequence
MALPVTALLLPLALLLHAARPEVVLTQSPATLSLSPGERATLSCRASKSISKDLAWYQQKPGQAPRLLIYSGSTLQSGIPARFSGSGSGTDFTLTISSLEPEDFAVYYCQQHNKYPYTFGGGTKVEIKGGGGSGGGGSGGGGSGGGGSEVQLVESGGGLVQPGGSLRLSCAASGYTFTSYWMNWVRQAPGKGLVWVSRIDPYDSETHYNQKFKDRFTISVDKAKSTAYLQMNSLRAEDTAVYYCARGNWDDYWGQGTTVTVSS

SEQ ID NO: 4021 - protein, 263 aa, Artificial Sequence
  Description of Artificial Sequence: Synthetic scFv sequence
MALPVTALLLPLALLLHAARPEVVLTQSPATLSLSPGERATLSCRASKSISKDLAWYQQKPGQAPRLLIYSGSTLQSGIPARFSGSGSGTDFTLTISSLEPEDFAVYYCQQHNKYPYTFGGGTKVEIKGGGGSGGGGSGGGGSGGGGSEVQLVQSGAEVKKPGESLRISCKGSGYTFTSYWMNWVRQMPGKGLEWMGRIDPYDSETHYNQKFKDHVTISVDKSISTAYLQWSSLKASDTAMYYCARGNWDDYWGQGTTVTVSS

SEQ ID NO: 4022 - protein, 263 aa, Artificial Sequence
  Description of Artificial Sequence: Synthetic scFv sequence
MALPVTALLLPLALLLHAARPEVVLTQSPATLSLSPGERATLSCRASKSISKDLAWYQQKPGQAPRLLIYSGSTLQSGIPARFSGSGSGTDFTLTISSLEPEDFAVYYCQQHNKYPYTFGGGTKVEIKGGGGSGGGGSGGGGSGGGGSQVQLVQSGAEVKKPGASVKVSCKASGYTFTSYWMNWVRQAPGQGLEWMGRIDPYDSETHYNQKFKDRVTMTVDKSTSTAYMELSSLRSEDTAVYYCARGNWDDYWGQGTTVTVSS

SEQ ID NO: 4023 - protein, 263 aa, Artificial Sequence
  Description of Artificial Sequence: Synthetic scFv sequence
MALPVTALLLPLALLLHAARPEVVLTQSPATLSLSPGERATLSCRASKSISKDLAWYQQKPGQAPRLLIYSGSTLQSGIPARFSGSGSGTDFTLTISSLEPEDFAVYYCQQHNKYPYTFGGGTKVEIKGGGGSGGGGSGGGGSGGGGSQVQLVQSGSELKKPGASVKVSCKASGYTFTSYWMNWVRQAPGQGLEWMGRIDPYDSETHYNQKFKDRFVFSVDKSVSTAYLQISSLKAEDTAVYYCARGNWDDYWGQGTTVTVSS

SEQ ID NO: 4024 - protein, 263 aa, Artificial Sequence
  Description of Artificial Sequence: Synthetic scFv sequence
MALPVTALLLPLALLLHAARPQVQLVQSGAEVKKPGASVKVSCKASGYTFTSYWMNWVRQAPGQGLEWMGRIDPYDSETHYNQKFKDRVTMTVDKSTSTAYMELSSLRSEDTAVYYCARGNWDDYWGQGTTVTVSSGGGGSGGGGSGGGGSGGGGSDVQLTQSPSFLSASVGDRVTITCRASKSISKDLAWYQQKPGKAPKLLIYSGSTLQSGVPSRFSGSGSGTEFTLTISSLQPEDFATYYCQQHNKYPYTFGGGTKVEIK

SEQ ID NO: 4025 - protein, 263 aa, Artificial Sequence
  Description of Artificial Sequence: Synthetic scFv sequence
MALPVTALLLPLALLLHAARPQVQLVQSGAEVKKPGASVKVSCKASGYTFTSYWMNWVRQAPGQGLEWMGRIDPYDSETHYNQKFKDRVTMTVDKSTSTAYMELSSLRSEDTAVYYCARGNWDDYWGQGTTVTVSSGGGGSGGGGSGGGGSGGGGSDVVMTQSPAFLSVTPGEKVTITCRASKSISKDLAWYQQKPDQAPKLLIYSGSTLQSGVPSRFSGSGSGTDFTFTISSLEAEDAATYYCQQHNKYPYTFGGGTKVEIK

SEQ ID NO: 4026 - protein, 263 aa, Artificial Sequence
  Description of Artificial Sequence: Synthetic scFv sequence
MALPVTALLLPLALLLHAARPQVQLVQSGAEVKKPGASVKVSCKASGYTFTSYWMNWVRQAPGQGLEWMGRIDPYDSETHYNQKFKDRVTMTVDKSTSTAYMELSSLRSEDTAVYYCARGNWDDYWGQGTTVTVSSGGGGSGGGGSGGGGSGGGGSDVVMTQSPDSLAVSLGERATINCRASKSISKDLAWYQQKPGQPPKLLIYSGSTLQSGVPDRFSGSGSGTDFTLTISSLQAEDVAVYYCQQHNKYPYTFGGGTKVEIK

SEQ ID NO: 4027 - protein, 263 aa, Artificial Sequence
  Description of Artificial Sequence: Synthetic scFv sequence
MALPVTALLLPLALLLHAARPQVQLVQSGAEVKKPGASVKVSCKASGYTFTSYWMNWVRQAPGQGLEWMGRIDPYDSETHYNQKFKDRVTMTVDKSTSTAYMELSSLRSEDTAVYYCARGNWDDYWGQGTTVTVSSGGGGSGGGGSGGGGSGGGGSEVVLTQSPATLSLSPGERATLSCRASKSISKDLAWYQQKPGQAPRLLIYSGSTLQSGIPARFSGSGSGTDFTLTISSLEPEDFAVYYCQQHNKYPYTFGGGTKVEIK

SEQ ID NO: 4028 - protein, 263 aa, Artificial Sequence
  Description of Artificial Sequence: Synthetic scFv sequence
MALPVTALLLPLALLLHAARPQVQLVQSGSELKKPGASVKVSCKASGYTFTSYWMNWVRQAPGQGLEWMGRIDPYDSETHYNQKFKDRFVFSVDKSVSTAYLQISSLKAEDTAVYYCARGNWDDYWGQGTTVTVSSGGGGSGGGGSGGGGSGGGGSDVQLTQSPSFLSASVGDRVTITCRASKSISKDLAWYQQKPGKAPKLLIYSGSTLQSGVPSRFSGSGSGTEFTLTISSLQPEDFATYYCQQHNKYPYTFGGGTKVEIK

SEQ ID NO: 4029 - protein, 263 aa, Artificial Sequence
  Description of Artificial Sequence: Synthetic scFv sequence
MALPVTALLLPLALLLHAARPQVQLVQSGSELKKPGASVKVSCKASGYTFTSYWMNWVRQAPGQGLEWMGRIDPYDSETHYNQKFKDRFVFSVDKSVSTAYLQISSLKAEDTAVYYCARGNWDDYWGQGTTVTVSSGGGGSGGGGSGGGGSGGGGSDVVMTQSPAFLSVTPGEKVTITCRASKSISKDLAWYQQKPDQAPKLLIYSGSTLQSGVPSRFSGSGSGTDFTFTISSLEAEDAATYYCQQHNKYPYTFGGGTKVEIK

SEQ ID NO: 4030 - protein, 263 aa, Artificial Sequence
  Description of Artificial Sequence: Synthetic scFv sequence
MALPVTALLLPLALLLHAARPQVQLVQSGSELKKPGASVKVSCKASGYTFTSYWMNWVRQAPGQGLEWMGRIDPYDSETHYNQKFKDRFVFSVDKSVSTAYLQISSLKAEDTAVYYCARGNWDDYWGQGTTVTVSSGGGGSGGGGSGGGGSGGGGSDVVMTQSPDSLAVSLGERATINCRASKSISKDLAWYQQKPGQPPKLLIYSGSTLQSGVPDRFSGSGSGTDFTLTISSLQAEDVAVYYCQQHNKYPYTFGGGTKVEIK

SEQ ID NO: 4031 - protein, 263 aa, Artificial Sequence
  Description of Artificial Sequence: Synthetic scFv sequence
MALPVTALLLPLALLLHAARPQVQLVQSGSELKKPGASVKVSCKASGYTFTSYWMNWVRQAPGQGLEWMGRIDPYDSETHYNQKFKDRFVFSVDKSVSTAYLQISSLKAEDTAVYYCARGNWDDYWGQGTTVTVSSGGGGSGGGGSGGGGSGGGGSEVVLTQSPATLSLSPGERATLSCRASKSISKDLAWYQQKPGQAPRLLIYSGSTLQSGIPARFSGSGSGTDFTLTISSLEPEDFAVYYCQQHNKYPYTFGGGTKVEIK

SEQ ID NO: 4032 - protein, 245 aa, Artificial Sequence
  Description of Artificial Sequence: Synthetic scFv sequence
QVQLQQSGAEVKKSGASVKVSCKASGYTFTDYYMHWLRQAPGQGLEWMGWINPNSGDTNYAQKFQGRVTLTRDTSISTVYMELSRLRSDDTAVYYCARDMNILATVPFDIWGQGTMVTVSSASGGGGSGGRASGGGGSDIQMTQSPSSLSASVGDRVTITCRASQSISSYLNWYQQKPGKAPKLLIYAASSLQSGVPSRFSGSGSGTDFTLTISSLQPEDFATYYCQQGDSVPLTFGGGTKVEIK

SEQ ID NO: 4033 - protein, 243 aa, Artificial Sequence
  Description of Artificial Sequence: Synthetic scFv sequence
QVQLVQSGAEVKKPGASVKVSCKASGYIFTGYYIHWVRQAPGQGLEWMGWINPNSGGTNYAQKFQGRVTMTRDTSISTAYMELSGLRSDDPAVYYCARDMNILATVPFDIWGQGTLVTVSSGGGGSGGGGSGGGGSDIQLTQSPSSLSASVGDRVTITCRASQSISSYLNWYQQKPGKAPKLLIYAASSLQSGVPSRFSGSGSGTDFTLTVNSLQPEDFATYYCQQGDSVPLTFGGGTKVEIK

SEQ ID NO: 4034 - protein, 243 aa, Artificial Sequence
  Description of Artificial Sequence: Synthetic scFv sequence
QVQLVQSGAEVKKPGASVKVSCKASGYTFTGYYMHWVRQAPGQGLEWMGWINPNSGGTNYAQKFQGRVTLTRDTSISTVYMELSRLRSDDTAVYYCARDMNILATVPFDIWGQGTMVTVSSGGGGSGGGGSGGGGSDIQMTQSPSSLSASVGDRVTITCRASQSISSYLNWYQQKPGKAPKLLIYAASSLQSGVPSRFSGSGSGTDFTLTVNSLQPEDFATYYCQQGDSVPLTFGGGTRLEIK

SEQ ID NO: 4035 - protein, 243 aa, Artificial Sequence
  Description of Artificial Sequence: Synthetic scFv sequence
QVQLVQSGAEVKKPGASVKVSCKASGYTFTGYYMHWVRQAPGQGLEWMGWINPNSGGTNYAQKFQGRVTMTRDTSISTAYMELSRLRSDDTAVYYCARDMNILATVPFDIWGQGTMVTVSSGGGGSGGGGSGGGGSDIQMTQSPSSLSASVGDRVTITCRASQSISTYLNWYQQKPGKAPNLLIYAAFSLQSGVPSRFSGSGSGTDFTLTINSLQPEDFATYYCQQGDSVPLTFGGGTKLEIK

SEQ ID NO: 4036 - protein, 264 aa, Artificial Sequence
  Description of Artificial Sequence: Synthetic scFv sequence
MALPVTALLLPLALLLHAARPQVQLVQSGAEVKKPGASVKVSCKASGYTFTGYYMHWVRQAPGQGLEWMGWINPNSGGTNYAQKFQGRVTMTRDTSISTAYMELSRLRSDDTAVYYCARDMNILATVPFDIWGQGTMVTVSSGGGGSGGGGSGGGGSDIQMTQSPSSLSASVGDRVTITCRASQSISTYLNWYQQKPGKAPNLLIYAAFSLQSGVPSRFSGSGSGTDFTLTINSLQPEDFATYYCQQGDSVPLTFGGGTKLEIK

SEQ ID NO: 4037 - protein, 264 aa, Artificial Sequence
  Description of Artificial Sequence: Synthetic scFv sequence
MALPVTALLLPLALLLHAARPQVQLVQSGAEVKKPGASVKVSCKASGYTFTGYYMHWVRQAPGQGLEWMGWINPNSGGTNYAQKFQGRVTLTRDTSISTVYMELSRLRSDDTAVYYCARDMNILATVPFDIWGQGTMVTVSSGGGGSGGGGSGGGGSDIQMTQSPSSLSASVGDRVTITCRASQSISSYLNWYQQKPGKAPKLLIYAASSLQSGVPSRFSGSGSGTDFTLTVNSLQPEDFATYYCQQGDSVPLTFGGGTRLEIK

SEQ ID NO: 4038 - protein, 264 aa, Artificial Sequence
  Description of Artificial Sequence: Synthetic scFv sequence
MALPVTALLLPLALLLHAARPQVQLVQSGAEVKKPGASVKVSCKASGYIFTGYYIHWVRQAPGQGLEWMGWINPNSGGTNYAQKFQGRVTMTRDTSISTAYMELSGLRSDDPAVYYCARDMNILATVPFDIWGQGTLVTVSSGGGGSGGGGSGGGGSDIQLTQSPSSLSASVGDRVTITCRASQSISSYLNWYQQKPGKAPKLLIYAASSLQSGVPSRFSGSGSGTDFTLTVNSLQPEDFATYYCQQGDSVPLTFGGGTKVEIK

SEQ ID NO: 4039 - protein, 266 aa, Artificial Sequence
  Description of Artificial Sequence: Synthetic scFv sequence
MALPVTALLLPLALLLHAARPQVQLQQSGAEVKKSGASVKVSCKASGYTFTDYYMHWLRQAPGQGLEWMGWINPNSGDTNYAQKFQGRVTLTRDTSISTVYMELSRLRSDDTAVYYCARDMNILATVPFDIWGQGTMVTVSSASGGGGSGGRASGGGGSDIQMTQSPSSLSASVGDRVTITCRASQSISSYLNWYQQKPGKAPKLLIYAASSLQSGVPSRFSGSGSGTDFTLTISSLQPEDFATYYCQQGDSVPLTFGGGTKVEIK

SEQ ID NO: 4040 - protein, 249 aa, Artificial Sequence
  Description of Artificial Sequence: Synthetic scFv sequence
DIVLTQSPDSLAVSLGERATINCRASESVDNYGNTFMHWYQQKPGQPPKLLIYRASNLESGVPDRFSGSGSRTDIFITISSLQAEDVAVYYCQQSNEDPPTFGQGTKLEIKGGGGSGGGGSGGGGSGGGGSQIQLVQSGSELKKPGASVKVSCKASGYIFTNYGMNWVRQAPGQGLEWMGWINTYTGESTYSADFKGRFVFSLDTSVSTAYLQINALKAEDTAVYYCARSGGYDPMDYWGQGTTVTVSS

SEQ ID NO: 4041 - protein, 249 aa, Artificial Sequence
  Description of Artificial Sequence: Synthetic scFv sequence
DIVLTQSPDSLAVSLGERATINCRASESVDNYGNTFMHWYQQKPGQPPKLLIYRASNLESGVPDRFSGSGSRTDFTLTISSLQAEDVAVYYCQQSNEDPPTFGQGTKLEIKGGGGSGGGGSGGGGSGGGGSQIQLVQSGAEVKKPGASVKVSCKASGYIFTNYGMNWVRQAPGQRLEWMGWINTYTGESTYSADFKGRVTITLDTSASTAYMELSSLRSEDTAVYYCARSGGYDPMDYWGQGTTVTVSS

SEQ ID NO: 4042 - protein, 249 aa, Artificial Sequence
  Description of Artificial Sequence: Synthetic scFv sequence
EIVLTQSPATLSLSPGERATLSCRASESVDNYGNTFMHWYQQKPGQAPRLLIYRASNLESGIPARFSGSGSRTDFTLTISSLEPEDVAVYYCQQSNEDPPTFGQGTKLEIKGGGGSGGGGSGGGGSGGGGSQIQLVQSGSELKKPGASVKVSCKASGYIFTNYGMNWVRQAPGQGLEWMGWINTYTGESTYSADFKGRFVFSLDTSVSTAYLQINALKAEDTAVYYCARSGGYDPMDYWGQGTTVTVSS

SEQ ID NO: 4043 - protein, 249 aa, Artificial Sequence
  Description of Artificial Sequence: Synthetic scFv sequence
EIVLTQSPATLSLSPGERATLSCRASESVDNYGNTFMHWYQQKPGQAPRLLIYRASNLESGIPARFSGSGSRTDFTLTISSLEPEDVAVYYCQQSNEDPPTFGQGTKLEIKGGGGSGGGGSGGGGSGGGGSQIQLVQSGAEVKKPGASVKVSCKASGYIFTNYGMNWVRQAPGQRLEWMGWINTYTGESTYSADFKGRVTITLDTSASTAYMELSSLRSEDTAVYYCARSGGYDPMDYWGQGTTVTVSS

SEQ ID NO: 4044 - protein, 249 aa, Artificial Sequence
  Description of Artificial Sequence: Synthetic scFv sequence
QIQLVQSGSELKKPGASVKVSCKASGYIFTNYGMNWVRQAPGQGLEWMGWINTYTGESTYSADFKGRFVFSLDTSVSTAYLQINALKAEDTAVYYCARSGGYDPMDYWGQGTTVTVSSGGGGSGGGGSGGGGSGGGGSDIVLTQSPDSLAVSLGERATINCRASESVDNYGNTFMHWYQQKPGQPPKLLIYRASNLESGVPDRFSGSGSRTDFTLTISSLQAEDVAVYYCQQSNEDPPTFGQGTKLEIK

SEQ ID NO: 4045 - protein, 249 aa, Artificial Sequence
  Description of Artificial Sequence: Synthetic scFv sequence
QIQLVQSGSELKKPGASVKVSCKASGYIFTNYGMNWVRQAPGQGLEWMGWINTYTGESTYSADFKGRFVFSLDTSVSTAYLQINALKAEDTAVYYCARSGGYDPMDYWGQGTTVTVSSGGGGSGGGGSGGGGSGGGGSEIVLTQSPATLSLSPGERATLSCRASESVDNYGNTFMHWYQQKPGQAPRLLIYRASNLESGIPARFSGSGSRTDFTLTISSLEPEDVAVYYCQQSNEDPPTFGQGTKLEIK

SEQ ID NO: 4046 - protein, 249 aa, Artificial Sequence
  Description of Artificial Sequence: Synthetic scFv sequence
QIQLVQSGAEVKKPGASVKVSCKASGYIFTNYGMNWVRQAPGQRLEWMGWINTYTGESTYSADFKGRVTITLDTSASTAYMELSSLRSEDTAVYYCARSGGYDPMDYWGQGTTVTVSSGGGGSGGGGSGGGGSGGGGSDIVLTQSPDSLAVSLGERATINCRASESVDNYGNTFMHWYQQKPGQPPKLLIYRASNLESGVPDRFSGSGSRTDFTLTISSLQAEDVAVYYCQQSNEDPPTFGQGTKLEIK

SEQ ID NO: 4047 - protein, 249 aa, Artificial Sequence
  Description of Artificial Sequence: Synthetic scFv sequence
QIQLVQSGAEVKKPGASVKVSCKASGYIFTNYGMNWVRQAPGQRLEWMGWINTYTGESTYSADFKGRVTITLDTSASTAYMELSSLRSEDTAVYYCARSGGYDPMDYWGQGTTVTVSSGGGGSGGGGSGGGGSGGGGSEIVLTQSPATLSLSPGERATLSCRASESVDNYGNTFMHWYQQKPGQAPRLLIYRASNLESGIPARFSGSGSRTDFTLTISSLEPEDVAVYYCQQSNEDPPTFGQGTKLEIK

SEQ ID NO: 4048 - protein, 247 aa, Artificial Sequence
  Description of Artificial Sequence: Synthetic scFv sequence
DIQMTQSTSSLSASLGDRVTISCSASQGINNYLNWYQQKPDGTVELLIYYTSTLQSGVPSRFSGSGSGTDYSLTISNLEPEDIGTYYCQQYSKLPRTFGGGTKLEIKGSTSGSGKPGSSEGSTKGQVQLQQSGSELMMPGASVKISCKATGYTFSNYWIEWVKQRPGHGLEWIGEILPGTGRTIYNEKFKGKATFTADISSNTVQMQLSSLTSEDSAVYYCARRDYYGNFYYAMDYWGQGTSVTVSS

SEQ ID NO: 4049 - protein, 242 aa, Artificial Sequence
  Description of Artificial Sequence: Synthetic scFv sequence
DIQMTQTTSSLSASLGDRVTISCRASQDISKYLNWYQQKPDGTVKLLIYHTSRLHSGVPSRFSGSGSGTDYSLTISNLEQEDIATYFCQQGNTLPYTFGGGTKLEITGGGGSGGGGSGGGGSEVKLQESGPGLVAPSQSLSVTCTVSGVSLPDYGVSWIRQPPRKGLEWLGVIWGSETTYYNSALKSRLTIIKDNSKSQVFLKMNSLQTDDTAIYYCAKHYYYGGSYAMDYWGQGTSVTVSS

SEQ ID NO: 4050 - DNA, 726 bp, Artificial Sequence
  Description of Artificial Sequence: Synthetic scFv sequence
gacatccagatgacacagaccacaagctccctgtccgcctctctgggcgacagagtgaccatcagctgccgggcctcccaggatatctctaagtatctgaactggtaccagcagaagcccgatggcacagtgaagctgctgatctatcacaccagccgcctgcactccggagtgccttctaggttcagcggctccggctctggcacagactacagcctgaccatctccaacctggagcaggaggatatcgccacctatttctgccagcagggcaatacactgccttacacctttggcggcggcacaaagctggagatcaccggaggaggaggcagcggaggaggaggctccggcggcggcggctctgaggtgaagctgcaggagtccggaccaggcctggtggcacctagccagtccctgtctgtgacatgtaccgtgtccggcgtgtctctgccagactacggcgtgtcttggatcaggcagccacctaggaagggcctggagtggctgggcgtgatctggggcagcgagacaacatactataattctgccctgaagagcagactgacaatcatcaaggacaacagcaagtcccaggtgttcctgaagatgaatagcctgcagacagacgataccgccatctactattgcgccaagcactactattacggcggcagctatgccatggattactggggccagggcacatccgtgaccgtgtctagc

SEQ ID NO: 4051 - DNA, 726 bp, Artificial Sequence
  Description of Artificial Sequence: Synthetic scFv sequence
gacatccagatgacacagaccacaagctccctgagcgcctccctgggcgacagagtgaccatctcttgccgggccagccaggatatctccaagtatctgaactggtaccagcagaagcccgatggcacagtgaagctgctgatctatcacacctctcgcctgcacagcggcgtgccttccaggttctctggcagcggctccggcacagactactctctgaccatcagcaacctggagcaggaggatatcgccacctatttctgccagcagggcaatacactgccctacacctttggcggcggcacaaagctggagatcaccggcggcggcggctctggaggaggaggcagcggcggaggaggctccgaggtgaagctgcaggagtccggaccaggcctggtggcaccatctcagagcctgtccgtgacatgtaccgtgagcggcgtgtccctgcctgactacggcgtgagctggatcagacagccacctaggaagggcctggagtggctgggcgtgatctggggctccgagacaacatactataactccgccctgaagtctcggctgaccatcatcaaggacaactctaagagccaggtgttcctgaagatgaattccctgcagacagacgataccgccatctactattgcgccaagcactactattacggcggctcctatgccatggattactggggccagggcacatctgtgaccgtgtctagc

SEQ ID NO: 4052 - DNA, 726 bp, Artificial Sequence
  Description of Artificial Sequence: Synthetic scFv sequence
gacatccagatgacacagaccacaagctccctgagcgcctccctgggcgacagagtgaccatcagctgccgggcctcccaggatatctctaagtatctgaactggtaccagcagaagccagatggcacagtgaagctgctgatctatcacaccagccgcctgcactccggagtgccctctaggttctctggcagcggctccggcacagactacagcctgaccatctccaacctggagcaggaggatatcgccacctatttctgccagcagggcaatacactgccatacacctttggcggcggcacaaagctggagatcaccggaggaggaggcagcggaggaggaggctccggcggcggcggctctgaggtgaagctgcaggagtccggaccaggcctggtggcaccttctcagagcctgtccgtgacatgtaccgtgtctggcgtgagcctgcccgactacggcgtgtcttggatcagacagccacctaggaagggcctggagtggctgggcgtgatctggggcagcgagacaacatactataattctgccctgaagagcaggctgaccatcatcaaggacaactctaagagccaggtgttcctgaagatgaattccctgcagacagacgataccgccatctactattgcgccaagcactactattacggcggctcttatgccatggattactggggccagggcacaagcgtgaccgtgtctagc

SEQ ID NO: 4053 - DNA, 726 bp, Artificial Sequence
  Description of Artificial Sequence: Synthetic scFv sequence
gacatccagatgacacagaccacaagctccctgagcgcctccctgggcgacagagtgaccatctcttgccgggccagccaggatatctccaagtatctgaactggtaccagcagaagccagatggcacagtgaagctgctgatctatcacacctctcgcctgcacagcggagtgccctccaggttctctggcagcggctccggcacagactactctctgaccatcagcaacctggagcaggaggatatcgccacctatttctgccagcagggcaatacactgccctacacctttggcggcggcacaaagctggagatcaccggcggcggcggctctggaggaggaggcagcggcggaggaggctccgaggtgaagctgcaggagtccggaccaggcctggtggcaccatctcagagcctgtccgtgacatgtaccgtgagcggcgtgtccctgcctgactacggcgtgagctggatcagacagccacctaggaagggcctggagtggctgggcgtgatctggggctccgagacaacatactataattccgccctgaagtctcggctgacaatcatcaaggacaactctaagagccaggtgtttctgaagatgaatagcctgcagacagacgataccgccatctactattgcgccaagcactactattacggcggctcctatgccatggattactggggccagggcacatctgtgaccgtgtctagc

SEQ ID NO: 4054 - DNA, 726 bp, Artificial Sequence
  Description of Artificial Sequence: Synthetic scFv sequence
gacatccagatgacacagaccacaagctccctgagcgcctccctgggcgacagagtgaccatcagctgccgggcctcccaggatatctctaagtatctgaactggtaccagcagaagccagatggcacagtgaagctgctgatctatcacaccagccgcctgcactccggagtgccctctaggttctctggcagcggctccggcacagactacagcctgaccatctccaacctggagcaggaggatatcgccacctatttctgccagcagggcaatacactgccatacacctttggcggcggcacaaagctggagatcaccggaggaggaggcagcggaggaggaggctccggcggcggcggctctgaggtgaagctgcaggagtccggaccaggcctggtggcaccttctcagagcctgtccgtgacatgtaccgtgtctggcgtgagcctgcccgactacggcgtgtcttggatcagacagccacctaggaagggcctggagtggctgggcgtgatctggggcagcgagacaacatactataattctgccctgaagagcaggctgacaatcatcaaggacaactctaagagccaggtgtttctgaagatgaatagcctgcagacagacgataccgccatctactattgtgccaagcactactattacggcggcagctatgccatggattactggggccagggcacatccgtgaccgtgtctagc

SEQ ID NO: 4055 - DNA, 726 bp, Artificial Sequence
  Description of Artificial Sequence: Synthetic scFv sequence
gacatccagatgacacagactacatcctccctgtctgcctctctgggagacagagtcaccatcagttgcagggcaagtcaggacattagtaaatatttaaattggtatcagcagaaaccagatggaactgttaaactcctgatctaccatacatcaagattacactcaggagtcccatcaaggttcagtggcagtgggtctggaacagattattctctcaccattagcaacctggagcaagaagatattgccacttacttttgccaacagggtaatacgcttccgtacacgttcggaggggggaccaagctggagatcacaggtggcggtggctcgggcggtggtgggtcgggtggcggcggatctgaggtgaaactgcaggagtcaggacctggcctggtggcgccctcacagagcctgtccgtcacatgcactgtctcaggggtctcattacccgactatggtgtaagctggattcgccagcctccacgaaagggtctggagtggctgggagtaatatggggtagtgaaaccacatactataattcagctctcaaatccagactgaccatcatcaaggacaactccaagagccaagttttcttaaaaatgaacagtctgcaaactgatgacacagccatttactactgtgccaaacattattactacggtggtagctatgctatggactactggggccaaggaacctcagtcaccgtctcctca

SEQ ID NO: 4056 - DNA, 726 bp, Artificial Sequence
  Description of Artificial Sequence: Synthetic scFv sequence
gatatccagatgacacagaccacaagctccctgtccgcctctctgggcgacagagtgaccatcagctgccgggcctcccaggatatctctaagtatctgaactggtaccagcagaagcccgatggcacagtgaagctgctgatctatcacaccagccgcctgcactccggagtgccttctaggttcagcggctccggctctggcacagactacagcctgaccatctccaacctggagcaggaggatatcgccacctatttctgccagcagggcaatacactgccttacacctttggcggcggcacaaagctggagatcaccggaggaggaggcagcggaggaggaggctccggcggcggcggctctgaggtgaagctgcaggagtccggaccaggcctggtggcacctagccagtccctgtctgtgacatgtaccgtgtccggcgtgtctctgccagactacggcgtgtcttggatcaggcagccacctaggaagggcctggagtggctgggcgtgatctggggcagcgagacaacatactataattctgccctgaagagcagactgacaatcatcaaggacaacagcaagtcccaggtgttcctgaagatgaatagcctgcagacagacgataccgccatctactattgcgccaagcactactattacggcggcagctatgccatggattactggggccagggcacatccgtgaccgtgtctagc

SEQ ID NO: 4057 - protein, 247 aa, Artificial Sequence
  Description of Artificial Sequence: Synthetic scFv sequence
DIQMTQTTSSLSASLGDRVTISCRASQDISKYLNWYQQKPDGTVKLLIYHTSRLHSGVPSRFSGSGSGTDYSLTISNLEQEDIATYFCQQGNTLPYTFGGGTKLEITGGSGSGNWSHPQFEKGSGSGEVKLQESGPGLVAPSQSLSVTCTVSGVSLPDYGVSWIRQPPRKGLEWLGVIWGSETTYYNSALKSRLTIIKDNSKSQVFLKMNSLQTDDTAIYYCAKHYYYGGSYAMDYWGQGTSVTVSS

SEQ ID NO: 4058 - protein, 245 aa, Artificial Sequence
  Description of Artificial Sequence: Synthetic scFv sequence
DIQMTQTTSSLSASLGDRVTISCRASQDISKYLNWYQQKPDGTVKLLIYHTSRLHSGVPSRFSGSGSGTDYSLTISNLEQEDIATYFCQQGNTLPYTFGGGTKLEITGSTSGSGKPGSGEGSTKGEVKLQESGPGLVAPSQSLSVTCTVSGVSLPDYGVSWIRQPPRKGLEWLGVIWGSETTYYNSALKSRLTIIKDNSKSQVFLKMNSLQTDDTAIYYCAKHYYYGGSYAMDYWGQGTSVTVSS

SEQ ID NO: 4059 - protein, 439 aa, Artificial Sequence
  Description of Artificial Sequence: Synthetic scFv sequence
DIQMTQTTSSLSASLGDRVTISCRASQDISKYLNWYQQKPDGTVKLLIYHTSRLHSGVPSRFSGSGSGTDYSLTISNLEQEDIATYFCQQGNTLPYTFGGGTKLEITGSTSGSGKPGSGEGSTKGEVKLQESGPGLVAPSQSLSVTCTVSGVSLPDYGVSWIRQPPRKGLEWLGVIWGSETTYYNSALKSRLTIIKDNSKSQVFLKMNSLQTDDTAIYYCAKHYYYGGSYAMDYWGQGTSVTVSSESKYGPPCPPCPMFWVLVVVGGVLACYSLLVTVAFIIFWVKRGRKKLLYIFKQPFMRPVQTTQEEDGCSCRFEEEEGGCELRVKFSRSADAPAYQQGQNQLYNELNLGRREEYDVLDKRRGRDPEMGGKPRRKNPQEGLYNELQKDKMAEAYSEIGMKGERRRGKGHDGLYQGLSTATKDTYDALHMQALPPRL

SEQ ID NO: 4060 - protein, 250 aa, Artificial Sequence
  Description of Artificial Sequence: Synthetic scFv sequence
DIQMTQTTSSLSASLGDRVTISCRASQDISKYLNWYQQKPDGTVKLLIYHTSRLHSGVPSRFSGSGSGTDYSLTISNLEQEDIATYFCQQGNTLPYTFGGGTKLEITKAGGGGSGGGGSGGGGSGGGGSEVKLQESGPGLVAPSQSLSVTCTVSGVSLPDYGVSWIRQPPRKGLEWLGVIWGSETTYYNSALKSRLTIIKDNSKSQVFLKMNSLQTDDTAIYYCAKHYYYGGSYAMDYWGQGTSVTVSSD

SEQ ID NO: 4061 - protein, 438 aa, Artificial Sequence
  Description of Artificial Sequence: Synthetic scFv sequence
DIQMTQTTSSLSASLGDRVTISCRASQDISKYLNWYQQKPDGTVKLLIYHTSRLHSGVPSRFSGSGSGTDYSLTISNLEQEDIATYFCQQGNTLPYVKLQESGPGLVAPSQSLSVTCTVSGVSLPDYGVSWIRQPPRKGLEWLGVIWGSETTYYNSALKSRLTIIKDNSKSQVFLKMNSLQTDDTAIYYCAKHYYYGGSYAMDYWGQGTSVTVSSTTTPAPRPPTPAPTIASQPLSLRPEACRPAAGGAVHTRGLDFACDIYIWAPLAGTCGVLLLSLVITLYCKRGRKKLLYIFKQPFMRPVQTTQEEDGCSCRFPEEEEGGCELRVKFSRSADAPAYKQGQNQLYNELNLGRREEYDVLDKRRGRDPEMGGKPRRKNPQEGLYNELQKDKMAEAYSEIGMKGERRRGKGHDGLYQGLSTATKDTYDALHMQALPPR

SEQ ID NO: 4062 - protein, 247 aa, Artificial Sequence
  Description of Artificial Sequence: Synthetic scFv sequence
EIVMTQSPATLSLSPGERATLSCRASQDISKYLNWYQQKPGQAPRLLIYHTSRLHSGIPARFSGSGSGTDYTLTISSLQPEDFAVYFCQQGNTLPYTFGQGTKLEIKGGGGSGGGGSGGGGSGGGGSQVQLQESGPGLVKPSETLSLTCTVSGVSLPDYGVSWIRQPPGKGLEWIGVIWGSETTYYQSSLKSRVTISKDNSKNQVSLKLSSVTAADTAVYYCAKHYYYGGSYAMDYWGQGTLVTVSS

SEQ ID NO: 4063 - protein, 247 aa, Artificial Sequence
  Description of Artificial Sequence: Synthetic scFv sequence
EIVMTQSPATLSLSPGERATLSCRASQDISKYLNWYQQKPGQAPRLLIYHTSRLHSGIPARFSGSGSGTDYTLTISSLQPEDFAVYFCQQGNTLPYTFGQGTKLEIKGGGGSGGGGSGGGGSGGGGSQVQLQESGPGLVKPSETLSLTCTVSGVSLPDYGVSWIRQPPGKGLEWIGVIWGSETTYYSSSLKSRVTISKDNSKNQVSLKLSSVTAADTAVYYCAKHYYYGGSYAMDYWGQGTLVTVSS

SEQ ID NO: 4064 - protein, 251 aa, Artificial Sequence
  Description of Artificial Sequence: Synthetic scFv sequence
EVQLQQSGPELIKPGASVKMSCKASGYTFTSYVMHWVKQKPGQGLEWIGYINPYNDGTKYNEKFKGKATLTSDKSSSTAYMELSSLTSEDSAVYYCARGTYYYGSRVFDYWGQGTTLTVSSGGGGSGGGGSGGGGSDIVMTQAAPSIPVTPGESVSISCRSSKSLLNSNGNTYLYWFLQRPGQSPQLLIYRMSNLASGVPDRFSGSGSGTAFTLRISRVEAEDVGVYYCMQHLEYPFTFGAGTKLELKRAD

SEQ ID NO: 4065 - protein, 252 aa, Artificial Sequence
  Description of Artificial Sequence: Synthetic scFv sequence
EVQLQQSGPELIKPGASVKMSCKASGYTFTSYVMHWVKQKPGQGLEWIGYINPYNDGTKYNEKFKGKATLTSDKSSSTAYMELSSLTSEDSAVYYCARGTYYYGSRVFDYWGQGTTLTVSSGGGGSGGGGSGGGGSDIVMTQAAPSIPVTPGESVSISCRSSKSLLNSNGNTYLYWFLQRPGQSPQLLIYRMSNLASGVPDRFSGSGSGTAFTLRISRVEAEDVGVYYCMQHLEYPFTFGAGTKLELKRSDP

SEQ ID NO: 4066 - protein, 251 aa, Artificial Sequence
  Description of Artificial Sequence: Synthetic scFv sequence
EVQLVESGGGLVQPGRSLRLSCAASGFTFDDYAMHWVRLAPGKGLEWVSGISWNSGRIGYADSVKGRFTISRDNAKNSLFLQMNSLRAKDTAVYYCARDQGYHYYDSAEHAFDIWGQGTMVTVSSGGGGSGGGGSGGGGSQSVLTQPRSVSGSPGQSVTISCTGPISGVGDYTSVSWYQHYPGKTPKLIIYDVTQRPSGVPNRFSGSKSGNTASLTISGLQADDEADYYCCSYEAPTHTYVFGTGTKLTVL

SEQ ID NO: 4067 - protein, 251 aa, Artificial Sequence
  Description of Artificial Sequence: Synthetic scFv sequence
EVQLVESGGGLVQPGRSLRLSCAASGFTFDDYAMHWVRQAPGKGLEWVSGISWNSGRIGYADSVKGRFTISRDNAKNSLFLQMNSLRAEDTAVYYCARDQGYHYYDSAEHAFDIWGQGTMVTVSSGGGGSGGGGSGGGGSQAVLTQPRSVSGSPGQSVTISCTGISSGVDSHRYVSWYQHHPGKAPKLMIYDFSKRPSGVPDRFSGSKSGNTASLTISGLQAEDEADYYCCSYAAISPNYVFGTGTKLTVL

SEQ ID NO: 4068 - protein, 251 aa, Artificial Sequence
  Description of Artificial Sequence: Synthetic scFv sequence
EVQLVESGGGLVQPGRSLRLSCAASGFTFDDYAMHWVRQAPGKGLEWVSGISWNSGRIGYADSVKGRFTISRDNAKNSLFLQMNSLRAEDTAVYYCARDQGYHYYDSAEHAFDIWGQGTMVTVSSGGGGSGGGGSGGGGSQLVLTQPPSVSGSPGQSVTFSCTGASSDVGGYDHVSWYQHHPGKGPKLLIYDVSKRPSGVPDRFSGSKSGNTASLTISGLQAEDEADYYCCSFAGYYTYWLFGGGTKVTVL

SEQ ID NO: 4069 - protein, 250 aa, Artificial Sequence
  Description of Artificial Sequence: Synthetic scFv sequence
EVQLVESGGGLVQPGRSLRLSCAASGFTFDDYAMHWVRQAPGKGLEWVSGISWNSGRIGYADSVKGRFTISRDNAKNSLFLQMNSLRAEDTAVYYCARDQGYHYYDSAEHAFDIWGQGTMVTVSSGGGGSGGGGSGGGGSQSALTQPASVSGSPGQSITIFCTGTSSDVGGYNYVSWYQQLPGTAPKLLIYSNNQRPSGVPDRFSGSKSGTSASLAISGLRSEDEADYYCAAWDDSLSVVFGGGTKLTVL

SEQ ID NO: 4070 - protein, 251 aa, Artificial Sequence
  Description of Artificial Sequence: Synthetic scFv sequence
EVQLVESGGGLVQPGRSLRLSCAASGFTFDDYAMHWVRQAPGKGLEWVSGISWNSGRIGYADSVKGRFTISRDNAKNSLFLQMNSLRAEDTAVYYCARDQGYHYYDSAEHAFDIWGQGTMVTVSSGGGGSGGGGSGGGGSQSALTQPASVSGSPGQSITISCTGTSSDVGAYNFVSWYQQLPGTAPKFLIYDNNKRPPGIPDRFSGSKSGTSATLGITGLQTGDEADYYCATWDSGLSAVVFGGGTKLTVL

SEQ ID NO: 4071 - protein, 248 aa, Artificial Sequence
  Description of Artificial Sequence: Synthetic scFv sequence
EVQLVESGGGLVQPGRSLRLSCAASGFTFDDYAMHWVRQAPGKGLEWVSGISWNSGRIGYADSVKGRFTISRDNAKNSLFLQMNSLRAEDTAVYYCARDQGYHYYDSAEHAFDIWGQGTMVTVSSGGGGSGGGGSGGGGSSYELTQDPAVSVALGQTVRITCQGDSLRSYYASWYQQKPGQAPVLVIYDKNNRPSGIPDRFSGSSSGNTASLTITGAQAEDEADYYCNSRDSSGNNWVFGGGTKLTVL

SEQ ID NO: 4072 - protein, 236 aa, Artificial Sequence
  Description of Artificial Sequence: Synthetic scFv sequence
EVQLVESGGGLVQPGRSLRLSCAASGFTFDDYAMHWVRQAPGKGLEWVSGISWNSGRIGYADSVKGRFTISRDNAKNSLFLQMNSLRAEDTAVYYCARDQGYHYYDSAEHAFDIWGQGTMVTVSSQSVLTQPRSLSGSPGQSVTIACTGASTDVGGYNYVSWYQQHPGKAPKLMIYDVNKRPSGVPDRFSGSKSGNTAFLTISGLQAEDEADYYCCSYAGSYTFEVFGGGTKLTVL

SEQ ID NO: 4073 - protein, 252 aa, Artificial Sequence
  Description of Artificial Sequence: Synthetic scFv sequence
EVQLVESGGGLVQPGRSLRLSCAASGFTFDDYAMHWVRQAPGKGLEWVSGISWNSGRIGYADSVKGRFTISRDNAKNSLFLQMNSLRAEDTAVYYCARDQGYHYYDSAEHAFDIWGQGTVVTVSSGGGGSGGGGSGGGGSQSALTQPASVSGSPGQSITISCTGTSSDLGGYNYVSWYQHRPGKAPKLIIYDVTVRPSGVSDRFSGSKSGNTASLTISGLQAEDEADYYCGSYTSSSTLLWVFGGGTKLTVL

SEQ ID NO: 4074 - protein, 246 aa, Artificial Sequence
  Description of Artificial Sequence: Synthetic scFv sequence
EVQLVESGGGLVQPGRSLRLSCAASGFTFDDYAMHWVRQAPGKGLEWVSGISWNSGRIGYADSVKGRFTISRDNAKNSLFLQMNSLRAEDTAVYYCARDQGYHYYDSAEHAFDIWGQGTVVTVSSGGGGSGGGGSGGGGSQSALTQPRSVSGFPGQSVTISCTGTTSDDVSWYQQHPGKAPQLMLYDVSKRPSGVPHRFSGSRSGRAASLIISGLQTEDEADYFCCSYAGRYNSVLFGGGTKLTVL

SEQ ID NO: 4075 - protein, 246 aa, Artificial Sequence
  Description of Artificial Sequence: Synthetic scFv sequence
EVQLVESGGGLVQPGRSLRLSCAASGFTFDDYAMHWVRQAPGKGLEWVSGISWNSGRIGYADSVKGRFTISRDNAKNSLFLQMNSLRAEDTAVYYCARDQGYHYYDSAEHAFDIWGQGTVVTVSSGGGGSGGGGSGGGGSQSALTQPRSVSGFPGQSVTISCTGTTSDDVSWYQQHPGKAPQLMLYDVSKRPSGVPHRFSGSRSGRAASLIISGLQTEDEADYFCCSYAGRYNSVPFGGGTKLTVL

SEQ ID NO: 4076 - protein, 246 aa, Artificial Sequence
  Description of Artificial Sequence: Synthetic scFv sequence
EVQLVESGGGLVQPGRSLRLSCAASGFTFDDYAMHWVRQAPGKGLEWVSGISWNSGRIGYADSVKGRFTISRDNAKNSLFLQMNSLRAEDTAVYYCARDQGYHYYDSAEHAFDIWGQGTVVTVSSGGGGSGGGGSGGGGSQSALTQPRSVSGFPGQSVTISCTGTTSDDVSWYQQHPGKAPQLMLYDVSKRPSGVPHRFSGSRSGRAASLIISGLQTEDEADYFCSSYAGRYNSVLFGGGTKLTVL

SEQ ID NO: 4077 - protein, 249 aa, Artificial Sequence
  Description of Artificial Sequence: Synthetic scFv sequence
EVQLVESGGGLVQPGRSLRLSCAASGFTFDDYAMHWVRQAPGKGLEWVSGISWNSGRIGYADSVKGRFTISRDNAKNSLFLQMNSLRAEDTAVYYCARDQGYHYYDSAEHAFDIWGQGTVVTVSSGGGGSGGGGSGGGGSQSVLTQPPSVSAAPGQEVTISCSGSSSNIGNNYVSWYQQLPGTAPKLLIYDNDKRPSGIPDRFSGSKSGTSATLGITGLQTGDEADYYCGTWDGNLSAVFGGGTKVTVL

SEQ ID NO: 4078 - protein, 251 aa, Artificial Sequence
  Description of Artificial Sequence: Synthetic scFv sequence
EVQLVESGGGLVQPGRSLRLSCAASGFTFDDYAMHWVRQAPGKGLEWVSGISWNSGRIGYADSVKGRFTISRDNAKNSLFLQMNSLRAEDTAVYYCARDQGYHYYDSAEHAFDIWGQGTVVTVSSGGGGSGGGGSGGGGSQSVLTQPPSVSAAPGQKVTISCSGSSSNIGNNYVSWYQQLPGTAPKLLIYDNNKRPSGIPDRFSGSKSGTSATLGITGLQTGDEADYYCGTWDSSLNRDWVFGGGTKLTVL

SEQ ID NO: 4079 - protein, 250 aa, Artificial Sequence
  Description of Artificial Sequence: Synthetic scFv sequence
EVQLVESGGGLVQPGRSLRLSCAASGFTFDDYAMHWVRQAPGKGLEWVSGISWNSGRIGYADSVKGRFTISRDNAKNSLFLQMNSLRAEDTAVYYCARDQGYHYYDSAEHAFDIWGQGTVVTVSSGGGGSGGGGSGGGGSQSVLTQPPSVSAAPGQKVTISCSGSSSNIGNNYVSWYQQLPGTAPKLLIYDNNKRPSGIPDRFSGSKSGTSATLGITGLQTGDEGDYYCGTWDISLRFGVFGGGTKVTVL

SEQ ID NO: 4080 - protein, 249 aa, Artificial Sequence
  Description of Artificial Sequence: Synthetic scFv sequence
EVQLVQSGGGLVQPGRSLRLSCAASGFTFDDYAMHWVRQAPGKGLEWVSGISWNSGSIGYADSVKGRFTISRDNAKNSLYLQMNSLRAEDTAVYYCARDQGYHYYDSAEHAFDIWGQGTVVTVSSGGGGSGGGGSGGGGSAIRMTQSPSSLSASVGDRVTVTCQASQDISNYLNWYQQKPGRAPKLLIYDASNVKAGVPSRFSGGGSGTDFTLTISSLQPEDFATYYCQQSYSTPQAYTFGQGTKLDIK

SEQ ID NO: 4081 - protein, 247 aa, Artificial Sequence
  Description of Artificial Sequence: Synthetic scFv sequence
EVQLVQSGGGLVQPGRSLRLSCAASGFTFDDYAMHWVRQAPGKGLEWVSGISWNSGSIGYADSVKGRFTISRDNAKNSLYLQMNSLRAEDTAVYYCARDQGYHYYDSAEHAFDIWGQGTVVTVSSGGGGSGGGGSGGGGSDIQLTQSPSTLSASVGDRVTITCRASQSISRWLAWYQQKPGKAPKLLIYDASNLETGVPSRFSGSGSGTDFTFTISSLQPEDIATYYCQQYDNLPLTFGGGTKVEIK

SEQ ID NO: 4082 - protein, 249 aa, Artificial Sequence
  Description of Artificial Sequence: Synthetic scFv sequence
EVQLVQSGGGLVQPGRSLRLSCAASGFTFDDYAMHWVRQAPGKGLEWVSGISWNSGSIGYADSVKGRFTISRDNAKNSLYLQMNSLRAEDTAVYYCARDQGYHYYDSAEHAFDIWGQGTVVTVSSGGGGSGGGGSGGGGSEIVLTQSPATLSLSPGETATLSCRASQSINHYLAWYQQKPGQAPRLLIYDASNRATGIPARFSGSGSGTDFTLTISSLEPEDFATYYCQQSYSHPRMYTFGQGTKLDIK

SEQ ID NO: 4083 - protein, 270 aa, Artificial Sequence
  Description of Artificial Sequence: Synthetic scFv sequence
MALPVTALLLPLALLLHAARPEVKLQESGPGLVAPSQSLSVTCTVSGVSLPDYGVSWIRQPPRKGLEWLGVIWGSETTYYNSALKSRLTIIKDNSKSQVFLKMNSLQTDDTAIYYCAKHYYYGGSYAMDYWGQGTSVTVSSGGGGSGGGGSGGGGSDIQMTQTTSSLSASLGDRVTISCRASQDISKYLNWYQQKPDGTVKLLIYHTSRLHSGVPSRFSGSGSGTDYSLTISNLEQEDIATYFCQQGNTLPYTFGGGTKLEITRSDPTSS

SEQ ID NO: 4084 - protein, 267 aa, Artificial Sequence
  Description of Artificial Sequence: Synthetic scFv sequence
MALPVTALLLPLALLLHAARPEVQLQQSGPDLVKPGASVKISCKASGYSFTGYYMHWVKQSHGKSLEWIGRINPNNGVTLYNQKFKDKAILTVDKSSTTAYMELRSLTSEDSAVYYCARSTMITNYVMDYWGQVTSVTVSSGGGGSGGGGSGGGGSSIVMTQTPTFLLVSAGDRVTITCKASQSVSNDVAWYQQKPGQSPTLLISYTSSRYAGVPDRFIGSGYGTDFTFTISTLQAEDLAVYFCQQDYNSPPTFGGGTKLEIKRSDP

SEQ ID NO: 4085 - protein, 272 aa, Artificial Sequence
  Description of Artificial Sequence: Synthetic scFv sequence
MALPVTALLLPLALLLHAARPEVQLQQSGPELIKPGASVKMSCKASGYTFTSYVMHWVKQKPGQGLEWIGYINPYNDGTKYNEKFKGKATLTSDKSSSTAYMELSSLTSEDSAVYYCARGTYYYGSRVFDYWGQGTTLTVSSGGGGSGGGGSGGGGSDIVMTQAAPSIPVTPGESVSISCRSSKSLLNSNGNTYLYWFLQRPGQSPQLLIYRMSNLASGVPDRFSGSGSGTAFTLRISRVEAEDVGVYYCMQHLEYPFTFGAGTKLELKRSD

SEQ ID NO: 4086 - protein, 273 aa, Artificial Sequence
  Description of Artificial Sequence: Synthetic scFv sequence
MALPVTALLLPLALLLHAARPEVQLQQSGPELIKPGASVKMSCKASGYTFTSYVMHWVKQKPGQGLEWIGYINPYNDGTKYNEKFKGKATLTSDKSSSTAYMELSSLTSEDSAVYYCARGTYYYGSRVFDYWGQGTTLTVSSGGGGSGGGGSGGGGSDIVMTQAAPSIPVTPGESVSISCRSSKSLLNSNGNTYLYWFLQRPGQSPQLLIYRMSNLASGVPDRFSGSGSGTAFTLRISRVEAEDVGVYYCMQHLEYPFTFGAGTKLELKRSDP

SEQ ID NO: 4087 - protein, 277 aa, Artificial Sequence
  Description of Artificial Sequence: Synthetic scFv sequence
MAPAMESPTLLCVALLFFAPDGVLAEVQLQQSGPELIKPGASVKMSCKASGYTFTSYVMHWVKQKPGQGLEWIGYINPYNDGTKYNEKFKGKATLTSDKSSSTAYMELSSLTSEDSAVYYCARGTYYVGSRVFDYWGQGTTLTVSSGGGGSGGGGSGGGGSDIVMTQAAPSIPVTPGESVSISCRSSKSLLNSNGNTYLYWFLQRPGQSPQLLIYRMSNLASGVPDRFSGSGSGTAFTLRISRVEAEDVGVYVCMQHLEYPFTFGAGTKLELKRSDP

SEQ ID NO: 4088 - protein, 277 aa, Artificial Sequence
  Description of Artificial Sequence: Synthetic scFv sequence
MAPAMESPTLLCVALLFFAPDGVLAEVQLQQSGPELIKPGASVKMSCKASGYTFTSYVMHWVKQKPGQGLEWIGYINPYNDGTKYNEKFKGKATLTSDKSSSTAYMELSSLTSEDSAVYYCARGTYYYGSRVFDYWGQGTTLTVSSGGGGSGGGGSGGGGSDIVMTQAAPSIPVTPGESVSISCRSSKSLLNSNGNTYLYWFLQRPGQSPQLLIYRMSNLASGVPDRFSGSGSGTAFTLRISRVEAEDVGVYYCMQHLEYPFTFGAGTKLELKRSDP

SEQ ID NO: 4089 - protein, 495 aa, Artificial Sequence
  Description of Artificial Sequence: Synthetic scFv sequence
METDTLLLWVLLLWVPGSTGEVQLQQSGPELIKPGASVKMSCKASGYTFTSYVMHWVKQKPGQGLEWIGYINPYNDGTKYNEKFKGKATLTSDKSSSTAYMELSSLTSEDSAVYYCARGTYYYGSRVFDYWGQGTTLTVSSGGGGSGGGGSGGGGSDIVMTQAAPSIPVTPGESVSISCRSSKSLLNSNGNTYLYWFLQRPGQSPQLLIYRMSNLASGVPDRFSGSGSGTAFTLRISRVEAEDVGVYYCMQHLEYPFTFGAGTKLELKRSDPTTTPAPRPPTPAPTIASQPLSLRPEACRPAAGGAVHTRGLDFACDIYIWAPLAGTCGVLLLSLVITLYCKRGRKKLLYIFKQPFMRPVQTTQEEDGCSCRFPEEEEGGCELRVKFSRSADAPAYQQGQNQLYNELNLGRREEYDVLDKRRGRDPEMGGKPRRKNPQEGLYNELQKDKMAEAYSEIGMKGERRRGKGHDGLYQGLSTATKDTYDALHMQALPPR

SEQ ID NO: 4090 - protein, 252 aa, Artificial Sequence
  Description of Artificial Sequence: Synthetic scFv sequence
QITLKESGPTLVKPTQTLTLTCTFSGFSLSTSGVGVGWIRQPPGKALEWLALIYWDDDKRYSPSLKSRLTITKDTSKNQVVLTMTNMDPVDTATYYCAHIDYGSGSYSPRTSYYYYMSVWGKGTTVTVSSGGGGSGGGGSGGGGSAIQLTQSPSFLSASVGDRVTITCRASQGISSYLNWYQQRAGKAPELLIYAASNLQSGVPSRFSGSGSGTDFTLTITSVQPEDFATYFCQQGDAFPLTFGPGTKVTIR

SEQ ID NO: 4091 - protein, 249 aa, Artificial Sequence
  Description of Artificial Sequence: Synthetic scFv sequence
QMQLVQSGGGLVQPGRSLRLSCAASGFTFDDYAMHWVRQAPGKGLEWVSGISWNSGSIGYADSVKGRFTISRDNAKNSLYLQMNSLRAEDTAVYYCARDQGYHYYDSAEHAFDIWGQGTVVTVSSGGGGSGGGGSGGGGSAIRMTQSPSSLSASVGDRVTVTCQASQDISNYLNWYQQKPGRAPKLLIYDASNVKAGVPSRFSGGGSGTDFTLTISSLQPEDFATYYCQQSYSTPQAYTFGQGTKLEIK

SEQ ID NO: 4092 - protein, 248 aa, Artificial Sequence
  Description of Artificial Sequence: Synthetic scFv sequence
QMQLVQSGGGLVQPGRSLRLSCAASGFTFDDYAMHWVRQAPGKGLEWVSGISWNSGSIGYADSVKGRFTISRDNAKNSLYLQMNSLRAEDTAVYYCARDQGYHYYDSAEHAFDIWGQGTVVTVSSGGGGSGGGGSGGGGSAIRMTQSPSTLSASVGDRVTITCRASQSISHYLAWYQQKPGKAPKLLIFDASRLASGVPSRFSGSGSGTDFTLTISSLQPEDFATYYCQQSYGAPMFTFGPGTRVDLK

SEQ ID NO: 4093 - protein, 119 aa, Artificial Sequence
  Description of Artificial Sequence: Synthetic scFv sequence
QVQLLESGAELVRPGSSVKISCKASGYAFSSYWMNWVKQRPGQGLEWIGQIYPGDGDTNYNGKFKGQATLTADKSSSTAYMQLSGLTSEDSAVYSCARKTISSVVDFYFDYWGQGTTVT

SEQ ID NO: 4094 - protein, 464 aa, Artificial Sequence
  Description of Artificial Sequence: Synthetic scFv sequence
QVQLLESGAELVRPGSSVKISCKASGYAFSSYWMNWVKQRPGQGLEWIGQIYPGDGDTNYNGKFKGQATLTADKSSSTAYMQLSGLTSEDSAVYSCARKTISSVVDFYFDYWGQGTTVTGGGSGGGSGGGSGGGSELVLTQSPKFMSTSVGDRVSVTCKASQNVGTNVAWYQQKPGQSPKPLIYSATYRNSGVPDRFTGSGSGTDFTLTITNVQSKDLADYFCQYNRYPYTSFFFTKLEIKRRSKIEVMYPPPYLDNEKSNGTIIHVKGKHLCPSPLFPGPSKPFWVLVVVGGVLACYSLLVTVAFIIFWVRSKRSRLLHSDYMNMTPRRPGPTRKHYQPYAPPRDFAAYRSRVKFSRSADAPAYQQGQNQLYNELNLGRREEYDVLDKRRGRDPEMGGKPRRKNPQEGLYNELQKDKMAEAYSEIGMKGERRRGKGHDGLYQGLSTATKDTYDALHMQALPPR

SEQ ID NO: 4095 - protein, 242 aa, Artificial Sequence
  Description of Artificial Sequence: Synthetic scFv sequence
QVQLQESGPGLVKPSETLSLTCTVSGVSLPDYGVSWIRQPPGKGLEWIGVIWGSETTYYQSSLKSRVTISKDNSKNQVSLKLSSVTAADTAVYYCAKHYYYGGSYAMDYWGQGTLVTVSSGGGGSGGGGSGGGGSEIVMTQSPATLSLSPGERATLSCRASQDISKYLNWYQQKPGQAPRLLIYHTSRLHSGIPARFSGSGSGTDYTLTISSLQPEDFAVYFCQQGNTLPYTFGQGTKLEIK

SEQ ID NO: 4096 - protein, 247 aa, Artificial Sequence
  Description of Artificial Sequence: Synthetic scFv sequence
QVQLQESGPGLVKPSETLSLTCTVSGVSLPDYGVSWIRQPPGKGLEWIGVIWGSETTYYQSSLKSRVTISKDNSKNQVSLKLSSVTAADTAVYYCAKHYYYGGSYAMDYWGQGTLVTVSSGGGGSGGGGSGGGGSGGGGSEIVMTQSPATLSLSPGERATLSCRASQDISKYLNWYQQKPGQAPRLLIYHTSRLHSGIPARFSGSGSGTDYTLTISSLQPEDFAVYFCQQGNTLPYTFGQGTKLEIK

SEQ ID NO: 4097 - protein, 242 aa, Artificial Sequence
  Description of Artificial Sequence: Synthetic scFv sequence
QVQLQESGPGLVKPSETLSLTCTVSGVSLPDYGVSWIRQPPGKGLEWIGVIWGSETTYYSSSLKSRVTISKDNSKNQVSLKLSSVTAADTAVYYCAKHYYYGGSYAMDYWGQGTLVTVSSGGGGSGGGGSGGGGSEIVMTQSPATLSLSPGERATLSCRASQDISKYLNWYQQKPGQAPRLLIYHTSRLHSGIPARFSGSGSGTDYTLTISSLQPEDFAVYFCQQGNTLPYTFGQGTKLEIK

SEQ ID NO: 4098 - protein, 241 aa, Artificial Sequence
  Description of Artificial Sequence: Synthetic scFv sequence
QVQLQQSGPELVKPGASVKISCKASGYAFSSSWMNWVKQRPGKGLEWIGRIYPGDEDTNYSGKFKDKATLTADKSSTTAYMQLSSLTSEDSAVYFCARSLLYGDYLDYWGQGTTLTVSSGGGGSGGGGSGGGGSQIVLTQSPAIMSASPGEKVTMTCSASSSVSYMHWYQQKSGTSPKRWIYDTSKLASGVPDRFSGSGSGTSYFLTINNMEAEDAATYYCQQWNINPLTFGAGTKLELKR

SEQ ID NO: 4099 - protein, 251 aa, Artificial Sequence
  Description of Artificial Sequence: Synthetic scFv sequence
QVQLVESGGGLVQPGRSLRLSCAASGFTFDDYAMHWVRQAPGKGLEWVSGISWNSGRIGYADSVKGRFTISRDNAKNSLFLQMNSLRAEDTAVYYCARDQGYHYYDSAEHAFDIWGQGTMVTVSSGGGGSGGGGSGGGGSQAVLTQPRSVSGSPGQSVTISCTGISSGVDSHRYVSWYQHHPGKAPKLMIYDFSKRPSGVPDRFSGSKSGNTASLTISGLQAEDEADYYCSSYAAISPNYVFGTGTKLTVL

SEQ ID NO: 4100 - protein, 239 aa, Artificial Sequence
  Description of Artificial Sequence: Synthetic scFv sequence
QVQLVESGGGLVQPGRSLRLSCAASGFTFDDYAMHWVRQAPGKGLEWVSGISWNSGRIGYADSVKGRFTISRDNAKNSLFLQMNSLRAEDTAVYYCARDQGYHYYDSAEHAFDIWGQGTMVTVSSGGGGSGGGGSGGGGSSYVLTQPPSASGTPGQRVTISCSGSSSNIGSNTVNWYQQFPGTAPKLLIYSNNQRPSGVPDRFSGSKSGTSASLAISGLQSEDEAEYYCAAWDDSLNVV

SEQ ID NO: 4101 - protein, 250 aa, Artificial Sequence
  Description of Artificial Sequence: Synthetic scFv sequence
QVQLVESGGGLVQPGRSLRLSCAASGFTFDDYAMHWVRQAPGKGLEWVSGISWNSGRIGYADSVKGRFTISRDNAKNSLFLQMNSLRAEDTAVYYCARDQGYHYYDSAEHAFDIWGQGTVVTVSSGGGGSGGGGSGGGGSQSALTQPASVSGSPGHSITISCTGTRSDVGGFDYVSWYQHNPGKAPKLIIYDVTKRPSGVSNRFSGAKSGITASLTISGLQAEDEADYYCTSYRPGPTFVFGTGTKLDIK

SEQ ID NO: 4102 - protein, 250 aa, Artificial Sequence
  Description of Artificial Sequence: Synthetic scFv sequence
QVQLVESGGGLVQPGRSLRLSCAASGFTFDDYAMHWVRQAPGKGLEWVSGISWNSGRIGYADSVKGRFTISRDNAKNSLFLQMNSLRAEDTAVYYCARDQGYHYYDSAEHAFDIWGQGTVVTVSSGGGGSGGGGSGGGGSQSALTQPASVSGSPGHSITISCTGTRSDVGGFDYVSWYQHNPGKAPKLIIYDVTKRPSGVSNRFSGAKSGITASLTISGLQAEDEADYYCTSYRPGPTFVFGTGTKLTVL

SEQ ID NO: 4103 - protein, 252 aa, Artificial Sequence
  Description of Artificial Sequence: Synthetic scFv sequence
QVQLVESGGGLVQPGRSLRLSCAASGFTFDDYAMHWVRQAPGKGLEWVSGISWNSGRIGYADSVKGRFTISRDNAKNSLFLQMNSLRAEDTAVYYCARDQGYHYYDSAEHAFDIWGQGTVVTVSSGGGGSGGGGSGGGGSQSALTQPASVSGSPGQSITISCTGTSSDLGGYNYVSWYQHRPGKAPKLIIYDVTVRPSGVSDRFSGSKSGNTASLTISGLQAEDEADYYCGSYTSSSTLLWVFGGGTKLDIK

SEQ ID NO: 4104 - protein, 252 aa, Artificial Sequence
  Description of Artificial Sequence: Synthetic scFv sequence
QVQLVESGGGLVQPGRSLRLSCAASGFTFDDYAMHWVRQAPGKGLEWVSGISWNSGRIGYADSVKGRFTISRDNAKNSLFLQMNSLRAEDTAVYYCARDQGYHYYDSAEHAFDIWGQGTVVTVSSGGGGSGGGGSGGGGSQSALTQPASVSGSPGQSITISCTGTSSDLGGYNYVSWYQHRPGKAPKLIIYDVTVRPSGVSDRFSGSKSGNTASLTISGLQAEDEADYYCGSYTSSSTLLWVFGGGTKLTVL

SEQ ID NO: 4105 - protein, 252 aa, Artificial Sequence
  Description of Artificial Sequence: Synthetic scFv sequence
  MOD_RES (76)..(76): Any amino acid
  MOD_RES (201)..(201): Any amino acid
QVQLVESGGGLVQPGRSLRLSCAASGFTFDDYAMHWVRQAPGKGLEWVSGISWNSGRIGYADSVKGRFTISRDNAXNSLFLQMNSLRAEDTAVYYCARDQGYHYYDSAEHAFDIWGQGTVVTVSSGGGGSGGGGSGGGGSQSALTQPASVSGSPGQSITISCTETSSDLGGYNYVSWYQHRPGKAPKLIIYDVTVRPSGVXDRFSGSKSGNTASLTISGLQAEDEADYYCGSYTSSSTLLWVFGGGTKLTVL

SEQ ID NO: 4106 - protein, 249 aa, Artificial Sequence
  Description of Artificial Sequence: Synthetic scFv sequence
  MOD_RES (64)..(65): Any amino acid
  MOD_RES (68)..(69): Any amino acid
  MOD_RES (93)..(93): Any amino acid
  MOD_RES (98)..(98): Any amino acid
  MOD_RES (102)..(102): Any amino acid
  MOD_RES (104)..(104): Any amino acid
  MOD_RES (113)..(113): Any amino acid
  MOD_RES (145)..(146): Any amino acid
  MOD_RES (148)..(149): Any amino acid
  MOD_RES (233)..(233): Any amino acid
  MOD_RES (244)..(244): Any amino acid
QVQLVESGGGLVQPGRSLRLSCAASGFTFDDYAMHWVRQAPGKGLEWVSGISWNSGRIGYADSXXGRXXISRDNAKNSLFLQMNSLRAEDTAXYYCAXDQGXHXYDSAEHAFXIWGQGTVVTVSSGGGGSGGGGSGGGGSQSVLXXPXXASGSPGQSVTVSCTGTGRDIGAYDYVSWYQQHPGKAPKLLIYGVNKRPSGVPDRFSGSKSDNTASLTVSGLQVEDEADYYCSSXAGRKYVFGTGXKVTVL

SEQ ID NO: 4107 - protein, 249 aa, Artificial Sequence
  Description of Artificial Sequence: Synthetic scFv sequence
QVQLVQSGGGVVQPGRSLRLSCAASGFTFDDYAMHWVRQAPGKGLEWVSGISWNSGSIGYADSVKGRFTISRDNAKNSLYLQMNSLRAEDTAVYYCARDQGYHYYDSAEHAFDIWGQGTVVTVSSGGGGSGGGGSGGGGSEIVLTQSPATLSLSPGETATLSCRASQSINHYLAWYQQKPGQAPRLLIYDASNRATGIPARFSGSGSGTDFTLTISSLEPEDFATYYCQQSYSHPRMYTFGQGTKLEIK

SEQ ID NO: 4108 - protein, 263 aa, Artificial Sequence
  Description of Artificial Sequence: Synthetic scFv sequence
WSHPQFEKGGGGSGGGGSDIQMTQTTSSLSASLGDRVTISCRASQDISKYLNWYQQKPDGTVKLLIYHTSRLHSGVPSRFSGSGSGTDYSLTISNLEQEDIATYFCQQGNTLPYTFGGGTKLEITGSTSGSGKPGSGEGSTKGEVKLQESGPGLVAPSQSLSVTCTVSGVSLPDYGVSWIRQPPRKGLEWLGVIWGSETTYYNSALKSRLTIIKDNSKSQVFLKMNSLQTDDTAIYYCAKHYYYGGSYAMDYWGQGTSVTVSS

SEQ ID NO: 4109 - DNA, 882 bp, Artificial Sequence
  Description of Artificial Sequence: Synthetic scFv sequence
atgaaatacctattgcctacggcagccgctggattgttattactcgcagcaagcggcgcgcatgcctcctatgagctgacacagccaccctcggtgtcagtggccccaggaaagacggccacaattccctgtgggggaaacaacattgagagtaaaagtgtccactggtaccagcagcggccaggccaggcccctgtcttggtcatctatgatgataccgaccggccctcagggatccctgagcgattctctggctccaactctgggaacacggccaccctgaccatcagcggggtcgaagccggggatgaggccgactatttctgtcaggtgtgggatagtcatagtgatcatgaggtgttcggcggagggaccaagctcaccgtcctatccggagggtcgaccataacttcgtataatgtatactatacgaagttatcctcgagcggttccgaggtgcagctggtggagaccgggggaggcttggtacagcctggagggtccctgagactctcctgtgcagcctctggattcaccttcagtagttatgaaatgaactgggtccgccaggctccagggaaggggctggagtgggtttcatacattagtagtagtggcagtaccatatactacgcagactctgtgaagggccgattcaccatctccagagacaacgccaagaactcactgtatctgcaaatgaacagcctgagagctgaggacacggctgtttattactgtgcgagagagcatgagtgggaggcgggcgcttttgatatctggggccaagggacaatggtcaccgtctcttcagctagcggcaaaccaatcccaaacccactgctgggcctggatagtactcaccatcaccatcaccattga

SEQ ID NO: 4110 - protein, 293 aa, Artificial Sequence
  Description of Artificial Sequence: Synthetic scFv sequence
MKYLLPTAAAGLLLLAASGAHASYELTQPPSVSVAPGKTATIPCGGNNIESKSVHWYQQRPGQAPVLVIYDDTDRPSGIPERFSGSNSGNTATLTISGVEAGDEADYFCQVWDSHSDHEVFGGGTKLTVLSGGSTITSYNVYYTKLSSSGSEVQLVETGGGLVQPGGSLRLSCAASGFTFSSYEMNWVRQAPGKGLEWVSYISSSGSTIYYADSVKGRFTISRDNAKNSLYLQMNSLRAEDTAVYYCAREHEWEAGAFDIWGQGTMVTVSSASGKPIPNPLLGLDSTHHHHHH

SEQ ID NO: 4111 - protein, 275 aa, Artificial Sequence
  Description of Artificial Sequence: Synthetic scFv sequence
  MOD_RES (236)..(236): Any amino acid
  MOD_RES (245)..(245): Any amino acid
GAHASYELTQPPSVSVAPGKTATIPCGGNNIESKSVHWYQQRPGQAPVLVIYDDTDRPSGIPERFSGSNSGNTATLTISGVEAGDEADYFCQVWDSHSDHEVFGGGTKLTVLSGGSTITSYNVYYTKLSSSGSEVQLVETGGGLVQPGGSLRLSCAASGFTFSSYEMNWVRQAPGKGLEWVSYISSSGSTIYYADSVKGRFTISRDNAKNSLYLQMNSLRAEDTAVYYCAREHEWXAGAFDIWGXGTMVTVSSASGKPIPNPLLGLDSTHHHHHH

SEQ ID NO: 4112 - protein, 273 aa, Artificial Sequence
  Description of Artificial Sequence: Synthetic scFv sequence
GAHAQPVLTQPPSVSVAPGQTAKITCGGNNIGSKSVHWYQQKPGQAPVLVVYDDSDRPSGIPERFSGSNSGNAATLTISRVEAGDEADYYCQVWDSSSGLVFGTGTKVTVLSGGSTITSYNVYDTKLSSSGTEVQLLESGAEVKKPGESLKISCKGSGYSFTSYWIGWVRQMPGKGLEWMGIIYPGDSDTRYSPSSQGQVTISADKSISTAYLRWSGLKASDTAMYYCARVSSDSGAFDIWGQGTMVTVSSASGKPIPNPLLGLDSTHHHHHH

SEQ ID NO: 4113 - DNA, 822 bp, Artificial Sequence
  Description of Artificial Sequence: Synthetic scFv sequence
ggcgcgcatgcccagccagtgctgactcagcccccctcggtgtcagtggccccgggacagacggccaagatcacctgtgggggaaacaacattggaagtaaaagtgtgcactggtaccagcagaagccaggccaggcccctgtgctggtcgtctatgatgatagcgaccggccctcagggatccctgagcgattctctggctccaactctgggaacgcggccaccctgaccatcagcagggtcgaagccggggatgaggccgactattactgtcaggtgtgggatagtagtagtggccttgtcttcggaactgggaccaaggtcaccgtcctatccggagggtcgaccataacttcgtataatgtatacgatacgaagttatcctcgagcggtaccgaggtgcagttgttggagtctggagcagaggtgaaaaagccgggggagtctctgaagatctcctgtaagggttctggatacagctttaccagctactggatcggctgggtgcgccagatgcccgggaaaggcctggagtggatggggatcatctatcctggtgactctgataccagatacagcccgtcctcccaaggccaggtcaccatctcagccgacaagtccatcagcaccgcctacctgcggtggagcggcctgaaggcctcggacaccgccatgtattactgtgcgagagtatcgagtgactccggtgcttttgatatctggggccaagggacaatggtcaccgtctcttcagctagcggcaaaccaatcccaaacccactgctgggcctggatagtactcaccatcaccatcaccattag

SEQ ID NO: 4114 - DNA, 813 bp, Artificial Sequence
  Description of Artificial Sequence: Synthetic scFv sequence
atggccctccctgtcaccgccctgctgcttccgctggctcttctgctccacgccgctcggcccgaaattgtgatgacccagtcacccgccactcttagcctttcacccggtgagcgcgcaaccctgtcttgcagagcctcccaagacatctcaaaataccttaattggtatcaacagaagcccggacaggctcctcgccttctgatctaccacaccagccggctccattctggaatccctgccaggttcagcggtagcggatctgggaccgactacaccctcactatcagctcactgcagccagaggacttcgctgtctatttctgtcagcaagggaacaccctgccctacacctttggacagggcaccaagctcgagattaaaggtggaggtggcagcggaggaggtgggtccggcggtggaggaagccaggtccaactccaagaaagcggaccgggtcttgtgaagccatcagaaactctttcactgacttgtactgtgagcggagtgtctctccccgattacggggtgtcttggatcagacagccaccggggaagggtctggaatggattggagtgatttggggctctgagactacttactactcttcatccctcaagtcacgcgtcaccatctcaaaggacaactctaagaatcaggtgtcactgaaactgtcatctgtgaccgcagccgacaccgccgtgtactattgcgctaagcattactattatggcgggagctacgcaatggattactggggacagggtactctggtcaccgtgtccagccaccaccatcatcaccatcaccat

SEQ ID NO: 4115 - DNA, 813 bp, Artificial Sequence
  Description of Artificial Sequence: Synthetic scFv sequence
atggccctccctgtcaccgccctgctgcttccgctggctcttctgctccacgccgctcggcccgaaattgtgatgacccagtcacccgccactcttagcctttcacccggtgagcgcgcaaccctgtcttgcagagcctcccaagacatctcaaaataccttaattggtatcaacagaagcccggacaggctcctcgccttctgatctaccacaccagccggctccattctggaatccctgccaggttcagcggtagcggatctgggaccgactacaccctcactatcagctcactgcagccagaggacttcgctgtctatttctgtcagcaagggaacaccctgccctacacctttggacagggcaccaagctcgagattaaaggtggaggtggcagcggaggaggtgggtccggcggtggaggaagccaggtccaactccaagaaagcggaccgggtcttgtgaagccatcagaaactctttcactgacttgtactgtgagcggagtgtctctccccgattacggggtgtcttggatcagacagccaccggggaagggtctggaatggattggagtgatttggggctctgagactacttactaccaatcatccctcaagtcacgcgtcaccatctcaaaggacaactctaagaatcaggtgtcactgaaactgtcatctgtgaccgcagccgacaccgccgtgtactattgcgctaagcattactattatggcgggagctacgcaatggattactggggacagggtactctggtcaccgtgtccagccaccaccatcatcaccatcaccat

SEQ ID NO: 4116 - protein, 271 aa, Artificial Sequence
  Description of Artificial Sequence: Synthetic scFv sequence
MALPVTALLLPLALLLHAARPEIVMTQSPATLSLSPGERATLSCRASQDISKYLNWYQQKPGQAPRLLIYHTSRLHSGIPARFSGSGSGTDYTLTISSLQPEDFAVYFCQQGNTLPYTFGQGTKLEIKGGGGSGGGGSGGGGSQVQLQESGPGLVKPSETLSLTCTVSGVSLPDYGVSWIRQPPGKGLEWIGVIWGSETTYYQSSLKSRVTISKDNSKNQVSLKLSSVTAADTAVYYCAKHYYYGGSYAMDYWGQGTLVTVSSHHHHHHHH

SEQ ID NO: 4117 - DNA, 813 bp, Artificial Sequence
  Description of Artificial Sequence: Synthetic scFv sequence
atggctctgcccgtgaccgcactcctcctgccactggctctgctgcttcacgccgctcgcccacaagtccagcttcaagaatcagggcctggtctggtgaagccatctgagactctgtccctcacttgcaccgtgagcggagtgtccctcccagactacggagtgagctggattagacagcctcccggaaagggactggagtggatcggagtgatttggggtagcgaaaccacttactattcatcttccctgaagtcacgggtcaccatttcaaaggataactcaaagaatcaagtgagcctcaagctctcatcagtcaccgccgctgacaccgccgtgtattactgtgccaagcattactactatggagggtcctacgccatggactactggggccagggaactctggtcactgtgtcatctggtggaggaggtagcggaggaggcgggagcggtggaggtggctccgaaatcgtgatgacccagagccctgcaaccctgtccctttctcccggggaacgggctaccctttcttgtcgggcatcacaagatatctcaaaatacctcaattggtatcaacagaagccgggacaggcccctaggcttcttatctaccacacctctcgcctgcatagcgggattcccgcacgctttagcgggtctggaagcgggaccgactacactctgaccatctcatctctccagcccgaggacttcgccgtctacttctgccagcagggtaacaccctgccgtacaccttcggccagggcaccaagcttgagatcaaacatcaccaccatcatcaccatcac

SEQ ID NO: 4118 - protein, 271 aa, Artificial Sequence
  Description of Artificial Sequence: Synthetic scFv sequence
MALPVTALLLPLALLLHAARPQVQLQESGPGLVKPSETLSLTCTVSGVSLPDYGVSWIRQPPGKGLEWIGVIWGSETTYYSSSLKSRVTISKDNSKNQVSLKLSSVTAADTAVYYCAKHYYYGGSYAMDYWGQGTLVTVSSGGGGSGGGGSGGGGSEIVMTQSPATLSLSPGERATLSCRASQDISKYLNWYQQKPGQAPRLLIYHTSRLHSGIPARFSGSGSGTDYTLTISSLQPEDFAVYFCQQGNTLPYTFGQGTKLEIKHHHHHHHH

SEQ ID NO: 4119 - DNA, 813 bp, Artificial Sequence
  Description of Artificial Sequence: Synthetic scFv sequence
atggctctgcccgtgaccgcactcctcctgccactggctctgctgcttcacgccgctcgcccacaagtccagcttcaagaatcagggcctggtctggtgaagccatctgagactctgtccctcacttgcaccgtgagcggagtgtccctcccagactacggagtgagctggattagacagcctcccggaaagggactggagtggatcggagtgatttggggtagcgaaaccacttactatcaatcttccctgaagtcacgggtcaccatttcaaaggataactcaaagaatcaagtgagcctcaagctctcatcagtcaccgccgctgacaccgccgtgtattactgtgccaagcattactactatggagggtcctacgccatggactactggggccagggaactctggtcactgtgtcatctggtggaggaggtagcggaggaggcgggagcggtggaggtggctccgaaatcgtgatgacccagagccctgcaaccctgtccctttctcccggggaacgggctaccctttcttgtcgggcatcacaagatatctcaaaatacctcaattggtatcaacagaagccgggacaggcccctaggcttcttatctaccacacctctcgcctgcatagcgggattcccgcacgctttagcgggtctggaagcgggaccgactacactctgaccatctcatctctccagcccgaggacttcgccgtctacttctgccagcagggtaacaccctgccgtacaccttcggccagggcaccaagcttgagatcaaacatcaccaccatcatcaccatcac

SEQ ID NO: 4120 - protein, 271 aa, Artificial Sequence
  Description of Artificial Sequence: Synthetic scFv sequence
MALPVTALLLPLALLLHAARPQVQLQESGPGLVKPSETLSLTCTVSGVSLPDYGVSWIRQPPGKGLEWIGVIWGSETTYYQSSLKSRVTISKDNSKNQVSLKLSSVTAADTAVYYCAKHYYYGGSYAMDYWGQGTLVTVSSGGGGSGGGGSGGGGSEIVMTQSPATLSLSPGERATLSCRASQDISKYLNWYQQKPGQAPRLLIYHTSRLHSGIPARFSGSGSGTDYTLTISSLQPEDFAVYFCQQGNTLPYTFGQGTKLEIKHHHHHHHH

SEQ ID NO: 4121 - DNA, 828 bp, Artificial Sequence
  Description of Artificial Sequence: Synthetic scFv sequence
atggccctcccagtgaccgctctgctgctgcctctcgcacttcttctccatgccgctcggcctgagatcgtcatgacccaaagccccgctaccctgtccctgtcacccggcgagagggcaaccctttcatgcagggccagccaggacatttctaagtacctcaactggtatcagcagaagccagggcaggctcctcgcctgctgatctaccacaccagccgcctccacagcggtatccccgccagattttccgggagcgggtctggaaccgactacaccctcaccatctcttctctgcagcccgaggatttcgccgtctatttctgccagcaggggaatactctgccgtacaccttcggtcaaggtaccaagctggaaatcaagggaggcggaggatcaggcggtggcggaagcggaggaggtggctccggaggaggaggttcccaagtgcagcttcaagaatcaggacccggacttgtgaagccatcagaaaccctctccctgacttgtaccgtgtccggtgtgagcctccccgactacggagtctcttggattcgccagcctccggggaagggtcttgaatggattggggtgatttggggatcagagactacttactactcttcatcacttaagtcacgggtcaccatcagcaaagataatagcaagaaccaagtgtcacttaagctgtcatctgtgaccgccgctgacaccgccgtgtactattgtgccaaacattactattacggagggtcttatgctatggactactggggacaggggaccctggtgactgtctctagccatcaccatcaccaccatcatcac

SEQ ID NO: 4122 - protein, 276 aa, Artificial Sequence
  Description of Artificial Sequence: Synthetic scFv sequence
MALPVTALLLPLALLLHAARPEIVMTQSPATLSLSPGERATLSCRASQDISKYLNWYQQKPGQAPRLLIYHTSRLHSGIPARFSGSGSGTDYTLTISSLQPEDFAVYFCQQGNTLPYTFGQGTKLEIKGGGGSGGGGSGGGGSGGGGSQVQLQESGPGLVKPSETLSLTCTVSGVSLPDYGVSWIRQPPGKGLEWIGVIWGSETTYYSSSLKSRVTISKDNSKNQVSLKLSSVTAADTAVYYCAKHYYYGGSYAMDYWGQGTLVTVSSHHHHHHHH

SEQ ID NO: 4123 - protein, 248 aa, Artificial Sequence
  Description of Artificial Sequence: Synthetic scFv sequence
QVQLLESGAELVRPGSSVKISCKASGYAFSSYWMNWVKQRPGQGLEWIGQIYPGDGDTNYNGKFKGQATLTADKSSSTAYMQLSGLTSEDSAVYSCARKTISSVVDFYFDYWGQGTTVTGSTSGSGKPGSGEGSTKGELVLTQSPKFMSTSVGDRVSVTCKASQNVGTNVAWYQQKPGQSPKPLIYSATYRNSGVPDRFTGSGSGTDFTLTITNVQSKDLADYFYFCQYNRYPYTSGGGTKLEIKRRS

SEQ ID NO: 4124 - protein, 514 aa, Artificial Sequence
  Description of Artificial Sequence: Synthetic scFv sequence
EIVMTQSPATLSLSPGERATLSCRASQDISKYLNWYQQKPGQAPRLLIYHTSRLHSGIPARFSGSGSGTDYTLTISSLQPEDFAVYFCQQGNTLPYTFGQGTKLEIKGGGGSGGGGSGGGGSQVQLQESGPGLVKPSETLSLTCTVSGVSLPDYGVSWIRQPPGKGLEWIGVIWGSETTYYQSSLKSRVTISKDNSKNQVSLKLSSVTAADTAVYYCAKHYYYGGSYAMDYWGQGTLVTVSSGGGGSGGGGSGGGGSGGGGSEVQLQQSGPGLVKPSQTLSLTCAISGDSVSSNSAAWNWIRQSPSRGLEWLGRTYYRSKWYNDYAVSVKSRITINPDTSKNQFSLQLNSVTPEDTAVYYCARDLGWIAVAGTFDYWGQGTLVTVSSGGGGSGGGGSGGGGSQSALTQPASVSGSPGQSITISCTGTSSDVGGYNYVSWYQQHPGKAPKLMIYDVSKRPSGVSNRFSGSKSGNTASLTISGLQAEDEADYYCSSYTSSSLNHVFGTGTKVTVLT

SEQ ID NO: 4125 - protein, 514 aa, Artificial Sequence
  Description of Artificial Sequence: Synthetic scFv sequence
EVQLQQSGPGLVKPSQTLSLTCAISGDSVSSNSAAWNWIRQSPSRGLEWLGRTYYRSKWYNDYAVSVKSRITINPDTSKNQFSLQLNSVTPEDTAVYYCARDLGWIAVAGTFDYWGQGTLVTVSSGGGGSGGGGSGGGGSQSALTQPASVSGSPGQSITISCTGTSSDVGGYNYVSWYQQHPGKAPKLMIYDVSKRPSGVSNRFSGSKSGNTASLTISGLQAEDEADYYCSSYTSSSLNHVFGTGTKVTVLTGGGGSGGGGSGGGGSGGGGSEIVMTQSPATLSLSPGERATLSCRASQDISKYLNWYQQKPGQAPRLLIYHTSRLHSGIPARFSGSGSGTDYTLTISSLQPEDFAVYFCQQGNTLPYTFGQGTKLEIKGGGGSGGGGSGGGGSQVQLQESGPGLVKPSETLSLTCTVSGVSLPDYGVSWIRQPPGKGLEWIGVIWGSETTYYQSSLKSRVTISKDNSKNQVSLKLSSVTAADTAVYYCAKHYYYGGSYAMDYWGQGTLVTVSS

SEQ ID NO: 4126 - protein, 271 aa, Artificial Sequence
  Description of Artificial Sequence: Synthetic scFv sequence
MALPVTALLLPLALLLHAARPEIVMTQSPATLSLSPGERATLSCRASQDISKYLNWYQQKPGQAPRLLIYHTSRLHSGIPARFSGSGSGTDYTLTISSLQPEDFAVYFCQQGNTLPYTFGQGTKLEIKGGGGSGGGGSGGGGSQVQLQESGPGLVKPSETLSLTCTVSGVSLPDYGVSWIRQPPGKGLEWIGVIWGSETTYYSSSLKSRVTISKDNSKNQVSLKLSSVTAADTAVYYCAKHYYYGGSYAMDYWGQGTLVTVSSHHHHHHHH

SEQ ID NO: 4127 - protein, 242 aa, Artificial Sequence
  Description of Artificial Sequence: Synthetic scFv sequence
EIVMTQSPATLSLSPGERATLSCRASQDISKYLNWYQQKPGQAPRLLIYHTSRLHSGIPARFSGSGSGTDYTLTISSLQPEDFAVYFCQQGNTLPYTFGQGTKLEIKGGGGSGGGGSGGGGSQVQLQESGPGLVKPSETLSLTCTVSGVSLPDYGVSWIRQPPGKGLEWIGVIWGSETTYYSSSLKSRVTISKDNSKNQVSLKLSSVTAADTAVYYCAKHYYYGGSYAMDYWGQGTLVTVSS

SEQ ID NO: 4128 - protein, 247 aa, Artificial Sequence
  Description of Artificial Sequence: Synthetic scFv sequence
QVQLQESGPGLVKPSETLSLTCTVSGVSLPDYGVSWIRQPPGKGLEWIGVIWGSETTYYNSSLKSRVTISKDNSKNQVSLKLSSVTAADTAVYYCAKHYYYGGSYAMDYWGQGTLVTVSSGGGGSGGGGSGGGGSGGGGSEIVMTQSPATLSLSPGERATLSCRASQDISKYLNWYQQKPGQAPRLLIYHTSRLHSGIPARFSGSGSGTDYTLTISSLQPEDFAVYFCQQGNTLPYTFGQGTKLEIK

SEQ ID NO: 4129 - protein, 242 aa, Artificial Sequence
  Description of Artificial Sequence: Synthetic scFv sequence
EIVMTQSPATLSLSPGERATLSCRASQDISKYLNWYQQKPGQAPRLLIYHTSRLHSGIPARFSGSGSGTDYTLTISSLQPEDFAVYFCQQGNTLPYTFGQGTKLEIKGGGGSGGGGSGGGGSQVQLQESGPGLVKPSETLSLTCTVSGVSLPDYGVSWIRQPPGKGLEWIGVIWGSETTYYNSSLKSRVTISKDNSKNQVSLKLSSVTAADTAVYYCAKHYYYGGSYAMDYWGQGTLVTVSS

SEQ ID NO: 4130 - protein, 242 aa, Artificial Sequence
  Description of Artificial Sequence: Synthetic scFv sequence
QVQLQESGPGLVKPSETLSLTCTVSGVSLPDYGVSWIRQPPGKGLEWIGVIWGSETTYYNSSLKSRVTISKDNSKNQVSLKLSSVTAADTAVYYCAKHYYYGGSYAMDYWGQGTLVTVSSGGGGSGGGGSGGGGSEIVMTQSPATLSLSPGERATLSCRASQDISKYLNWYQQKPGQAPRLLIYHTSRLHSGIPARFSGSGSGTDYTLTISSLQPEDFAVYFCQQGNTLPYTFGQGTKLEIK

SEQ ID NO: 4131 - protein, 242 aa, Artificial Sequence
  Description of Artificial Sequence: Synthetic scFv sequence
EIVMTQSPATLSLSPGERATLSCRASQDISKYLNWYQQKPGQAPRLLIYHTSRLHSGIPARFSGSGSGTDYTLTISSLQPEDFAVYFCQQGNTLPYTFGQGTKLEIKGGGGSGGGGSGGGGSQVQLQESGPGLVKPSETLSLTCTVSGVSLPDYGVSWIRQPPGKGLEWIGVIWGSETTYYQSSLKSRVTISKDNSKNQVSLKLSSVTAADTAVYYCAKHYYYGGSYAMDYWGQGTLVTVSS

SEQ ID NO: 4132 - protein, 247 aa, Artificial Sequence
  Description of Artificial Sequence: Synthetic scFv sequence
QVQLQESGPGLVKPSETLSLTCTVSGVSLPDYGVSWIRQPPGKGLEWIGVIWGSETTYYSSSLKSRVTISKDNSKNQVSLKLSSVTAADTAVYYCAKHYYYGGSYAMDYWGQGTLVTVSSGGGGSGGGGSGGGGSGGGGSEIVMTQSPATLSLSPGERATLSCRASQDISKYLNWYQQKPGQAPRLLIYHTSRLHSGIPARFSGSGSGTDYTLTISSLQPEDFAVYFCQQGNTLPYTFGQGTKLEIK

SEQ ID NO: 4133 - protein, 247 aa, Artificial Sequence
  Description of Artificial Sequence: Synthetic scFv sequence
EIVMTQSPATLSLSPGERATLSCRASQDISKYLNWYQQKPGQAPRLLIYHTSRLHSGIPARFSGSGSGTDYTLTISSLQPEDFAVYFCQQGNTLPYTFGQGTKLEIKGGGGSGGGGSGGGGSGGGGSQVQLQESGPGLVKPSETLSLTCTVSGVSLPDYGVSWIRQPPGKGLEWIGVIWGSETTYYNSSLKSRVTISKDNSKNQVSLKLSSVTAADTAVYYCAKHYYYGGSYAMDYWGQGTLVTVSS

SEQ ID NO: 4134 - protein, 111 aa, Artificial Sequence
  Description of Artificial Sequence: Synthetic scFv sequence
ELVLTQSPKFMSTSVGDRVSVTCKASQNVGTNVAWYQQKPGQSPKPLIYSATYRNSGVPDRFTGSGSGTDFTLTITNVQSKDLADYFYFCQYNRYPYTSGGGTKLEIKRRS

SEQ ID NO: 4135 - protein, 251 aa, Artificial Sequence
  Description of Artificial Sequence: Synthetic scFv sequence
EVQLVQSGAEVKKPGESLKISCKGSGFTFRDYYMAWVRQMPGKGLEWMGSISYEGNPYYGDSVKGQVTISRDNSISTLYLQWSSLKASDTAMYYCARHDHNNVDWFAYWGQGTLVTVSSGGGGSGGGGSGGGGSGGGGSDIQMTQSPSSLSASVGDRVTITCKSSQSLLYSENKKNYLAWYQQKPGKVPKLLIFWASTRESGVPSRFSGSGSGTDFTLTISSLQPEDVATYYCQQYYNFPTFGQGTKLEIK

SEQ ID NO: 4136 - protein, 251 aa, Artificial Sequence
  Description of Artificial Sequence: Synthetic scFv sequence
EVQLVQSGAEVKKPGESLKISCKGSGFTFRDYYMAWVRQMPGKGLEWMGSISYEGNPYYGDSVKGQVTISRDNSISTLYLQWSSLKASDTAMYYCARHDHNNVDWFAYWGQGTLVTVSSGGGGSGGGGSGGGGSGGGGSEIVMTQSPATLSLSPGERATLSCKSSQSLLYSENKKNYLAWYQQKPGQAPRLLIFWASTRESGIPARFSGSGSGTDFTLTISSLQPEDLAVYYCQQYYNFPTFGQGTKLEIK

SEQ ID NO: 4137 - protein, 251 aa, Artificial Sequence
  Description of Artificial Sequence: Synthetic scFv sequence
QVQLVESGGGVVQPGRSLRLSCAASGFTFRDYYMAWVRQAPGKGLEWVASISYEGNPYYGDSVKGRFTISRDNAKSTLYLQMSSLRAEDTAVYYCARHDHNNVDWFAYWGQGTLVTVSSGGGGSGGGGSGGGGSGGGGSDIVMTQTPLSLSVTPGQPVSMSCKSSQSLLYSENKKNYLAWYLQKPGQSPQLLIFWASTRESGVPDRFSGSGSGTDFTLKISRVEAEDVGVYYCQQYYNFPTFGQGTKLEIK

SEQ ID NO: 4138 - protein, 251 aa, Artificial Sequence
  Description of Artificial Sequence: Synthetic scFv sequence
QVQLVQSGAEVKKPGASVKVSCKASGFTFRDYYMAWVRQAPGQGLEWMGSISYEGNPYYGDSVKGRVTMTRDNSTSTLYMELSSLRSEDTAVYYCARHDHNNVDWFAYWGQGTLVTVSSGGGGSGGGGSGGGGSGGGGSDIQMTQSPSSLSASVGDRVTITCKSSQSLLYSENKKNYLAWYQQKPGKVPKLLIFWASTRESGVPSRFSGSGSGTDFTLTISSLQPEDVATYYCQQYYNFPTFGQGTKLEIK

SEQ ID NO: 4139 - protein, 251 aa, Artificial Sequence
  Description of Artificial Sequence: Synthetic scFv sequence
QVQLVQSGAEVKKPGASVKVSCKASGFTFRDYYMAWVRQAPGQGLEWMGSISYEGNPYYGDSVKGRVTMTRDNSTSTLYMELSSLRSEDTAVYYCARHDHNNVDWFAYWGQGTLVTVSSGGGGSGGGGSGGGGSGGGGSEIVMTQSPATLSLSPGERATLSCKSSQSLLYSENKKNYLAWYQQKPGQAPRLLIFWASTRESGIPARFSGSGSGTDFTLTISSLQPEDLAVYYCQQYYNFPTFGQGTKLEIK

SEQ ID NO: 4140 - protein, 251 aa, Artificial Sequence
  Description of Artificial Sequence: Synthetic scFv sequence
QVQLVQSGAEVKKPGASVKVSCKASGFTFRDYYMAWVRQAPGQRLEWMGSISYEGNPYYGDSVKGRVTITRDNSASTLYMELSSLRSEDTAVYYCARHDHNNVDWFAYWGQGTLVTVSSGGGGSGGGGSGGGGSGGGGSDIQMTQSPSSLSASVGDRVTITCKSSQSLLYSENKKNYLAWYQQKPGKVPKLLIFWASTRESGVPSRFSGSGSGTDFTLTISSLQPEDVATYYCQQYYNFPTFGQGTKLEIK

SEQ ID NO: 4141 - protein, 247 aa, Artificial Sequence
  Description of Artificial Sequence: Synthetic scFv sequence
EVQLQQSGPGLVKPSLTLSLTCAISGDSVSSNSATWTWIRQSPSRGLEWLGRTYYRSTWYNDYAVSVKSRITINPDTSKNQFSLQLNSVTPEDTAVYYCAREGSGSYYAYWGQGTLVTVSSGGGGSGGGGSGGGGSQSALTQPASVSGSPGQSITISCTGTSSDVGGYNYVSWYQQHPGKAPKLMIYDVSNRPSGVSNRFSGSKSGNTASLTISGLQAEDEADYYCSSYTSSSTLYVFGTGTKVTVL

SEQ ID NO: 4142 - protein, 253 aa, Artificial Sequence
  Description of Artificial Sequence: Synthetic scFv sequence
EVQLQQSGPGLVKPSQTLPLTCAISGDSVLSNSDTWNWIRQSPSRGLEWLGRTYHRSTWYDDYASSVRGRVSINVDTSKNQYSLQLNAVTPEDTGVYYCARVRLQDGNSWSDAFDVWGQGTMVTVSSGGGGSGGGGSGGGGPQSALTQPASASGSPGQSVTISCTGTSSDVGGYNYVSWYQQHPGKAPKLMIYDVSNRPSGVSNRFSGSKSGNTASLTISGLQAEDEADYYCSSYTSSSTLYVFGTGTQLTVL

SEQ ID NO: 4143 - protein, 253 aa, Artificial Sequence
  Description of Artificial Sequence: Synthetic scFv sequence
EVQLQQSGPGLVKPSQTLSLTCAISGDSMLSNSDTWNWIRQSPSRGLEWLGRTYHRSTWYDDYASSVRGRVSINVDTSKNQYSLQLNAVTPEDTGVYYCARVRLQDGNSWSDAFDVWGQGTMVTVSSGGGGSGGGGSGGGGSQSALTQPASASGSPGQSVTISCTGTSSDVGGYNYVSWYQQHPGKAPKLMIYDVSNRPSGVSNRFSGSKSGNTASLTISGLQAEDEADYYCSSYTSSSTLYVFGTGTQLTVL

SEQ ID NO: 4144 - protein, 253 aa, Artificial Sequence
  Description of Artificial Sequence: Synthetic scFv sequence
EVQLQQSGPGLVKPSQTLSLTCAISGDSVLSNSDTWNWIRQSPSRGLEWLGRTYHRSTWYDDYASSVRGRVSINVDTSKNQYSLQLNAVTPEDTGAYYCARDRLQDGNSWSDAFDVWGQGTMVTVSSGGGGSGGGGSGGGGSQSALTQPASVSGSPGQSITISCTGTSSDVGGYNYVSWYQQHPGKAPKLMIYDVSNRPSGVSNRFSGSKSGNTASLTISGLQAEDEADYYCSSYTSSSTPYVFGTGTQLTVL

SEQ ID NO: 4145 - protein, 253 aa, Artificial Sequence
  Description of Artificial Sequence: Synthetic scFv sequence
EVQLQQSGPGLVKPSQTLSLTCAISGDSVLSNSDTWNWIRQSPSRGLEWLGRTYHRSTWYDDYASSVRGRVSINVDTSKNQYSLQLNAVTPEDTGVYYCARDRLQDGNSWSDAFDVWGQGTMVTVSSGGGGSGGGGSGGGGSQSALTQPASASGSPGQSVTISCTGTSSDVGGYNYVSWYQQHPGKAPKLMIYDVSNRPSGVSNRFSGSKSGNTASLTISGLQAEDEADYYCSSYTSSSTLYVFGTGTQLTVL

SEQ ID NO: 4146 - protein, 254 aa, Artificial Sequence
  Description of Artificial Sequence: Synthetic scFv sequence
EVQLQQSGPGLVKPSQTLSLTCAISGDSVLSNSDTWNWIRQSPSRGLEWLGRTYHRSTWYDDYASSVRGRVSINVDTSKNQYSLQLNAVTPEDTGVYYCARDRLQDGNSWSDAFDVWGQGTMVTVSSGGGGSGGGGSGGGGSQSALTQPASVSGSPGQSITISCTGSSSDIGGFNYVSWYQQHAGEAPKLMIYEVTNRPSGVSDRFSGSKSDNTASLTISGLQAEDEADYYCSSYASGSPLYVFGTGTKVTVLG

SEQ ID NO: 4147 - protein, 254 aa, Artificial Sequence
  Description of Artificial Sequence: Synthetic scFv sequence
EVQLQQSGPGLVKPSQTLSLTCAISGDSVLSNSDTWNWIRQSPSRGLEWLGRTYHRSTWYDDYASSVRGRVSINVDTSKNQYSLQLNAVTPEDTGVYYCARDRLQDGNSWSDAFDVWGQGTMVTVSSGGGGSGGGGSGGGGSQSALTQPASVSGSPGQSITISCTGTSSDVGGYNYVSWYQQHPGKAPKLMIYDVSNRPSGVSNRFSGSKSGNTASLTISGLQAEDEADYYCSSYTSSSTLVYVFGTGTKVTVL

SEQ ID NO: 4148 - protein, 254 aa, Artificial Sequence
  Description of Artificial Sequence: Synthetic scFv sequence
EVQLQQSGPGLVKPSQTLSLTCAISGDSVLSNSDTWNWIRQSPSRGLEWLGRTYHRSTWYDDYASSVRGRVSINVDTSKNQYSLQLNAVTPEDTGVYYCARDRLQDGNSWSDAFDVWGQGTMVTVSSGGGGSGGGGSGGGGSQSALTQPASVSGSPGQSITISCTGTSSDVGGYNYVSWYQQHPGKAPKLMIYDVSNRPSGVSNRFSGSKSGNTASLTISGLQAEDEADYYCSSYTSSSTLYVFGTGTKVTVLG

SEQ ID NO: 4149 - protein, 254 aa, Artificial Sequence
  Description of Artificial Sequence: Synthetic scFv sequence
EVQLQQSGPGLVKPSQTLSLTCAISGDSVLSNSDTWNWIRQSPSRGLEWLGRTYHRSTWYDDYASSVRGRVSINVDTSKNQYSLQLNAVTPEDTGVYYCARDRLQDGNSWSDAFDVWGQGTMVTVSSGGGGSGGGGSGGGGSQSALTQPASVSGSPGQSITISCTGTSSDVGGYNYVSWYQQHPGKAPKLMIYEVSNRPSGVSNRFSGSKSGNTASLTISGLQAEDEADYYCSSYTSSSTLYIFGTGTKVTVLG

SEQ ID NO: 4150 - protein, 254 aa, Artificial Sequence
  Description of Artificial Sequence: Synthetic scFv sequence
EVQLQQSGPGLVKPSQTLSLTCAISGDSVLSNSDTWNWIRQSPSRGLEWLGRTYHRSTWYDDYASSVRGRVSINVDTSKNQYSLQLNAVTPEDTGVYYCARDRLQDGNSWSDAFDVWGQGTMVTVSSGGGGSGGGGSGSGGSQSALTQPASVSGSPGQSITFSCTGTSSDIGGYNYVSWYQQHPGKAPKLMIYEVSNRPSGVSNRFSGTKSGNTASLTISGLQAEDEADYYCSSYTSSSTLYVFGTGTKLTVLG

SEQ ID NO: 4151 - protein, 251 aa, Artificial Sequence
  Description of Artificial Sequence: Synthetic scFv sequence
EVQLQQSGPGLVKPSQTLSLTCAISGDSVSNNNAAWNWIRQSPSRGLEWLGRTYHRSTWYNDYVGSVKSRITINPDTSKNQFSLQLNSVTPEDTAVYYCARETDYGDYGAFDIWGQGTTVTVSSGGGGSGGGGSGGGGSQSALTQPASVSGSPGQSITISCTGSRNDIGAYESVSWYQQHPGNAPKLIIHGVNNRPSGVFDRFSVSQSGNTASLTISGLQAEDEADYYCSSHTTTSTLYVFGTGTKVTVLG

SEQ ID NO: 4152 - protein, 251 aa, Artificial Sequence
  Description of Artificial Sequence: Synthetic scFv sequence
EVQLQQSGPGLVKPSQTLSLTCAISGDSVSSNSAAWNWIRQSPSRGLEWLGRTYYRSKWYNDYAVSVKSRITINPDTSKNQFSLQLNSVTPEDTAVYYCARDLGWIAVAGTFDYWGQGTLVTVSSGGGGSGGGGSGGGGSQSALTQPASVSGSPGQSITISCTGTSSDVGGYNYVSWYQQHPGKAPKLMIYDVSKRPSGVSNRFSGSKSGNTASLTISGLQAEDEADYYCSSYTSSSLNHVFGTGTKVTVL

SEQ ID NO: 4153 - protein, 249 aa, Artificial Sequence
  Description of Artificial Sequence: Synthetic scFv sequence
EVQLQQSGPGLVKPSQTLSLTCAISGDSVSSNSAAWNWIRQSPSRGLEWLGRTYYRSKWYNDYAVSVKSRITINPDTSKNQFSLQLNSVTPEDTAVYYCAREESSSGWYEGNWFDPWGQGTLVTVSSGGGGSGGGGSGGGGSSSELTQDPAVSVALGQTVRITCQGDSLRSYYASWYQQKPGQAPVLVIYGKNHRPSGIPDRFSGSSSGDTDSLTITGAQAEDEADYYCHSRDSSGNHLFGGGTKLTVL

SEQ ID NO: 4154 - protein, 254 aa, Artificial Sequence
  Description of Artificial Sequence: Synthetic scFv sequence
EVQLQQSGPGLVKPSQTLSLTCAISGDSVSSNSAAWNWIRQSPSRGLEWLGRTYYRSKWYSDYAVSVKSRITINPDTSKNQFSLQLNSVTPEDTAVYYCARDPYDFWSGYPDAFDIWGQGTMVTVSSGGGGSGGGGSGGGGSQSALTQPASVSGSPGQSITISCTGTSSDVGGYNYVSWYQQHPGKAPKVIISEVNNRPSGVSHRFSGSKSGNTASLTISGLQAEDEADYFCSSYTSGRTLYVFGTGSKVTVLG

SEQ ID NO: 4155 - protein, 247 aa, Artificial Sequence
  Description of Artificial Sequence: Synthetic scFv sequence
EVQLQQSGPGLVNPSQTLSITCAISGDSVSSNSAAWNWIRQSPSRGLEWLGRTFYRSKWYNDYAVSVKGRITISPDTSKNQFSLQLNSVTPEDTAVYYCAGGDYYYGLDVWGQGTTVTVSSGGGGSGGGGSGGGGSQSALTQPASVSGSPGQSITISCTGSSSDVGGYNSVSWYQQHPGKAPKLMIYEVINRPSGVSHRFSGSKSGNTASLTISGLQAEDEADYYCSSYTSSSTYVFGTGTKVTVLG

SEQ ID NO: 4156 - protein, 252 aa, Artificial Sequence
  Description of Artificial Sequence: Synthetic scFv sequence
EVQLVESGAEVKKPGASVKVSCKASGYTFTGYYMHWVRQAPGQGLEWMGWINPNSGGTNYAQKFQGRVTMTRDTSISTAYMELSRLRSDDTAVYYCAREPASSSWYGYYYYMDVWGKGTLVTVSSGGGGSGGGGSGGGGSGGGGSDIQMTQSPSSLSASVGDRVTITCRASQSINTYLNWYQQKPGKPPKLLIYAASNLQSGVPSRFSGSGSGTHFTLTISSLQPDDFATYYCQQSYSSLLTFGGGTKLEIK

SEQ ID NO: 4157 - protein, 243 aa, Artificial Sequence
  Description of Artificial Sequence: Synthetic scFv sequence
EVQLVESGAEVKKPGASVKVSCKASGYTFTSYYMHWVRQAPGQGLEWMGIINPSGGSTSYAQKFQGRVTMTRDTSTSTAYMELSSLRSEDTAVYYCAREAGVVAVDYWGQGTLVTVSSGGGGSGGGGSGGGGSQSALTQPASVSGSPGQSITISCTGTSSDVGGYNYVSWYQQHPGKAPKLMIYDVSNRPSGVSNRFSGSKSGNTASLTISGLQAEDEADYYCSSYTSSSTWVFGGGTKLTVL

SEQ ID NO: 4158 - protein, 247 aa, Artificial Sequence
  Description of Artificial Sequence: Synthetic scFv sequence
EVQLVESGAEVKKPGASVKVSCKASGYTFTSYYMHWVRQAPGQGLEWMGIINPSGGSTSYAQKFQGRVTMTRDTSTSTVYMELSSLRSEDTAVYYCARGPIGCSGGSCLDYWGQGTLVTVSSGGGGSGGGGSGGGGSQSALTQPAYVSGSPGQSITISCTGTNSDVGRYNYVSWYQQHPGKAPKLMIYEVSYRPSGVSNRFSGSKSGNTASLTISGLQAEDEADYYCSSYTTSSTLDFGTGTKVTVL

SEQ ID NO: 4159 - protein, 252 aa, Artificial Sequence
  Description of Artificial Sequence: Synthetic scFv sequence
EVQLVESGAEVKKPGESLKISCKGSGYSFTGSWIGWGRQMPGKGLEWMGIIYPGDSDTRYSPSFQGQVTISADKSISTAYLQWSSLKASDTAMYYCARGFLRGGDCCGALDIWGQGTMVTVSSGGGGSGGGGSGGGGSDIVMTQSPLSLPVTPGEPASISCRSSQSLLHSNGYNYLDWYLQKPGQSPQLLIYLGSNRASGVPDRFSGSGSGTDFTLKISRVEAEDVGVYYCMQALQTPPWTFGQGTKLEIKR

SEQ ID NO: 4160 - protein, 244 aa, Artificial Sequence
  Description of Artificial Sequence: Synthetic scFv sequence
EVQLVESGAEVKKPGSSVKVSCKASGGTFSSYAISWVRQAPGQGLEWMGGIIPIFGTANYAQKFQGRVTITADESTSTAYMELSSLRSEDTAVYYCARDHKVVRFGYWGQGTLVTVSSGGGGSGGGGSGGGGSHVILTQPPSASASLGASVKLTCTLSSGHSSYAIAWHQQQPEKGPRYLMKVNSDGSLSKGDGIPDRFSGSTSGAERYLTISSLQSEDEADYYCQTWGSGMAIFGGGTKLTVL

SEQ ID NO: 4161 - protein, 245 aa, Artificial Sequence
  Description of Artificial Sequence: Synthetic scFv sequence
EVQLVESGGGLVKPGGSLKLSCAASGFAFSIYDMSWVRQTPEKRLEWVAYISSGGGTYYPDTVKGRFTISRDNAKNTLYLQMSSLKSEDTAMYYCARHSGYGSSYGVLFAYWGQGTLVTVSAGGGGSGGGGSGGGGSDIQMTQTTSSLSASLGDRVTISCRASQDISNYLNWYQQKPDGTVKLLIYYTSILHSGVPSRFSGSGSGTDYSLTISNLEQEDFATYFCQQGNTLPWTFGGGTKLEIKA

SEQ ID NO: 4162 - protein, 245 aa, Artificial Sequence
  Description of Artificial Sequence: Synthetic scFv sequence
EVQLVESGGGLVKPGGSLKLSCAASGFAFSIYDMSWVRQTPEKRLEWVAYISSGGGTYYPDTVKGRFTISRDNAKNTLYLQMSSLKSEDTAMYYCARHSGYGTHWGVLFAYWGQGTLVTVSAGGGGSGGGGSGGGGSDIQMTQTTSSLSASLGDRVTISCRASQDISNYLNWYQQKPDGTVKLLIYYTSILHSGVPSRFSGSGSGTDYSLTISNLEQEDFATYFCQQGNTLPWTFGGGTKLEIKA

SEQ ID NO: 4163 - protein, 247 aa, Artificial Sequence
  Description of Artificial Sequence: Synthetic scFv sequence
EVQLVESGGGLVKPGGSLRLSCAASGFTFSDYYMSWIRQAPGKGLEWVSYISSSGSTIYYADSVKGRFTISRDNAKNSLYLQMNSLRAEDTAVYYCARDDFWSGSVDYWGQGTLVTVSSGGGGSGGGGSGGGGSGGGGSSYVLTQPPSVSVAPGKTATITCGGTNIGSKNVHWYQQKPGQAPVLAIYYDSDRPSGIPERFSGSNSGNTATLTISRVEAGDEADYFCQVWDSSSDHWVFGGGTKLTVL

SEQ ID NO: 4164 - protein, 241 aa, Artificial Sequence
  Description of Artificial Sequence: Synthetic scFv sequence
EVQLVESGGGLVKPGGSLRLSCVASGFTFSNAWMNWVRQAPGKGLEWVGRIKSKTDGGTADYAAPVKGRFTISRDDSKNTMYLQMNSLKTEDTGVYYCITGATDVWGQGTTVTVSSGGGGSGGGGSGGGGSSYVLTQPPSASGTPGQRVTISCSGSSSNIGSNYVYWYQQLPGTAPKLLIYRNNQRPSGVPDRFSGSKSGTSASLAISGLRSEDEADYYCAAWDDSLSGPVFGGGTKLTVL

SEQ ID NO: 4165 - protein, 247 aa, Artificial Sequence
  Description of Artificial Sequence: Synthetic scFv sequence
EVQLVESGGGLVQPGGSLRLSCAASGFTFSSYAMHWVRQAPGKGLEYVSAISSNGGSTYYANSVKDRFTISRDNSKNTLYLQMGSLRAEDMAVYYCARVHSSGYYHPGPNDYWGQGTLVTVSSGGGGSGGGGSGGGGSSSELTQDPAVSVALGQTVRITCQGDSLRTYYATWYQQKPGQAPVLVFYDENNRPSGIPDRFSGSSSGNTASLTITGTQAEDEADYYCSSRDSSGNPSCVFGGGTKLTVL

SEQ ID NO: 4166 - protein, 247 aa, Artificial Sequence
  Description of Artificial Sequence: Synthetic scFv sequence
EVQLVESGGGLVQPGGSLRLSCAASGFTFSSYAMSWVRQAPGKGLEWVSYISSSSSTIYYADSVKGRFTISRDNAKNSLYLQMNSLRAEDTAVYYCARDGPIRYFDHSKAFDIWGQGTMVTVSSGGGGSGGGGSGGGGSSSELTQDPAVSVALGQTVRITCQGDSLRSYYASWYQQKPGQAPVLVIYGKNNRPSGIPDRFSGSSSGNTASLTITGAQAEDEADYYRNSRDSSGNPYVFGTGTKVTVL

SEQ ID NO: 4167 - protein, 245 aa, Artificial Sequence
  Description of Artificial Sequence: Synthetic scFv sequence
EVQLVESGGGLVQPGRSLRLSCAASGFTFDDYAMHWVRQAPGKGLEWVSGISWNSGSIGYADSVKGRFTISRDNAKNSLYLQMNSLRAEDTALYYCAKDKGGGYYDFWSGSDYWGQGTLVTVSSGGGGSGGGGSGGGGSSSELTQDPAVSVALGQTVRITCQGDSLRSYYASWYQQKPGQAPVLVIYGKNNRPSGIPDRFSGSSSGNTASLTITGAQAEDEADYYCNSRDSSGWVFGGGTKLTVL

SEQ ID NO: 4168 - protein, 246 aa, Artificial Sequence
  Description of Artificial Sequence: Synthetic scFv sequence
EVQLVESGGGLVQPGRSLRLSCAASGFTFDDYAMHWVRQAPGKGLEWVSGISWNSGSIGYADSVKGRFTISRDNAKNSLYLQMNSLRAEDTALYYCAKGLSSWHFHDALDIWGQGTMVTVSSGGGGSGGGGSGGGGSSSELTQDPAVSVALGQTVRITCQGDSLRSYYASWYQQKPGQAPVLVIYGKNNRPSGIPDRFSGSSSGNTASLTITGAQAEDEADYYCNSRDSSGNHLWVFGGGTKLTVL

SEQ ID NO: 4169 - protein, 254 aa, Artificial Sequence
  Description of Artificial Sequence: Synthetic scFv sequence
QVNLRESGPALVKPTQTLTLTCTFSGFSLNTFGMSVSWIRQPPGKALEWLALIDWDDDKYYSTSLRTRLTISKDTAKNQVVLRMTNMDPMDTATYYCARIYGGDRTNTQAPYFFDLWGQGTLVTVSSGGGGSGGGGSGGGGSDVVMTQSPLSLPVTPGEPASISCRSSQSLLHSNGYNYLDWYLQKPGQSPQLLIYLGSNRASGVPDRFSGSGSGTDFTLKISRVEAEDVGVYYCMQALQTPWTFGQGTKLEIK

SEQ ID NO: 4170 - protein, 250 aa, Artificial Sequence
  Description of Artificial Sequence: Synthetic scFv sequence
QVQLQESGPGLVKPSETLSLTCSVSGGSINSYYWSWIRQAPGKGLEWIAFTSHSGNVKYNPSLTGRVTIAVDTSKNQFYLEVTSVTAADTAVYFCARGLDPLFAYDAFEIWGLGTMVTVSSGGGGSGGGGSGGGGSEIVLTQSPLSLPVTPGEPASISCRSSQSLLHSNGYNYLDWYLQKPGQSPQLLIYLGSNRASGVPDRFSGSGSGTDFTLKISRVEAEDVGVYYCMQVLQTPPLTFGGGTKVDIKR

SEQ ID NO: 4171 - protein, 245 aa, Artificial Sequence
  Description of Artificial Sequence: Synthetic scFv sequence
QVQLQESGPGLVKPSETLSLTCTVSGGSISSSSYYWGWIRQPPGKGLEWIGSIYYSGSTYYNPSLKSRVTISVDTSKNQFSLKLSSVTAADTAVYYCARGRMDTAMAQIWGQGTMVTVSSGDGGSGGGGSGGGGSNFMLTQPHSVSESPGKTVTIPCTGSSGSFASSYVQWYQQRPGSAPATVIYEDNQRPSGVPDRFSGSVDSSSNSASLTISGLKTEDEAVYYCQSYDGATWVFGGGTKLTVL

SEQ ID NO: 4172 - protein, 248 aa, Artificial Sequence
  Description of Artificial Sequence: Synthetic scFv sequence
QVQLQESGPGLVKPSGTLSLTCAVSGASITSRHWWNWVRHSPGKGLEWIGQIYHSGTTTYNPSLGSRVTISVDKSKNQISLELRSVTAADTATYYCVRDYLELATYYGMDVWGQGTTVTVSSGGGGSGGGGSGGGGSEIVLTQSPLSLPVTPGEPASISCRSSQSLLYSDGYNYLDWYLQKPGQSPQLLIYLGSNRASGVPDRFSGSGSGTDFTLQISGVETEDVGVYYCMQALQTQSFGQGTKLEIK

SEQ ID NO: 4173 - protein, 254 aa, Artificial Sequence
  Description of Artificial Sequence: Synthetic scFv sequence
QVQLQESGPGLVKPSQTLSLTCAISGDSVLSNSDTWNWIRQSPSRGLEWLGRTYHRSTWYDDYASSVRGRVSINVDTSKNQYSLQLNAVTPEDTGVYYCARDRLQDGNSWSDAFDVWGQGTMVTVSSGGGGSGGGGSGSGGSQSALTQPASVSGSPGQSITISCTGTSSDVGGYNYVSWYQQHPGKAPKLMIYEVSNRPSGVSNRFSGSKSGNTASLTISGLQAEDEADYYCSSYTSSSTLYVFGTGTKVTVLG

SEQ ID NO: 4174 - protein, 236 aa, Artificial Sequence
  Description of Artificial Sequence: Synthetic scFv sequence
QVQLQQSGPGLVKPSQTLSLTCAISGDSVSSNSAAWNWIRQSPSRGLEWLGRTYYRSKWYNDYAVSVKSRITINPDTSKNQFSLQLNSVTPEDTAVYYCAREVTGDLEDAFDIWGQGTMVTVSSGGGGSDIQMTQSPSSLSASVGDRVTITCRASQTIWSYLNWYQQRPGKAPNLLIYAASSLQSGVPSRFSGRGSGTDFTLTISSLQAEDFATYYCQQSYSIPQTFGQGTKLEIK

SEQ ID NO: 4175 - protein, 247 aa, Artificial Sequence
  Description of Artificial Sequence: Synthetic scFv sequence
QVQLVQSGAEVKKPGASVKVSCKASGYTFTGYYMHWVRQAPGQGLEWMGWINPNSGGTNYAQKFQGRVTMTRDTSISTAYMELSRLRSDDTAVYYCARDYWGYYGSGTLDYWGQGTLVTVSSGGGGSGGGGSGGGGSQSALTQPGSVSGSPGQSITISCTGTSSDVGGYNYVSWYQQHPGKAPKLIIYDVSSRPSGVSNRFSGSQSGNTASLTISGLQAEDEADYSCSSYAGSNTLVFGTGTKVTVL

SEQ ID NO: 4176 - protein, 252 aa, Artificial Sequence
  Description of Artificial Sequence: Synthetic scFv sequence
QVQLVQSGAEVKKPGASVKVSCKASGYTFTSYDINWVRQATGQGLEWMGWMNPNSGNTGYAQKFQGRVTMTRNTSISTAYMELSSLRSEDTAVYYCARGDSNYWSYYGMDVWGQGTLVTVSSGGGGSGGGGSGGGGSGGGGSQSVLTQPRSVSGSPGQSVTISCTGTSSDVGGYNYVSWYQQHPGEAPKLIIYDADKRPSGISNRFSSGKSGNTASLTISGLQVEDEADYYCCSYAGGSTWVFGGGTKVTVL

SEQ ID NO: 4177 - protein, 254 aa, Artificial Sequence
  Description of Artificial Sequence: Synthetic scFv sequence
QVQLVQSGAEVKKPGASVKVSCKASGYTFTSYGISWVRQAPGQGLEWMGWISAYNGNTNYAQKLQGRVTMTTDTSTSTAYMELRSLRSDDTAVYYCARAGLALYSNYVPYYYYGMDVWGQGTTVTVSSGGGGSGGGGSGGGGSNFMLTQPHSVSESPGKTVTISCTRSSGSIASNYVQWYQQRPGSSPTTVIYEDNQRPSGVPDRFSGSIDSSSNSASLTISGLKTEDEADYYCQSYDSSNPWVFGGGTKLTVL

SEQ ID NO: 4178 - protein, 247 aa, Artificial Sequence
  Description of Artificial Sequence: Synthetic scFv sequence
QVQLVQSGAEVKKPGASVKVSCKASGYTFTSYGISWVRQAPGQGLEWMGWISAYNGNTNYAQKLQGRVTMTTDTSTSTAYMELRSLRSDDTAVYYCASFSSSDSYDYWGQGTLVTVSSGGGGSGGGGSGGGGSGGGGSEIVLTQSPATLSVSPGERATLSCRASQSVTSNLAWYQQKPGQAPRLLIYAASTRATGIPARFSGSGSGTEFTLTISSMQSEDFAVYFCQQYHTWPPLTFGGGTKVEIKT

SEQ ID NO: 4179 - protein, 244 aa, Artificial Sequence
  Description of Artificial Sequence: Synthetic scFv sequence
QVQLVQSGAEVKKPGASVKVSCKASGYTFTSYYMHWVRQAPGQGLEWMGIINPSGGSTSYAQKFQGRVTMTRDTSISTAYMELSRLRSDDTAVYYCAREMDDSSGPDYWGQGTLVTVSSGGGGSGGGGSGGGGSQSALTQPASVSGSPGQSITISCTGTSSDVGGYNYVSWYQQHPGKAPKLMIYEVSNRPSGVSNRFSGSKSGNTASLTISGLQAEDEADYYCSSYTSSSTLVFGTGTKLTVL

SEQ ID NO: 4180 - protein, 246 aa, Artificial Sequence
  Description of Artificial Sequence: Synthetic scFv sequence
QVQLVQSGAEVKKPGASVKVSCKASGYTFTSYYMHWVRQAPGQGLEWMGIINPSGGSTSYAQKFQGRVTMTRDTSTSTVYMELSSLRAEDTAVYYCARGGYGDYLDAFDIWGQGTTVTVSSGGGGSGGGGSGSGGSQSALTQPASVSGSPGQSITISCTGTSSDVGGYNYVSWYQQHPGKAPKLMIYEVSNRPSGVSNRFSGSKSGNTASLTISGLQAEDEADYYCSSYTSSSTLVFGTGTQLTVL

SEQ ID NO: 4181 - protein, 246 aa, Artificial Sequence
  Description of Artificial Sequence: Synthetic scFv sequence
QVQLVQSGAEVKKPGASVKVSCKASGYTFTSYYMHWVRQAPGQGLEWMGIINPSGGSTSYAQKFQGRVTMTRDTSTSTVYMELSSLRSEDTAVYYCARDDDFWSGSGAFDIWGQGTTVTVSSGGGGSGGGGSGGGGSSSELTQDPAVSVALGQTVRITCQGDSLRSYYASWYQQKPGQAPVLVIYGKNNRPSGIPDRFSGSSSGNTASLTITGAQAEDEADYYCNSRDSSGNHPVVFGGGTKLTVL

SEQ ID NO: 4182 - protein, 246 aa, Artificial Sequence
  Description of Artificial Sequence: Synthetic scFv sequence
QVQLVQSGAEVKKPGASVKVSCKASGYTFTSYYMHWVRQAPGQGLEWMGIINPSGGSTSYAQKFQGRVTMTRDTSTSTVYMELSSLRSEDTAVYYCARDGFGELSGAFDIWGQGTMVTVSSGGGGSGGGGSGGGGSQSALTQPASVSGSPGQSITISCTGTSSDVGGYNYVSWYQQHPGKAPKLMIYDVSNRPSGVSNRFSGSKSGNTASLTISGLQAEDEADYYCSSYASSSTLVFGGGTKVTVL

SEQ ID NO: 4183 - protein, 247 aa, Artificial Sequence
  Description of Artificial Sequence: Synthetic scFv sequence
QVQLVQSGAEVKKPGASVKVSCKASGYTFTSYYMHWVRQAPGQGLEWMGIINPSGGSTSYAQKFQGRVTMTRDTSTSTVYMELSSLRSEDTAVYYCARDLAAAGNYYYYGMDVWGQGTTVTVSSGGGGSGGGGSGGGGSSSELTQDPAVSVALGQTARITCQGDSLRSYFTSWYHQKPGQAPVLVIYGNNNRPSGIPDRFSGSSSGNTASLTITGAQAEDEGDYYCDSRDSSGDHLVFGGGTKLTVL

SEQ ID NO: 4184 - protein, 242 aa, Artificial Sequence
  Description of Artificial Sequence: Synthetic scFv sequence
QVQLVQSGAEVKKPGASVKVSCKASGYTFTSYYMHWVRQAPGQGLEWMGIINPSGGSTSYAQKFQGRVTMTRDTSTSTVYMELSSLRSEDTAVYYCARDLDVSLDIWGQGTMVTVSSGGGGSGGGGSGGGGSQSALTQPASVSGSPGQSITISCSGTSSDVGGYNSVSWYQQYPGKAPKLMIYDVNNRPSGVSSRFSGSKSGNTASLTISGLQAEDEADYYCSSYTSSSTLFFGAGTKVTVL

SEQ ID NO: 4185 - protein, 250 aa, Artificial Sequence
  Description of Artificial Sequence: Synthetic scFv sequence
QVQLVQSGAEVKKPGASVKVSCKASGYTFTSYYMHWVRQAPGQGLEWMGIINPSGGSTSYAQKFQGRVTMTRDTSTSTVYMELSSLRSEDTAVYYCAREDDSSGYTSPFDYWGQGTLVTVSSGGGGSGGGGSGGGGSGGGRSSYELTQPPSVSVAPGETASIACGGHNIRSKNVHWYQQKPGQAPVLVISYDGDRPSGIPERFSGSNLGSTATLTISRVEAGDEADYYCQVWDSDSDHYVFGTGTKVTVL

SEQ ID NO: 4186 - protein, 241 aa, Artificial Sequence
  Description of Artificial Sequence: Synthetic scFv sequence
QVQLVQSGAEVKKPGASVKVSCKASGYTFTSYYMHWVRQAPGQGLEWMGIINPSGGSTSYAQKFQGRVTMTRDTSTSTVYMELSSLRSEDTAVYYCARGDYYMDVWGKGTTVTVSSGGGGSGGGGSGGGGSQSALTQPASASGSPGQSVTISCTGTSSDVGGYNYVSWYQQHPGKAPKLMIYEVSKRPSGVPDRFSGSKSGNTASLTISGLQAEDEADYYCSSYTSSGTLVFGGGTKLTVL

SEQ ID NO: 4187 - protein, 245 aa, Artificial Sequence
  Description of Artificial Sequence: Synthetic scFv sequence
QVQLVQSGAEVKKPGASVKVSCKASGYTFTSYYMHWVRQAPGQGLEWMGIINPSGGSTSYAQKFQGRVTMTRDTSTSTVYMELSSLRSEDTAVYYCARGSGSLGDAFDIWGQGTMVTVSSGGGGSGGGGSGGGGSQSALTQPASVSGSPGQSITISCTGSSSDVGGYNYVSWYQQHPGKAPKLMIYEVSNRPSGVSNRFSGSKSGNTASLTISGLQAEDEADYYCSSYTSSSTLVFGTGTKVTVL

SEQ ID NO: 4188 - protein, 246 aa, Artificial Sequence
  Description of Artificial Sequence: Synthetic scFv sequence
QVQLVQSGAEVKKPGASVKVSCKASGYTFTSYYMHWVRQAPGQGLEWMGIINPSGGSTSYAQKFQGRVTMTRDTSTSTVYMELSSLRSEDTAVYYCARGSYGDYGDAFDIWGQGTTVTVSSGGGGSGGGGSGSGGSQSALTQPASVSGSPGQSITISCTGTSSDVGGYKYVSWYQQHPGKAPKLMIYDVSNRPSGVSNRFSGSKSGNTASLTISGLQAEDEADYYCSSYTSSSTLVFGGGTKLTVL

SEQ ID NO: 4189 - protein, 248 aa, Artificial Sequence
  Description of Artificial Sequence: Synthetic scFv sequence
QVQLVQSGAEVKKPGASVKVSCKASGYTFTSYYMHWVRQAPGQGLEWMGIINPSGGSTSYAQKFQGRVTMTRDTSTSTVYMELSSLRSEDTAVYYCARPEGVSYYDSSVLDYWGQGTLVTVSSGGGGSGGGGSGGGGSQSALTQPASVSGSPGQSITISCTGTSSDVGGYKHVSWYQHHPGKAPKLMIYDVSNRPSGVSNRFSGSKSGNTASLTVSGLQAEDEAHYYCVSYRNFNSLVFGTGTKVTVL

SEQ ID NO: 4190 - protein, 251 aa, Artificial Sequence
  Description of Artificial Sequence: Synthetic scFv sequence
QVQLVQSGGGLIQPGGSLRLSCAASGFTVSSNYMSWVRQAPGKGLEWVSVIYSGGSTYYADSVKGRFTISRDNSKNTLYLQMNSLRAEDTAVYYCASQSTPYDSSGYYSGDAFDIWGQGTMVTVSSGGGGSGGGGSGGGGSSYVLTQPPSASGTPGQRVTISCSGSSSNIGSNYVYWYQQLPGTAPKLLIYRNNQRPSGVPDRFSGSKSGTSASLAISGLRSEDEADYYCAAWDDSLSGYVFGTGTKLTVL

SEQ ID NO: 4191 - protein, 250 aa, Artificial Sequence
  Description of Artificial Sequence: Synthetic scFv sequence
QVQLVQSGGGVVQPGRSLRLSCAASGFTFSSYAMSWVRQAPGKGLEWVSAISGSGGSTYYADSVKGRFTISRDNSKNTLYLQMNSLRAEDTAVYYCAKEPLFGVVEEDVDYWGQGTLVTVSSGGGGSGGGGSGGGGSDVVMTQSPLSLPVTPGEPASISCRSSQSLLAGNGHNYLDWYLQKPGQSPQLLIYLGSNRASGVPDRFSGSGSGTDFTLKISRVEAEDVGVYYCMQALQNPLTFGGGTKLEIKR

SEQ ID NO: 4192 - protein, 244 aa, Artificial Sequence
  Description of Artificial Sequence: Synthetic scFv sequence
EVQLVESGGGLVQPGGSLRLSCAASGFTFSSFGMHWVRQAPGKGLEWVAYISSDSSAIYYADTVKGRFTISRDNAKNSLYLQMNSLRDEDTAVYYCGRGRENIYYGSRLDYWGQGTTVTVSSGGGGSGGGGSGGGGSDIQLTQSPSFLSASVGDRVTITCKASQNVDTNVAWYQQKPGKAPKALIYSASYRYSGVPSRFSGSGSGTDFTLTISSLQPEDFATYYCQQYNNYPFTFGQGTKLEIK

SEQ ID NO: 4193 - protein, 248 aa, Artificial Sequence
  Description of Artificial Sequence: Synthetic scFv sequence
QVQLQQSGAEVKKPGSSVKVSCKASGGTFSSYAISWVRQAPGQGLEWMGGIIPILGIANYAQKFQGRVTITADESTSTAYMELSSLRSEDTAVYYCARGGAGGSGSYYPLIWGQGTTVTVSSGGGGSGGGGSGGGGSEIVLTQSPATLSLSPGERATLSCGASQSVSSSYLAWYQQKPGQAPRLLIYDASSRATGIPARFSGSGSGTDFTLTISSLEPEDFAVYYCQQRSSWPPTWTFGQGTKLEIKR

SEQ ID NO: 4194 - protein, 244 aa, Artificial Sequence
  Description of Artificial Sequence: Synthetic scFv sequence
QVQLQQSGAEVKKPGSSVKVSCKASGGTFSSYAISWVRQAPGQGLEWMGGIIPILGIANYAQKFQGRVTITADESTSTAYMELSSLRSEDTAVYYCATGGSGRYALDIWGQGTMVTVSSGGGGSGGGGSGGGGSEIVLTQSPATLSLSPGERATLSCRASQSVSSYLAWYQQKPGQAPRLLIYDASNRATGIPARFSGSGSGTDFTLTISSLEPEDFAVYYCQQRSNWPPSYTFGQGTKLEIKR

SEQ ID NO: 4195 - protein, 242 aa, Artificial Sequence
  Description of Artificial Sequence: Synthetic scFv sequence
QVQLVQSGAEVKKPGSSVKVSCKASGGTFSSYAISWVRQAPGQGLEWMGGIIPILGTANYAQKFQGRVTITADESTSTAYMELSSLRSEDTAVYYCARWGGGAFDIWGQGTMVTVSSGGGGSGGGGSGGGGSEIVLTQSPGTLSLSPGERATLSCRASQSVGGYLAWYQQKPGQAPRLLIYDASNRATGIPARFSGSGSGTDFTLTISSLEPEDFAVYYCQQRNNWPPMYTFGQGTKLEIKR

SEQ ID NO: 4196 - protein, 406 aa, Artificial Sequence
  Description of Artificial Sequence: Synthetic scFv sequence
QEDERIVLVDNKCKCARISRIIRSSEDPNEDIVERIRIIVPLNNREISDPSPLRTRFVYHLSDLCKKCDPTEVELDNQIVTATQSNICDEDSATETCYTYDRNKCYTAVVPLVYGGETKMVETALTPDACYPDGGGGSGGGGSGGGGSQVQLQQSGAELARPGASVKMSCKASGYTFTRYTMHWVKQRPGQGLEWIGYINPSRGYTNYNQKFKDKATLTTDKSSSTAYMQLSSLTSEDSAVYYCARYYDDHYSLDYWGQGTTLTVSSGGGGSGGGGSGGGGSQIVLTQSPAIMSASPGEKVTMTCSASSSVSYMNWYQQKSGTSPKRWIYDSKLASGVPAHFRGSGSGSYSLISGMEAEDAATYYCQQWSSNPFTFGSGTKLEIKEQKLISEEDLNSAVDHHHHHH

SEQ ID NO: 4197 - protein, 558 aa, Artificial Sequence
  Description of Artificial Sequence: Synthetic scFv sequence
QVQLQQWGAGLLKPSETLSLTCAVYGGSFSGYYWSWIRQPPGKGLEWIGEINHSGSNYNPSLKSRVISVDSKNQFSLKLSSVTAADTAVYYCARGRMAWGASVNFDYWGQGTLVTVSSGSASAPTLFPLVSCENSPSDSSVAVGCLAQDFLPDSITFSWKYKNNSDISSTRGFPSVLRGGKYAASQVLLPSKDVMQGTDEHVVCKVQHPNGNKEKNVPLPVIAELPPKVSVFVPPRDGFFGNPRKSKLICQATGFSPRQIQVSWLREGKQVGSGVTTDQVQAEAKESGPTTYKVTSTLTIKESDWLSQSMFTCRVDHRGLTFQQNASSMCVPDQDTAIRVFAIPPSFASIFLTKSKLTCLVTDLTYDSVISWTRQNGEAVKTHTISESHPNAFSAVGEASICEDDWNSGERFTCTVTHDLPSPLKQISRPKGVALHRPDVYLLPPAREQLNLRESAICLVTGFSPADVFVQWMQRGQPLSPEKYVSAPMPEPQAPGRYFAHSILTVSEEEWNTGEYTCVVAHEALPNRVTERTVDKSTGKPTLYNVSLVMSDTAGTCY

SEQ ID NO: 4198 - protein, 246 aa, Artificial Sequence
  Description of Artificial Sequence: Synthetic scFv sequence
LLHESGAEVAKPGASVKMSCKASGYTFTTYWMHWIKQRPGQGLEWIGYINPSTGYTDYNQNFKDKATLTADKSSRTAYMQLSSLTSEDSTVYYCTRRGPSYGNHGAWFPYWGQGTLVTVSAVSSGGGGSGGGGSGGGGSTNIVMTQSPRSMSMSVGERVTLSCKASENVDTYVSWYQQKPEQSPKLLIYGASNRYTGVPDRFTGSGSATDFTLTISSVQAEDLADYHCGQSYRYPPTFGGGTKLEI

SEQ ID NO: 4199 - protein, 252 aa, Artificial Sequence
  Description of Artificial Sequence: Synthetic scFv sequence
RMAQVQLQQSGAELARPGASVKMSCKASGYTFTTYTIHWVRRRPGHDLEWIGYINPSSGCSDYNQNFKGKTTLTADKSSNTAYMQLNSLTSEDSAVYYCARRADYGNYEYTWFAYWGQGTTVTVSSSGGGSGGGGSGGGGSVIELTQSPKFMSTSVGDRVNVTYKASQNVGTNVAWFQQKPGQSPKVLIYSASYRYSGVPDRFTGSGSGTDFTLTISNVQSEDLAEYFCQQYHTYPLTFGGGTKLEIKRSDP

SEQ ID NO: 4200 - protein, 246 aa, Artificial Sequence
  Description of Artificial Sequence: Synthetic scFv sequence
EIVLTQSPGSLAVSPGERVTMSCKSSQSVFFSSSQKNYLAWYQQIPGQSPRLLIYWASTRESGVPDRFTGSGSGTDFTLTISSVQPEDLAIYYCHQYLSSRTFGQGTKLEIKRGGGGSGGGGSSGGGSQVQLQQPGAEVVKPGASVKMSCKASGYTFTSYYIHWIKQTPGQGLEWVGVIYPGNDDISYNQKFQGKATLTADKSSTTAYMQLSSLTSEDSAVYYCAREVRLRYFDVWGQGTTVTVSS

SEQ ID NO: 4201 - protein, 245 aa, Artificial Sequence
  Description of Artificial Sequence: Synthetic scFv sequence
EVQLVESGGGLVQPGGSLRLSCAASGFTFSSYAMSWVRQAPGKGLEWVSAISGSGGSTYYADSVKGRFTISRDNSKNTLYLQMNSLRAEDTAVYYCAKETDYYGSGTFDYWGQGTLVTVSSASGGGGSGGGGSGGGGSDIQMTQSPSSLSASVGDRVTISCRASQGIGIYLAWYQQRSGKPPQLLIHGASTLQSGVPSRFSGSGSGTDFTLTISSLQPEDFASYWCQQSNNFPPTFGQGTKVEIK

SEQ ID NO: 4202 - protein, 267 aa, Artificial Sequence
  Description of Artificial Sequence: Synthetic scFv sequence
MALPVTALLLPLALLLHAARPEVQLQQSGPELVKPGASVKISCKASGYTFTDYNMHWVKQSHGKSLEWIGYIYPYNGGTGYNQKFKSKATLTVDNSSSTAYMDVRSLTSEDSAVYYCARGRPAMDYWGQGTSVTVSSGGGGSGGGGSGGGGSDIVLTQSPASLAVSLGQRATISCRASESVDNYGISFMNWFQQKPGQPPKLLIYAASNQGSGVPARFSGSGSGTDFSLNIHPMEEDDTAMYFCQQSKEVPWTFGGGTKLEIKRSDP

SEQ ID NO: 4203 - protein, 266 aa, Artificial Sequence
  Description of Artificial Sequence: Synthetic scFv sequence
MALPVTALLLPLALLLHAARPEVQLVESGGGLVQPGGSLRLSCAASGFTFSSYAMSWVRQAPGKGLEWVSAISGSGGSTYYADSVKGRFTISRDNSKNTLYLQMNSLRAEDTAVYYCAKETDYYGSGTFDYWGQGTLVTVSSASGGGGSGGGGSGGGGSDIQMTQSPSSLSASVGDRVTISCRASQGIGIYLAWYQQRSGKPPQLLIHGASTLQSGVPSRFSGSGSGTDFTLTISSLQPEDFASYWCQQSNNFPPTFGQGTKVEIK

SEQ ID NO: 4204 - protein, 272 aa, Artificial Sequence
  Description of Artificial Sequence: Synthetic scFv sequence
MALPVTALLLPLALLLHAARPQVQLVQSGAEVKKPGASVRVSCKASGYIFTNYYVHWVRQAPGQGLEWMGIISPSGGSPTYAQRLQGRVTMTRDLSTSTVYMELSSLTSEDTAVYFCARESRLRGNRLGLQSSIFDHWGQGTLVTVSSASGGGGSGGGGSGGGGSDIRMTQSPPSLSASVGDRVTIPCQASQDINNHLNWYQQKPGKAPQLLIYDTSNLEIGVPSRFSGSGSGTDFTLTISSLQPEDIATYYCQQYENLPLTFGGGTKVEIK

SEQ ID NO: 4205 - protein, 266 aa, Artificial Sequence
  Description of Artificial Sequence: Synthetic scFv sequence
MALPVTALLLPLALLLHAARPQVQLVQSGAEVKKPGASVRVSCKASGYMFTDFFIHWVRQAPGQGLEWMGWINPNSGVTKYAQKFQGRVTMTRNTSISTAYMELSSLRSEDTAVYYCATWYSSGWYGIANIWGQGTMVTVSSASGGGGSGGGGSGGGGSDIQLTQSPSSLSASVGDRVTITCQASHDISNYLHWYQQKPGKAPKLLIYDASNLETGVPSRFTGSGSGTDFTLTIRSLQPEDVAAYYCQQSDDLPHTFGQGTKVDIK

SEQ ID NO: 4206 - protein, 265 aa, Artificial Sequence
  Description of Artificial Sequence: Synthetic scFv sequence
MALPVTALLLPLALLLHAARPQVQLVQSGAEVKKPGESLKISCKGSGYSFTNYWIGWVRQMPGKGLEWMGIIYPGDSDTRYSPSFQGQVTISADKSISTAYLQWSSLKASDTAMYYCARHGPSSWGEFDYWGQGTLVTVSSASGGGGSGGGGSGGGGSDIRLTQSPSSLSASVGDRVTITCRASQSISSYLNWYQQKPGKAPKLLIYAASSLQSGVPSRFSGSGSGTDFTLTISSLQPEDFATYYCQQSYSTPLTFGGGTKVDIK

SEQ ID NO: 4207 - protein, 271 aa, Artificial Sequence
  Description of Artificial Sequence: Synthetic scFv sequence
MALPVTALLLPLALLLHAARPQVQLVQSGAEVKKPGESLKISCKGSGYSFTSYWIGWVRQMPGKGLEWMGIIYPGDSDTRYSPSFQGQVTISADKSISTAYLQWSSLKASDTAMYYCARLGGSLPDYGMDVWGQGTMVTVSSASGGGGSGGGGSGGGGSEIVLTQSPLSLPVTPGEPASISCRSSQSLLHSNGYNYLDWYLQKPGQSPQLLIYLGSNRASGVPDRFSGSGSGTDFTLKISRVEAEDVGVYYCMQALQTLITFGQGTKVDIK

SEQ ID NO: 4208 - protein, 271 aa, Artificial Sequence
  Description of Artificial Sequence: Synthetic scFv sequence
MALPVTALLLPLALLLHAARPQVQLVQSGAEVKKPGESLKISCKGSGYSFTSYWIGWVRQMPGKGLEWMGIIYPGDSDTRYSPSFQGQVTISADKSITTAYLQWSSLRASDSAMYYCARGGYSDYDYYFDFWGQGTLVTVSSASGGGGSGGGGSGGGGSEIVMTQSPLSLPVTPGEPASISCRSSQSLLHSNGYNYLDWYLQKPGQSPQLLIYLGSNRASGVPDRFSGSGSGTDFTLKISRVEAEDVGVYYCMQALQTPFTFGGGTKVEIK

SEQ ID NO: 4209 - protein, 261 aa, Artificial Sequence
  Description of Artificial Sequence: Synthetic scFv sequence
MALPVTALLLPLALLLHAARPQVQLVQSGGDLAQPGRSLRLSCAASGFTFDDYAMHWVRQAPGKGLEWVAVIWPDGGQKYYGDSVKGRFTVSRDNPKNTLYLQMNSLRAEDTAIYYCVRHFNAWDYWGQGTLVTVSSASGGGGSGGGGSGGGGSDIQLTQSPSSLSAYVGGRVTITCQASQGISQFLNWFQQKPGKAPKLLISDASNLEPGVPSRFSGSGSGTDFTFTITNLQPEDIATYYCQQYDDLPLTFGGGTKVEIK

SEQ ID NO: 4210 - protein, 270 aa, Artificial Sequence
  Description of Artificial Sequence: Synthetic scFv sequence
MALPVTALLLPLALLLHAARPQVQLVQSGGGLVQPGGSLRLSCAASGFTFSSYAMSWVRQAPGKGLEWVSAISGSGGSTYYADSVKGRFTISRDNSKNTLYLQMNSLRAEDTAVYYCAKEDTIRGPNYYYYGMDVWGQGTTVTVSSASGGGGSGGGGSGGGGSETTLTQSPSSVSASVGDRVSITCRASQDIDTWLAWYQLKPGKAPKLLMYAASNLQGGVPSRFSGSGSGTDFILTISSLQPEDFATYYCQQASIFPPTFGGGTKVDIK

SEQ ID NO: 4211 - protein, 269 aa, Artificial Sequence
  Description of Artificial Sequence: Synthetic scFv sequence
MALPVTALLLPLALLLHAARPQVQLVQSGGGVVQPGKSLRLSCAASGFTFSIFAMHWVRQAPGKGLEWVATISYDGSNAFYADSVEGRFTISRDNSKDSLYLQMDSLRPEDTAVYYCVKAGDGGYDVFDSWGQGTLVTVSSASGGGGSGGGGSGGGGSEIVMTQSPLSLPVTPGEPASISCRSSQSLLHSNGYNYLDWYLQKPGQSPQLLIYLGSNRASGVPDRFSGSGSGTDFTLKISRVEAEDVGVYYCMQALQTPTFGPGTKVDIK

SEQ ID NO: 4212 - protein, 246 aa, Artificial Sequence
  Description of Artificial Sequence: Synthetic scFv sequence
NIMLTQSPSSLAVSAGEKVTMSCKSSQSVFFSSSQKNYLAWYQQIPGQSPKLLIYWASTRESGVPDRFTGSGSGTDFTLTISSVQSEDLAIYYCHQYLSSRTFGGGTKLEIKRGGGGSGGGGSSGGGSQVQLQQPGAEVVKPGASVKMSCKASGYTFTSYYIHWIKQTPGQGLEWVGVIYPGNDDISYNQKFKGKATLTADKSSTTAYMQLSSLTSEDSAVYYCAREVRLRYFDVWGAGTTVTVSS

SEQ ID NO: 4213 - protein, 251 aa, Artificial Sequence
  Description of Artificial Sequence: Synthetic scFv sequence
QVQLVQSGAEVKKPGASVRVSCKASGYIFTNYYVHWVRQAPGQGLEWMGIISPSGGSPTYAQRLQGRVTMTRDLSTSTVYMELSSLTSEDTAVYFCARESRLRGNRLGLQSSIFDHWGQGTLVTVSSASGGGGSGGGGSGGGGSDIRMTQSPPSLSASVGDRVTIPCQASQDINNHLNWYQQKPGKAPQLLIYDTSNLEIGVPSRFSGSGSGTDFTLTISSLQPEDIATYYCQQYENLPLTFGGGTKVEIK

SEQ ID NO: 4214 - protein, 245 aa, Artificial Sequence
  Description of Artificial Sequence: Synthetic scFv sequence
QVQLVQSGAEVKKPGASVRVSCKASGYMFTDFFIHWVRQAPGQGLEWMGWINPNSGVTKYAQKFQGRVTMTRNTSISTAYMELSSLRSEDTAVYYCATWYSSGWYGIANIWGQGTMVTVSSASGGGGSGGGGSGGGGSDIQLTQSPSSLSASVGDRVTITCQASHDISNYLHWYQQKPGKAPKLLIYDASNLETGVPSRFTGSGSGTDFTLTIRSLQPEDVAAYYCQQSDDLPHTFGQGTKVDIK

SEQ ID NO: 4215 - protein, 244 aa, Artificial Sequence
  Description of Artificial Sequence: Synthetic scFv sequence
QVQLVQSGAEVKKPGESLKISCKGSGYSFTNYWIGWVRQMPGKGLEWMGIIYPGDSDTRYSPSFQGQVTISADKSISTAYLQWSSLKASDTAMYYCARHGPSSWGEFDYWGQGTLVTVSSASGGGGSGGGGSGGGGSDIRLTQSPSSLSASVGDRVTITCRASQSISSYLNWYQQKPGKAPKLLIYAASSLQSGVPSRFSGSGSGTDFTLTISSLQPEDFATYYCQQSYSTPLTFGGGTKVDIK

SEQ ID NO: 4216 - protein, 250 aa, Artificial Sequence
  Description of Artificial Sequence: Synthetic scFv sequence
QVQLVQSGAEVKKPGESLKISCKGSGYSFTSYWIGWVRQMPGKGLEWMGIIYPGDSDTRYSPSFQGQVTISADKSISTAYLQWSSLKASDTAMYYCARLGGSLPDYGMDVWGQGTMVTVSSASGGGGSGGGGSGGGGSEIVLTQSPLSLPVTPGEPASISCRSSQSLLHSNGYNYLDWYLQKPGQSPQLLIYLGSNRASGVPDRFSGSGSGTDFTLKISRVEAEDVGVYYCMQALQTLITFGQGTKVDIK

SEQ ID NO: 4217 - protein, 250 aa, Artificial Sequence
  Description of Artificial Sequence: Synthetic scFv sequence
QVQLVQSGAEVKKPGESLKISCKGSGYSFTSYWIGWVRQMPGKGLEWMGIIYPGDSDTRYSPSFQGQVTISADKSITTAYLQWSSLRASDSAMYYCARGGYSDYDYYFDFWGQGTLVTVSSASGGGGSGGGGSGGGGSEIVMTQSPLSLPVTPGEPASISCRSSQSLLHSNGYNYLDWYLQKPGQSPQLLIYLGSNRASGVPDRFSGSGSGTDFTLKISRVEAEDVGVYYCMQALQTPFTFGGGTKVEIK

SEQ ID NO: 4218 - protein, 240 aa, Artificial Sequence
  Description of Artificial Sequence: Synthetic scFv sequence
QVQLVQSGGDLAQPGRSLRLSCAASGFTFDDYAMHWVRQAPGKGLEWVAVIWPDGGQKYYGDSVKGRFTVSRDNPKNTLYLQMNSLRAEDTAIYYCVRHFNAWDYWGQGTLVTVSSASGGGGSGGGGSGGGGSDIQLTQSPSSLSAYVGGRVTITCQASQGISQFLNWFQQKPGKAPKLLISDASNLEPGVPSRFSGSGSGTDFTFTITNLQPEDIATYYCQQYDDLPLTFGGGTKVEIK

SEQ ID NO: 4219 - protein, 249 aa, Artificial Sequence
  Description of Artificial Sequence: Synthetic scFv sequence
QVQLVQSGGGLVQPGGSLRLSCAASGFTFSSYAMSWVRQAPGKGLEWVSAISGSGGSTYYADSVKGRFTISRDNSKNTLYLQMNSLRAEDTAVYYCAKEDTIRGPNYYYYGMDVWGQGTTVTVSSASGGGGSGGGGSGGGGSETTLTQSPSSVSASVGDRVSITCRASQDIDTWLAWYQLKPGKAPKLLMYAASNLQGGVPSRFSGSGSGTDFILTISSLQPEDFATYYCQQASIFPPTFGGGTKVDIK

SEQ ID NO: 4220 - protein, 248 aa, Artificial Sequence
  Description of Artificial Sequence: Synthetic scFv sequence
QVQLVQSGGGVVQPGKSLRLSCAASGFTFSIFAMHWVRQAPGKGLEWVATISYDGSNAFYADSVEGRFTISRDNSKDSLYLQMDSLRPEDTAVYYCVKAGDGGYDVFDSWGQGTLVTVSSASGGGGSGGGGSGGGGSEIVMTQSPLSLPVTPGEPASISCRSSQSLLHSNGYNYLDWYLQKPGQSPQLLIYLGSNRASGVPDRFSGSGSGTDFTLKISRVEAEDVGVYYCMQALQTPTFGPGTKVDIK

SEQ ID NO: 4221 - protein, 511 aa, Artificial Sequence
  Description of Artificial Sequence: Synthetic scFv sequence
QVQLVQSGAEVKKPGESVKVSCKASGYTFTNYGMNWVKQAPGQGLEWMGWINTYTGEPTYADKFQGRVTMTTDTSTSTAYMEIRNLGGDDTAVYYCARWSWSDGYYVYFDYWGQGTSVTVSSGGGGSGGGGSGGGGSDIVMTQSPDSLTVSLGERTTINCKSSQSVLDSSTNKNSLAWYQQKPGQPPKLLLSWASTRESGIPDRFSGSGSGTDFTLTIDSPQPEDSATYYCQQSAHFPITFGQGTRLEIKSGGGGSEVQLVESGGGLVQPGGSLKLSCAASGFTFNKYAMNWVRQAPGKGLEWVARIRSKYNNYATYYADSVKDRFTISRDDSKNTAYLQMNNLKTEDTAVYYCVRHGNFGNSYISYWAYWGQGTLVTVSSGGGGSGGGGSGGGGSQTVVTQEPSLTVSPGGTVTLTCGSSTGAVTSGNYPNWVQQKPGQAPRGLIGGTKFLAPGTPARFSGSLLGGKAALTLSGVQPEDEAEYYCVLWYSNRWVFGGGTKLTVLHHHHHH

SEQ ID NO: 4222 - protein, 728 aa, Artificial Sequence
  Description of Artificial Sequence: Synthetic scFv sequence
QVQLVQSGAEVKKPGESVKVSCKASGYTFTNYGMNWVKQAPGQGLEWMGWINTYTGEPTYADKFQGRVTMTTDTSTSTAYMEIRNLGGDDTAVYYCARWSWSDGYYVYFDYWGQGTSVTVSSGGGGSGGGGSGGGGSDIVMTQSPDSLTVSLGERTTINCKSSQSVLDSSTNKNSLAWYQQKPGQPPKLLLSWASTRESGIPDRFSGSGSGTDFTLTIDSPQPEDSATYYCQQSAHFPITFGQGTRLEIKSGGGGSEVQLVESGGGLVQPGGSLKLSCAASGFTFNKYAMNWVRQAPGKGLEWVARIRSKYNNYATYYADSVKDRFTISRDDSKNTAYLQMNNLKTEDTAVYYCVRHGNFGNSYISYWAYWGQGTLVTVSSGGGGSGGGGSGGGGSQTVVTQEPSLTVSPGGTVTLTCGSSTGAVTSGNYPNWVQQKPGQAPRGLIGGTKFLAPGTPARFSGSLLGGKAALTLSGVQPEDEAEYYCVLWYSNRWVFGGGTKLTVLAPELLGGPSVFLFPPKPKDTLMISRTPEVTCVVVDVSHEDPEVKFNWYVDGVEVHNAKTKPREEQYGSTYRVVSVLTVLHQDWLNGKEYKCKVSNKALPAPIEKTISKAKGQPREPQVTTLPPSREEMTKNQVSLTCLVKGFYPSDIAVEWESNGQPENNYDTTPPVLDSDGSFFLYSDLTVDKSRWQQGNVFSCSVMHEALHNHYTQKSLSLSPGKHHHHHH

SEQ ID NO: 4223 - protein, 728 aa, Artificial Sequence
  Description of Artificial Sequence: Synthetic scFv sequence
QVQLVQSGAEVKKPGESVKVSCKASGYTFTNYGMNWVKQAPGQGLEWMGWINTYTGEPTYADKFQGRVTMTTDTSTSTAYMEIRNLGGDDTAVYYCARWSWSDGYYVYFDYWGQGTSVTVSSGGGGSGGGGSGGGGSDIVMTQSPDSLTVSLGERTTINCKSSQSVLDSSTNKNSLAWYQQKPGQPPKLLLSWASTRESGIPDRFSGSGSGTDFTLTIDSPQPEDSATYYCQQSAHFPITFGQGTRLEIKSGGGGSEVQLVESGGGLVQPGGSLKLSCAASGFTFNKYAMNWVRQAPGKGLEWVARIRSKYNNYATYYADSVKDRFTISRDDSKNTAYLQMNNLKTEDTAVYYCVRHGNFGNSYISYWAYWGQGTLVTVSSGGGGSGGGGSGGGGSQTVVTQEPSLTVSPGGTVTLTCGSSTGAVTSGNYPNWVQQKPGQAPRGLIGGTKFLAPGTPARFSGSLLGGKAALTLSGVQPEDEAEYYCVLWYSNRWVFGGGTKLTVLAPELLGGPSVFLFPPKPKDTLMISRTPEVTCVVVDVSHEDPEVKFNWYVDGVEVHNAKTKPREEQYNSTYRVVSVLTVLHQDWLNGKEYKCKVSNKALPAPIEKTISKAKGQPREPQVTTLPPSREEMTKNQVSLTCLVKGFYPSDIAVEWESNGQPENNYDTTPPVLDSDGSFFLYSDLTVDKSRWQQGNVFSCSVMHEALHNHYTQKSLSLSPGKHHHHHH

SEQ ID NO: 4224 - protein, 214 aa, Artificial Sequence
  Description of Artificial Sequence: Synthetic scFv sequence
DIQMTQSPSSLSVSVGERVTITCRASENIRSNLAWYQQKPGKSPKLLVNVATNLADGVPSRFSGSGSGTDYSLKINSLQPEDFGTYYCQHYWGTTWTFGQGTKLEIKRTVAAPSVFIFPPSDEQLKSGTASVVCLLNNFYPREAKVQWKVDNALQSGNSQESVTEQDSKDSTYSLSSTLTLSKADYEKHKVYACEVTHQGLSSPVTKSFNRGEC

SEQ ID NO: 4225 - protein, 115 aa, Artificial Sequence
  Description of Artificial Sequence: Synthetic scFv sequence
QVQVQESGPGLVAPSQTLSITCTVSGFSLTTSGVSWVRQPPGKGLEWLGVIWGDGSTNYHSSLKSRLSIKKDHSKSQVFLKLNSLTAADTATYYCAKGGYSLAHWGQGTLVTVSS

SEQ ID NO: 4226 - protein, 68 aa, Artificial Sequence
  Description of Artificial Sequence: Synthetic scFv sequence
FWVLVVVGGVLACYSLLVTVAFIIFWVRSKRSRLLHSDYMNMTPRRPGPTRKHYQPYAPPRDFAAYRS

SEQ ID NO: 4227 - protein, 234 aa, Artificial Sequence
  Description of Artificial Sequence: Synthetic scFv sequence
QVNLRESGGGLVQPGGFLRLSCAAFGFTFSGYWMSWVHPAPGKGLEWVANIKQDGSEKFYVDSVKGRFTISRDNAKNSLFLQMNSLRAEDTAVYFCARGLLSDYWGQGTLVPVSSGGGGSGGGGSGGGGSNFMLTQPPSVSVAPGKTASLTCGGYNIGTKSVHWYQQKPGQAPWWHDDSDRPSGIPERFSGSNSGTTATLIIRVEAGDEADYYCQAWDSISEEWFGGGTKLTVL

SEQ ID NO: 4228 - protein, 243 aa, Artificial Sequence
  Description of Artificial Sequence: Synthetic scFv sequence
QVQLLESGGGWQPGTSLRLSCAASGFTFSNYAINWVRQAAGKGLEWVSGISGSGVSTSYADSVKGRFTVSRDNSKNTLYLQMNSLRVEDTALYYCAKNGGGPEYLQHWGQGTLVTVSSGGGGSGGGGSGGGGSQSVLTQPPSASGTPGQRVTISCSGSSSNIGNNTVNWSRQLPGTAPKLLIYSNDQRPSGVPDRFSGSKSGTSASLAITGLQPEDEADYYCGTWDSSLSAYVFGTGTKLTVL

SEQ ID NO: 4229 - protein, 240 aa, Artificial Sequence
  Description of Artificial Sequence: Synthetic scFv sequence
QVQLLQSAGGLVQPGGSLRLSCAASGFTFSTYAMNWVRQAPGKGLEWVSGISGSGGSTNYADSVKGRFTISRDSSKNTLFLQMNSLRAEDTAVYYCAKDYGSGWYDYWGQGTLVTVSSGGGGSGGGGSGGGGSSSELTQDPAVSVALGQTVRITCQGDSLRSYYASWYQERPGQAPLLVIYGRNERPSGIPDRFSASSSGNTASLTITGAQAEDEADYYCQVWDSFNEQWFGGGTKLTVL

SEQ ID NO: 4230 - protein, 245 aa, Artificial Sequence
  Description of Artificial Sequence: Synthetic scFv sequence
QVQLLQSGGGLVQPGGSLRLSCAASGFTFSSYAMSWVRQAPGKGLEWVSAISGSGGSTYYTDSVKGRFTISRDNSKNTLYLQMNSLRAEDTAVYYCAKSHDYGDYAGFDYWGQGTLVTVSSGGGGSGGGGSGGGGSHVILTQDPAVSVALGQTVRITCQGDSLKSYYASWYQQKPGQAPVLVIYGKNNRPSGIPDRFSGSSSGTTASLTITGAQAEDEADYYCHSRDSSGTHLRVFGGGTKLTVL

SEQ ID NO: 4231 - protein, 241 aa, Artificial Sequence
  Description of Artificial Sequence: Synthetic scFv sequence
QVQLQESGGGLVKPGESLRLSCAASGFTFSDHYMDWVRQAPGKGLEWVAYIRYDGSTKYYADSVKGRFTISRDNSKNTLYLQMNSLRPEDTAFYYCARLIAEAEGWFDPWGQGTLVTVSSGGGGSGGGGSGGGGSNFMLTQPPSVSVAPGKTARITCGGNNIGSKSVYWYQQKPGQAPVLWYDDSDRPSGIPERFSGSNSGNTATLTISRVEAGDEADYYCQVWDSSSDHWFGGGTKVTVL

SEQ ID NO: 4232 - protein, 242 aa, Artificial Sequence
  Description of Artificial Sequence: Synthetic scFv sequence
QVQLQESGGGLVKPGGPLRLSCAASGFTFSSYGMYWVRQAPGKGLEWVSTLSRSGSGTYYADSVKGRFTISRBNSKNTLYLQMNSLRAEDTAVYYCASIAVAGNYFDYWGQGTLVTVSSGGGGSGGGGSGGGGSSYVLTQDPAVSVALGQTVRITCQGDSLRSYYASWYQERPGQAPLLVIYGKNNRPSGIPDRFSGSNSGSTATLTISRVEAGDEGDYYCQVWDSINEQVVFGGGTKVTVL

SEQ ID NO: 4233 - protein, 241 aa, Artificial Sequence
  Description of Artificial Sequence: Synthetic scFv sequence
QVQLQESGGGLVKPGGPLRLSCAASGFTFSSYGMYWVRQAPGKGLEWVSTLSRSGSGTYYAESVKGRFTISRDNSKNTLYFQMNSLRAEDTAVYYCASIAVAGNYFEYWGQGTLVTVSSGGGGSGGGGSGGGGSSYVLTQDPAVSVALGQTVRITCQGDSLRSYYASWYQERPGQAPLLVIYGKNNRPSGIPDRFSGSNSGSTATLTISRVEAGDEGDYYCQVWDSINEQWFGGGTKVTVL

SEQ ID NO: 4234 - protein, 244 aa, Artificial Sequence
  Description of Artificial Sequence: Synthetic scFv sequence
QVQLQESGGGLVKPGGSLRLSCAASGFTFSNAWMNWVRQAPGKGLEWVGRIKSKTDEGTTDYAAPVKGRFSISRDDSKNTLYLQMNSLKTEDTGVYYCTATKGLGGSKLGQGTLVTVSSGGGGSGGGGSGGGGSQSVLTQPPSASGTPGQRVTISCSGSSSNIGNNTVNWSRQLPGTAPKLLIYSNDQRPSGVPDRFSGSKSGTSASLAITGLQPEDEADYYCGTWDSSLSAYVFGTGTKLTVL

SEQ ID NO: 4235 - protein, 245 aa, Artificial Sequence
  Description of Artificial Sequence: Synthetic scFv sequence
QVQLQESGGGLVKPGGSLRLSCAASGFTSSSYAMHWVRQAPGKGLEYVSAIGGNGGTYYADSVKGRFTISRDNSKNTLYLQMNSLRAEDTAVYYCAKEGEQWLEYRYYYGMDVWGQGTTVTVSSGGGGSGGGGSGGGGSSSELTQDPAVSVALGQTVRITCQGDSLRSYYASWYQQKPGQAPSLVIYGENSRPSGIPDRFSGSSSGNTASLTITGAQAENEADYYCQAWDSSTAWFGGGTKLTVL

SEQ ID NO: 4236 - protein, 243 aa, Artificial Sequence
  Description of Artificial Sequence: Synthetic scFv sequence
QVQLQESGGGLVQLGGSLRLSCAASGFTFSSYAMSWVRQAPGKGLEWVSAISGSGGSTYYADSVKGRFTISRDNSKNTLYLQMSSLRAEDTAFYYCANSAYTGGWYDYWGHGTLVTVSSGGGGSGGGGSGGGGSSSELTQDPAVSVALGQTVKITCQGDSLRTYYASWYQQRPGQAPVLVIYGENSRPSGIPDRFSGSSSGNTASLTITGAQAEDEADYYCNSRDSSGNHLRVFGGGTKLTVL

SEQ ID NO: 4237 - protein, 245 aa, Artificial Sequence
  Description of Artificial Sequence: Synthetic scFv sequence
QVQLQESGGGLVQPGGSLRLSCAASGFTFSSYAMSWVRQAPGKGLEWVAVISYDGSNKYYADSVKGRFTISRDNSKNTLYLQMNSLRAEDTAVYYCVRGDRSYGAEYFQHWGQGTLVTVSSGGGGSGGGGSGGGGSSSELTQDPAVSVASGQTVRITCQGDSLRSYYASWYQQKPGQAPLLVIYGKNIRPSGIPDRFSGSTSGNSASLTITGAQAEDEADYYCNSRDSSGNRNWVFGGGTKLTVL

SEQ ID NO: 4238 - protein, 238 aa, Artificial Sequence
  Description of Artificial Sequence: Synthetic scFv sequence
QVQLQESGGGLVQPGGSLRLSCAASGTFSSYAMHWVRQAPGKGLEWVAVISYDGSNKYYADSVKGRFTISRDNSKNTLYLQMNSLRAEDTAVYYCARFSSGWYYFDYWGQGTLVTVSSGGGGSGGGGSGGGGSDIQMTQSPSFLSASVGDRITITCRASNDISSYFAWYQQKPGKAPKPLIYAASTLQSGVPSRFSGSGTEFTLTISSLQPEDFATYYCQQLGSYPLTFGGGTKLEIK

SEQ ID NO: 4239 - protein, 239 aa, Artificial Sequence
  Description of Artificial Sequence: Synthetic scFv sequence
QVQLQESGGGLVQPGGSLRLSCSASGFTFGTYAMRWVRQTSGKGLEWVSGIGVSGDAYYTDSVRGRFTISRDNSKNTLYLQMNTLRAEDTAYYCTRKSSTTSNDYWGRGTLVTVSSGGGGSGGGGSGGGGSSYVLTQDPAVSVALGQTVRITCQGDNIGSKSVHWYQQKPGQAPVLVVYDDSDRPSGIPERFSGSNSGTTATLTISSVEAGDEADYYCQAWDSISEHVIFGGGTKVTVL

SEQ ID NO: 4240 - protein, 237 aa, Artificial Sequence
  Description of Artificial Sequence: Synthetic scFv sequence
QVQLQESGGTLVQPGGSLRLSCAASGFTFSSYAMSWVRQAPGRGLEWVSTISGSGGSTYYADSVKGRFTISRDNSKNTLYLQMNSLRAEDTAVYYCAKGAYSGSHWGQGTLVTVSSGGGGSGGGGSGGGGSSSELTQDPAVSVALGQTVRITCQGDSLRSYYASWYQQKPGQAPSLVIYGENSRPSGIPDRFSGSSSGNTASLTITGAQAENEADYYCQAWDSSTAWFGGGTKLTVL

SEQ ID NO: 4241 - protein, 235 aa, Artificial Sequence
  Description of Artificial Sequence: Synthetic scFv sequence
QVQLQESGGTLVQPGGSLRLSCAASGFTFSSYAMSWVRQAPGRGLEWVSTISGSGGSTYYADSVKGRFTISRDNSKNTLYLQMNSLRAEDTAVYYCAKGAYSGSYWGQGTLVTVSSGGGGSGGGGSGGGGSSSELTQDPAVSVALGQTVRITCQGDSLRSYYASWYQQKPGQAPSLVIYGENSRPSGIPDRFSGSSSGNTASLIGAQAENEADYYCQAWDSSTAWFGGGTKLTVL

SEQ ID NO: 4242 - protein, 244 aa, Artificial Sequence
  Description of Artificial Sequence: Synthetic scFv sequence
QVQLVESGAEVKKPGASVKVSCKASGYTFTSYGISWVRQAPGQGLEWMGWISAYNGNTNYAQKLQGRVTMTTDTSTSTAYMELRSLRSDDTAVYYCARPIYDSSGYDAFDIWGQGTMVTVSSGGGGSGGGGSGGGGSDIVMTQSPSTLSASIGDRVTITCRASEGIYHWLAWYQQKPGKAPKLLIYKASSLASGAPSRFSGSGSGTDFTLTISSLQPDDFATYYCQQYHTISRTFGPGTKVDIK

SEQ ID NO: 4243 - protein, 244 aa, Artificial Sequence
  Description of Artificial Sequence: Synthetic scFv sequence
QVQLVESGGGLVKPGGSLRLSCAASGFTFSSYAMHWVRQAPGKGLEWVAVISYDGSNKYYADSVKGRFTISRDNSKNTLYLQMNSLRAEDTAVYFCVRPSDSGWSFEHWGQGTLVPVSSGGGGSGGGGSGGGGSQSVLTQPPSASGTPGQRVTISCSGSSSNIGNNTVNWSRQLPGTAPKLLIYSNDQRPSGVPDRFSGSKSGTSASLAITGLQPEDEADYYCGTWDSSLSAYVFGTGTKLTVL

SEQ ID NO: 4244 - protein, 237 aa, Artificial Sequence
  Description of Artificial Sequence: Synthetic scFv sequence
QVQLVESGGGLVQPGGSLRLSCAASGFTFSSYAMGWVRQAPGKGLEWVSAISGSGGSTYYADSVKGRFTISRDNSKDTLYLQMNSLRAEDTAVYYCASRSLLDYWGQGTLVTVSSGGGGSGGGGSGGGGSNFMLTQDPAVSVALGQTVRITCQGDSLRSYYASWYQQKPGQAPLLVIYGKNNRPSGIPDRFSGSSSGNTASLTITGAQAEDEADYYCNSRDSSGNPVFGGGTKVTVL

SEQ ID NO: 4245 - protein, 245 aa, Artificial Sequence
  Description of Artificial Sequence: Synthetic scFv sequence
QVQLVESGGGLVQPGGSLRLSCAASGFTFSSYAMSWVHQAPGKGLEWVSAISGSGGSTYYADSVKGRFTISRDNSKNTLYLQMNSLRAEDTAVYYCAKTYYGFWSGYYDYLGQGTLVTVSSGGGGSGGGGSGGGGSSSELTQDPAVSVGLGQTVTITCQGDSLRSYYANWYQQKPGQAPILVIYGENNRPSGIPDRFSGSSSGNTASLTITGAQAEDEADYYCHSRDSSGTHLRVFGGGTKLTVL

SEQ ID NO: 4246 - protein, 237 aa, Artificial Sequence
  Description of Artificial Sequence: Synthetic scFv sequence
QVQLVESGGGLVQPGGSLRLSCAASGFTFSSYAMSWVRQAPGKGLEWVSAISGSGGSTYYADSVKGRFTISRDNSKDTLYLQMNSLRAEDTAVYYCASRSLLDYWGQGTLVTVSSGGGGSGGGGSGGGGSNFMLTQDPAVSVALGQTVRITCQGDSLRSYYASWYQQKPGQAPLLVIYGKNNRPSGIPDRFSGSSSGNTASLTITGAQAEDEADYYCNSRDSSGNPVFGGGTKVTVL

SEQ ID NO: 4247 - protein, 244 aa, Artificial Sequence
  Description of Artificial Sequence: Synthetic scFv sequence
QVQLVESGGGWQPGRSLRLSCAASGFTFSSFGMHWVRRAPGKGLEWVAVISYDGSNQYYADSVKGRFTISRDNSKNTLYLQMNSLRAEDTAVYYCGSRPGGGYASGSTVAYWGQGTPVTVSSGGGGSGGGGSGGGGSSSELTQDPAVSVALGQTVRITCQGDSLRSYYASWYQQKPGQAPLLVIYGQNIRPSGIPDRFSGSSSGNSASLTITGAQAEDEADYYCHSRDSSGKYVFGVGTKVTVL

SEQ ID NO: 4248 - protein, 247 aa, Artificial Sequence
  Description of Artificial Sequence: Synthetic scFv sequence
QVQLVESGGGWQPGRSLRLSCTASGFTFSSYGMHWVRQAPGKGLEWVAVISYDGSNKYYADSVKGRFTISRDNSKNTLYLQMNSLRAEDTAVYYCARGGRYSSNWFSYYYYGMDVWGQGTTVTVSSGGGGSGGGGSGGGGSNFMLTQPPSVSVAPGKTARITCGGNNIGSKSVYWYQQKPGQAPVLWYDDSDRPSGIPERFSGSNSGNTATLTISRVEAGDEADYYCQVWDSSSDHWFGGGTKVTVL

SEQ ID NO: 4249 - protein, 241 aa, Artificial Sequence
  Description of Artificial Sequence: Synthetic scFv sequence
QVQLVQSGGGVVQPGRSLRLSCAATGIPFSGSGMHWVRQAPGKGLEWVTMIWYDGSNKFYADSVKGRFTISRDNSKNTLYLQMDSLRAEDTAVYFCARDKGVRSMDVWGLGTTVTVSSGGGGSGGGGSGGGGSNFMLTQPPSVSVAPGQTAKITCDGYSIRTKSVHWYQQKPGQAPVVVVHDDSDRPSGIPERFSGSNSGTTATLTISRVEAGDEADYYCQAWDSISEEVVFGGGTKLTVL

SEQ ID NO: 4250 - protein, 324 aa, Artificial Sequence
  Description of Artificial Sequence: Synthetic scFv sequence
MALPVTALLLPLALLLHAARPDIQVTQSPSSLSASLGERISLTCRTSQDISNYLNWFQQKPDGTFKRLIYATSSLDSGVPKRFSGSGSGSDYSLTISSLESEDFADYYCLQYASYPFTFGSGTKLEIKGGGGSGGGGSGGGGSEVQLQESGPGLVKPSQTLSLTCSVTGYSITSGYYWHWIRQFPGNKLQWMGYISYSGFTNYKTSLINRISITHDTSENQFFLNLNSVTTEDTATYYCAGDRTGSWFAYWGQGTLVTVSATTTPAPRPPTPAPTIASQPLSLRPEACRPAAGGAVHTRGDFACDIYIWAPLAGTLSLVITLYC

SEQ ID NO: 4251 - protein, 252 aa, Artificial Sequence
  Description of Artificial Sequence: Synthetic scFv sequence
DIVLTQSPASLAVSLGQRATISCKASQSVDYDGDGYMDWYQQKPGQPPKLLIFAASNLKSGIPARFSGSGSGTDFTLNIHPVEEEDAATYYCQQTNEYPWTFGGGTKLEIKGSTSGSGKPGSGEGSTKGQIQLVQSGPELKKPGETVKISCKASGYTFTDYSMHWVKQAPGEGLKWMGWINTETGEPTYADDFKGRFAFSLETSASTAYLQINNLKNEDTATYFCYYGSYWGQGTLVTVSAGGGGSGGGGSC

SEQ ID NO: 4252 - protein, 213 aa, Artificial Sequence
  Description of Artificial Sequence: Synthetic scFv sequence
DIQLTQSPSSLSASVGDRVTITCKASQDVGTSVAWYQQKPGKAPKLLIYWTSTRHTGVPSRFSGSGSGTDFTFTISSLQPEDIATYYCQQYSLYRSFGQGTKVEIKRTVAAPSVFIFPPSDEQLKSGTASVVCLLNNFYPREAKVQWKVDNALQSGNSQESVTEQDSKDSTYSLSSTLTLSKADYEKHKVYACEVTHQGLSSPVTKSFNRGEC

SEQ ID NO: 4253 - protein, 257 aa, Artificial Sequence
  Description of Artificial Sequence: Synthetic scFv sequence
MSVPTQVLGLLLLWLTGARCDIQMTQSPASLSASVGDTVTITCRASENIYSYLAWYQQKQGKSPQLLVYNAKALSEGVPSRFSGSGSGTQFSLRINSLQPEDFGDYYCQHHYNSPYTFGGGTKLEIKGSTSGSGKSSEGKGQIQLVQSGPELKKPGETVKISCKASGYSFTNDGINWVKQAPGKGFKYMGWINTITGEPTYTEDFKGRFAFSLETSASTAYLQINNLKDEDTATFFCAKGTGTSAYWGQGTLVTVSA

SEQ ID NO: 4254 - protein, 256 aa, Artificial Sequence
  Description of Artificial Sequence: Synthetic scFv sequence
DILLTQSPVILSVSPGERVSFSCRASQSIGTNIHWYQQRTNGSPRLLIKYASESISGIPSRFSGSGSGTDFTLSINSVESEDIADYYCQQNNNWPTTFGAGTKLELKRGSTSGSGKPGSGEGSTKGQVQLKQSGPGLVQPSQSLSITCTVSGFSLTNYGVHWVRQSPGKGLEWLGVIWSGGNTDYNTPFTSRLSINKDNSKSQVFFKMNSLQSNDTAIYYCARALTYYDYEFAYWGQGTLVTVSAGGGGSGGGGSC

SEQ ID NO: 4255 - protein, 234 aa, Artificial Sequence
  Description of Artificial Sequence: Synthetic scFv sequence
DIQMTQSPSSLSASVGDRVTITCKAGQNVGTSVAWFQQKPGKAPKSLIYSASYRYSGVPSRFSGSGSGTDFTLTISSLQPEDFATYYCQQYITYPYTFGGGTKVEIKGGGGSGGGGSGGGGSEVQLLESGGGLVQPGGSLRLSCAASGFTFSRYWMSWVRQAPGKGLEWVSEINPDSSTIQYTPSLKARFTISRDNSKNTLYLQMNSLRAEDTAVYYCTGPAYWGQGTLVTVSS

SEQ ID NO: 4256 - protein, 249 aa, Artificial Sequence
  Description of Artificial Sequence: Synthetic scFv sequence
EIVLTQSPATLSLSPGERATLSCSVSSSISSSNLHWYQQKPGQAPRLLIYGTSNLASGIPARFSGSGSGTDFTLTISSLEPEDFAVYYCQQWSSYPHTFGGGTKVEIKGGGGSGGGGSGGGGSQVQLVQSGAEVKKPGASVKVSCKASGYTFTNYLIEWVRQAPGQGLEWMGLINPGSGGTNYNEKFKGRVTMTTDTSTSTAYMELRSLRSDDTAVYYCARRSPLGSWIYYAYDGVAYWGQGTLVTVSS

SEQ ID NO: 4257 - protein, 480 aa, Artificial Sequence
  Description of Artificial Sequence: Synthetic scFv sequence
MALPVTALLLPLALLLHAARPDIQMTQSPSSLSASVGDRVTITCKAGQNVGTSVAWFQQKPGKAPKSLIYSASYRYSGVPSRFSGSGSGTDFTLTISSLQPEDFATYYCQQYITYPYTFGGGTKVEIKGGGGSGGGGSGGGGSEVQLLESGGGLVQPGGSLRLSCAASGFTFSRYWMSWVRQAPGKGLEWVSEINPDSSTIQYTPSLKARFTISRDNSKNTLYLQMNSLRAEDTAVYYCTGPAYWGQGTLVTVSSSSTTTPAPRPPTPAPTIASQPLSLRPEACRPAAGGAVHTRGLDFACDIYIWAPLAGTCGVLLLSLVITLYCKRGRKKLLYIFKQPFMRPVQTTQEEDGCSCRFPEEEEGGCELRVKFSRSADAPAYKQGQNQLYNELNLGRREEYDVLDKRRGRDPEMGGKPRRKNPQEGLYNELQKDKMAEAYSEIGMKGERRRGKGHDGLYQGLSTATKDTYDALHMQALPPR

SEQ ID NO: 4258 - protein, 493 aa, Artificial Sequence
  Description of Artificial Sequence: Synthetic scFv sequence
MALPVTALLLPLALLLHAARPEIVLTQSPATLSLSPGERATLSCSVSSSISSSNLHWYQQKPGQAPRLLIYGTSNLASGIPARFSGSGSGTDFTLTISSLEPEDFAVYYCQQWSSYPHTFGGGTKVEIKGGGGSGGGGSGGGGSQVQLVQSGAEVKKPGASVKVSCKASGYTFTNYLIEWVRQAPGQGLEWMGLINPGSGGTNYNEKFKGRVTMTTDTSTSTAYMELRSLRSDDTAVYYCARRSPLGSWIYYAYDGVAYWGQGTLVTVSSTTTPAPRPPTPAPTIASQPLSLRPEACRPAAGGAVHTRGLDFACDIYIWAPLAGTCGVLLLSLVITLYCKRGRKKLLYIFKQPFMRPVQTTQEEDGCSCRFPEEEEGGCELRVKFSRSADAPAYKQGQNQLYNELNLGRREEYDVLDKRRGRDPEMGGKPRRKNPQEGLYNELQKDKMAEAYSEIGMKGERRRGKGHDGLYQGLSTATKDTYDALHMQALPPR

SEQ ID NO: 4259 - protein, 242 aa, Artificial Sequence
  Description of Artificial Sequence: Synthetic scFv sequence
SQVQLQQPGAELVRPGASVKLSCKASGYSFTTYWMNWVKQRPGQGLEWIGMIHPSDSETRLNQKFKDKATLTVDKSSSTAYMQLSSPTSEDSAVYYCARSTMIATRAMDYWGQGTSVTVSGGGGSGGGGSGGGGSDIVMTQSQKSMSTSVGDRVSITCKASQDVITGVAWYQQKPGQSPKLLIYSASYRYTGVPDRFTGSGSGTDFTFTISNVQAEDLAVYYCQQHYSTPLTFGAGTKLELK

SEQ ID NO: 4260 - protein, 244 aa, Artificial Sequence
  Description of Artificial Sequence: Synthetic scFv sequence
EVQLQQSGPELVKPGASMKISCKASGYSFTGYTMNWVKQSHGKNLEWIGLINPYNGGTIYNQKFKGKATLTVDKSSSTAYMELLSLTSEDSAVYYCARDYGFVLDYWGQGTTLTVSSGGGGSGGGGSGGGGSGGGGSQIVLTQSPSIMSVSPGEKVTITCSASSSVSYMHWFQQKPGTSPKLCIYSTSNLASGVPARFSGRGSGTSYSLTISRVAAEDAATYYCQQRSNYPPWTFGGGTKLEIK

SEQ ID NO: 4261 - protein, 244 aa, Artificial Sequence
  Description of Artificial Sequence: Synthetic scFv sequence
EVQLQQSGPELVKPGASMKISCKASGYSFTGYTMNWVKQSHGKNLEWIGLINPYNGGTIYNQKFKGKATLTVDKSSSTAYMELLSLTSEDSAVYYCARDYGFVLDYWGQGTTLTVSSGGGGSGGGGSGGGGSGGGGSQIVLTQSPAIMSASPGEKVTITCSASSSVSYLHWFQQKPGTSPKLWVYSTSNLPSGVPARFGGSGSGTSYSLTISRMEAEDAATYYCQQRSIYPPWTFGGGTKLEIK

SEQ ID NO: 4262 - protein, 244 aa, Artificial Sequence
  Description of Artificial Sequence: Synthetic scFv sequence
EVQLQQSGPELVKPGASMKISCKASGYSFTGYTMNWVKQSHGKNLEWIGLINPYNGGTIYNQKFKGKATLTVDKSSSTAYMELLSLTSEDSAVYYCARDYGFVLDYWGQGTTLTVSSGGGGSGGGGSGGGGSGGGGSQIVLTQSPSIMSVSPGEKVTITCSASSSVSYMHWFQQKPGTSPKLGIYSTSNLASGVPARFSGRGSGTSYSLTISRVAAEDAATYYCQQRSNYPPWTFGGGTKLEIK

SEQ ID NO: 4263 - protein, 239 aa, Artificial Sequence
  Description of Artificial Sequence: Synthetic scFv sequence
EVQLQQSGPELVKPGASMKISCKASGYSFTGYTMNWVKQSHGKNLEWIGLINPYNGGTIYNQKFKGKATLTVDKSSSTAYMELLSLTSEDSAVYYCARDYGFVLDYWGQGTTLTVSSGGGGSGGGGSGGGGSQIVLTQSPSIMSVSPGEKVTITCSASSSVSYMHWFQQKPGTSPKLCIYSTSNLASGVPARFSGRGSGTSYSLTISRVAAEDAATYYCQQRSNYPPWTFGGGTKLEIK

SEQ ID NO: 4264 - protein, 241 aa, Artificial Sequence
  Description of Artificial Sequence: Synthetic scFv sequence
DIQMTQSPASLSASVGETVTITCRASENIDSYLAWYQQKQGKSPQLLVYASTLLVDGVPSRFSGSRSGTQFSLKINSLQSEDVARYYCQHYYSIPYTFGSGTKLEIKGGGGSGGGGSGGGGSEVKLVESGGGLVKPGGSLKLSCAASGFTFNSYTMSWVRQTPAKRLEWVVTISSGGGRTYYPDSVKGRFTISRDNARNTLYLQMSSLRSEDTAMYYCIRGDYRYDGFAYWGQGTVVTVST

SEQ ID NO: 4265 - protein, 241 aa, Artificial Sequence
  Description of Artificial Sequence: Synthetic scFv sequence
EVKLVESGGGLVKPGGSLKLSCAASGFTFNSYTMSWVRQTPAKRLEWVVTISSGGGRTYYPDSVKGRFTISRDNARNTLYLQMSSLRSEDTAMYYCIRGDYRYDGFAYWGQGTVVTVSTGGGGSGGGGSGGGGSDIQMTQSPASLSASVGETVTITCRASENIDSYLAWYQQKQGKSPQLLVYASTLLVDGVPSRFSGSRSGTQFSLKINSLQSEDVARYYCQHYYSIPYTFGSGTKLEIK

SEQ ID NO: 4266 - protein, 247 aa, Artificial Sequence
  Description of Artificial Sequence: Synthetic scFv sequence
EVQLQQSGAEVKKPGSSVKVSCKASGGTFSSYAISWVRQAPGQGLEWMGGIIPIFGTANYAQKFQGRVTITADESTSTAYMELSSLRSEDTAVYYCARDLEMATIMGGYWGQGTLVTVSSGGGGSGGGGSGGGGSQSALTQPASVSGSPGQSITISCTGTSSDVGGYNYVSWYQQHPGKAPKLMIYDVSNRPSGVSNRFSGSKSGNTASLTISGLQAEDEADYYCSSYTSSSTLDVVFGGGTKLTVL

SEQ ID NO: 4267 - protein, 245 aa, Artificial Sequence
  Description of Artificial Sequence: Synthetic scFv sequence
EVQLQQSGPGLVRPSETLSLTCTVSGGPVRSGSHYWNWIRQPPGRGLEWIGYIYYSGSTNYNPSLENRVTISIDTSNNHFSLKLSSVTAADTALYFCARGTATFDWNFPFDSWGQGTLVTVSSGGGGSGGGGSGSGGSDIQMTQSPSSLSASIGDRVTITCRASQSISSYLNWYQQKPGKAPKLLIYAASSLQSGVPSRFSGSGSGTDFTLTISSLQPEDFATYYCQQSYSTPWTFGQGTKLEIK

SEQ ID NO: 4268 - protein, 255 aa, Artificial Sequence
  Description of Artificial Sequence: Synthetic scFv sequence
EVQLVESGGGLVKPGGSLRLSCAASGFTFSSYSMNWVRQAPGKGLEWVSSISSSSSYIYYADSVKGRFTISRDNAKNSLYLQMNSLRAEDTAVYYCARDPSSSGSYYMEDSYYYGMDVWGQGTTVTVSSGGGGSGGGGSGGGGSNFMLTQPHSVSESFGKTVTISCTGSSGSIASNYVQWYQQRPGSAPTTVIYEDNQRPSGVPDRFSGSIDSSSNSASLTISGLKTEDEADYYCQSYDSSNQVVFGGGTKLTVL

SEQ ID NO: 4269 - protein, 255 aa, Artificial Sequence
  Description of Artificial Sequence: Synthetic scFv sequence
EVQLVESGGGLVKPGGSLRLSCAASGFTFSSYSMNWVRQAPGKGLEWVSSISSSSSYIYYADSVKGRFTISRDNAKNSLYLQMNSLRAEDTAVYYCARDPSSSGSYYMEDSYYYGMDVWGQGTTVTVSSGGGGSGGGGSGGGGSNFMLTQPHSVSESPGKTVTISCTGSSGSIASNYVQWYQQRPGSAPTTVIYEDNQRPSGVPDRFSGSIDSSSNSASLTISGLKTEDEADYYCQSYDSSNQVVFGGGTKLTVL

SEQ ID NO: 4270 - protein, 245 aa, Artificial Sequence
  Description of Artificial Sequence: Synthetic scFv sequence
EVQLVESGGGLVQPGGSLRLSCAASGFTFSSYEMNWVRQAPGKGLEWVSYISSSGSTIYYADSVKGRFTISRDNAKNSLYLQMNSLRAEDTAVYYCARDPYSSSWHDAFDIWGQGTMVTVSSGGGGSGGGGSGGGGSEIVLTQSPGTLSLSPGERATLSCRASQSVSSSYLAWYQQKPGQAPRLLIYGASSRATGIPDRFSGSGSGTDFTLTISRLEPEDFAVYYCQQYGSSPLTFGGGTKVDIK

SEQ ID NO: 4271 - protein, 245 aa, Artificial Sequence
  Description of Artificial Sequence: Synthetic scFv sequence
EVQLVESGGGVVQPGGSLRLSCAASGFTFDDYAMHWVRQAPGKGLEWVSLISGDGGSTYYADSVKGRFTISRDNSKNTLYLQMNSLRVEDTAVYYCARVFDSYYMDVWGKGTTVTVSSGGGGSGGGGSGSGGSEIVLTQSPLSLPVTPGQPASISCRSSQSLVYTDGNTYLNWFQQRPGQSPRRLIYKVSNRDSGVPDRFSGSGSDTDFTLKISRVEAEDVGIYYCMQGTHWSFTFGQGTRLEIK

SEQ ID NO: 4272 - protein, 245 aa, Artificial Sequence
  Description of Artificial Sequence: Synthetic scFv sequence
EVQLVESGGGVVQPGGSLRLSCAASGFTFDDYAMHWVRQAPGKGLEWVSLISGDGGSTYYADSVKGRFTISRDNSKNTLYLQMNSLRVEDTAVYYCARVFDSYYMDVWGKGTTVTVSSGGGGSGGGGSGSGGSEIVLTQSPLSLPVTPGQPASISCRSSQSLVYTDGNTYLNWFQQRPGQSPRRLIYKVSNRDSGVPDRFSGSGSDTDFTLKISRVEAEEVGIYYCMQGTHWSFTFGQGTRLEIK

SEQ ID NO: 4273 - protein, 246 aa, Artificial Sequence
  Description of Artificial Sequence: Synthetic scFv sequence
EVQLVQSGGGVVRSGRSLRLSCAASGFTFNSYGLHWVRQAPGKGLEWVALIEYDGSNKYYGDSVKGRFTISRDKSKSTLYLQMDNLRAEDTAVYYCAREGNEDLAFDIWGQGTLVTVSSGGGGSGGGGSGGGGSGGGGSEIVLTQSPSSLSASVGDRVTITCQASQFIKKNLNWYQHKPGKAPKLLIYDASSLQTGVPSRFSGNRSGTTFSFTISSLQPEDVATYYCQQHDNLPLTFGGGTKVEIK

SEQ ID NO: 4274 - protein, 239 aa, Artificial Sequence
  Description of Artificial Sequence: Synthetic scFv sequence
QVNLRESGGGLVQPGGSLRLSCAASGFTFSSYEMNWVRQAPGKGLEWVSYISSSGSTIYYADSVKGRFTISRDNAKNSLYLQMNSLRAEDTAVYYCAREALGSSWEWGQGTTVTVSSGGGGSGGGGSGGGGSDIQMTQSPSSLSASVGDRVTITCQASQDISNYLNWYQQKPGKAPKLLIYDASNLETGVPSRFSGSGSGTDFTFTISSLQPEDIATYYCQQYDNLPLTFGGGTKLEIK

SEQ ID NO: 4275 - protein, 249 aa, Artificial Sequence
  Description of Artificial Sequence: Synthetic scFv sequence
QVQLQESGAGLLKPSETLSLTCAVYGGSFSGYYWSWIRQPPGKGLEWVGEINHSGSTNYNPSLKSRVTISVDTSKNQFSLKLSSVTAADTAVYYCARGSGLVVYAIRVGSGWFDYWGQGTLVTVSSGGGGSGGGDSGGGGSDIQMTQSPSSLSASVGDRVTITCRASQSISSYLNWYQQKPGKAPKLLMYAASSLQSGVPSRFSGSGSGTDFTLTISSLQPEDFATYYCQQSYSTPPWTFGQGTKVDIK

SEQ ID NO: 4276 - protein, 247 aa, Artificial Sequence
  Description of Artificial Sequence: Synthetic scFv sequence
QVQLQESGPGLVKPSETLSLTCTVSGGSISSSSYYWGWIRQPPGKGLEWIGSIYYSGSTYYNPSLKSRVSISVDTSKNQFSLKLKYVTAADTAVYYCATPGTYYDFLSGYYPFYWGQGTLVTVSSGGGGSGGGGSGGGGSDIVMTQSPSSLSASVGDRVTITCRASQGISSYLAWYQQKPGKAPKLLIYAASTLQSGVPSRFSGSGSGTDFTLTISSLQPEDFATYYCQQLNSYPYTFGQGTKLEIK

SEQ ID NO: 4277 - protein, 255 aa, Artificial Sequence
  Description of Artificial Sequence: Synthetic scFv sequence
QVQLVESGGGLVQPGGSLRLSCAASGFNVSSNYMTWVRQAPGKGLEWVSVIYSGGATYYGDSVKGRFTVSRDNSKNTVYLQMNRLTAEDTAVYYCARDRLYCGNNCYLYYYYGMDVWGQGTLVTVSSGGGGSGGGGSGGGGSGGGGSDIQVTQSPSSLSASVGDRVTITCRASQSISSYLNWYQQKPGKAPKLLIYAASSLQSGVPSRFSGSGSGTDFTLTISSLQPEDFATYYCQQSYSTPPLTFGQGTKVEIK

SEQ ID NO: 4278 - protein, 239 aa, Artificial Sequence
  Description of Artificial Sequence: Synthetic scFv sequence
QVQLVESGGGLVQPGGSLRLSCAASGFTFSSYWMSWVRQAPGKGLEWVANINEDGSAKFYVDSVKGRFTISRDNAKNSLYLQMNSLRAEDTAVYFCARDLRSGRYWGQGTLVTVSSGGGGSGGGGSGGGGSEIVLTQSPGTLSLSPGGRATLSCRASQSISGSFLAWYQQKPGQAPRLLIYGASSRATGIPDRFSGSGSGTDFTLTISRLEPEDFAVYYCQQYGSSPPTFGLGTKLEIK

SEQ ID NO: 4279 - protein, 246 aa, Artificial Sequence
  Description of Artificial Sequence: Synthetic scFv sequence
QVQLVQSGAEVKEPGASVKVSCKAPANTFSDHVMHWVRQAPGQRFEWMGYIHAANGGTHYSQKFQDRVTITRDTSANTVYMDLSSLRSEDTAVYYCARGGYNSDAFDIWGQGTMVTVSSGGGGSGGGGSGGGGSGGGGSDIVMTQSPSSVSASVGDRVTITCRASQDISSWLAWYQQKPGKAPKLLIYAASSLQSGVPSRFNGSGSGTDFTLTISSLQPEDFATYYCQQSYSTPLTFGGGTKVEIK

SEQ ID NO: 4280 - protein, 247 aa, Artificial Sequence
  Description of Artificial Sequence: Synthetic scFv sequence
QVQLVQSGAEVKKSGASVKVSCKASGYPFTGYYIQWVRQAPGQGLEWMGWIDPNSGNTGYAQKFQGRVTMTRNTSISTAYMELSSLRSEDTAVYYCASDSYGYYYGMDVWGQGTLVTVSSGGGGSGGGGSGGGGSGGGGSDIQMTQSPSSLSASVGDRVTFTCRASQGISSALAWYQQKPGKPPKLLIYDASSLESGVPSRFSGSGSGTDFTLTISSLQFEDFATYYCQQFNNYPLTFGGGTKVEIK

SEQ ID NO: 4281 - protein, 247 aa, Artificial Sequence
  Description of Artificial Sequence: Synthetic scFv sequence
QVQLVQSGAEVKKSGASVKVSCKASGYPFTGYYIQWVRQAPGQGLEWMGWIDPNSGNTGYAQKFQGRVTMTRNTSISTAYMELSSLRSEDTAVYYCASDSYGYYYGMDVWGQGTLVTVSSGGGGSGGGGSGGGGSGGGGSDIQMTQSPSSLSASVGDRVTFTCRASQGISSALAWYQQKPGKPPKLLIYDASSLESGVPSRFSGSGSGTDFTLTISSLQPEDFATYYCQQFNNYPLTFGGGTKVEIK

SEQ ID NO: 4282 - protein, 248 aa, Artificial Sequence
  Description of Artificial Sequence: Synthetic scFv sequence
QVQLVQSGGGLVQPGGSLRLSCAASGFTFSSYSMNWVRQAPGKGLEWVSYISSSSSTIYYADSVKGRFTISRDNAKNSLYLQMNSLRAEDTAVYYCARDLSVRAIDAFDIWGQGTMVTVSSGGGGSGGGGSGGGGSGGGGSDIVLTQSPSSLSASVGDRVTITCQASQDISNYLNWYQQKPGKAPKLLIYDASNLETGVPSRFSGSGSGTDFTFTISSLQPEDFATYYCQQAYSTPFTFGPGTKVEIK

SEQ ID NO: 4283 - protein, 253 aa, Artificial Sequence
  Description of Artificial Sequence: Synthetic scFv sequence
EVQLVESGGGLVQPGRSLRLSCAASGFTFDDYDMHWVRQAPGKGLEWVSSISWSGGTIGYADSVKGRFTVSRDNAKNSLYLQMNSVRAEDTALYYCAKDRGAVAALPDYQYGMDVWGRGTLVTVSSGGGGSGGGGSGGGGSAQSALTQPASVSGSPGQSITISCTGTSSDIGSYNLVSWYQQHPGKAPKLMIYEDYKRASGVSNHFSGSKSGNTASLTISGLQAEDEADYYCSSYAGSSAWVFGGGTKVTVLG

SEQ ID NO: 4284 - protein, 248 aa, Artificial Sequence
  Description of Artificial Sequence: Synthetic scFv sequence
EVQLVESGPGLVKPSGTLSLTCAVSGGSISTSDWWSWVRRPPGKGLEWIGEIYHSGSTNYHPSLKSRVTISLDKSKNQFSLKLSSVTAADTAVYYCAREGGHSGSYPLDYWGRGTLVTVSSGGGGSGGGGSGGGGSAQSVVTQPPSVSAAPGQKVTISCSGNFSNIEYNYVSWYQHLPGTAPKLLIFDNNQRPSWIPDRFSGSKSGTSATLGITGLQTGDEADYYCGTWDSSLNAGVFGGGTKVTVLG

SEQ ID NO: 4285 - protein, 255 aa, Artificial Sequence
  Description of Artificial Sequence: Synthetic scFv sequence
EVQLVQSGAEMKKPGSSVKVSCKASGGTFSSYAVNWVRQAPGQGLEWMGGIIPIFDTSNYAQKFQGRLTMTADDSTNTAYMELRSLRSEDTAVYYCARGAPRGTVMAFSSYYFDLWGQGTLVTVSSGGGGSGGGGSGGGGSALNFMLTQPHSVSESPGKTVIISCAGSGGNIATNYVQWYQHRPGSAPITVIYEDNQRPSGVPDRFSGSVDSSSNSASLTISGLQTEDEADYYCHSYDNTDQGVFGTGTKVTVLG

SEQ ID NO: 4286 - protein, 257 aa, Artificial Sequence
  Description of Artificial Sequence: Synthetic scFv sequence
EVQLVQSGAEVKKPGASVKVSCKASGYSFPSSGLSWVRQAPGQGPEWMGWIGIYNGNTDYAQKFQGRVTMTTDKSTSTAYMELRSLRSDDTAVYYCARDSVGSISVAGTMQYYYFAMDVWGQGTLVTVSSGGGGSGGGGSGGGGSAQSVLTQPPSASGSPGQSVTISCAGTRYDIGTYNYVSWYQQHPAKGPKLIIYAVSERPSGVPNRFSGSKSGNTASLTVSGLRAEDEAHYYCSSYAGNNNVIFGGGTKVTVLG

SEQ ID NO: 4287 - protein, 248 aa, Artificial Sequence
  Description of Artificial Sequence: Synthetic scFv sequence
EVQLVQSGAEVKKPGASVKVSCKVSGYSLSELSMHWVRQAPGKGLEWMGGFDPQNGYTIYAQEFQGRITMTEDTSTDTVYMELGSLRSEDTAVYFCAAIEITGVNWYFDLWGKGTLVTVSSGGGGSGGGGSGGGGSALSSELTQDPDVSVALGQTVRITCQGDSLKKFYPGWYQQKPGQAPLLVLYGENIRPSRIPDRFSGSSSGNTATLTITGAQAEDEAVYYCNSREASVHHVRVFGGGTKLTVLG

SEQ ID NO: 4288 - protein, 250 aa, Artificial Sequence
  Description of Artificial Sequence: Synthetic scFv sequence
EVQLVQSGAEVKKPGATLKVSCKVSAYTFTDYSMHWVQQAPGKGLKWMGLIDLEDGNTIYAEEFQDRVTITADTSTDTAYMDLSSLRSEDTAVFYCAISPLRGLTADVFDVWGQGTLVTVSSGGGGSGGGGSGGGGSAQSALTQPASASGSPGQSITISCTGTSSDIGRYDFVSWYQRQPGKAPKLMIYDVINRPSGVSSRFSGSKSGNTASLTISGLQAEDEADYYCSSYAGSTTLYVFGTGTKLTVLG

SEQ ID NO: 4289 - protein, 246 aa, Artificial Sequence
  Description of Artificial Sequence: Synthetic scFv sequence
EVQLVQSGAEVKKPGSSVKVSCKASGGSFSNYDFSWVRQAPGQGLEWMGEIINAFGSSRYAQKFQDRVTITADESASTAYMELRGLTSEDTATYYCARAERWELNMAFDMWGRGTLVTVSSGGGGSGGGGSGGGGSAQSVLTQPPSVSVAPGQTARITCGGDNIGRKNVHWYQQRPGLAPVLVVYDDTDRPSGIPERFSGSNSGDTATLTITWVEAGDEADYYCQLWDSDTYDVLFGGGTKLTVLG

SEQ ID NO: 4290 - protein, 251 aa, Artificial Sequence
  Description of Artificial Sequence: Synthetic scFv sequence
EVQLVQSGAEVKKPGSSVKVSCKASGGTFKTYAINWVRQAPGQGLEWMGGIIPVLGTANYVQKFQGRVTITADESTTTAYMELRGLRSEDTAVYYCARGEGSGWYDHYYGLDVWGQGTLVTVSSGGGGSGGGGSGGGGSAQSVLTQPPSASGTPGQRVTISCSGSSSNIGSNTVNWYRQLPGTAPKLLIFGDDQRPSGVPDRFSGSRSGTSVSLAISGLQSEDEADYYCAAWDDSLNGGVFGGGTKLTVLG

SEQ ID NO: 4291 - protein, 247 aa, Artificial Sequence
  Description of Artificial Sequence: Synthetic scFv sequence
EVQLVQSGAEVKKPGSSVKVSCKSSGGPFSSYGISWVRQAPGQGLEWMGGISPIFGTANYAQKFQGRVTITADESTETAYMELSSLRSEDTAVYYCARDESPVGFYALDIWGRGTTVTVSSGGGGSGGGGSGGGGSALSYELTQPPSVSVAPGQTARINCGGDKIGSRSVHWYQQKPGQAPVMVVYDDSDRPSGIPERFSGSNSGNTATLTISSVEAGDEADYYCQVWDGSTDPWVFGGGTKVTVLG

SEQ ID NO: 4292 - protein, 249 aa, Artificial Sequence
  Description of Artificial Sequence: Synthetic scFv sequence
EVQLVQSGAEVKKPGSSVKVSCQASGGTFTSHAMYWVRQAPGQGLEWMGGIIPIFGRTNYAQKFQGRVTFTADMSTSTAYMEMTSLRSDDTAVYYCARGDNWNDLYPIDYWGRGTLVTVSSGGGGSGGGGSGGGGSALNFMLTQPHSVSESPGKTVTISCTRSSGSIATTYVQWFQQRPGSSPTTVIYDDDQRPSGVPDRFSGSIDSSSNSASLTISGLMPEDEADYYCQSYDNTDLVFGGGTQLTVLS

SEQ ID NO: 4293 - protein, 245 aa, Artificial Sequence
  Description of Artificial Sequence: Synthetic scFv sequence
EVQLVQSGAEVRKPGSSMKVSCKASGDTFRNFAFSWVRQAPGQGLEWMGGVIPLVGPPKYAQKFQGRLTITADESTSTSYMDLTSLTLEDTAVYFCARGGVYAPFDKWGQGTLVTVSSGGGGSGGGGSGGGGSAQSVVTQPPSVSEAPRQRVTISCSGSSSNIGNNAVNWYQQLPGKAPKLLIYYNDLLPSGVSDRFSGSKSGTSASLAISGLQSEDEADYYCAAWDDSLNGWVFGGGTKVTVLG

SEQ ID NO: 4294 - protein, 240 aa, Artificial Sequence
  Description of Artificial Sequence: Synthetic scFv sequence
GVQLVESGGGLVKPGGSLRLSCAASGFTFSSYTMNWVRQAPGKGLEWVSYISSSGSATYYADSVKGRFTISRDNANNSLYLQMNSLRAEDTAVYYCARGYRYGMDVWGQGTLVTVSSGGGGSGGGGSGGGGSGIVMTQSPSTLSASVGDRVTITCRASQGISSWLAWYQQKPGRAPKVLIYKASTLESGVPSRFSGSGSGTDFTLTISSLQPEDFATYYCQQSYSTPWTFGQGTKLEIKR

SEQ ID NO: 4295 - protein, 242 aa, Artificial Sequence
  Description of Artificial Sequence: Synthetic scFv sequence
KVQLLESGGGLVQPGGSLRLSCAASGFTFSSYAMSWVRQAPGKGLEWVSAISGSGGSTYYADSVKGRFTISRDNSKNTLYLQMNSLRAEDTAVYYCAKDDVRNAFDIWGRGTTVTVSSGGGGSGGGGSGGGGSAQSVLTQPPSVSVSPGQTTSITCSRDKLGEQYVYWYQQRPGQSPILLLYQDSRRPSWIPERFSGSNSGDTATLTISGTQALDEADYYCQAWDNSSYVAFGGGTKVTVLG

SEQ ID NO: 4296 - protein, 240 aa, Artificial Sequence
  Description of Artificial Sequence: Synthetic scFv sequence
QLQLQESGPGLVKPSGTLSLTCAVSGDSVSSYYWWSWVRQPPGKGLEWIGEIFRDGSSNYNRSLKSRVTISPDKPKNQFSLRLSSVTAADTAIYYCARHIRGYDAFDIWGRGTLVTVSSGGGGSGGGGSGGGGSAQSVLTQPPSVSGAPGQRVTISCTGSSSNIGAGYDVHWYQQFPGRAPKLLIYGNTNRPSGVPDRFSGSKSDISASLAITGLQAEDEADYYCQSYDSNLTGVFGGGT

SEQ ID NO: 4297 - protein, 250 aa, Artificial Sequence
  Description of Artificial Sequence: Synthetic scFv sequence
QLQLQESGPGLVKPSGTLSLTCAVSGGSISSTNWWSWVRQPPGKGLEWIGEIYHSGSTNYNPSLKSRVTISVDKSKNHFSLNLSSVTAADTAVYYCARDSMGSTGWHYGMDLWGKGTLVTVSSGGGGSGGGGSGGGGSAQSALTQPASVSGSPGQSIAISCTGTSSDVGGYNYVSWYQQHPGKAPKLMIYAVTNRPSGVSDRFSGSKSGNTASLTISGLQADDEADYYCSSYTSSSSLVFGGGTKLTVLG

SEQ ID NO: 4298 - protein, 250 aa, Artificial Sequence
  Description of Artificial Sequence: Synthetic scFv sequence
QLQLQESGPGLVKPSGTLSLTCAVSGGSISSTNWWSWVRQPPGKGLEWIGEIYHSGSTNYNPSLKSRVTISVDKSKNHFSLNLSSVTAADTAVYYCARDSMGSTGWHYGMDLWGRGTLVTVSSGGGGSGGGGSGGGGSAQSALTQPPSASGSPGQSVTISCSGSSSDIGDYNHVSWYQQHPGKAPKLMIYDVNKWPSGVPDRFSGSKSGNTASLTVSGLQAEDEADYYCSSYSGIYNLVFGGGTKVTVLG

SEQ ID NO: 4299 - protein, 251 aa, Artificial Sequence
  Description of Artificial Sequence: Synthetic scFv sequence
QLQLQESGPGLVKPSGTLSLTCAVSGGSISTSDWWSWVRRPPGKGLEWIGEIYHSGSTNYHPSLKSRVTISLDKSKNQFSLKLSSVTAADTAVYYCAREGGHSGSYPLDYWGKGTLVTVSSGGGGSGGGGSGGGGSALNFMLTQPHSVSESPGKTVTISCTRSSGSIASNYVQWYQQRPGSSPTTVIYEDNQRPSGVPDRFSGSIDSSSNSASLTISGLKTEDEADYYCQSYDSSNPYVVFGGGTKLTVLG

SEQ ID NO: 4300 - protein, 248 aa, Artificial Sequence
  Description of Artificial Sequence: Synthetic scFv sequence
QLQLQESGPGLVKPSGTLSLTCAVSGGSISTSDWWSWVRRPPGKGLEWIGEIYHSGSTNYHPSLKSRVTISLDKSKNQFSLKLSSVTAADTAVYYCAREGGHSGSYPLDYWGKGTLVTVSSGGGGSGGGGSGGGGSAQAVLTQPSSVSAAPGQKVTISCSGSSSNIGNNYVSWYQQLPGTAPKLLIYDNNKRPSGIPDRFSGSRSGTSATLGITGLQTGDEADYYCGTWDSSLSAVVFGTGTKLTVLG

SEQ ID NO: 4301 - protein, 251 aa, Artificial Sequence
  Description of Artificial Sequence: Synthetic scFv sequence
QLQLQESGPGLVKPSGTLSLTCAVSGGSISTSDWWSWVRRPPGKGLEWIGEIYHSGSTNYHPSLKSRVTISLDKSKNQFSLKLSSVTAADTAVYYCAREGGHSGSYPLDYWGQGTLVTVSSGGGGSGGGGSGGGGSALNFMLTQPHSVSESPGKTVTISCTGSSGSIASNYVQWYQQRPGSAPTTLIYEDDQRPSGVPDRFSGSVDSSSNSASLTISGLKTEDEADYYCQSYDRSNQAVVFGGGTKLTVLG

SEQ ID NO: 4302 - protein, 251 aa, Artificial Sequence
  Description of Artificial Sequence: Synthetic scFv sequence
QLQLQESGPGLVKPSGTLSLTCAVSGGSISTSDWWSWVRRPPGKGLEWIGEIYHSGSTNYHPSLKSRVTISLDKSKNQFSLKLSSVTAADTAVYYCAREGGHSGSYPLDYWGQGTLVTVSSGGGGSGGGGSGGGGSALNFMLTQPHSVSESPGKTVTISCTRSSGSIDNNYVQWYQQRPGSSPTTVIFEDNQRPSGVPDRFSGSIDSSSNSASLTISGLKTEDEADYYCQSYDSHNQGVVFGGGTKLTVLG

SEQ ID NO: 4303 - protein, 249 aa, Artificial Sequence
  Description of Artificial Sequence: Synthetic scFv sequence
QLQLQESGPGLVKPSGTLSLTCAVSGGSISTSDWWSWVRRPPGKGLEWIGEIYHSGSTNYHPSLKSRVTISLDKSKNQFSLKLSSVTAADTAVYYCAREGGHSGSYPLDYWGQGTLVTVSSGGGGSGGGGSGGGGSALNFMLTQPHSVSESPGKTVTVSCTGSGGNIASNYVQWYQQRPDSAPTLVIFEDTQRPSGVPARFSGSIDSSSNSASLIISSLRTEDEADYYCQSSDSNRVVFGGGTKVTVLG

SEQ ID NO: 4304 - protein, 248 aa, Artificial Sequence
  Description of Artificial Sequence: Synthetic scFv sequence
QLQLQESGPGLVKPSGTLSLTCAVSGGSISTSDWWSWVRRPPGKGLEWIGEIYHSGSTNYHPSLKSRVTISLDKSKNQFSLKLSSVTAADTAVYYCAREGGHSGSYPLDYWGQGTLVTVSSGGGGSGGGGSGGGGSAQSVVTQPPSVSAAPGQKVTISCSGSSSNIGNNYVSWYKQLPGTAPKLLIYDNNKRPSGIPDRFSGSKSGTSATLGITGLQTGDEADYYCGTWDSSLSGVVFGGGTKLTVLG

SEQ ID NO: 4305 - protein, 250 aa, Artificial Sequence
  Description of Artificial Sequence: Synthetic scFv sequence
QLQLQESGPGLVKPSGTLSLTCAVSGGSISTSDWWSWVRRPPGKGLEWIGEIYHSGSTNYHPSLKSRVTISLDKSKNQFSLKLSSVTAADTAVYYCAREGGHSGSYPLDYWGRGTLVTVSSGGGGSGGGGSGGGGSALNFMLTQPHSVSESPGKTVTISCARSSGSIASNYVQWYQQRPGSSPTTLIYEDRQRPSGVPDRFSGSIDSSSNSASLTISGLKTEDEADYYCQSYDSSDHVVFGGGTKLTVLG

SEQ ID NO: 4306 - protein, 251 aa, Artificial Sequence
  Description of Artificial Sequence: Synthetic scFv sequence
QLQLQESGPGLVKPSGTLSLTCAVSGGSISTSDWWSWVRRPPGKGLEWIGEIYHSGSTNYHPSLKSRVTISLDKSKNQFSLKLSSVTAADTAVYYCAREGGHSGSYPLDYWGRGTLVTVSSGGGGSGGGGSGGGGSALNFMLTQPHSVSESPGKTVTISCTRSSGSIASNYVQWYQQRPGSSPTTLIYDDNQRPSGVPDRFSGSIDSSSNSASLTISGLKTEDEADYYCQSYDSSNLGVVFGGGTKLTVLG

SEQ ID NO: 4307 - protein, 248 aa, Artificial Sequence
  Description of Artificial Sequence: Synthetic scFv sequence
QLQLQESGPGLVKPSGTLSLTCAVSGGSISTSDWWSWVRRPPGKGLEWIGEIYHSGSTNYHPSLKSRVTISLDKSKNQFSLKLSSVTAADTAVYYCAREGGHSGSYPLDYWGRGTLVTVSSGGGGSGGGGSGGGGSAQSVLTQPPSVSAAPGQKVTISCSGSSSNIGNSYVSWYKQLPGTAPKVLIYDNQKRSSGIPDRFSASKSGTSATLGITGLRTEDEADYYCGTWDTSLSAVVFGGGTKLTVLG

SEQ ID NO: 4308 - protein, 252 aa, Artificial Sequence
  Description of Artificial Sequence: Synthetic scFv sequence
QVQLQESGAEVKKPGSSVKVSCKASGGTFSSSAISWVRQAPGQGLEWMGGIIPVFGTANYAQKFQDRVTITADESTSTAYLELSRLTSEDTAVYYCASRGEYDYGDYDVYYYYMEVWGQGTLVTVSSGGGGSGGGGSGGGGSAQSVLTQPPSVSVAPGQTARLTCGANNIGSTSVHWYQQKPGQAPVLVIYDDTDRPSGIPERFSGSNSGNTATLTIRRVEAGDEADYYCQVWDTNSDHVIFGGGTKLTVLG

SEQ ID NO: 4309 - protein, 243 aa, Artificial Sequence
  Description of Artificial Sequence: Synthetic scFv sequence
QVQLQESGGGLLQPGGSLRLSCAASRFTFSNYAMSWVRQAPGKGLEWVSAISGSGASTYYADSVKGRFTISRDNSKNTLYLQMNSLRAEDTAVYYCSNLYGDYDYWGQGTLVTVSSGGGGGSGGGGSGGGGSQSVLTQPASVSGSPGQSITISCTGTSSDVGGYNYVSWYQQHPGKAPKLMIYDVSNRPSGVSNRFSGSKSGNTASLTISGLQAEDEADYYCSSYTSSSTLLFGGGTKLTVLG

SEQ ID NO: 4310 - protein, 245 aa, Artificial Sequence
  Description of Artificial Sequence: Synthetic scFv sequence
QVQLQESGGGLVQPGGSLRLSCAASGFTFSNYAMSWVRQAPGKGLEWVSAISGSGGSTYYADSVKGRFTISRDNSKNTLYLQMNSLRAEDTAVYYCAKDRFRAAAYWGQGTLVTVSSGGGGGSGGGGSGGGGSQSVLTQPPSVSAAPGQKVTISCTGSSSNIGAGYDVHWYQQLPGTAPKLLIYGNSNRPSGVPDRFSGSKSGTSASLAISGLQSEDEADYYCAAWDDILNGEIFGGGTKVTVLG

SEQ ID NO: 4311 - protein, 245 aa, Artificial Sequence
  Description of Artificial Sequence: Synthetic scFv sequence
QVQLQESGGGLVQPGGSLRLSCAASGFTFSSYAMSWVRQAPGKGLEWVSAISGSGGSTYYADSVKGRFTISRDNSKNTLYLQMNSLRAEDTAVYYCASQHVGEQSRYFDYWGQGTLVTVSSGGGGGSGGGGSGGGGSDIVMTQSPSSLSASIGDRVTITCRASHSISSYVNWYQKKPGKAPNLLIYAASYLPRGVPSRFSGSGLGTDFTLTISNLQPEDFATYYCQESYSTPYSFGQGTKVDIKR

SEQ ID NO: 4312 - protein, 255 aa, Artificial Sequence
  Description of Artificial Sequence: Synthetic scFv sequence
QVQLQESGGGVVQPGGSLRLSCAASGFTFSSYSMNWVRQAPGKGLEWVSSISSSSSYIYYADSVKGRFTISRDNAKNSLYLQMNSLRAEDTAVYYCARDLPSDDYGDYDYYYYGMDVWGQGTTVTVSSGGGGGSGGGGSGGGGSQSVLTQPPSASGTPGQRVTLFCSGSSSNIASNSVKWYQQPPQRAPKLLMFSDDQRPSGVPVRFSASKSGTSASLAISGLQSEDEADYYCAAWDDSLNAEVFGGGTKVTVLG

SEQ ID NO: 4313 - protein, 241 aa, Artificial Sequence
  Description of Artificial Sequence: Synthetic scFv sequence
QVQLQESGGGVVQPGRSLRLSCAASGFTFSSYGMHWVRQAPGKGLEWVSAIGSSGGSTHDADTVKGRFTISRDNAKNSLYLQMNSLRAEDTAVYYCARDRARGFDYWGQGTLVTVSSGGGGGSGGGGSGGGGSEIVLTQSPSTLSASIGDRVTITCRASQGISSYLAWYQQKPGKAPKLLIYGASSLQSGVPSRFSGRGSGADFTLTISSLQPEDFATYYCQQLISYPLTFGGGTKVEIKR

SEQ ID NO: 4314 - protein, 246 aa, Artificial Sequence
  Description of Artificial Sequence: Synthetic scFv sequence
QVQLQESGPGLVKPSATLSLTCAVSGGSISSNHWWSWVRQSPGKGLEWIGEIYTYGGANYNPSLKSRVDISMDKSKNQFSLHLSSVTAADTAVYYCGRHLTGYDCFDIWGQGTLVTVSSGGGGSGGGGSGGGGSAQAVLTQPSSVSGAPGQRVTISCTGSSSNIGAGYDVHWYQQLPGTAPKLLIYGNSNRPSGVPDRFSGSKSGTSASLAITGLQAEDEADYYCQSYDSSLSGVFGTGTQLTVLS

SEQ ID NO: 4315 - protein, 241 aa, Artificial Sequence
  Description of Artificial Sequence: Synthetic scFv sequence
QVQLQESGPGLVKPSETLSLTCNVSGGSIRNYFWSWIRQPPGQGLEYIGYIYYSGTTDYNPSLKGRVTISLDTSKTQFSLKLNSVTAADTAFYYCVRGPNKYAFDPWGQGTLVTVSSGGGGSGGGGSGGGGSALSYELTQPPSVSVSPGQTASITCSGDKLGDKFASWYQQKAGQSPVLVIYRDTKRPSGIPERFSGSNSGNTATLTISGTQAMDEADYYCQAWDSSTAVFGTGTKVTVLG

SEQ ID NO: 4316 - protein, 250 aa, Artificial Sequence
  Description of Artificial Sequence: Synthetic scFv sequence
QVQLQESGPGLVKPSGTLSLTCAVSGDSISSSNWWTWVRQPPGKGLEWIGEIFHSGTTNYNPSLNNRVTISLDESRNQFSLELSSVTAADTAIYYCARDSGNYDDNRGYDYWGRGTLVTVSSGGGGSGGGGSGGGGSAQSVLTQPPSVSGAPGQRVTISCAGTSSNIGAGFDVHWYQLLPGRAPKLLIYGNNNRPSGVPDRFSGSKSGTSASLAISGLQSEDEGDYYCAAWDDTVGGPVFGGGTKLTVLG

SEQ ID NO: 4317 - protein, 247 aa, Artificial Sequence
  Description of Artificial Sequence: Synthetic scFv sequence
QVQLQESGPGLVKPSGTLSLTCAVSGGSISSSNWWSWVRQAPGKGLEWIGEIYYGGSTNYNPSLKSRVTLSVDKSKNQFSLRLISVTAADTAVYYCARSSGLYGDYGNLWGRGTLVTVSSGGGGSGGGGSGGGGSAQSVVTQPPSVSAAPGQKVTISCSGSASNIGDHYISWYQQFPGTAPKLLISDNDQRPSGIPDRFSGSKSGTSATLGITGLQTGDEADYYCGTWDSNLSSWVFGSGTKVTVLG

SEQ ID NO: 4318 - protein, 251 aa, Artificial Sequence
  Description of Artificial Sequence: Synthetic scFv sequence
QVQLQESGPGLVKPSGTLSLTCAVSGGSISSTNWWSWVRQPPGKGLEWIGEIYHSGSTNYNPSLKSRVTISVDKSKNHFSLNLSSVTAADTAVYYCARDSMGSTGWHYGMDLWGQGTTVTVSSGGGGSGGGGSGGGGSAQSALTQPASVSGSPGQSITISCTGTSSDVGGYNYVSWYQQHPGKAPKLMIYEVSNRPLGVSNRFSGSKSGNTASLTISGLQAEDEGDYYCSSYTSSTTLIVFGGGTKLTVLG

SEQ ID NO: 4319 - protein, 250 aa, Artificial Sequence
  Description of Artificial Sequence: Synthetic scFv sequence
QVQLQESGPGLVKPSGTLSLTCAVSGGSISSTNWWSWVRQPPGKGLEWIGEIYHSGSTNYNPSLKSRVTISVDKSKNHFSLNLSSVTAADTAVYYCARDSMGSTGWHYGMDLWGRGTLVTVSSGGGGSGGGGSGGGGSAQSALTQPAAVSGSPGQSITISCTGSSSDVGGYNYVSWYQQHPGKAPKLLIYDVSDRPSGVSYRFSGSKSGNTASLTISGLQAEDEADYYCSSYTATGTLVFGGGTKLTVLG

SEQ ID NO: 4320 - protein, 251 aa, Artificial Sequence
  Description of Artificial Sequence: Synthetic scFv sequence
QVQLQESGPGLVKPSGTLSLTCAVSGGSISTSDWWSWVRRPPGKGLEWIGEIYHSGSTNYHPSLKSRVTISLDKSKNQFSLKLSSVTAADTAVYYCAREGGHSGSYPLDYWGKGTLVTVSSGGGGSGGGGSGGGGSALNFMLTQPHSVSESPGKTVTISCTRSSGSIASNYVQWYQQRPGSSPTTVIYEDNQRPSGVPDRFSGSIDSSSNSASLTISGLKTEDEADYYCQSYDSSNQGVVFGGGTKLTVLG

SEQ ID NO: 4321 - protein, 249 aa, Artificial Sequence
  Description of Artificial Sequence: Synthetic scFv sequence
QVQLQESGPGLVKPSGTLSLTCAVSGGSISTSDWWSWVRRPPGKGLEWIGEIYHSGSTNYHPSLKSRVTISLDKSKNQFSLKLSSVTAADTAVYYCAREGGHSGSYPLDYWGQGTLVTVSSGGGGSGGGGSGGGGSALNFMLTQPHSVSESPGKTVTISCTRSSGSIASKYVQWYQQRPGSAPTSVIYEDNQRPSGVPDRFSGSIDSASNSASLTISGLKTEDEADYYCQSDDGSSVVFGGGTKVTVLG

SEQ ID NO: 4322 - protein, 251 aa, Artificial Sequence
  Description of Artificial Sequence: Synthetic scFv sequence
QVQLQESGPGLVKPSGTLSLTCAVSGGSISTSDWWSWVRRPPGKGLEWIGEIYHSGSTNYHPSLKSRVTISLDKSKNQFSLKLSSVTAADTAVYYCAREGGHSGSYPLDYWGQGTLVTVSSGGGGSGGGGSGGGGSALNFMLTQPHSVSGSPGRTVTISCTRSSGSIATNYVQWYQQRPGSSPTIVIYEDNQRPSGVPDRFSGSIDTSSNSASLTISGLKTEDEADYYCQSYDSNNLGVVFGGGTQLTVLS

SEQ ID NO: 4323 - protein, 248 aa, Artificial Sequence
  Description of Artificial Sequence: Synthetic scFv sequence
QVQLQESGPGLVKPSGTLSLTCAVSGGSISTSDWWSWVRRPPGKGLEWIGEIYHSGSTNYHPSLKSRVTISLDKSKNQFSLKLSSVTAADTAVYYCAREGGHSGSYPLDYWGQGTLVTVSSGGGGSGGGGSGGGGSAQSVLTQPPSVSGTTGQRVILSCSGGNSNIGYNSVNWYQQLPGTAPKLLIYTDDQRPSGVPDRFSGSRSGTSASLAISGLQSEDEADYYCATWDDSLNAGVFGGGTKLTVLG

SEQ ID NO: 4324 - protein, 250 aa, Artificial Sequence
  Description of Artificial Sequence: Synthetic scFv sequence
QVQLQESGPGLVKPSGTLSLTCAVSGGSISTSDWWSWVRRPPGKGLEWIGEIYHSGSTNYHPSLKSRVTISLDKSKNQFSLKLSSVTAADTAVYYCAREGGHSGSYPLDYWGRGTLVTVSSGGGGSGGGGSGGGGSALNFMLTQPHSVSESPGKTATISCTGSGGSIARSYVQWYQQRPGRAPSIVIYEDYQRPSGVPDRFSGSIDSSSNSASLTITGLKTDDEADYYCQSSDDNNNVVFGGGTKVTVLG

SEQ ID NO: 4325 - protein, 248 aa, Artificial Sequence
  Description of Artificial Sequence: Synthetic scFv sequence
QVQLQESGPGLVKPSGTLSLTCAVSGGSISTSDWWSWVRRPPGKGLEWIGEIYHSGSTNYHPSLKSRVTISLDKSKNQFSLKLSSVTAADTAVYYCAREGGHSGSYPLDYWGRGTLVTVSSGGGGSGGGGSGGGGSAQAVLTQPSSVSAAPGQKVTISCSGSSSNIGNNYVSWYQQLPGTAPKLLIYDNNERPSGIPDRFSGSKSGTSATLGITGLQTGDEADYYCGTWDSSLSTVVFGTGTKVTVLG

SEQ ID NO: 4326 - protein, 247 aa, Artificial Sequence
  Description of Artificial Sequence: Synthetic scFv sequence
QVQLQESGPGLVKPSGTLSLTCAVSGGSISTSDWWSWVRRPPGKGLEWIGEIYHSGSTNYHPSLKSRVTISLDKSKNQFSLKLSSVTAADTAVYYCAREGGHSGSYPLDYWGRGTMVTVSSGGGGSGGGGSGGGGSAQSVLTQPPSASGTPGQRVTISCSGSFSNIGGNYVNWYQQLPGTAPKLLIYGNNQRPSGVPDRFSSFKSGTSASLAISGLRSEDEADYYCATWDDSQTVLFGGGTKLTVLG

SEQ ID NO: 4327 - protein, 247 aa, Artificial Sequence
  Description of Artificial Sequence: Synthetic scFv sequence
QVQLQESGPGLVRSSGILSLTCSVSGVSVSSNNWWSWVRQTPGKGLEWIGEIYQTGTTNYNPSLKSRVAISLDKSRNQFSLILKSVTAADTAVYYCARTSSAWSNADWGKGTMVTVSSGGGGSGGGGSGGGGSALSSELTQDPSASGSPGQSVSISCTGTSSDVGGYNYVSWYQQHPGKAPKLMISEVTKRPSGVPDRFSGSKSGNTASLTVSGLQAEDEADYYCSSFGANNNYLVFGGGTKLTVLG

SEQ ID NO: 4328 - protein, 251 aa, Artificial Sequence
  Description of Artificial Sequence: Synthetic scFv sequence
QVQLQESGPRLVKPSQTLSLTCTVSNDSIISGDYFWSWIRQPPGKGLEWIGNIFYTGSTSYNPSLKSRLTMSLDTSKNQFSLRLSSVTAADTAVYFCARGRQGMNWNSGTYFDSWGRGTLVTVSSGGGGSGGGGSGGGGSALSYVLTQPPSVSVAPGKTANITCGGKNIGNKSVQWYQQKPGQAPVVVMYYDSDRPSGIPERFSGSNAGNTATLTIDRVEAGDEADYYCQVWDKSSDRPVFGGGTKLTVLG

SEQ ID NO: 4329 - protein, 244 aa, Artificial Sequence
  Description of Artificial Sequence: Synthetic scFv sequence
QVQLQQSGAEVRKPGASAKVSCKTSGYTFIDYYIHWVRQAPGQGLEWMGWINPVTGASGSSPNFRGRVTLTTDTSGNTAYMELRSLRSDDTAVFYCARRHQQSLDYWGRGTTVTVSSGGGGSGGGGSGGGGSAQSVVTQPPSVSAAPGQKVTISCSGRTSNIGNNYVSWYQQVPGAPPKLLIFDNNKRPSGTPARFSGSKSGTSATLAISGLQTGDEADYYCGTWDTTLRGFVFGPGTKVTVLG

SEQ ID NO: 4330 - protein, 249 aa, Artificial Sequence
  Description of Artificial Sequence: Synthetic scFv sequence
QVQLQQSGAEVRKPGASVKISCKTSGYTFMDYYIHWVRQAPGQGLEWMGWSNPVTGTSGSSPKFRGRVTLTTDTSGNTAYLDLRSLRSDDTAVFYCARRHQQSLDYWGQGTLVTVSSGGGGSGGGGSGGGGSAQAVLTQPSSLSASPGASASLTCTLRSDINVGSYSINWYQQKPGSPPQYLLNYRSDSDKQQGSGVPSRFSGSKDASANAGILLISGLQSEDEADYYCMIWYRTAWVFGGGTKVTVLG

SEQ ID NO: 4331 - protein, 241 aa, Artificial Sequence
  Description of Artificial Sequence: Synthetic scFv sequence
QVQLVQSGAEVKKPGASVKVSCKASGYTFTDYYMHWVRQAPGEGLEWMGWMNPNSGGTNYAQKFQGRVTMTRDTSISTAYMELSRLRSDDTAVYYCARSHYWDSWSPGTLVTVSSGGGGGSGGGGSGGGGSSALTQPASVSGSPGQSITISCTGTSGDVGGYNYVSWYQQHPGKAPKLMIYDVSNRPSGVSNRFSGSKSGNTASLTISGLQAEDEADYYCTSYAGSRNLVFGGGTKLTVLG

SEQ ID NO: 4332 - protein, 245 aa, Artificial Sequence
  Description of Artificial Sequence: Synthetic scFv sequence
QVQLVQSGAEVKKPGASVKVSCKTSGYTFMEYYIHWVRQAPGQGLEWMGWSNPVTGTSGSSPKFRGRVTLTTDTSGNTAYLDLRSLRSDDTAVFYCARRHQQSLDYWGQGTLVTVSSGGGGSGGGGSGGGGSAQSVVTQPPSASGSPGQSVTISCSGYSSSNIGNNAVSWYQQLPGTAPKLLIFDNNKRPSGIPARFSGSQSGTTATLGITGLQTGDEADYFCGTWDSSLSAFVFGSGTKVTVLG

SEQ ID NO: 4333 - protein, 250 aa, Artificial Sequence
  Description of Artificial Sequence: Synthetic scFv sequence
QVQLVQSGAEVKKPGESLKISCKGSGYTFTNYWIAWVRQMPGKGLEWMGIIYPDDSDTRYNPSFQGQVTMSADKSIDTAYLQWSSLKASDTAIYYCARPSGWNDNGYFDYWGRGTTVTVSSGGGGSGGGGSGGGGSALNFMLTQPHSVSASPGKTVTLSCTGSSGSIASNYVQWYRQRPGSAPTTVIYDDNQRPSGVPDRFSGSIDSSSNSASLTISGLKTEDEADYYCQSFDNDNHWVFGGGTKLTVLG

SEQ ID NO: 4334 - protein, 244 aa, Artificial Sequence
  Description of Artificial Sequence: Synthetic scFv sequence
QVQLVQSGAEVRKPGASVKVSCKTSGYTFIDYYIHWVRQAPGQGLEWMGWVNPVTGTSGSSPNFRGRVTMTTDTSGNTAYMELRSLRSDDTAVFYCARRHQQSLDYWGQGTLVTVSSGGGGSGGGGSGGGGSAQSVLTQPPSVSAPPGQKVTISCSGSSSNIGTNYVSWYQQLPGTAPKLLIYDNHKRPSVIPDRFSGSKSGTSATLGISGLQTGDEADYYCGTWDYSLSTWVFGGGTKLTVLG

SEQ ID NO: 4335 - protein, 244 aa, Artificial Sequence
  Description of Artificial Sequence: Synthetic scFv sequence
QVQLVQSGAEVRKPGASVKVSCKTSGYTFIEYYIHWVRQAPGQGLEWMGWSNPVTGTSGSSPKFRGRVTLTTDTSGNTAYLDLRSLRSDDTAVFYCARRHQQSLDYWGRGTTVTVSSGGGGSGGGGSGGGGSAQSVLTQPPSVSAAPGQKVTISCSGTNSNIGNYYVSWYQQLPGTAPKLLIYDNNKRPSGVPDRFSGSKSGTSASLVISGLRSEDEADYYCAAWDGSLTAWVFGGGTKVTVLG

SEQ ID NO: 4336 - protein, 244 aa, Artificial Sequence
  Description of Artificial Sequence: Synthetic scFv sequence
QVQLVQSGAEVRKPGASVKVSCKTSGYTFMDYYIHWVRQAPGQGLEWMGWSNPVTGTSGSSPKFRGRVTLTTDTSGNTAYLDLRSLRSDDTAVFYCARRHQQSLDYWGQGTMVTVSSGGGGSGGGGSGGGGSAQSVLTQPPSVSAAPGQKVTISCSGSSSNIGNNYVSWYQQLPGTAPKLLMYENSKRPSGIPDRFSGSKSGTSGTLGITGLQTGDEADYYCGTWDTSLRAWVFGGGTKVTVLG

SEQ ID NO: 4337 - protein, 245 aa, Artificial Sequence
  Description of Artificial Sequence: Synthetic scFv sequence
QVQLVQSGAEVRKPGASVRVSCKTSGYTFLEYYIHWVRQAPGQGLEWMAWSNPVTGTSGSSPKFRGRVTLTADTSGNTAYLDLKSLTSDDTAIFYCARRHQQSLDYWGQGTLVTVSSGGGGSGGGGSGGGGSAQSVLTQPPSVSAAPGQTVTISCSGSNSNIGNNHVSWYRQLPETAPKLLIYDNNKRPSGIPDRFSGSKSGTSATLDITGLQTGDEADYYCATWDNSLSAPWVFGGGTKLTVLG

SEQ ID NO: 4338 - protein, 246 aa, Artificial Sequence
  Description of Artificial Sequence: Synthetic scFv sequence
QVQLVQSGGGLVQPGGSLRLSCAASGFTFSSYAMSWVRQAPGKGLEWVSAISGSGGSTYYADSVKGRFTISRDNSKNTLYLQMNSLRAEDTAVYYCAKSSSSWYRSYYFDYWGQGTLVTVSSGGGGGSGGGGSGGGGSQSALTQDPAVSVALGQTVRITCRGDSLRNYYASWYQQKPGQAPVLVIYGKNNRPSGIPDRFSGSFSGNTASLTITGAQAEDEADYYCNSRDSSANQMFGGGTKVTVLG

SEQ ID NO: 4339 - protein, 253 aa, Artificial Sequence
  Description of Artificial Sequence: Synthetic scFv sequence
QVQLVQSGPEVKKPGASVEVSCKASGYTFTGDYMHWVRQAPGQGPEWMGWINPQTGVTKYAQKFQGRVTMARDTSINTAYMELRGLRSDDTAVYYCVREDHNYDLWSAYNGLDVWGQGTLVTVSSGGGGSGGGGSGGGGSAQSVLTQPPSVSAAPGQKVTISCSGSSSNIGNNHVSWYQQLAGTAPKLLIFDNDKRPSGIPDRFSGSKSGTSATLGITGLQTGDEADYYCGTWDKSPTDIYVFGSGTKLTVLG

SEQ ID NO: 4340 - protein, 243 aa, Artificial Sequence
  Description of Artificial Sequence: Synthetic scFv sequence
EVQLVESGGGLVQPGGSLRLSCAASGFDFSRYWMSWVRQAPGKGLEWIGEINPDSSTINYAPSLKDKFIISRDNAKSLYLQMNSLRAEDTAVYYCARPDGNYWYFDVWGQGTLVTVSSGSTSGGGSGGGSGGGGSSDIQMTQSPSSLSASVGDRVTITCKASQDVGIAVAWYQQKPGKVPKLLIYWASTRHTGVPDRFSGSGSGTDFTLTISSLQPEDVATYYCQQYSSYPYTFGQGTKVEIK

SEQ ID NO: 4341 - protein, 259 aa, Artificial Sequence
  Description of Artificial Sequence: Synthetic scFv sequence
MEFGLSWLFLVAILKGVQCSRMAQVKLKESGPELKKPGETVKISCKASGYTFTDYSMHWVKKTPGKGLKWLGWINTATGEPTYADDFKGRFAISLETSARTVYLQINNLRNEDTATYFCFSYYDYWGQGTTVTVSSGGGGSGGGGSGGGGLDIKLTQSPSILSVTPGETVSLSCRASQTIYKNLHWYQQKSHRSPRLLIKYGSDSISGIPSRFTGSGSGTDYTLNINSVKPEDEGIYYCLQGYSTPWTFGGGTKLEIKR

SEQ ID NO: 4342 - protein, 219 aa, Artificial Sequence
  Description of Artificial Sequence: Synthetic scFv sequence
DIVMTQSPSSLAVSLGERATMSCKSSQSLFNSRTRKNYLAWYQQKPGQSPKLLIYWASARDSGVPARFTGSGSETYFTLTISRVQAEDLAVYYCMQSFNLRTFGQGTKVEIKRTVAAPSVFIFPPSDEQLKSGTASVVCLLNNFYPREAKVQWKVDNALQSGNSQESVTEQDSKDSTYSLSSTLTLSKADYEKHKVYACEVTHQGLSSPVTKSFNRGEC

SEQ ID NO: 4343 - protein, 450 aa, Artificial Sequence
  Description of Artificial Sequence: Synthetic scFv sequence
EVNLVESGGGLVQPGRSLRLSCTASGFTFTDNYMSWVRQAPGKGLEWLGFIRNKANGYTTDYAASVRGRFTISRDNSKSILYLQMNALRTEDTAVYYCARDVGSNYFDYWGQGTLVTVSSASTKGPSVFPLAPSSKSTSGGTAALGCLVKDYFPEPVTVSWNSGALTSGVHTFPAVLQSSGLYSLSSVVTVPSSSLGTQTYICNVNHKPSNTKVDKRVEPKSCDKTHTCPPCPAPELLGGPSVFLFPPKPKDTLMISRTPEVTCVVVDVSHEDPEVKFNWYVDGVEVHNAKTKPREEQYNSTYRVVSVLTVLHQDWLNGKEYKCKVSNKALPAPIEKTISKAKGQPREPQVYTLPPSREEMTKNQVSLTCLVKGFYPSDIAVEWESNGQPENNYKTTPPVLDSDGSFFLYSKLTVDKSRWQQGNVFSCSVMHEALHNHYTQKSLSLSPGK

SEQ ID NO: 4344 - protein, 450 aa, Artificial Sequence
  Description of Artificial Sequence: Synthetic scFv sequence
EVQLVESGGGLVQPGRSLRLSCTASGFTFTDNYMSWVRQAPGKGLEWLGFIRNKANGYTTEYAASVKGRFTISRDNSKSIAYLQMNSLKTEDTAVYYCARDVGSNYFDYWGQGTLVTVSSASTKGPSVFPLAPSSKSTSGGTAALGCLVKDYFPEPVTVSWNSGALTSGVHTFPAVLQSSGLYSLSSVVTVPSSSLGTQTYICNVNHKPSNTKVDKRVEPKSCDKTHTCPPCPAPELLGGPSVFLFPPKPKDTLMISRTPEVTCVVVDVSHEDPEVKFNWYVDGVEVHNAKTKPREEQYNSTYRVVSVLTVLHQDWLNGKEYKCKVSNKALPAPIEKTISKAKGQPREPQVYTLPPSREEMTKNQVSLTCLVKGFYPSDIAVEWESNGQPENNYKTTPPVLDSDGSFFLYSKLTVDKSRWQQGNVFSCSVMHEALHNHYTQKSLSLSPGK

SEQ ID NO: 4345 - protein, 450 aa, Artificial Sequence
  Description of Artificial Sequence: Synthetic scFv sequence
EVQLVESGGGLVQPGRSLRLSCTASGFTFTDNYMSWVRQAPGKGLEWVGFIRNKANGYTTEYAASVKGRFTISRDDSKSIAYLQMNSLKTEDTAVYYCARDVGSNYFDYWGQGTLVTVSSASTKGPSVFPLAPSSKSTSGGTAALGCLVKDYFPEPVTVSWNSGALTSGVHTFPAVLQSSGLYSLSSVVTVPSSSLGTQTYICNVNHKPSNTKVDKRVEPKSCDKTHTCPPCPAPELLGGPSVFLFPPKPKDTLMISRTPEVTCVVVDVSHEDPEVKFNWYVDGVEVHNAKTKPREEQYNSTYRVVSVLTVLHQDWLNGKEYKCKVSNKALPAPIEKTISKAKGQPREPQVYTLPPSREEMTKNQVSLTCLVKGFYPSDIAVEWESNGQPENNYKTTPPVLDSDGSFFLYSKLTVDKSRWQQGNVFSCSVMHEALHNHYTQKSLSLSPGK

SEQ ID NO: 4346 - protein, 250 aa, Artificial Sequence
  Description of Artificial Sequence: Synthetic scFv sequence
SYELTQPPSVSGTPGQRVAISCSGSSSNIGTRMVTWYQHVPGTAPKLLIFNNNQRPSGVPDRFSASKSGTSASLAIIGLQSDDEADYYCAAWDDNLKSYVFGTGTKVTVLGSRGGGGSGGGGSDGGGSLEMAQVQLQQWGAGLLKPSETLSLTCAVYGGSFSGYYWSWIRQLPGKGLEWIGEINHSGSTNYNPYLKSRVTISVDTSKRQFSLKLSSVTAADTAVYYCARAPQSWYVGDVWGQGTLVTVSS

SEQ ID NO: 4347 - protein, 250 aa, Artificial Sequence
  Description of Artificial Sequence: Synthetic scFv sequence
SYELTQPPSVSGTPGQRVAISCSGSSSNIGTRMVTWYQHVPGTAPKLLIFNNNQRPSGVPDRFSASKSGTSASLAIIGLQSDDEADYYCAAWDDNLKSYVFGTGTKVTVLGSRGGGGSGGGGSGGGGSLEMAQVQLQQWGAGLLKPSETLSLTCAVYGGSFSGYYWSWIRQPPGKGLEWIGEINHSGSTNYNPSLKSRVTISVDTSKNQFSLKLSSVTAADTAVYYCARAPQSWYRGDVWGQGTLVTVSS

SEQ ID NO: 4348 - protein, 250 aa, Artificial Sequence
  Description of Artificial Sequence: Synthetic scFv sequence
SYELTQPPSVSGTPGQRVAISCSGSSSNIGTRMVTWYQHVPGTAPKLLIFNNNQRPSGVPDRFSASKSGTSASLAIIGLQSDDEADYYCAAWDDNLKSYVFGTGTKVTVLGSRGGGGSGGGGSGGGGSLEMAQVQLQQWGAGLLKPSETLSLTCAVYGGSFSGYYWSWIRQPPGKGLEWIGEINHSGSTNYNPSLKSRVTISVDTSKNQFSLKLSSVTAADTAVYYCLRAPQSWYVGDVWGQGTLVTVSS

SEQ ID NO: 4349 - protein, 250 aa, Artificial Sequence
  Description of Artificial Sequence: Synthetic scFv sequence
SYELTQPPSVSGTPGQRVAISCSGSSSNIGTRMVTWYQHVPGTAPKLLIFNNNQRPSGVPDRFSASKSGTSASLAIIGLQSDDEADYYCAAWDDNLKSYVFGTGTKVTVLGSRGGGGSGGGGSGGGGSLEMAQVQLQQWGAGLLKPSETMSLTCAVYGGSFSGYYWSWIRQPPGKGLEWIGEINHSGSTNYNPSLKSRVTISVDTSKNQFSLKLSSVTAADTAVYYCARAPQSWYRGDVWGQGTLVTVSS

SEQ ID NO: 4350 - protein, 250 aa, Artificial Sequence
  Description of Artificial Sequence: Synthetic scFv sequence
SYELTQPPSVSGTPGQRVAISCSGSSSNIGTRMVTWYQHVPGTAPKLLIFNNNQRPSGVPDRFSASKSGTSASLAIIGLQSDDEADYYCAAWDDNPKSYHFGTGTKVTVLGSRGGGGSGGGGSGGGGSLEMAQVQLQQWGAGLLKPSETLSLTCAVYGGSFSGYYWSWIRQPPGKGLEWIGEINHSGSTNYNPSLKSRVTISVDTSKNQFSLKLSSVTAADTAVYYCARAPQSWYVGDVWGQGTLVTVSS

SEQ ID NO: 4351 - protein, 250 aa, Artificial Sequence
  Description of Artificial Sequence: Synthetic scFv sequence
SYELTQPPSVSGTPGQRVAISCSGSSSNIGTRMVTWYQHVPGTAPKLLIFNNNQRPSGVPDRFSASKSGTSASLAIIGLQSDDEADYYCATWDDNVKSYVFGTGTKVTVLGSRGGGGSGGGGSGGGGSLEMAQVQLQQWGAGLLKPSETLSLTCAVYGGSFSGYYWSWIRQPPGKGLEWIGEINHSGSTNYNPSLKSRVTISVDTSKNQFSLKLSSVTAADTAVYYCARAPQSWYVGDVWGQGTLVTVSS

SEQ ID NO: 4352 - protein, 250 aa, Artificial Sequence
  Description of Artificial Sequence: Synthetic scFv sequence
SYELTQPPSVSGTPGQRVAISCSGSSSNIGTRMVTWYQHVPGTAPKLLIFNNNQRPSGVPDRFSASKSGTSASLAIIGLQSDDEADYYCATWDENPKSYVFGTGTKVTVLGSRGGGGSGGGGSGGGGSLEMAQVQLQQWGAGLLKPSETLSLTCAVYGGSFSGYYWSWIRQPPGKGLEWIGEINHSGSTNYNPSLKSRVTISVDTSKNQFSLKLSSVTAADTAVYYCARAPQSWYVGDVWGQGTLVTVSS

SEQ ID NO: 4353 - protein, 250 aa, Artificial Sequence
  Description of Artificial Sequence: Synthetic scFv sequence
SYELTQPPSVSGTPGQRVAISCSGSSSNIGTRMVTWYQHVPGTAPKLLIFNNNQRPSGVPDRFSASKSGTSASLAIIGLQSDDEADYYCATWEDNRKSYVFGTGTKVTVLGSRGGGGSGGGGSGGGGSLEMAQVQLQQWGAGLLKPSETLSLTCAVYGGSFSGYYWSWIRQPPGKGLEWIGEINHSGSTNYNPSLKSRVTISVDTSKNQFSLKLSSVTAADTAVYYCARAPQSWYVGDVWGQGTLVTVSS

SEQ ID NO: 4354 - protein, 250 aa, Artificial Sequence
  Description of Artificial Sequence: Synthetic scFv sequence
SYELTQPPSVSGTPGQRVAISCSGSSSNIGTRMVTWYQHVPGTAPKLLIFNNNQRPSGVPDRFSASKSGTSASLTIIGLQSDDEADYYCAAWDDNLKSYVFGTGTKVTVLGSRGGGGSGGGGSGGGGSLEMAQVQLQQWGAGLLKPSETLSLTCAVYGGSFSGYYWSWIRQPPGKGLEWIGEINHSGSTNYNPSLKSRVTMSVDTSKRQFSLKLSSVTAADTAVYYCARAPQSWYVGDVWGQGTLVTVSS

SEQ ID NO: 4355 - protein, 250 aa, Artificial Sequence
  Description of Artificial Sequence: Synthetic scFv sequence
SYELTQPPSVSGTPGQRVAISCSGSSSNIGTRVVTWYQHVPGTAPKLLIFNNNQRPSGVPDRFSASKSGTSASLAIIGLQSDDEADYYCAAWDDNLKSYVFGTGTKVTVLGSRGGGGSGGGGSGGGGSLEMAQVQLQQWGAGLLKPSETLSLTCAVYGGSFSGYYWSWIRQPPGKGLEWIGEINHSGSTNYNPSLKSRVTISVDTSKNQFSLKLSSVTAADTAVYYCARAPQSWYVGDVWGQGTLVTVSS

SEQ ID NO: 4356 - protein, 240 aa, Artificial Sequence
  Description of Artificial Sequence: Synthetic scFv sequence
DIQMTQSPSSLSASVGDRVTITCRASQGIRNNLAWYQQKPGKAPKRLIYAASNLQSGVPSRFTGSGSGTEFTLIVSSLQPEDFATYYCLQHHSYPLTSGGGTKVEIKRTGSTSGSGKPGSGEGSEVQVLESGGGLVQPGGSLRLSCAASGFTFSSYAMSWVRQAPGKGLEWVSAISGSGGSTNYADSVKGRFTISRDNSKNTLYLQMNSLRAEDTAVYYCAGSSGWSEYWGQGTLVTVSS

SEQ ID NO: 4357 - protein, 126 aa, Artificial Sequence
  Description of Artificial Sequence: Synthetic scFv sequence
EAQLVQSGAEGKKPGSSVKVSCKAPGGTFNSYAISWVRQAPGQGLEWMGGIIPIFGTAYYAQKFQGRVTITADESTSTAYMELSSLRSEDTAVYYCAREEGPYCSSTSCYAAFDIWGRGTLVTVSS

SEQ ID NO: 4358 - protein, 126 aa, Artificial Sequence
  Description of Artificial Sequence: Synthetic scFv sequence
EAQLVQSGAEGKKPGSSVKVSCKAPGGTFNSYAISWVRQAPGQGLEWMGGIIPIFGTAYYAQKFQGRVTITADESTSTAYMELSSLRSEDTAVYYCAREEGPYCSSTSCYGAFDIWGRGTLVTVSS

SEQ ID NO: 4359 - protein, 126 aa, Artificial Sequence
  Description of Artificial Sequence: Synthetic scFv sequence
EVQLVQSGAEVKKLGSSVKVSCKASGGTFSSYAISWVRQAPGQGLEWVGGIIPIFGTANYAQKFQGRVKITADESASTAYMELSSLRSEDTAVYYCAREEGPYCSSTSCYGAFDIWGQGTLVTVSS

SEQ ID NO: 4360 - protein, 126 aa, Artificial Sequence
  Description of Artificial Sequence: Synthetic scFv sequence
EVQLVQSGAEVKKPGSSVKVSCKASGGTFSSYAIGWVRQAPGQGLEWMGGIIPIFGIANYAQKFQGRVTITADESTSSAYMELSSLRSEDTAVYYCAREEGPYCSSTSCYAAFDIWGQGTLVTVSS

SEQ ID NO: 4361 - protein, 126 aa, Artificial Sequence
  Description of Artificial Sequence: Synthetic scFv sequence
EVQLVQSGAEVKKPGSSVKVSCKASGGTFSSYAIGWVRQAPGQGLEWMGGIIPIFGIANYAQKFQGRVTITADESTSSAYMELSSLRSEDTAVYYCAREEGPYCSSTSCYGAFDIWGQGTLVTVSS

SEQ ID NO: 4362 - protein, 126 aa, Artificial Sequence
  Description of Artificial Sequence: Synthetic scFv sequence
EVQLVQSGAEVKKPGSSVKVSCKASGGTFSSYAISWVRQAPGQGLEWMGGIIPIFGTANYAQKFQGRVTITADESTSTAYMELSSLRSEDTAVYYCAREEGPYCSSTSCYAAFDIWGQGTLVTVSS

SEQ ID NO: 4363 - protein, 126 aa, Artificial Sequence
  Description of Artificial Sequence: Synthetic scFv sequence
EVQLVQSGAEVKKPGSSVKVSCKASGGTFSSYAISWVRQAPGQGLEWMGGIIPIFGTANYAQKFQGRVTITADESTSTAYMELSSLRSEDTAVYYCAREEGPYCSSTSCYGAFDIWGQGTLVTVSS

SEQ ID NO: 4364 - protein, 126 aa, Artificial Sequence
  Description of Artificial Sequence: Synthetic scFv sequence
EVQLVQSGAEVKKPGSSVKVSCKASGGTFSSYAISWVRQAPGQGLEWVGGIIPIFGTANYAQKFQGRVKITADESASTAYMELSSLRSEDTAVYYCAREEGPYCSSTSCYAAFDIWGQGTLVTVSS

SEQ ID NO: 4365 - protein, 126 aa, Artificial Sequence
  Description of Artificial Sequence: Synthetic scFv sequence
EVQLVQSGAEVKKPGSSVKVSCKASGGTFSSYAISWVRQAPGQGLEWVGGIIPIFGTANYAQKFQGRVKITADESASTAYMELSSLRSEDTAVYYCAREEGPYCSSTSCYGAFDIWGQGTLVTVSS

SEQ ID NO: 4366 - protein, 261 aa, Artificial Sequence
  Description of Artificial Sequence: Synthetic scFv sequence
HAARPDVVMTQSPDSLAVSLGERATINCKSSQSLLDSDGKTYLNWLQQKPGQPPKRLISLVSKLDSGVPDRFSGSGSGTDFTLTISSLQAEDVAVYYCWQGTHFPGTFGGGTKVEIKGGGGSGGGGSGGGGSGGGGSEIQLVQSGAEVKKPGATVKISCKGSGFNIEDYYIHWVQQAPGKGLEWMGRIDPENDETKYGPIFQGRVTITADTSTNTVYMELSSLRSEDTAVYYCAFRGGVYWGQGTTVTVSSGSHHHHHHHH

SEQ ID NO: 4367 - protein, 269 aa, Artificial Sequence
  Description of Artificial Sequence: Synthetic scFv sequence
MALPVTALLLPLALLLHAARPDIQMTQSPSSLSASVGDRVTITCRASQGIRNNLAWYQQKPGKAPKRLIYAASNLQSGVPSRFTGSGSGTEFTLIVSSLQPEDFATYYCLQHHSYPLTSGGGTKVEIKRTGSTSGSGKPGSGEGSEVQVLESGGGLVQPGGSLRLSCAASGFTFSSYAMSWVRQAPGKGLEWVSAISGSGGSTNYADSVKGRFTISRDNSKNTLYLQMNSLRAEDTAVYYCAGSSGWSEYWGQGTLVTVSSHHHHHHHH

SEQ ID NO: 4368 - protein, 278 aa, Artificial Sequence
  Description of Artificial Sequence: Synthetic scFv sequence
MALPVTALLLPLALLLHAARPDVVMTQSPDSLAVSLGERATINCKSSQSLLDSDGKTYLNWLQQKPGQPPKRLISLVSKLDSGVPDRFSGSGSGTDFTLTISSLQAEDVAVYYCWQGTHFPGTFGGGTKVEIKGGGGSGGGGSGGGGSGGGGSEIQLVQSGAEVKKPGESLRISCKGSGFNIEDYYIHWVRQMPGKGLEWMGRIDPENDETKYGPIFQGHVTISADTSINTVYLQWSSLKASDTAMYYCAFRGGVYWGQGTTVTVSSGSHHHHHHHHH

SEQ ID NO: 4369 - protein, 277 aa, Artificial Sequence
  Description of Artificial Sequence: Synthetic scFv sequence
MALPVTALLLPLALLLHAARPDVVMTQSPLSLPVTLGQPASISCKSSQSLLDSDGKTYLNWLQQRPGQSPRRLISLVSKLDSGVPDRFSGSGSGTDFTLKISRVEAEDVGVYYCWQGTHFPGTFGGGTKVEIKGGGGSGGGGSGGGGSGGGGSEIQLVQSGAEVKKPGATVKISCKGSGFNIEDYYIHWVQQAPGKGLEWMGRIDPENDETKYGPIFQGRVTITADTSTNTVYMELSSLRSEDTAVYYCAFRGGVYWGQGTTVTVSSGSHHHHHHHH

SEQ ID NO: 4370 - protein, 277 aa, Artificial Sequence
  Description of Artificial Sequence: Synthetic scFv sequence
MALPVTALLLPLALLLHAARPDVVMTQSPLSLPVTLGQPASISCKSSQSLLDSDGKTYLNWLQQRPGQSPRRLISLVSKLDSGVPDRFSGSGSGTDFTLKISRVEAEDVGVYYCWQGTHFPGTFGGGTKVEIKGGGGSGGGGSGGGGSGGGGSEIQLVQSGAEVKKPGESLRISCKGSGFNIEDYYIHWVRQMPGKGLEWMGRIDPENDETKYGPIFQGHVTISADTSINTVYLQWSSLKASDTAMYYCAFRGGVYWGQGTTVTVSSGSHHHHHHHH

SEQ ID NO: 4371 - protein, 274 aa, Artificial Sequence
  Description of Artificial Sequence: Synthetic scFv sequence
MALPVTALLLPLALLLHAARPEIQLQQSGAELVKPGASVKLSCTGSGFNIEDYYIHWVKQRTEQGLEWIGRIDPENDETKYGPIFQGRATITADTSSNTVYLQLSSLTSEDTAVYYCAFRGGVYWGPGTTLTVSSGGGGSGGGGSGGGGSHMDVVMTQSPLTLSVAIGQSASISCKSSQSLLDSDGKTYLNWLLQRPGQSPKRLISLVSKLDSGVPDRFTGSGSGTDFTLRISRVEAEDLGIYYCWQGTHFPGTFGGGTKLEIKGSHHHHHHHH

SEQ ID NO: 4372 - protein, 277 aa, Artificial Sequence
  Description of Artificial Sequence: Synthetic scFv sequence
MALPVTALLLPLALLLHAARPEIQLVQSGAEVKKPGATVKISCKGSGFNIEDYYIHWVQQAPGKGLEWMGRIDPENDETKYGPIFQGRVTITADTSTNTVYMELSSLRSEDTAVYYCAFRGGVYWGQGTTVTVSSGGGGSGGGGSGGGGSGGGGSDVVMTQSPDSLAVSLGERATINCKSSQSLLDSDGKTYLNWLQQKPGQPPKRLISLVSKLDSGVPDRFSGSGSGTDFTLTISSLQAEDVAVYYCWQGTHFPGTFGGGTKVEIKGSHHHHHHHH

SEQ ID NO: 4373 - protein, 277 aa, Artificial Sequence
  Description of Artificial Sequence: Synthetic scFv sequence
MALPVTALLLPLALLLHAARPEIQLVQSGAEVKKPGATVKISCKGSGFNIEDYYIHWVQQAPGKGLEWMGRIDPENDETKYGPIFQGRVTITADTSTNTVYMELSSLRSEDTAVYYCAFRGGVYWGQGTTVTVSSGGGGSGGGGSGGGGSGGGGSDVVMTQSPLSLPVTLGQPASISCKSSQSLLDSDGKTYLNWLQQRPGQSPRRLISLVSKLDSGVPDRFSGSGSGTDFTLKISRVEAEDVGVYYCWQGTHFPGTFGGGTKVEIKGSHHHHHHHH

SEQ ID NO: 4374 - protein, 278 aa, Artificial Sequence
  Description of Artificial Sequence: Synthetic scFv sequence
MALPVTALLLPLALLLHAARPEIQLVQSGAEVKKPGESLRISCKGSGFNIEDYYIHWVRQMPGKGLEWMGRIDPENDETKYGPIFQGHVTISADTSINTVYLQWSSLKASDTAMYYCAFRGGVYWGQGTTVTVSSGGGGSGGGGSGGGGSGGGGSDVVMTQSPDSLAVSLGERATINCKSSQSLLDSDGKTYLNWLQQKPGQPPKRLISLVSKLDSGVPDRFSGSGSGTDFTLTISSLQAEDVAVYYCWQGTHFPGTFGGGTKVEIKGSHHHHHHHHH

SEQ ID NO: 4375 - protein, 277 aa, Artificial Sequence
  Description of Artificial Sequence: Synthetic scFv sequence
MALPVTALLLPLALLLHAARPEIQLVQSGAEVKKPGESLRISCKGSGFNIEDYYIHWVRQMPGKGLEWMGRIDPENDETKYGPIFQGHVTISADTSINTVYLQWSSLKASDTAMYYCAFRGGVYWGQGTTVTVSSGGGGSGGGGSGGGGSGGGGSDVVMTQSPLSLPVTLGQPASISCKSSQSLLDSDGKTYLNWLQQRPGQSPRRLISLVSKLDSGVPDRFSGSGSGTDFTLKISRVEAEDVGVYYCWQGTHFPGTFGGGTKVEIKGSHHHHHHHH

SEQ ID NO: 4376 - protein, 363 aa, Artificial Sequence
  Description of Artificial Sequence: Synthetic scFv sequence
MATGSRTSLLLAFGLLCLPWLQEGSAAPDVQDCPECTLQENPFFSQPGAPILQCMGCCFSRAYPTPLRSKKTMLVQKNVTSESTCCVAKSYNRVTVMGGFKVENHTACHCSTCGFSASPAFFQVQLKQSGPGLVQPSQSLSITCTVSGFSLTNYGVHWVRQSPGKGLEWLGVIWSGGNTDYNTPFTSRLSINKDNSKSQVFFKMNSLQSNDTAIYYCARALTYYDYEFAYWGQGTLVTVSAGGGGSGGGGSGGGGSDILLTQSPVILSVSPGERVSFSCRASQSIGTNIHWYQQRTNGSPRLLIKYASESISGIPSRFSGSGSGTDFTLSINSVESEDIADYYCQQNNNWPTTFGAGTKLELK

SEQ ID NO: 4377 - protein, 232 aa, Artificial Sequence
  Description of Artificial Sequence: Synthetic scFv sequence
MATGSRTSLLLAFGLLCLPWLQEGSAAPDVQDCPECTLQENPFFSQPGAPILQCMGCCFSRAYPTPLRSKKTMLVQKNVTSESTCCVAKSYNRVTVMGGFKVENHTACHCSTCQVQLKQSGPGLVQPSQSLSITCTVSGFSLTNYGVHWVRQSPGKGLEWLGVIWSGGNTDYNTPFTSRLSINKDNSKSQVFFKMNSLQSNDTAIYYCARALTYYDYEFAYWGQGTLVTVSA

SEQ ID NO: 4378 - protein, 353 aa, Artificial Sequence
  Description of Artificial Sequence: Synthetic scFv sequence
MATGSRTSLLLAFGLLCLPWLQEGSAAPDVQDCPECTLQENPFFSQPGAPILQCMGCCFSRAYPTPLRSKKTMLVQKNVTSESTCCVAKSYNRVTVMGGFKVENHTACHCSTCQVQLKQSGPGLVQPSQSLSITCTVSGFSLTNYGVHWVRQSPGKGLEWLGVIWSGGNTDYNTPFTSRLSINKDNSKSQVFFKMNSLQSNDTAIYYCARALTYYDYEFAYWGQGTLVTVSAGGGGSGGGGSGGGGSDILLTQSPVILSSPGERVSFSCRASQSIGTNIHWYQQRTNGSPRLLIKYASESISGIPSRFSGSGSGTDFTLSINSVESEDIADYYCQQNNNWPTTFGAGTKLELK

SEQ ID NO: 4379 - protein, 222 aa, Artificial Sequence
  Description of Artificial Sequence: Synthetic scFv sequence
MATGSRTSLLLAFGLLCLPWLQEGSADILLTQSPVILSVSPGERVSFSCRASQSIGTNIHWYQQRTNGSPRLLIKYASESISGIPSRFSGSGSGTDFTLSINSVESEDIADYYCQQNNNWPTTFGAGTKLELKAAAPDVQDCPECTLQENPFFSQPGAPILQCMGCCFSRAYPTPLRSKKTMLVQKNVTSESTCCVAKSYNRVTVMGGFKVENHTACHCSTC

SEQ ID NO: 4380 - protein, 616 aa, Artificial Sequence
  Description of Artificial Sequence: Synthetic scFv sequence
MATGSRTSLLLAFGLLCLPWLQEGSADIQMTQSPSSLSASVGDRVTITCITSNDIDDDMNWYQQKPGKAPKLLISEGNTLRPGVPSRFSGSGYGTDFTLTISSLQPEDVATYYCFQSDNLPYTFGQGTKVEIKGGGGSGGGGSGGGGSEVQLVQSGAEVKKPGASVKVSCKASGDTFTTYVIHWMRQAPGQGLEWIGYINPYNDGTKYNEKFKGRVTITSDKSTSTAYMELSSLRSEDTAVYYCARIYYDYDGDYWGQGTLVTVSSAAAPDVQDCPECTLQENPFFSQPGAPILQCMGCCFSRAYPTPLRSKKTMLVQKNVTSESTCCVAKSYNRVTVMGGFKVENHTACHCSTCGGGGSGGGGSGGGGSGGGGSQVQLKQSGPGLVQPSQSLSITCTVSGFSLTNYGVHWVRQSPGKGLEWLGVIWSGGNTDYNTPFTSRLSINKDNSKSQVFFKMNSLQSNDTAIYYCARALTYYDYEFAYWGQGTLVTVSAGGGGSGGGGSGGGGSDILLTQSPVILSVSPGERVSFSCRASQSIGTNIHWYQQRTNGSPRLLIKYASESISGIPSRFSGSGSGTDFTLSINSVESEDIADYYCQQNNNWPTTFGAGTKLELK

SEQ ID NO: 4381 - protein, 658 aa, Artificial Sequence
  Description of Artificial Sequence: Synthetic scFv sequence
MATGSRTSLLLAFGLLCLPWLQEGSAEVQLVESGGGLVQPGGSLRLSCAASGYTFTNYGMNWVRQAPGKGLEWVGWINTYTGEPTYAADFKRRFTFSLDTSKSTAYLQMNSLRAEDTAVYYCAKYPHYYGSSHWYFDVWGQGTLVTVSSGGGGSGGGGSGGGGSDIQMTQSPSSLSASVGDRVTITCSASQDISNYLNWYQQKPGKAPKVLIYFTSSLHSGVPSRFSGSGSGTDFTLTISSLQPEDFATYYCQQYSTVPWTFGQGTKVEIKRSKEPLRPRCRPINATLAVEKEGCPVCITVNTTICAGYCPTMTRVLQGVLPALPQVVCNYRDVRFESIRLPGCPRGVNPVVSYAVALSCQCALCRRSTTDCGGPKDHPLTCDDPRFQDSSSSKAPPPSLPSPSRLPGPSDTPILPQQVQLKQSGPGLVQPSQSLSITCTVSGFSLTNYGVHWVRQSPGKGLEWLGVIWSGGNTDYNTPFTSRLSINKDNSKSQVFFKMNSLQSNDTAIYYCARALTYYDYEFAYWGQGTLVTVSAGGGGSGGGGSGGGGSDILLTQSPVILSVSPGERVSFSCRASQSIGTNIHWYQQRTNGSPRLLIKYASESISGIPSRFSGSGSGTDFTLSINSVESEDIADYYCQQNNNWPTTFGAGTKLELK

SEQ ID NO: 4382 - protein, 616 aa, Artificial Sequence
  Description of Artificial Sequence: Synthetic scFv sequence
MATGSRTSLLLAFGLLCLPWLQEGSAEVQLVQSGAEVKKPGASVKVSCKASGDTFTTYVIHWMRQAPGQGLEWIGYINPYNDGTKYNEKFKGRVTITSDKSTSTAYMELSSLRSEDTAVYYCARIYYDYDGDYWGQGTLVTVSSGGGGSGGGGSGGGGSDIQMTQSPSSLSASVGDRVTITCITSNDIDDDMNWYQQKPGKAPKLLISEGNTLRPGVPSRFSGSGYGTDFTLTISSLQPEDVATYYCFQSDNLPYTFGQGTKVEIKAAAPDVQDCPECTLQENPFFSQPGAPILQCMGCCFSRAYPTPLRSKKTMLVQKNVTSESTCCVAKSYNRVTVMGGFKVENHTACHCSTCGGGGSGGGGSGGGGSGGGGSQVQLKQSGPGLVQPSQSLSITCTVSGFSLTNYGVHWVRQSPGKGLEWLGVIWSGGNTDYNTPFTSRLSINKDNSKSQVFFKMNSLQSNDTAIYYCARALTYYDYEFAYWGQGTLVTVSAGGGGSGGGGSGGGGSDILLTQSPVILSVSPGERVSFSCRASQSIGTNIHWYQQRTNGSPRLLIKYASESISGIPSRFSGSGSGTDFTLSINSVESEDIADYYCQQNNNWPTTFGAGTKLELK

SEQ ID NO: 4383 - protein, 359 aa, Artificial Sequence
  Description of Artificial Sequence: Synthetic scFv sequence
MATGSRTSLLLAFGLLCLPWLQEGSAQVQLQESGPGLVKPSETLSLTCTVSGYSITGGYLWNWIRQPPGKGLEWIGYISYDGTNNYKPSLKDRVTISRDTSKNQFSLKLSSVTAADTAVYYCARYGRVFFDYWGQGTLVTVSSGGGGSGGGGSGGGGSDIVMTQSPLSLPVTPGEPASISCRSSQSIVHSNGNTYLQWYLQKPGQSPQLLIYKVSNRLYGVPDRFSGSGSGTDFTLKISRVEAEDVGVYYCFQGSHVPWTFGQGTKVEIKAAAPDVQDCPECTLQENPFFSQPGAPILQCMGCCFSRAYPTPLRSKKTMLVQKNVTSESTCCVAKSYNRVTVMGGFKVENHTACHCSTC

SEQ ID NO: 4384 - protein, 418 aa, Artificial Sequence
  Description of Artificial Sequence: Synthetic scFv sequence
MATGSRTSLLLAFGLLCLPWLQEGSAQVQLQESGPGLVKPSETLSLTCTVSGYSITGGYLWNWIRQPPGKGLEWIGYISYDGTNNYKPSLKDRVTISRDTSKNQFSLKLSSVTAADTAVYYCARYGRVFFDYWGQGTLVTVSSGGGGSGGGGSGGGGSDIVMTQSPLSLPVTPGEPASISCRSSQSIVHSNGNTYLQWYLQKPGQSPQLLIYKVSNRLYGVPDRFSGSGSGTDFTLKISRVEAEDVGVYYCFQGSHVPWTFGQGTKVEIKAAASKEPLRPRCRPINATLAVEKEGCPVCITVNTTICAGYCPTMTRVLQGVLPALPQVVCNYRDVRFESIRLPGCPRGVNPVVSYAVALSCQCALCRRSTTDCGGPKDHPLTCDDPRFQDSSSSKAPPPSLPSPSRLPGPSDTPILPQ

SEQ ID NO: 4385 - protein, 278 aa, Artificial Sequence
  Description of Artificial Sequence: Synthetic scFv sequence
MATGSRTSLLLAFGLLCLPWLQEGSASKEPLRPRCRPINATLAVEKEGCPVCITVNTTICAGYCPTMTRVLQGVLPALPQVVCNYRDVRFESIRLPGCPRGVNPVVSYAVALSCQCALCRRSTTDCGGPKDHPLTCDDPRFQDSSSSKAPPPSLPSPSRLPGPSDTPILPQDILLTQSPVILSVSPGERVSFSCRASQSIGTNIHWYQQRTNGSPRLLIKYASESISGIPSRFSGSGSGTDFTLSINSVESEDIADYYCQQNNNWPTTFGAGTKLELK

SEQ ID NO: 4386 - protein, 412 aa, Artificial Sequence
  Description of Artificial Sequence: Synthetic scFv sequence
MATGSRTSLLLAFGLLCLPWLQEGSASKEPLRPRCRPINATLAVEKEGCPVCITVNTTICAGYCPTMTRVLQGVLPALPQVVCNYRDVRFESIRLPGCPRGVNPVVSYAVALSCQCALCRRSTTDCGGPKDHPLTCDDPRFQDSSSSKAPPPSLPSPSRLPGPSDTPILPQQVQLKQSGPGLVQPSQSLSITCTVSGFSLTNYGVHWVRQSPGKGLEWLGVIWSGGNTDYNTPFTSRLSINKDNSKSQVFFKMNSLQSNDTAIYYCARALTYYDYEFAYWGQGTLVTVSAGGGGSGGGGSGGGGSDILLTQSPVILSVSPGERVSFSCRASQSIGTNIHWYQQRTNGSPRLLIKYASESISGIPSRFSGSGSGTDFTLSINSVESEDIADYYCQQNNNWPTTFGAGTKLELK

SEQ ID NO: 4387 - protein, 108 aa, Artificial Sequence
  Description of Artificial Sequence: Synthetic scFv sequence
QSVLTQDPAASVALGQTVKITCQGDSLRSYFASWYQQKPGQAPTLVMYARNDRPAGVPDRFSGSKSGTSASLAISGLQSEDEADYYCAAWDDSLNGYLFGAGTKLTVL

SEQ ID NO: 4388 - protein, 108 aa, Artificial Sequence
  Description of Artificial Sequence: Synthetic scFv sequence
QSVLTQDPAVSAALGQTVKITCQGDSLRSYFASWYQQKPGQAPTLVMYARNDRPAGVPDRFSGSKSGTSASLAISGLQSEDEADYYCAAWDDSLNGYLFGAGTKLTVL

SEQ ID NO: 4389 - protein, 108 aa, Artificial Sequence
  Description of Artificial Sequence: Synthetic scFv sequence
QSVLTQDPAVSVALGQTVKITCQGDSLRSYFASWYQQKPGQAPTLVMYARNDRPAGVPDRFSGSKSGTSASLAISGLQPEDEADYYCAAWDDSLNGYLFGAGTKLTVL

SEQ ID NO: 4390 - protein, 108 aa, Artificial Sequence
  Description of Artificial Sequence: Synthetic scFv sequence
QSVLTQDPAVSVALGQTVKITCQGDSLRSYFASWYQQKPGQAPTLVMYARNDRPAGVPDRFSGSKSGTSASLAISGLQSEDEADYYCAAWDDSLNGYLFGAGTKLTVL

SEQ ID NO: 4391 - protein, 108 aa, Artificial Sequence
  Description of Artificial Sequence: Synthetic scFv sequence
QSVLTQDPAVSVALGQTVKITCQGDSLRSYLASWYQQKPGQAPTLVTYARNDRPAGVPDRFSGSKSGTSASLAISGLQSEDEADYYCAAWDDSLNGYLFGAGTKLTVL

SEQ ID NO: 4392 - protein, 330 aa, Artificial Sequence
  Description of Artificial Sequence: Synthetic scFv sequence
QVQLKQSGPGLVQPSQSLSITCTVSGFSLTNYGVHWVRQSPGKGLEWLGVIWSGGNTDYNTPFTSRLSINKDNSKSQVFFKMNSLQSNDTAIYYCARALTYYDYEFAYWGQGTLVTVSAGGGGSGGGGSGGGGSDILLTQSPVILSVSPGERVSFSCRASQSIGTNIHWYQQRTNGSPRLLIKYASESISGIPSRFSGSGSGTDFTLSINSVESEDIADYYCQQNNNWPTTFGAGTKLELKAAAPDVQDCPECTLQENPFFSQPGAPILQCMGCCFSRAYPTPLRSKKTMLVQKNVTSESTCCVAKSYNRVTVMGGFKVENHTACHCSTC

SEQ ID NO: 4393 - protein, 227 aa, Artificial Sequence
  Description of Artificial Sequence: Synthetic scFv sequence
SVKLSCTGSGFNIEDYYIHWVKQRTEQGLEWIGRIDPENDETKYGPIFQGRATITADTSSNTVYLQLSSLTSEDTAVYYCAFRGGVYWGPGTTLTVSSGGGGSGGGGSGGGGSHMDVVMTQSPLTLSVAIGQSASISCKSSQSLLDSDGKTYLNWLLQRPGQSPKRLISLVSKLDSGVPDRFTGSGSGTDFTLRISRVEAEDLGIYYCWQGTHFPGTFGGGTKLEIK

SEQ ID NO: 4394 - protein, 249 aa, Artificial Sequence
  Description of Artificial Sequence: Synthetic scFv sequence
SYELTQPPSVSVAPGQTARITCSGDALGDKYASWYQQKPGQAPVLVIYEDSKRPSGIPERFSGSNSGNTATLTISGTQAEDEADYYCSVWDGDWGMPVFGGGTKLTVLGSGGSTITSYNVYYTKLSSSGSEVQLVQSGAEVKKPGESLKISCKGSGYSFTSYWIGWVRQMPGKGLEWMGIIYPGDSDTRYSPSFQGQVTISADKSISTAYLQWSSLKASDTAMYYCARGIIYPSNVAVWGQGTLVTVSS

SEQ ID NO: 4395 - protein, 246 aa, Artificial Sequence
  Description of Artificial Sequence: Synthetic scFv sequence
DVVMTQSPDSLAVSLGERATINCKSSQSLLDSDGKTYLNWLQQKPGQPPKRLISLVSKLDSGVPDRFSGSGSGTDFTLTISSLQAEDVAVYYCWQGTHFPGTFGGGTKVEIKGGGGSGGGGSGGGGSGGGGSEIQLVQSGAEVKKPGATVKISCKGSGFNIEDYYIHWVQQAPGKGLEWMGRIDPENDETKYGPIFQGRVTITADTSTNTVYMELSSLRSEDTAVYYCAFRGGVYWGQGTTVTVSS

SEQ ID NO: 4396 - protein, 246 aa, Artificial Sequence
  Description of Artificial Sequence: Synthetic scFv sequence
EIQLVQSGAEVKKPGESLRISCKGSGFNIEDYYIHWVRQMPGKGLEWMGRIDPENDETKYGPIFQGHVTISADTSINTVYLQWSSLKASDTAMYYCAFRGGVYWGQGTTVTVSSGGGGSGGGGSGGGGSGGGGSDVVMTQSPLSLPVTLGQPASISCKSSQSLLDSDGKTYLNWLQQRPGQSPRRLISLVSKLDSGVPDRFSGSGSGTDFTLKISRVEAEDVGVYYCWQGTHFPGTFGGGTKVEIK

SEQ ID NO: 4397 - protein, 246 aa, Artificial Sequence
  Description of Artificial Sequence: Synthetic scFv sequence
DVVMTQSPLSLPVTLGQPASISCKSSQSLLDSDGKTYLNWLQQRPGQSPRRLISLVSKLDSGVPDRFSGSGSGTDFTLKISRVEAEDVGVYYCWQGTHFPGTFGGGTKVEIKGGGGSGGGGSGGGGSGGGGSEIQLVQSGAEVKKPGESLRISCKGSGFNIEDYYIHWVRQMPGKGLEWMGRIDPENDETKYGPIFQGHVTISADTSINTVYLQWSSLKASDTAMYYCAFRGGVYWGQGTTVTVSS

SEQ ID NO: 4398 - protein, 246 aa, Artificial Sequence
  Description of Artificial Sequence: Synthetic scFv sequence
EIQLVQSGAEVKKPGATVKISCKGSGFNIEDYYIHWVQQAPGKGLEWMGRIDPENDETKYGPIFQGRVTITADTSTNTVYMELSSLRSEDTAVYYCAFRGGVYWGQGTTVTVSSGGGGSGGGGSGGGGSGGGGSDVVMTQSPLSLPVTLGQPASISCKSSQSLLDSDGKTYLNWLQQRPGQSPRRLISLVSKLDSGVPDRFSGSGSGTDFTLKISRVEAEDVGVYYCWQGTHFPGTFGGGTKVEIK

SEQ ID NO: 4399 - protein, 246 aa, Artificial Sequence
  Description of Artificial Sequence: Synthetic scFv sequence
EIQLVQSGAEVKKPGESLRISCKGSGFNIEDYYIHWVRQMPGKGLEWMGRIDPENDETKYGPIFQGHVTISADTSINTVYLQWSSLKASDTAMYYCAFRGGVYWGQGTTVTVSSGGGGSGGGGSGGGGSGGGGSDVVMTQSPDSLAVSLGERATINCKSSQSLLDSDGKTYLNWLQQKPGQPPKRLISLVSKLDSGVPDRFSGSGSGTDFTLTISSLQAEDVAVYYCWQGTHFPGTFGGGTKVEIK

SEQ ID NO: 4400 - protein, 246 aa, Artificial Sequence
  Description of Artificial Sequence: Synthetic scFv sequence
DVVMTQSPDSLAVSLGERATINCKSSQSLLDSDGKTYLNWLQQKPGQPPKRLISLVSKLDSGVPDRFSGSGSGTDFTLTISSLQAEDVAVYYCWQGTHFPGTFGGGTKVEIKGGGGSGGGGSGGGGSGGGGSEIQLVQSGAEVKKPGESLRISCKGSGFNIEDYYIHWVRQMPGKGLEWMGRIDPENDETKYGPIFQGHVTISADTSINTVYLQWSSLKASDTAMYYCAFRGGVYWGQGTTVTVSS

SEQ ID NO: 4401 - protein, 246 aa, Artificial Sequence
  Description of Artificial Sequence: Synthetic scFv sequence
DVVMTQSPLSLPVTLGQPASISCKSSQSLLDSDGKTYLNWLQQRPGQSPRRLISLVSKLDSGVPDRFSGSGSGTDFTLKISRVEAEDVGVYYCWQGTHFPGTFGGGTKVEIKGGGGSGGGGSGGGGSGGGGSEIQLVQSGAEVKKPGATVKISCKGSGFNIEDYYIHWVQQAPGKGLEWMGRIDPENDETKYGPIFQGRVTITADTSTNTVYMELSSLRSEDTAVYYCAFRGGVYWGQGTTVTVSS

SEQ ID NO: 4402 - protein, 246 aa, Artificial Sequence
  Description of Artificial Sequence: Synthetic scFv sequence
EIQLVQSGAEVKKPGATVKISCKGSGFNIEDYYIHWVQQAPGKGLEWMGRIDPENDETKYGPIFQGRVTITADTSTNTVYMELSSLRSEDTAVYYCAFRGGVYWGQGTTVTVSSGGGGSGGGGSGGGGSGGGGSDVVMTQSPDSLAVSLGERATINCKSSQSLLDSDGKTYLNWLQQKPGQPPKRLISLVSKLDSGVPDRFSGSGSGTDFTLTISSLQAEDVAVYYCWQGTHFPGTFGGGTKVEIK

SEQ ID NO: 4403 - protein, 262 aa, Artificial Sequence
  Description of Artificial Sequence: Synthetic scFv sequence
MVLLVTSLLLCELPHPAFLLIPDIQMTQSPSSLSASVGDRVTITCRASQGIRNNLAWYQQKPGKAPKRLIYAASNLQSGVPSRFTGSGSGTEFTLIVSSLQPEDFATYYCLQHHSYPLTSGGGTKVEIKRTGSTSGSGKPGSGEGSEVQVLESGGGLVQPGGSLRLSCAASGFTFSSYAMSWVRQAPGKGLEWVSAISGSGGSTNYADSVKGRFTISRDNSKNTLYLQMNSLRAEDTAVYYCAGSSGWSEYWGQGTLVTVSS

SEQ ID NO: 4404 - protein, 243 aa, Artificial Sequence
  Description of Artificial Sequence: Synthetic scFv sequence
EIQLQQSGAELVKPGASVKLSCTGSGFNIEDYYIHWVKQRTEQGLEWIGRIDPENDETKYGPIFQGRATITADTSSNTVYLQLSSLTSEDTAVYYCAFRGGVYWGPGTTLTVSSGGGGSGGGGSGGGGSHMDVVMTQSPLTLSVAIGQSASISCKSSQSLLDSDGKTYLNWLLQRPGQSPKRLISLVSKLDSGVPDRFTGSGSGTDFTLRISRVEAEDLGIYYCWQGTHFPGTFGGGTKLEIK

SEQ ID NO: 4405 - protein, 240 aa, Artificial Sequence
  Description of Artificial Sequence: Synthetic scFv sequence
MKYLLPTAAAGLLLLAASGAHAQVQLVQSGGGLVKPGGSLRLSCAASGFTFSSYSMNWVRQAPGKGLEWVANIKPDGSERHSVDSVKGRFTISRDNSKNSLYLQMNSLRAEDTAVYYCARPGAGRLDYWGQGTLVTVSSGGGGSGGGGSGGGGSNFMLTQDAAVSVALGQTVRITCQGDSLRSYYASWYQQKPGQAPVLVVYGKNNRPSGIPDRFSGSSSGNTASLTITGAQAEDEADYY

SEQ ID NO: 4406 - protein, 248 aa, Artificial Sequence
  Description of Artificial Sequence: Synthetic scFv sequence
QVQLQESGGGLVKPGGSLRLSCAASGFTFSSYWMSWVRQAPGKGLEWVANINRDGSASYYVDSVKGRFTISRDDAKNSLYLQMNSLRAEDTAVYYCARDRGVGYFDLWGRGTLVTVSSASTGGGGSGGGGSGGGGSQSALTQPASVSGSPGQSITISCTGTSSDVGGYNFVSWYQQHPGKAPKLMIYDVSDRPSGVSDRFSGSKSGNTASLIISGLQADDEADYYCSSYGSSSTHVIFGGGTKVTVLG

SEQ ID NO: 4407 - protein, 246 aa, Artificial Sequence
  Description of Artificial Sequence: Synthetic scFv sequence
QVQLVESGGGLVQPGGSLRLSCAASGFTFRSYAMSWVRQAPGKGLEWVSAISGRGDNTYYADSVKGRFTISRDNSKNTLYLQMNSLRAEDTAVYYCAKMTSNAFAFDYWGQGTLVTVSSGGGGSGGGGSGGGGSQSVLTQPPSVSGAPGQRVTISCTGSSSNIGAGYGVHWYQQLPGTAPKLLIYGNTNRPSGVPDRFSGFKSGTSASLAITGLQAEDEADYYCQSYDSSLSGWVFGGGTKLTVLG

SEQ ID NO: 4408 - protein, 255 aa, Artificial Sequence
  Description of Artificial Sequence: Synthetic scFv sequence
QVQLVQSGAEVKKPGESLKISCKGSGYSFTSYWIAWVRQMPGKGLEYMGLIYPGDSDTKYSPSFQGQVTISVDKSVSTAYLQWSSLKPSDSAVYFCARHDVGYCTDRTCAKWPEWLGVWGQGTLVTVSSGGGGSSGGGSGGGGSQSVLTQPPSVSAAPGQKVTISCSGSSSNIGNNYVSWYQQLPGTAPKLLIYDHTNRPAGVPDRFSGSKSGTSASLAISGFRSEDEADYYCASWDYTLSGWVFGGGTKLTVLG

SEQ ID NO: 4409 - protein, 242 aa, Artificial Sequence
  Description of Artificial Sequence: Synthetic scFv sequence
QVQLVESGGGLVQPGGSLRLSCAASGFTFSSYAMGWVRQAPGKGLEWVSSISGSSRYIYYADSVKGRFTISRDNSKNTLYLQMNSLRAEDTAVYYCAKMDASGSYFNFWGQGTLVTVSSGGGGSGGGGSGGGGSETTLTQSPSFLSAFVGDRITITCRASPGIRNYLAWYQQKPGKAPKLLIYAASTLQSGVPSRFSGSGSGTDFTLTISSLQPEDFATYYCQQYNSYPLSFGGGTKVEIKR

SEQ ID NO: 4410 - protein, 241 aa, Artificial Sequence
  Description of Artificial Sequence: Synthetic scFv sequence
EVQLLESGGGLVQPGGSLRLSCAASGFTFSSYAMSWVRQAPGKGLEWVSQIDPWGQETLYADSVKGRFTISRDNSKNTLYLQMNSLRAEDTAVYYCAKLTGRFDYWGQGTLVTVSSGGGGSGGGGSGGGGSTDIQMTQSPSSLSASVGDRVTITCRASQSISSYLNWYQQKPGKAPKLLIYSASQLQSGVPSRFSGSGSGTDFTLTISSLQPEDFATYYCQQGPGTPNTFGQGTKVEIKRA

SEQ ID NO: 4411 - protein, 247 aa, Artificial Sequence
  Description of Artificial Sequence: Synthetic scFv sequence
DIQMTQSPSSLSASVGDRVTITCRASQSISSYLNWYQQKPGKAPKLLIYAASSLQSGVPSRFSGSGSGTDFTLTISSLQPEDFATYYCQQSYSTPFTFGPGTKVDIKRSRGGGGSGGGGSGGGGSLEMAEVQLVQSGAEVKKPGSSVKVSCKASGGTFSSYAISWVRQAPGQGLEWMGGIIPIFGTANYAQKFQGRVTITADESTSTAYMELSSLRSEDTAMYYCARYWGYDSYDEWGQGTLVTVSS

SEQ ID NO: 4412 - protein, 272 aa, Artificial Sequence
  Description of Artificial Sequence: Synthetic scFv sequence
DIQMTQSPSSLSASVGDRVTITCRASQSISSYLNWYQQKPGKAPKLLIYAASSLQSGVPSRFSGSGSGTDFTLTISSLQPEDFATYYCQQSYSTPFTFGPGTKVDIKRSRGGGGSGGGGSGGGGSLEMAEVQLVQSGAEVKKPGSSVKVSCKASGGTFSSYAISWVRQAPGQGLEWMGGIIPIFGTANYAQKFQGRVTITADESTSTAYMELSSLRSEDTAMYYCARYWGYDSYDEWGQGTLVTVSSTSGQAGQHHHHHHGAYPYDVPDYAS

SEQ ID NO: 4413 - protein, 253 aa, Artificial Sequence
  Description of Artificial Sequence: Synthetic scFv sequence
DVVMTQSPPSLSVTPGEPASITCRSSQSLLERNAYNYLDWYLQRPGQSPQLLIYLGSNRAAGVPDRFSGSGSGRDFTLKISRVEPEDVGVYYCMQALQAPFTFGGGTKVEIKRSRGGGGSGGGGSGGGGSLEMAEVQLVQSGGGLVQPGGSLRLSCAASGFTFSSYAMSWVRQAPGKGLEWVSAISGSGGSTYYADSVKGRFTISRDNSKNTLYLQMNSLRAEDTAVYYCAKWGPFQDAFDIWGQGTMVTVSS

SEQ ID NO: 4414 - protein, 278 aa, Artificial Sequence
  Description of Artificial Sequence: Synthetic scFv sequence
DVVMTQSPPSLSVTPGEPASITCRSSQSLLERNAYNYLDWYLQRPGQSPQLLIYLGSNRAAGVPDRFSGSGSGRDFTLKISRVEPEDVGVYYCMQALQAPFTFGGGTKVEIKRSRGGGGSGGGGSGGGGSLEMAEVQLVQSGGGLVQPGGSLRLSCAASGFTFSSYAMSWVRQAPGKGLEWVSAISGSGGSTYYADSVKGRFTISRDNSKNTLYLQMNSLRAEDTAVYYCAKWGPFQDAFDIWGQGTMVTVSSTSGQAGQHHHHHHGAYPYDVPDYAS

SEQ ID NO: 4415 - protein, 254 aa, Artificial Sequence
  Description of Artificial Sequence: Synthetic scFv sequence
LPVLTQPPSASATPGQRVTISCSGTTSNIGSNTVHWYQQLPGTAPKLLIYNNNQRPSGVPDRFSGSKSGTSASLAISGLRSEDEATYSCATWDDSLSGVVFGGGTKLTVLGSRGGGGSGGGGSGGGGSLEMAEVQLVQSGAEVKKPGSSVKVSCKASGGTFSSYAISWVRQAPGQGLEWMGGIIPIFGTANYAQKFQGRVTITADESTSTAYMELSSLRSEDTAVYYCARDPAYGDYEYDAFDRGQGTMVTVSS

SEQ ID NO: 4416 - protein, 280 aa, Artificial Sequence
  Description of Artificial Sequence: Synthetic scFv sequence
LPVLTQPPSASATPGQRVTISCSGTTSNIGSNTVHWYQQLPGTAPKLLIYNNNQRPSGVPDRFSGSKSGTSASLAISGLRSEDEATYSCATWDDSLSGVVFGGGTKLTVLGSRGGGGSGGGGSGGGGSLEMAEVQLVQSGAEVKKPGSSVKVSCKASGGTFSSYAISWVRQAPGQGLEWMGGIIPIFGTANYAQKFQGRVTITADESTSTAYMELSSLRSEDTAVYYCARDPAYGDYEYDAFDRVGQGTMVTVSSTSGQAGQHHHHHHGAYPYDVPDYAS

SEQ ID NO: 4417 - protein, 251 aa, Artificial Sequence
  Description of Artificial Sequence: Synthetic scFv sequence
LPVLTQPPSASGTPGQRVTISCSGSSSNVGSYTVNWYRQLPGTAPTLLIYNNNQRPSGVPDRFSDSKSGTSASLTISGLQPEDEADYYCAAWDDRLGGYVFGTGTKVTVLGSRGGGGSGGGGSGGGGSLEMAEVQLVQSGAEVKKPGESLKISCKGSGYSFTNYWIGWVRQMPGKGLEWMGIIYPGDSDTRYSPSFQGQVTISADKSISTAYLQWSSLKASDTAMYYCARSTGSSHMSDEWGQGTLVTVSS

SEQ ID NO: 4418 - protein, 276 aa, Artificial Sequence
  Description of Artificial Sequence: Synthetic scFv sequence
LPVLTQPPSASGTPGQRVTISCSGSSSNVGSYTVNWYRQLPGTAPTLLIYNNNQRPSGVPDRFSDSKSGTSASLTISGLQPEDEADYYCAAWDDRLGGYVFGTGTKVTVLGSRGGGGSGGGGSGGGGSLEMAEVQLVQSGAEVKKPGESLKISCKGSGYSFTNYWIGWVRQMPGKGLEWMGIIYPGDSDTRYSPSFQGQVTISADKSISTAYLQWSSLKASDTAMYYCARSTGSSHMSDEWGQGTLVTVSSTSGQAGQHHHHHHGAYPYDVPDYAS

SEQ ID NO: 4419 - protein, 264 aa, Artificial Sequence
  Description of Artificial Sequence: Synthetic scFv sequence
LPVLTQPPSASGTPGQRVTISCSGTSSNIGSNSVDWYQQLPGTAPKLLIYSNNQRPSGVPDRISGSKSGTSASLAISGLQSEDEADYYCAAWDDSLNGYVFGTGTKVTVLGSRGGGGSGGGGSGGGGSLEMAEVQLVQSGAEVKKPGASVKVSCKASGYTFTGYYMHWVRQAPGQGLEWMGWINPNSGGTNYAQKFQGRVTMTRDTSISTAYMELSRLRSDDTAVYYCARDYGYYGSGSYSSGPLYYYYGMDVWGQGTTVTVSS

SEQ ID NO: 4420 - protein, 289 aa, Artificial Sequence
  Description of Artificial Sequence: Synthetic scFv sequence
LPVLTQPPSASGTPGQRVTISCSGTSSNIGSNSVDWYQQLPGTAPKLLIYSNNQRPSGVPDRISGSKSGTSASLAISGLQSEDEADYYCAAWDDSLNGYVFGTGTKVTVLGSRGGGGSGGGGSGGGGSLEMAEVQLVQSGAEVKKPGASVKVSCKASGYTFTGYYMHWVRQAPGQGLEWMGWINPNSGGTNYAQKFQGRVTMTRDTSISTAYMELSRLRSDDTAVYYCARDYGYYGSGSYSSGPLYYYYGMDVWGQGTTVTVSSTSGQAGQHHHHHHGAYPYDVPDYAS

SEQ ID NO: 4421 - protein, 249 aa, Artificial Sequence
  Description of Artificial Sequence: Synthetic scFv sequence
LPVLTQPPSVSVAPGKTARITCGGNNIGSKSVHWYQQKPGQAPVLVVYADSDRPSGIPERFSGSNSGNTATLTISRVEAGDEADYYCQVWDSSSYHNYVFGTGTKVTVLGSRGGGGSGGGGSGGGGSLEMAEVQLVQSGAEVKKPGASVKVSCKASGYTFTSYGISWVRQAPGQGLEWMGWISAYNGNTNYAQKLQGRVTMTTDTSTSTAYMELSSLRSEDTAMYYCARYWGFGVSDRWGQGTLVTVSS

SEQ ID NO: 4422 - protein, 274 aa, Artificial Sequence
  Description of Artificial Sequence: Synthetic scFv sequence
LPVLTQPPSVSVAPGKTARITCGGNNIGSKSVHWYQQKPGQAPVLVVYADSDRPSGIPERFSGSNSGNTATLTISRVEAGDEADYYCQVWDSSSYHNYVFGTGTKVTVLGSRGGGGSGGGGSGGGGSLEMAEVQLVQSGAEVKKPGASVKVSCKASGYTFTSYGISWVRQAPGQGLEWMGWISAYNGNTNYAQKLQGRVTMTTDTSTSTAYMELSSLRSEDTAMYYCARYWGFGVSDRWGQGTLVTVSSTSGQAGQHHHHHHGAYPYDVPDYAS

SEQ ID NO: 4423 - protein, 250 aa, Artificial Sequence
  Description of Artificial Sequence: Synthetic scFv sequence
LPVLTQPPSVSVSPGQTAIITCSGDKLGEKYVSWYQQKPGQSPVLVIDQDTRRPSGIPERFSGSNSGTTATLTISGTQAMDEADYYCQAWDRGVVFGGGTKLTVLGSRGGGGSGGGGSGGGGSLEMAEVQLVESGGDLVQPGRSLRLSCAASGFTFNDYAMHWVRQAPGKGLEWVSGISWSGNNIGYADSVKGRFTISRDNAKNSLYLQMNSLRAEDTALYYCAKDSIRYGITWGGFDYWGQGTLVTVSS

SEQ ID NO: 4424 - protein, 275 aa, Artificial Sequence
  Description of Artificial Sequence: Synthetic scFv sequence
LPVLTQPPSVSVSPGQTAIITCSGDKLGEKYVSWYQQKPGQSPVLVIDQDTRRPSGIPERFSGSNSGTTATLTISGTQAMDEADYYCQAWDRGVVFGGGTKLTVLGSRGGGGSGGGGSGGGGSLEMAEVQLVESGGDLVQPGRSLRLSCAASGFTFNDYAMHWVRQAPGKGLEWVSGISWSGNNIGYADSVKGRFTISRDNAKNSLYLQMNSLRAEDTALYYCAKDSIRYGITWGGFDYWGQGTLVTVSSTSGQAGQHHHHHHGAYPYDVPDYAS

SEQ ID NO: 4425 - protein, 251 aa, Artificial Sequence
  Description of Artificial Sequence: Synthetic scFv sequence
NFMLTQPHAVSESPGKTVTISCTRSSGSIASNYVQWYQQRPGSSPRTVIYEDNQRPSGVPGRFSGSIDSSSNSASLTISGLKTEDEADYYCQSYDSTSVLFGGGTKLTVLGSRGGGGSGGGGSGGGGSLEMAEVQLVQSGAEVKKPGSSVKVSCKASGGTFSSNSLSWVRQAPGQGLEWMGRIFPILGITNYAQKFQGRVTITADKSTSTAYMELSSLRSEDTAVYYCARGNYQWYDAFDVGQGTMVTVSS

SEQ ID NO: 4426 - protein, 276 aa, Artificial Sequence
  Description of Artificial Sequence: Synthetic scFv sequence
NFMLTQPHAVSESPGKTVTISCTRSSGSIASNYVQWYQQRPGSSPRTVIYEDNQRPSGVPGRFSGSIDSSSNSASLTISGLKTEDEADYYCQSYDSTSVLFGGGTKLTVLGSRGGGGSGGGGSGGGGSLEMAEVQLVQSGAEVKKPGSSVKVSCKASGGTFSSNSLSWVRQAPGQGLEWMGRIFPILGITNYAQKFQGRVTITADKSTSTAYMELSSLRSEDTAVYYCARGNYQWYDAFDVGQGTMVTVSSTSGQAGQHHHHHHGAYPYDVPDYAS

SEQ ID NO: 4427 - protein, 254 aa, Artificial Sequence
  Description of Artificial Sequence: Synthetic scFv sequence
NFMLTQPHSVSESPGKTVTISCTGSSDSIANNYVQWYQQRPGSAPTNVIYEDVQRPSGVPDRFSGSIDSSSNSASLTISGLKTEDEAVYYCQSYHSDNRWVFGGGTKLTVLGSRGGGGSGGGGSGGGGSLEMAQVQLVESGGGLVQPGGSLRLSCAASGFTFSSYAMSWVRQAPGKGLEWVSAISGSGGSTYYADSVKGRFTISRDNSKNTLYLQMNSLRAEDTAVYYCARSGAYWDYSVYDEWGQGTLVTVSS

SEQ ID NO: 4428 - protein, 279 aa, Artificial Sequence
  Description of Artificial Sequence: Synthetic scFv sequence
NFMLTQPHSVSESPGKTVTISCTGSSDSIANNYVQWYQQRPGSAPTNVIYEDVQRPSGVPDRFSGSIDSSSNSASLTISGLKTEDEAVYYCQSYHSDNRWVFGGGTKLTVLGSRGGGGSGGGGSGGGGSLEMAQVQLVESGGGLVQPGGSLRLSCAASGFTFSSYAMSWVRQAPGKGLEWVSAISGSGGSTYYADSVKGRFTISRDNSKNTLYLQMNSLRAEDTAVYYCARSGAYWDYSVYDEWGQGTLVTVSSTSGQAGQHHHHHHGAYPYDVPDYAS

SEQ ID NO: 4429 - protein, 248 aa, Artificial Sequence
  Description of Artificial Sequence: Synthetic scFv sequence
NFMLTQPHSVSESPGKTVTISCTGSSGSIASNYVQWYQQRPGSAPTTVIYEDNQRPSGVPDRFSGSIDSSSNSASLTISGLKTEDEADYYCQSYDSSNHWVFGGGTKLTVLGSRGGGGSGGGGSGGGGSLEMAQVQLQQWGAGLLKPSETLSLTCAVYGGSFSGYYWSWIRQPPGKGLEWIGEITHSGRSNYNPSLKSRVTISVDTSKNQFSLKLSSVTAADTAVYYCARSSIMSDYWGQGTLVTVSS

SEQ ID NO: 4430 - protein, 273 aa, Artificial Sequence
  Description of Artificial Sequence: Synthetic scFv sequence
NFMLTQPHSVSESPGKTVTISCTGSSGSIASNYVQWYQQRPGSAPTTVIYEDNQRPSGVPDRFSGSIDSSSNSASLTISGLKTEDEADYYCQSYDSSNHWVFGGGTKLTVLGSRGGGGSGGGGSGGGGSLEMAQVQLQQWGAGLLKPSETLSLTCAVYGGSFSGYYWSWIRQPPGKGLEWIGEITHSGRSNYNPSLKSRVTISVDTSKNQFSLKLSSVTAADTAVYYCARSSIMSDYWGQGTLVTVSSTSGQAGQHHHHHHGAYPYDVPDYAS

SEQ ID NO: 4431 - protein, 250 aa, Artificial Sequence
  Description of Artificial Sequence: Synthetic scFv sequence
NFMLTQPHSVSESPGKTVTISCTGSSGSIASNYVQWYQQRPGSAPTTVIYEDNQRPSGVPDRFSGSIDSSSNSASLTISGLKTEDEADYYCQSYDSSNLWVFGGGTKLTVLGSRGGGGSGGGGSGGGGSLEMAQMQLVQSGAEVKKPGSSVKVSCKASGGTFSSYAISWVRQAPGQGLEWMGGIIPIFGTANYAQKFQGRVTITADESTSTAYMELSSLRSEDTAVYYCARYNYYYYDSWGQGTLVTVSS

SEQ ID NO: 4432 - protein, 275 aa, Artificial Sequence
  Description of Artificial Sequence: Synthetic scFv sequence
NFMLTQPHSVSESPGKTVTISCTGSSGSIASNYVQWYQQRPGSAPTTVIYEDNQRPSGVPDRFSGSIDSSSNSASLTISGLKTEDEADYYCQSYDSSNLWVFGGGTKLTVLGSRGGGGSGGGGSGGGGSLEMAQMQLVQSGAEVKKPGSSVKVSCKASGGTFSSYAISWVRQAPGQGLEWMGGIIPIFGTANYAQKFQGRVTITADESTSTAYMELSSLRSEDTAVYYCARYNYYYYDSWGQGTLVTVSSTSGQAGQHHHHHHGAYPYDVPDYAS

SEQ ID NO: 4433 - protein, 249 aa, Artificial Sequence
  Description of Artificial Sequence: Synthetic scFv sequence
NFMLTQPHSVSESPGKTVTISCTGSSGSIASNYVQWYQQRPGSAPTTVIYEDNQRPSGVPDRFSGSIDSSSNSASLTISGLKTEDEADYYCQSYDSSNWVFGGGTKLTVLGSRGGGGSGGGGSGGGGSLEMAEVQLVQSGAEVKKPGSSVKVSCKASGGTFSSYAISWVRQAPGQGLEWMGGIIPIFGTANYAQKFQGRVTITADESTSTAYMELSSLRSEDTAVYYCARNNHYYNDYWGQGTLVTVSS

SEQ ID NO: 4434 - protein, 274 aa, Artificial Sequence
  Description of Artificial Sequence: Synthetic scFv sequence
NFMLTQPHSVSESPGKTVTISCTGSSGSIASNYVQWYQQRPGSAPTTVIYEDNQRPSGVPDRFSGSIDSSSNSASLTISGLKTEDEADYYCQSYDSSNWVFGGGTKLTVLGSRGGGGSGGGGSGGGGSLEMAEVQLVQSGAEVKKPGSSVKVSCKASGGTFSSYAISWVRQAPGQGLEWMGGIIPIFGTANYAQKFQGRVTITADESTSTAYMELSSLRSEDTAVYYCARNNHYYNDYWGQGTLVTVSSTSGQAGQHHHHHHGAYPYDVPDYAS

SEQ ID NO: 4435 - protein, 248 aa, Artificial Sequence
  Description of Artificial Sequence: Synthetic scFv sequence
NFMLTQPHSVSESPGKTVTISCTRSSGSIASNFVQWYQQRPGSAPTPMIYEDNNRPPGVPDRFSASVDSSSNSASLTISGLKTEDEADYYCQSYDTSNVVFGGGTKLTVLGSRGGGGSGGGGSGGGGSLEMAEVQLVESGGGLVQPGGSLRLSCAASGFTFSSYEMNWVRQAPGKGLEWVSYISSSGSTIYYADSVKGRFTISRDNAKNSLYLQMNSLRAEDTAVYYCARWDYGMDVWGQGTTVTVSS

SEQ ID NO: 4436 - protein, 273 aa, Artificial Sequence
  Description of Artificial Sequence: Synthetic scFv sequence
NFMLTQPHSVSESPGKTVTISCTRSSGSIASNFVQWYQQRPGSAPTPMIYEDNNRPPGVPDRFSASVDSSSNSASLTISGLKTEDEADYYCQSYDTSNVVFGGGTKLTVLGSRGGGGSGGGGSGGGGSLEMAEVQLVESGGGLVQPGGSLRLSCAASGFTFSSYEMNWVRQAPGKGLEWVSYISSSGSTIYYADSVKGRFTISRDNAKNSLYLQMNSLRAEDTAVYYCARWDYGMDVWGQGTTVTVSSTSGQAGQHHHHHHGAYPYDVPDYAS

SEQ ID NO: 4437 - protein, 249 aa, Artificial Sequence
  Description of Artificial Sequence: Synthetic scFv sequence
NFMLTQPHSVSESPGKTVTISCTRSSGSIASNYVQWYQQRPGSAPTTVIYEDNQRPSGVPDRFSGSIDSSSNSASLTISGLKTEDEADYYCQSYDSSNSVVFGGGTKLTVLGSRGGGGSGGGGSGGGGSLEMAQVQLVQSGTEVKKPGASVRVACKASGYPFNKYDINWVRQAPGQGLEWMGGIIPIFRTTNYAQKFQGRVTITADESTSTAYMELSSLRSEDTAVYYCAREWFYWDIWGQGTLVTVSS

SEQ ID NO: 4438 - protein, 274 aa, Artificial Sequence
  Description of Artificial Sequence: Synthetic scFv sequence
NFMLTQPHSVSESPGKTVTISCTRSSGSIASNYVQWYQQRPGSAPTTVIYEDNQRPSGVPDRFSGSIDSSSNSASLTISGLKTEDEADYYCQSYDSSNSVVFGGGTKLTVLGSRGGGGSGGGGSGGGGSLEMAQVQLVQSGTEVKKPGASVRVACKASGYPFNKYDINWVRQAPGQGLEWMGGIIPIFRTTNYAQKFQGRVTITADESTSTAYMELSSLRSEDTAVYYCAREWFYWDIWGQGTLVTVSSTSGQAGQHHHHHHGAYPYDVPDYAS

SEQ ID NO: 4439 - protein, 265 aa, Artificial Sequence
  Description of Artificial Sequence: Synthetic scFv sequence
NFMLTQPHSVSESPGKTVTISCTRSSGSIASNYVQWYQQRPGSAPTTVIYEDNQRPSGVPDRFSGSIDSSSNSASLTISGLKTEDEADYYCQSYDSSNSWVFGGGTKLTVLGSRGGGGSGGGGSGGGGSLEMAQVQLVQSGAEVKRPGSSVKVSCTASGGTFSSDAISWVRQAPGQGLEWMGGIIPMFGTANYAQKFQGRVTITADESTSTAYMELSSLRSEDTAVYYCAREGYYYPSAYLGSVLNDISSVYDEWGQGTLVTVSS

SEQ ID NO: 4440 - protein, 290 aa, Artificial Sequence
  Description of Artificial Sequence: Synthetic scFv sequence
NFMLTQPHSVSESPGKTVTISCTRSSGSIASNYVQWYQQRPGSAPTTVIYEDNQRPSGVPDRFSGSIDSSSNSASLTISGLKTEDEADYYCQSYDSSNSWVFGGGTKLTVLGSRGGGGSGGGGSGGGGSLEMAQVQLVQSGAEVKRPGSSVKVSCTASGGTFSSDAISWVRQAPGQGLEWMGGIIPMFGTANYAQKFQGRVTITADESTSTAYMELSSLRSEDTAVYYCAREGYYYPSAYLGSVLNDISSVYDEWGQGTLVTVSSTSGQAGQHHHHHHGAYPYDVPDYAS

SEQ ID NO: 4441 - protein, 273 aa, Artificial Sequence
  Description of Artificial Sequence: Synthetic scFv sequence
NFMLTQPHSVSESPGKTVTISCTRSSGSIASNYVQWYQQRPGSAPTTVIYEDNQRPSGVPDRFSGSIDSSSNSASLTISGLKTEDEADYYCQSYDSSNVVFGGGTKVTVLGSRGGGGSGGGGSGGGGSLEMAEVQLVESGGGLVQPGGSLRLSCAASGFTFSSYEMNWVRQAPGKGLEWVSYISSSGSTIYYADSVKGRFTISRDNAKNSLYLQMNSLRAEDTAVYYCARWDYGMDVWGQGTTVTVSSTSGQAGQHHHHHHGAYPYDVPDYAS

SEQ ID NO: 4442 - protein, 249 aa, Artificial Sequence
  Description of Artificial Sequence: Synthetic scFv sequence
NFMLTQPHSVSESPGKTVTISCTRSSGSIASNYVQWYQQRPGSAPTTVIYEDNQRPSGVPDRFSGSIDSSSNSASLTISGLKTEDEADYYCQSYDSTNWVFGGGTKLTVLGSRGGGGSGGGGSGGGGSLEMAQVQLVQSGAEVKKPGSSVKVSCKASGGTFSSYAISWVRQAPGQGLEWMGGIIPIFGTANYAQKFQGRVTITADESTSTAYMELSSLRSEDTAVYYCARYNYYFNDYWGQGTLVTVSS

SEQ ID NO: 4443 - protein, 274 aa, Artificial Sequence
  Description of Artificial Sequence: Synthetic scFv sequence
NFMLTQPHSVSESPGKTVTISCTRSSGSIASNYVQWYQQRPGSAPTTVIYEDNQRPSGVPDRFSGSIDSSSNSASLTISGLKTEDEADYYCQSYDSTNWVFGGGTKLTVLGSRGGGGSGGGGSGGGGSLEMAQVQLVQSGAEVKKPGSSVKVSCKASGGTFSSYAISWVRQAPGQGLEWMGGIIPIFGTANYAQKFQGRVTITADESTSTAYMELSSLRSEDTAVYYCARYNYYFNDYWGQGTLVTVSSTSGQAGQHHHHHHGAYPYDVPDYAS

SEQ ID NO: 4444 - protein, 249 aa, Artificial Sequence
  Description of Artificial Sequence: Synthetic scFv sequence
NFMLTQPHSVSESPGKTVTISCTRSSGSIASNYVQWYQQRPGSSPTTVIYEDNQRPSGVPDRFSGSIDSSSNSASLTISGLKTEDEADYYCQSYDSSNWVFGGGTKLTVLGSRGGGGSGGGGSGGGGSLEMAEVQLVQSGAEVKKPGSSVKVSCKASGGTFSSYAISWVRQAPGQGLEWMGGIIPIFGTANYAQKFQGRVTITADESTSTAYMELSSLRSEDTAVYYCARSNYYYNDYWGQGTLVTVSS

SEQ ID NO: 4445 - protein, 274 aa, Artificial Sequence
  Description of Artificial Sequence: Synthetic scFv sequence
NFMLTQPHSVSESPGKTVTISCTRSSGSIASNYVQWYQQRPGSSPTTVIYEDNQRPSGVPDRFSGSIDSSSNSASLTISGLKTEDEADYYCQSYDSSNWVFGGGTKLTVLGSRGGGGSGGGGSGGGGSLEMAEVQLVQSGAEVKKPGSSVKVSCKASGGTFSSYAISWVRQAPGQGLEWMGGIIPIFGTANYAQKFQGRVTITADESTSTAYMELSSLRSEDTAVYYCARSNYYYNDYWGQGTLVTVSSTSGQAGQHHHHHHGAYPYDVPDYAS

SEQ ID NO: 4446 - protein, 249 aa, Artificial Sequence
  Description of Artificial Sequence: Synthetic scFv sequence
NFMLTQPHSVSGSPGKTVTISCTGSSGSIADNFVQWYQQRPGGVPTTVIFNDDERPSGVPDRFSGSIDTSSNSASLTISGLKTEDEADYYCQSYDNNNRGVFGGGTKLTVLGSRGGGGSGGGGSGGGGSLEMAQVQLVQSGAEVKKPGSSVKVSCKASGGTFSSYAISWVRQAPGQGLEWMGWMNPNSGNTGYAQKFQGRVTMTRNTSISTAYMELSNLRSEDTAVYYCARYYSYGYDWGQGTLVTVSS

SEQ ID NO: 4447 - protein, 274 aa, Artificial Sequence
  Description of Artificial Sequence: Synthetic scFv sequence
NFMLTQPHSVSGSPGKTVTISCTGSSGSIADNFVQWYQQRPGGVPTTVIFNDDERPSGVPDRFSGSIDTSSNSASLTISGLKTEDEADYYCQSYDNNNRGVFGGGTKLTVLGSRGGGGSGGGGSGGGGSLEMAQVQLVQSGAEVKKPGSSVKVSCKASGGTFSSYAISWVRQAPGQGLEWMGWMNPNSGNTGYAQKFQGRVTMTRNTSISTAYMELSNLRSEDTAVYYCARYYSYGYDWGQGTLVTVSSTSGQAGQHHHHHHGAYPYDVPDYAS

SEQ ID NO: 4448 - protein, 256 aa, Artificial Sequence
  Description of Artificial Sequence: Synthetic scFv sequence
QAVLTQPASVSGSPGQSITISCTGTSSDVGGYNYVSWYQQHPGKAPKLMIYEVSNRPSGVSNRFSGSKSGNTASLTISGLQAEDEADYYCSSYTSSSTPYVFGAGTKVTVLGSRGGGGSGGGGSGGGGSLEMAEVQLVESGGGLVQPGRSLRLSCAASGFTFDDYAMHWVRQAPGKGLEWVSGISWNSGSIGYADSVKGRFTISRDNAKNSLYLQMNSLRAEDTALYYCAKARWTAVASDHHFDYWGQGTLVTVSS

SEQ ID NO: 4449 - protein, 281 aa, Artificial Sequence
  Description of Artificial Sequence: Synthetic scFv sequence
QAVLTQPASVSGSPGQSITISCTGTSSDVGGYNYVSWYQQHPGKAPKLMIYEVSNRPSGVSNRFSGSKSGNTASLTISGLQAEDEADYYCSSYTSSSTPYVFGAGTKVTVLGSRGGGGSGGGGSGGGGSLEMAEVQLVESGGGLVQPGRSLRLSCAASGFTFDDYAMHWVRQAPGKGLEWVSGISWNSGSIGYADSVKGRFTISRDNAKNSLYLQMNSLRAEDTALYYCAKARWTAVASDHHFDYWGQGTLVTVSSTSGQAGQHHHHHHGAYPYDVPDYAS

SEQ ID NO: 4450 - protein, 257 aa, Artificial Sequence
  Description of Artificial Sequence: Synthetic scFv sequence
QAVLTQPHSVSESPGKTVTISCTRSSGSIASNYVQWYQQRPGSAPTTVIYEDNQRPSGVPDRFSGSIDSSSNSASLTISGLKTEDEADYYCQSYDSTITVFGGGTKLTVLGSRGGGGSGGGGSGGGGSLEMAQVQLVQSGAEVKKPGSSVKVSCKASGGTFSSYAISWVRQAPGQGLEWMGGIIPIFGTANYAQKFQGRVTITADESTSTAYMELSSLRSEDTAVYYCAGEGYYDSSGYSNGDAFDRGQGTMVTVSS

SEQ ID NO: 4451 - protein, 283 aa, Artificial Sequence
  Description of Artificial Sequence: Synthetic scFv sequence
QAVLTQPHSVSESPGKTVTISCTRSSGSIASNYVQWYQQRPGSAPTTVIYEDNQRPSGVPDRFSGSIDSSSNSASLTISGLKTEDEADYYCQSYDSTITVFGGGTKLTVLGSRGGGGSGGGGSGGGGSLEMAQVQLVQSGAEVKKPGSSVKVSCKASGGTFSSYAISWVRQAPGQGLEWMGGIIPIFGTANYAQKFQGRVTITADESTSTAYMELSSLRSEDTAVYYCAGEGYYDSSGYSNGDAFDRVGQGTMVTVSSTSGQAGQHHHHHHGAYPYDVPDYAS

SEQ ID NO: 4452 - protein, 247 aa, Artificial Sequence
  Description of Artificial Sequence: Synthetic scFv sequence
QAVLTQPPSASETPGQRVTISCSGSRSNIGTNIVHWYQQRPGMAPKLLTYGSRRPSGVPDRFSGSKFGTSASLAISGLQSEDEADYYCAAWDDSLNGPAFGGGTKLTVLGSRGGGGSGGGGSGGGGSLEMAQVQLQQWGAGLLKPSETLSLTCAVYGGSFSGYYWSWIRQPPGKGLEWIGEINHSGSTNYNPSLKSRVTISVDTSKNQFSLKLSSVTAADTAVYYCARDGGGYFDYWGQGTLVTVSS

SEQ ID NO: 4453 - protein, 272 aa, Artificial Sequence
  Description of Artificial Sequence: Synthetic scFv sequence
QAVLTQPPSASETPGQRVTISCSGSRSNIGTNIVHWYQQRPGMAPKLLTYGSRRPSGVPDRFSGSKFGTSASLAISGLQSEDEADYYCAAWDDSLNGPAFGGGTKLTVLGSRGGGGSGGGGSGGGGSLEMAQVQLQQWGAGLLKPSETLSLTCAVYGGSFSGYYWSWIRQPPGKGLEWIGEINHSGSTNYNPSLKSRVTISVDTSKNQFSLKLSSVTAADTAVYYCARDGGGYFDYWGQGTLVTVSSTSGQAGQHHHHHHGAYPYDVPDYAS

SEQ ID NO: 4454 - protein, 253 aa, Artificial Sequence
  Description of Artificial Sequence: Synthetic scFv sequence
QAVLTQPPSASGAPGQRVTVSCSGSNSNIGSNYVNWYQQFPGTAPKLLMYSSSQRPSGVPDRFSGSKSGTSASLAISGLHSEDEADYYCATWDDSLNAWVFGGGTKLTVLGSRGGGGSGGGGSGGGGSLEMAEVQLVQSGAEVRKPGASVKVSCKTSGYTFTWYAIHWVRQAPGQRLEWMGWINAGSGNTKYSQKFQGRVTLTRDTSASTAYMELSSLRSDDTAVYYCARPNNYGSGGDVFDRGQGTMVTVSS

SEQ ID NO: 4455 - protein, 278 aa, Artificial Sequence
  Description of Artificial Sequence: Synthetic scFv sequence
QAVLTQPPSASGAPGQRVTVSCSGSNSNIGSNYVNWYQQFPGTAPKLLMYSSSQRPSGVPDRFSGSKSGTSASLAISGLHSEDEADYYCATWDDSLNAWVFGGGTKLTVLGSRGGGGSGGGGSGGGGSLEMAEVQLVQSGAEVRKPGASVKVSCKTSGYTFTWYAIHWVRQAPGQRLEWMGWINAGSGNTKYSQKFQGRVTLTRDTSASTAYMELSSLRSDDTAVYYCARPNNYGSGGDVFDRGQGTMVTVSSTSGQAGQHHHHHHGAYPYDVPDYAS

SEQ ID NO: 4456 - protein, 248 aa, Artificial Sequence
  Description of Artificial Sequence: Synthetic scFv sequence
QAVLTQPPSASGTPGQRVTISCSGSSSNIGSNTVNWYQQLPGTAPKLLIYSNNQRPSGVPDRFSGSKSGTSASLAISGLQSEDEADYYCAAWDDSLNGYVFGTGTKLTVLGSRGGGGSGGGGSGGGGSLEMAEVQLVQSGAEVKKPGSSVKVSCKASGGTFSSYAISWVRQAPGQGLEWMGGIIPIFGTANYAQKFQGRVTITADESTSTAYMELSSLRSEDTAVYYCARDWDYMDVWGKGTTVTVSS

SEQ ID NO: 4457 - protein, 273 aa, Artificial Sequence
  Description of Artificial Sequence: Synthetic scFv sequence
QAVLTQPPSASGTPGQRVTISCSGSSSNIGSNTVNWYQQLPGTAPKLLIYSNNQRPSGVPDRFSGSKSGTSASLAISGLQSEDEADYYCAAWDDSLNGYVFGTGTKLTVLGSRGGGGSGGGGSGGGGSLEMAEVQLVQSGAEVKKPGSSVKVSCKASGGTFSSYAISWVRQAPGQGLEWMGGIIPIFGTANYAQKFQGRVTITADESTSTAYMELSSLRSEDTAVYYCARDWDYMDVWGKGTTVTVSSTSGQAGQHHHHHHGAYPYDVPDYAS

SEQ ID NO: 4458 - protein, 248 aa, Artificial Sequence
  Description of Artificial Sequence: Synthetic scFv sequence
QAVLTQPPSASGTPGQRVTISCSGSSSNIGSNTVNWYQQLPGTAPKLLIYSNNQRPSGVPDRFSGSKSGTSASLAISGLQSEDETDYYCAAWDDSLNGYVFGTGTKVTVLGSRGGGGSGGGGSGGGGSLEMAQVQLQQWGAGLLKPSETLSLTCAVYGGSFSGYYWSWIRQPPGKGLEWIGEINHSGSTNYNPSLKSRVTISVDTSKNQFSLKLSSVTAADTAVYYCAREGLDAFDIWGQGTMVTVSS

SEQ ID NO: 4459 - protein, 273 aa, Artificial Sequence
  Description of Artificial Sequence: Synthetic scFv sequence
QAVLTQPPSASGTPGQRVTISCSGSSSNIGSNTVNWYQQLPGTAPKLLIYSNNQRPSGVPDRFSGSKSGTSASLAISGLQSEDETDYYCAAWDDSLNGYVFGTGTKVTVLGSRGGGGSGGGGSGGGGSLEMAQVQLQQWGAGLLKPSETLSLTCAVYGGSFSGYYWSWIRQPPGKGLEWIGEINHSGSTNYNPSLKSRVTISVDTSKNQFSLKLSSVTAADTAVYYCAREGLDAFDIWGQGTMVTVSSTSGQAGQHHHHHHGAYPYDVPDYAS

SEQ ID NO: 4460 - protein, 259 aa, Artificial Sequence
  Description of Artificial Sequence: Synthetic scFv sequence
QAVLTQPPSASGTPGQRVTISCSGSSSNIGSNTVNWYQQLPGTAPKLLMYNNDQRPSGVPDRFSGSKSGTSASLAISGLQSEDEADYYCAAWDDSLNGYVFGPGTKVTVLGSRGGGGSGGGGSGGGGSLEMAQVQLVESGAEVKKPGASVKVSCKASGYTFTSYGISWVRQAPGQGLEWMGWISAYNGNTNYAQKLQGRVTMTTDTSTSTAYMELRSLRSDDTAVYYCARDLSRGANPHYYYYYGMDVWGQGTTVTVSS

SEQ ID NO: 4461 - protein, 284 aa, Artificial Sequence
  Description of Artificial Sequence: Synthetic scFv sequence
QAVLTQPPSASGTPGQRVTISCSGSSSNIGSNTVNWYQQLPGTAPKLLMYNNDQRPSGVPDRFSGSKSGTSASLAISGLQSEDEADYYCAAWDDSLNGYVFGPGTKVTVLGSRGGGGSGGGGSGGGGSLEMAQVQLVESGAEVKKPGASVKVSCKASGYTFTSYGISWVRQAPGQGLEWMGWISAYNGNTNYAQKLQGRVTMTTDTSTSTAYMELRSLRSDDTAVYYCARDLSRGANPHYYYYYGMDVWGQGTTVTVSSTSGQAGQHHHHHHGAYPYDVPDYAS

SEQ ID NO: 4462 - protein, 247 aa, Artificial Sequence
  Description of Artificial Sequence: Synthetic scFv sequence
QAVLTQPPSASGTPGQRVTISCSGSSSNIGSNTVNWYQQLPGTAPKLLMYSNDQRPSGVPDRFSGSKSGTSASLAISGLQSEDEADYYCAAWDDSLNGYVFAAGTQLTVLSSRGGGGSGGGGSGGGGSLEMAQVQLQQWGAGLLKPSETLSLTCAVYGGSFSGYYWSWIRQPPGKGLEWIGEINHSGSTNYNPSLKSRVTISVDTSKNQFSLKLSSVTAADTAVYYCAREGLDAFDRGQGTMVTVSS

SEQ ID NO: 4463 - protein, 273 aa, Artificial Sequence
  Description of Artificial Sequence: Synthetic scFv sequence
QAVLTQPPSASGTPGQRVTISCSGSSSNIGSNTVNWYQQLPGTAPKLLMYSNDQRPSGVPDRFSGSKSGTSASLAISGLQSEDEADYYCAAWDDSLNGYVFAAGTQLTVLSSRGGGGSGGGGSGGGGSLEMAQVQLQQWGAGLLKPSETLSLTCAVYGGSFSGYYWSWIRQPPGKGLEWIGEINHSGSTNYNPSLKSRVTISVDTSKNQFSLKLSSVTAADTAVYYCAREGLDAFDRVGQGTMVTVSSTSGQAGQHHHHHHGAYPYDVPDYAS

SEQ ID NO: 4464 - protein, 247 aa, Artificial Sequence
  Description of Artificial Sequence: Synthetic scFv sequence
QAVLTQPPSTSGTPGQRVTISCSGSSSNIGRNGVNWYQQLPGAAPKVLIYNDNQRPSGVPDRVSGSQSGSSGTLAIDGLRSEDEADYYCAAWDDSLHGVVFGGGTKLTVLGSRGGGGSGGGGSGGGGSLEMAQVQLVQSGAEVKKPGASVKVSCKVSGYTLNELSMHWVRQAPGKGLEWMGGFDPEDGETIYAQKFQGRVTMTEDTSTDTAYMELSSLRSEDTAVYYCARGGYGDSWGQGTLVTVSS

SEQ ID NO: 4465 - protein, 272 aa, Artificial Sequence
  Description of Artificial Sequence: Synthetic scFv sequence
QAVLTQPPSTSGTPGQRVTISCSGSSSNIGRNGVNWYQQLPGAAPKVLIYNDNQRPSGVPDRVSGSQSGSSGTLAIDGLRSEDEADYYCAAWDDSLHGVVFGGGTKLTVLGSRGGGGSGGGGSGGGGSLEMAQVQLVQSGAEVKKPGASVKVSCKVSGYTLNELSMHWVRQAPGKGLEWMGGFDPEDGETIYAQKFQGRVTMTEDTSTDTAYMELSSLRSEDTAVYYCARGGYGDSWGQGTLVTVSSTSGQAGQHHHHHHGAYPYDVPDYAS

SEQ ID NO: 4466 - protein, 249 aa, Artificial Sequence
  Description of Artificial Sequence: Synthetic scFv sequence
QAVLTQPPSVSVAPGKTARVTCGGNNIGSESVHWYQQKPGQAPVLVIYYDTDRPSGIPERFSGSHSGTTATLTISRVEAGDEADYYCQVWDSSRDHVVFGGGTKLTVLGSRGGGGSGGGGSGGGGSLEMAQVQLVQSGGGVVQPGRSLRLSCAASGFTFSSYAMHWVRQAPGKGLEWVAVISYDGSNKYYADSVKGLFTISRDNSKNTLYLQMNSLRAEDTAVYYCARSYFTSGFYDYWGQGTLVTVSS

SEQ ID NO: 4467 - protein, 274 aa, Artificial Sequence
  Description of Artificial Sequence: Synthetic scFv sequence
QAVLTQPPSVSVAPGKTARVTCGGNNIGSESVHWYQQKPGQAPVLVIYYDTDRPSGIPERFSGSHSGTTATLTISRVEAGDEADYYCQVWDSSRDHVVFGGGTKLTVLGSRGGGGSGGGGSGGGGSLEMAQVQLVQSGGGVVQPGRSLRLSCAASGFTFSSYAMHWVRQAPGKGLEWVAVISYDGSNKYYADSVKGLFTISRDNSKNTLYLQMNSLRAEDTAVYYCARSYFTSGFYDYWGQGTLVTVSSTSGQAGQHHHHHHGAYPYDVPDYAS

SEQ ID NO: 4468 - protein, 250 aa, Artificial Sequence
  Description of Artificial Sequence: Synthetic scFv sequence
QPVLTQPPSVSKGLRQTATLTCTGNSNNVGNLGVAWLQQHQGHPPKLLSYRNNNRPSGISERLSASRSGNTASLTITGLQPEDEADYYCSAWDSSLSAWVFGGGTKLTVLGSRGGGGSGGGGSGGGGSLEMAEVQLVESGGVVVQPGGSLRLSCAASGFTFDDYAMHWVRQAPGKGLEWVSLINWDGGSTYYADSVKGRFTISRDNSKNSLYLQMNSLRAEDTALYYCAKGMGLRAFDYWGQGTLVTVSS

SEQ ID NO: 4469 - protein, 275 aa, Artificial Sequence
  Description of Artificial Sequence: Synthetic scFv sequence
QPVLTQPPSVSKGLRQTATLTCTGNSNNVGNLGVAWLQQHQGHPPKLLSYRNNNRPSGISERLSASRSGNTASLTITGLQPEDEADYYCSAWDSSLSAWVFGGGTKLTVLGSRGGGGSGGGGSGGGGSLEMAEVQLVESGGVVVQPGGSLRLSCAASGFTFDDYAMHWVRQAPGKGLEWVSLINWDGGSTYYADSVKGRFTISRDNSKNSLYLQMNSLRAEDTALYYCAKGMGLRAFDYWGQGTLVTVSSTSGQAGQHHHHHHGAYPYDVPDYAS

SEQ ID NO: 4470 - protein, 245 aa, Artificial Sequence
  Description of Artificial Sequence: Synthetic scFv sequence
QPVLTQPPSVSVAPGKTATITCGGNNIGSESVHWYHQKPGQAPVLVIYDDAGRPSGIPERFTGSNSGNTATLTISRVEAGDEADYYCQVWDRNSAQFVFGPGTKVTVLGSRGGGGSGGGGSGGGGSLEMAEVQLVQSGAEVKKPGASVKVSCKASGYTFTSYGISWVRQAPGQGLEWMGWISAYNGNTNYAQKLQGRVTMTTDTSTSTAYMELRSLRSDDTAVYYCARGVHLDWWGQGTLVTVSS

SEQ ID NO: 4471 - protein, 270 aa, Artificial Sequence
  Description of Artificial Sequence: Synthetic scFv sequence
QPVLTQPPSVSVAPGKTATITCGGNNIGSESVHWYHQKPGQAPVLVIYDDAGRPSGIPERFTGSNSGNTATLTISRVEAGDEADYYCQVWDRNSAQFVFGPGTKVTVLGSRGGGGSGGGGSGGGGSLEMAEVQLVQSGAEVKKPGASVKVSCKASGYTFTSYGISWVRQAPGQGLEWMGWISAYNGNTNYAQKLQGRVTMTTDTSTSTAYMELRSLRSDDTAVYYCARGVHLDWWGQGTLVTVSSTSGQAGQHHHHHHGAYPYDVPDYAS

SEQ ID NO: 4472 - protein, 250 aa, Artificial Sequence
  Description of Artificial Sequence: Synthetic scFv sequence
QPVLTQPPSVSVSPGQTAAIPCSGDKLGDKFASWYQQKPGQSPVLVIYQDTKRPSGIPERFSGSNSGNTATLTISGTQAMDEADYYCQTWASGRVVFGGGTKLTVLGSRGGGGSGGGGSGGGGSLEMAQVQLQQSGPGLVKPSQTLSLTCAISGDSVSSNSAAWNWIRQSPSRGLEWLGRTYYRSKWYNDYAVSVKSRITINPDTSKNQFSLQLNSVTPEDTAVYYCARERSGWKGFDYWGQGTLVTVSS

SEQ ID NO: 4473 - protein, 275 aa, Artificial Sequence
  Description of Artificial Sequence: Synthetic scFv sequence
QPVLTQPPSVSVSPGQTAAIPCSGDKLGDKFASWYQQKPGQSPVLVIYQDTKRPSGIPERFSGSNSGNTATLTISGTQAMDEADYYCQTWASGRVVFGGGTKLTVLGSRGGGGSGGGGSGGGGSLEMAQVQLQQSGPGLVKPSQTLSLTCAISGDSVSSNSAAWNWIRQSPSRGLEWLGRTYYRSKWYNDYAVSVKSRITINPDTSKNQFSLQLNSVTPEDTAVYYCARERSGWKGFDYWGQGTLVTVSSTSGQAGQHHHHHHGAYPYDVPDYAS

SEQ ID NO: 4474 - protein, 248 aa, Artificial Sequence
  Description of Artificial Sequence: Synthetic scFv sequence
QPVLTQPPSVSVVPGKTARITCGGKNIGSKSVHWYQQKPGQAPVVVIHYDSDRPSGIPERFSGSNSGNTATLTISRVEAGDEADYYCQVWDSSSDHPYVFGTGTKVTVLGSRGGGGSGGGGSGGGGSLEMAQVQLVQSGAEVKKPGASVKVSCKASGYTFTNYGISWVRQAPGQGLEWMGWISAYNGNTNYAHKLQGRVTMTTDTSTSTANMELRSLRPDDTAVYYCARSYFGSHDYWGQGTLVTVSS

SEQ ID NO: 4475 - protein, 273 aa, Artificial Sequence
  Description of Artificial Sequence: Synthetic scFv sequence
QPVLTQPPSVSVVPGKTARITCGGKNIGSKSVHWYQQKPGQAPVVVIHYDSDRPSGIPERFSGSNSGNTATLTISRVEAGDEADYYCQVWDSSSDHPYVFGTGTKVTVLGSRGGGGSGGGGSGGGGSLEMAQVQLVQSGAEVKKPGASVKVSCKASGYTFTNYGISWVRQAPGQGLEWMGWISAYNGNTNYAHKLQGRVTMTTDTSTSTANMELRSLRPDDTAVYYCARSYFGSHDYWGQGTLVTVSSTSGQAGQHHHHHHGAYPYDVPDYAS

SEQ ID NO: 4476 - protein, 256 aa, Artificial Sequence
  Description of Artificial Sequence: Synthetic scFv sequence
QSALTQPASVSGSPGQSITISCTGTSSDIGGYNYVSWYQQHPGKAPKLMIYDVSNRPSGVSNRFSGSKSGNTASLTISGLQAEDEADYYCISYTRTWNPYVFGSGTKVTVLGSRGGGGSGGGGSGGGGSLEMAEVQLVQSGGGVVQPGGSLRLSCAASGFTFDDYAMHWVRQAPGKGLEWVSLISGDGGSTYYADSVKGRFTISRDNSKNSLYLQMNSLRTEDTALYYCAKDRAAAGYYYYGMDVWGQGTTVTVSS

SEQ ID NO: 4477 - protein, 274 aa, Artificial Sequence
  Description of Artificial Sequence: Synthetic scFv sequence
QSALTQPASVSGSPGQSITISCTGTSSDVGGYNSVSWYQQHPGKAPRLMIYDVSNRPSGVSNRFSGSKSGNTASLTISGLQAEDEADYYCSSYTSSSTPLVFGTGTKVTVLGSRGGGGSGGGGSGGGGSLEMAQVQLVQSGAEVKKPGASVKVSCKASGYTFTSYGISWVRQAPGQGLEWMGWISAYNGNTNYAQKLQGRVTMTTDTSTSTAYMELRSLRSDDTAVYYCARGAVAYHDWGQGTLVTVSSTSGQAGQHHHHHHGAYPYDVPDYAS

SEQ ID NO: 4478 - protein, 279 aa, Artificial Sequence
  Description of Artificial Sequence: Synthetic scFv sequence
QSALTQPASVSGSPGQSMSCTGTSSDIGGYNYVSWYQQHPGKAPKLMIYDVSNRPSGVSNRFSGSKSGNTASLTISGLQAEDEADYYCISYTRTWNPYVFGSGTKVTVLGSRGGGGSGGGGSGGGGSLEMAEVQLVQSGGGVVQPGGSLRLSCAASGFTFDDYAMHWVRQAPGKGLEWVSLISGDGGSTYYADSVKGRFTISRDNSKNSLYLQMNSLRTEDTALYYCAKDRAAAGYYYYGMDVWGQGTTVTVSSTSGQAGQHHHHHHGAYPYDVPDYAS

SEQ ID NO: 4479 - protein, 272 aa, Artificial Sequence
  Description of Artificial Sequence: Synthetic scFv sequence
QSALTQPASVSGSPGQSMSCTGTSSDVGGYNSVSWYQQHPGKAPRLMIYDVSNRPSGVSNRFSGSKSGNTASLTISGLQAEDEADYYCSSYTSSSTPLVFGTGTKVTVLGSRGGGGSGGGGSGGGGSLEMAQVQLVQSGAEVKKPGASVKVSCKASGYTFTSYGISWVRQAPGQGLEWMGWISAYNGNTNYAQKLQGRVTMTTDTSTSTAYMELRSLRSDDTAVYYCARGAVAYHDWGQGTLVTVSSTSGQAGQHHHHHHGAYPYDVPDYAS

SEQ ID NO: 4480 - protein, 276 aa, Artificial Sequence
  Description of Artificial Sequence: Synthetic scFv sequence
QSALTQPASVSGSPGQSMSCTGTSSDVGGYNYVSWYQQHPGKAPKLMIYDVSNRPSGVSNRFSGSKSGNTASLTISGLQAEDEADYYCSSYTSSSTSKVFGGGTKLTVLGSRGGGGSGGGGSGGGGSLEMAEVQLVESGGGVVRPGGSLRLSCAASGFTFGDYGMSWVRQAPGKGLEWVSGINWNGGSTGYADSVKGRFTISRDNAKNSLYLQMNSLRAEDTAVYYCARSKYNFHVYYDYWGQGTLVTVSSTSGQAGQHHHHHHGAYPYDVPDYAS

SEQ ID NO: 4481 - protein, 249 aa, Artificial Sequence
  Description of Artificial Sequence: Synthetic scFv sequence
QSALTQPASVSGSPGQSRRISCTGTSSDVGGYNSVSWYQQHPGKAPRLMIYDVSNRPSGVSNRFSGSKSGNTASLTISGLQAEDEADYYCSSYTSSSTPLVFGTGTKVTVLGSRGGGGSGGGGSGGGGSLEMAQVQLVQSGAEVKKPGASVKVSCKASGYTFTSYGISWVRQAPGQGLEWMGWISAYNGNTNYAQKLQGRVTMTTDTSTSTAYMELRSLRSDDTAVYYCARGAVAYHDWGQGTLVTVSS

SEQ ID NO: 4482 - protein, 253 aa, Artificial Sequence
  Description of Artificial Sequence: Synthetic scFv sequence
QSALTQPASVSGSPGQSRRISCTGTSSDVGGYNYVSWYQQHPGKAPKLMIYDVSNRPSGVSNRFSGSKSGNTASLTISGLQAEDEADYYCSSYTSSSTSKVFGGGTKLTVLGSRGGGGSGGGGSGGGGSLEMAEVQLVESGGGVVRPGGSLRLSCAASGFTFGDYGMSWVRQAPGKGLEWVSGINWNGGSTGYADSVKGRFTISRDNAKNSLYLQMNSLRAEDTAVYYCARSKYNFHVYYDYWGQGTLVTVSS

SEQ ID NO: 4483 - protein, 278 aa, Artificial Sequence
  Description of Artificial Sequence: Synthetic scFv sequence
QSALTQPASVSGSPGQSRRISCTGTSSDVGGYNYVSWYQQHPGKAPKLMIYDVSNRPSGVSNRFSGSKSGNTASLTISGLQAEDEADYYCSSYTSSSTSKVFGGGTKLTVLGSRGGGGSGGGGSGGGGSLEMAEVQLVESGGGVVRPGGSLRLSCAASGFTFGDYGMSWVRQAPGKGLEWVSGINWNGGSTGYADSVKGRFTISRDNAKNSLYLQMNSLRAEDTAVYYCARSKYNFHVYYDYWGQGTLVTVSSTSGQAGQHHHHHHGAYPYDVPDYAS

SEQ ID NO: 4484 - protein, 251 aa, Artificial Sequence
  Description of Artificial Sequence: Synthetic scFv sequence
QSVLTQPPAASGTPGQRVTISCSGGVSNIGSGALNWYQQLPGTAPKLLIYSYNQRPSGVSDRFSGSRSATSASLAISGLQSEDEADYYCATWDDSVNGWVFGGGTKLTVLGSRGGGGSGGGGSGGGGSLEMAQVQLVQSGAEVKKPGDSVKVSCKPSGYNFLNYGINWVRQAPGQGLEWMGWISTYTGNTNYAQKLQGRVTFTTDTSTSTAYMEMRSLRSDDTAVYYCARDLYYYEGVDYWGQGTLVTVSS

SEQ ID NO: 4485 - protein, 276 aa, Artificial Sequence
  Description of Artificial Sequence: Synthetic scFv sequence
QSVLTQPPAASGTPGQRVTISCSGGVSNIGSGALNWYQQLPGTAPKLLIYSYNQRPSGVSDRFSGSRSATSASLAISGLQSEDEADYYCATWDDSVNGWVFGGGTKLTVLGSRGGGGSGGGGSGGGGSLEMAQVQLVQSGAEVKKPGDSVKVSCKPSGYNFLNYGINWVRQAPGQGLEWMGWISTYTGNTNYAQKLQGRVTFTTDTSTSTAYMEMRSLRSDDTAVYYCARDLYYYEGVDYWGQGTLVTVSSTSGQAGQHHHHHHGAYPYDVPDYAS

SEQ ID NO: 4486 - protein, 254 aa, Artificial Sequence
  Description of Artificial Sequence: Synthetic scFv sequence
QSVLTQPPSASGTPGQRVTISCSGSSSNIGSNTVNWYQQLPGTAPKLLIYSNDQRPSGVPDRFSGSKSGTSASLAISGLQSEDEADYYCASWDDSLNGRYVFGTGTKVTVLGSRGGGGSGGGGSGGGGSLEMAQVQLVQSGAEVRKPGASVKVSCKTSGYTFSWYAIHWVRQAPGQRLEWMGWINAGNGNTKYSQKFQGRVSLTRDTSASTAYMELSSLRSDDTAVYYCARPDNYGSGGDVFDRGQGTMVTVSS

SEQ ID NO: 4487 - protein, 279 aa, Artificial Sequence
  Description of Artificial Sequence: Synthetic scFv sequence
QSVLTQPPSASGTPGQRVTISCSGSSSNIGSNTVNWYQQLPGTAPKLLIYSNDQRPSGVPDRFSGSKSGTSASLAISGLQSEDEADYYCASWDDSLNGRYVFGTGTKVTVLGSRGGGGSGGGGSGGGGSLEMAQVQLVQSGAEVRKPGASVKVSCKTSGYTFSWYAIHWVRQAPGQRLEWMGWINAGNGNTKYSQKFQGRVSLTRDTSASTAYMELSSLRSDDTAVYYCARPDNYGSGGDVFDRGQGTMVTVSSTSGQAGQHHHHHHGAYPYDVPDYAS

SEQ ID NO: 4488 - protein, 249 aa, Artificial Sequence
  Description of Artificial Sequence: Synthetic scFv sequence
QSVLTQPPSASGTPGQRVTISCSGSSSNIGSNTVNWYQQLPGTAPKLLIYSNNQRPSGVPDRFSGSKSGTSASLAISGLQSEDEADYYCAAWDDSLNGYVFGTGTKVTVLGSRGGGGSGGGGSGGGGSLEMAQVQLQQWGAGLLKPSETLSLTCAVYGGSFSGYYWSWIRQPPGKGLEWIGEINHSGSTNYNPSLKSRVTISVDTSKNQFSLKLSSVTAADTAVYYCAREGPYDGFDSWGQGTLVTVSS

SEQ ID NO: 4489 - protein, 274 aa, Artificial Sequence
  Description of Artificial Sequence: Synthetic scFv sequence
QSVLTQPPSASGTPGQRVTISCSGSSSNIGSNTVNWYQQLPGTAPKLLIYSNNQRPSGVPDRFSGSKSGTSASLAISGLQSEDEADYYCAAWDDSLNGYVFGTGTKVTVLGSRGGGGSGGGGSGGGGSLEMAQVQLQQWGAGLLKPSETLSLTCAVYGGSFSGYYWSWIRQPPGKGLEWIGEINHSGSTNYNPSLKSRVTISVDTSKNQFSLKLSSVTAADTAVYYCAREGPYDGFDSWGQGTLVTVSSTSGQAGQHHHHHHGAYPYDVPDYAS

SEQ ID NO: 4490 - protein, 250 aa, Artificial Sequence
  Description of Artificial Sequence: Synthetic scFv sequence
QSVLTQPPSASGTPGQRVTISCSGSSSNIGSNTVNWYQQLPGTAPKLLIYSNNQRPSGVPDRFSGSKSGTSASLAISGLQSEDEADYYCAAWDDSLNGYWVFGGGTKLTVLGSRGGGGSGGGGSGGGGSLEMAQVQLQQWGAGLLKPSETLSLTCAVYGGSFSGYYWSWIRQPPGKGLEWIGEINHSGSTNYNPSLKSRVTISVDTSKNQFSLKLSSVTAADTAVYYCAREGAFDAFDIWGQGTMVTVSS

SEQ ID NO: 4491 - protein, 275 aa, Artificial Sequence
  Description of Artificial Sequence: Synthetic scFv sequence
QSVLTQPPSASGTPGQRVTISCSGSSSNIGSNTVNWYQQLPGTAPKLLIYSNNQRPSGVPDRFSGSKSGTSASLAISGLQSEDEADYYCAAWDDSLNGYWVFGGGTKLTVLGSRGGGGSGGGGSGGGGSLEMAQVQLQQWGAGLLKPSETLSLTCAVYGGSFSGYYWSWIRQPPGKGLEWIGEINHSGSTNYNPSLKSRVTISVDTSKNQFSLKLSSVTAADTAVYYCAREGAFDAFDIWGQGTMVTVSSTSGQAGQHHHHHHGAYPYDVPDYAS

SEQ ID NO: 4492 - protein, 250 aa, Artificial Sequence
  Description of Artificial Sequence: Synthetic scFv sequence
QSVLTQPPSASGTPGQRVTISCSGSSSNIGTNGVNWFQQFPGTAPKLLIYTNDQRPSGVPDRFSGSKSGTSASLAISGLQSADEADYYCAVWDHSLNGPVFGGGTKLTVLGSRGGGGSGGGGSGGGGSLEMAQVQLVQSGAEVKKPGSSVKVSCKASGGTFSSYAISWVRQAPGQGLEWMGGIIPIFGTANYAQKFQGRVTITADESTSTAYMELSSLRSEDTAVYYCARGAGFDAFDIWGQGTMVTVSS

SEQ ID NO: 4493 - protein, 275 aa, Artificial Sequence
  Description of Artificial Sequence: Synthetic scFv sequence
QSVLTQPPSASGTPGQRVTISCSGSSSNIGTNGVNWFQQFPGTAPKLLIYTNDQRPSGVPDRFSGSKSGTSASLAISGLQSADEADYYCAVWDHSLNGPVFGGGTKLTVLGSRGGGGSGGGGSGGGGSLEMAQVQLVQSGAEVKKPGSSVKVSCKASGGTFSSYAISWVRQAPGQGLEWMGGIIPIFGTANYAQKFQGRVTITADESTSTAYMELSSLRSEDTAVYYCARGAGFDAFDIWGQGTMVTVSSTSGQAGQHHHHHHGAYPYDVPDYAS

SEQ ID NO: 4494 - protein, 252 aa, Artificial Sequence
  Description of Artificial Sequence: Synthetic scFv sequence
QSVLTQPPSASGTPGQTVTISCSGSNSNIGSNYVYWYQQLPGTAPKLLIYRNNQRPSGVPDRFSGSKSGTSASLAISGLRSEDEADYYCAAWDDSLSAYVFGTGTKVTVLGSRGGGGSGGGGSGGGGSLEMAQVQLVQSGAEVKKPGASVKVSCKASGYTFTSYGISWVRQAPGQGLEWMGWISAYNGNTNYAQKLQGRVTMTTDTSTSTAYMELRSLRSDDTAVYYCARSSGNMVSWKDMWGQGTLVTVSS

SEQ ID NO: 4495 - protein, 277 aa, Artificial Sequence
  Description of Artificial Sequence: Synthetic scFv sequence
QSVLTQPPSASGTPGQTVTISCSGSNSNIGSNYVYWYQQLPGTAPKLLIYRNNQRPSGVPDRFSGSKSGTSASLAISGLRSEDEADYYCAAWDDSLSAYVFGTGTKVTVLGSRGGGGSGGGGSGGGGSLEMAQVQLVQSGAEVKKPGASVKVSCKASGYTFTSYGISWVRQAPGQGLEWMGWISAYNGNTNYAQKLQGRVTMTTDTSTSTAYMELRSLRSDDTAVYYCARSSGNMVSWKDMWGQGTLVTVSSTSGQAGQHHHHHHGAYPYDVPDYAS

SEQ ID NO: 4496 - protein, 249 aa, Artificial Sequence
  Description of Artificial Sequence: Synthetic scFv sequence
QSVLTQPPSVSAAAGQKVTISCSGSDSNIGNNYVSWYQHLPGTAPKLLIYDVKNRPSGIPDRFSGSKSGSSATLGIAGLQPGDEADYYCGTWDSRLDAYVFGTGTKVTVLGSRGGGGSGGGGSGGGGSLEMAQMQLVQSGAEVKKPGASVKVSCKTSGFPFNIFGITWVRQAPGQGLEWMGWISGYNGNTDYPQKFQGRVTMSTDTSTSTAYMELRNLKSDDTAVYYCARGAYGGMDTWGQGTLVTVSS

SEQ ID NO: 4497 - protein, 274 aa, Artificial Sequence
  Description of Artificial Sequence: Synthetic scFv sequence
QSVLTQPPSVSAAAGQKVTISCSGSDSNIGNNYVSWYQHLPGTAPKLLIYDVKNRPSGIPDRFSGSKSGSSATLGIAGLQPGDEADYYCGTWDSRLDAYVFGTGTKVTVLGSRGGGGSGGGGSGGGGSLEMAQMQLVQSGAEVKKPGASVKVSCKTSGFPFNIFGITWVRQAPGQGLEWMGWISGYNGNTDYPQKFQGRVTMSTDTSTSTAYMELRNLKSDDTAVYYCARGAYGGMDTWGQGTLVTVSSTSGQAGQHHHHHHGAYPYDVPDYAS

SEQ ID NO: 4498 - protein, 249 aa, Artificial Sequence
  Description of Artificial Sequence: Synthetic scFv sequence
QSVLTQPPSVSAAPGQKVTISCSGSNSNIGNNYVSWYQQLPGTAPKLLIYDNNKRPSGIPDRFSGSRSGTSATLGITGLQTGDEADYYCGTWNTTVTPGYVFGTGTKVTVLGSRGGGGSGGGGSGGGGSLEMAEVQLVQSGAEVKKPGASVKVSCKASGYTFTSYGISWVRQAPGQGLEWMGWISAYNGNTNYAQKLQGRVTMTTDTSTSTAYMELRSLRSDDTAMYYCARSVYDLDTWGQGTLVTVSS

SEQ ID NO: 4499 - protein, 274 aa, Artificial Sequence
  Description of Artificial Sequence: Synthetic scFv sequence
QSVLTQPPSVSAAPGQKVTISCSGSNSNIGNNYVSWYQQLPGTAPKLLIYDNNKRPSGIPDRFSGSRSGTSATLGITGLQTGDEADYYCGTWNTTVTPGYVFGTGTKVTVLGSRGGGGSGGGGSGGGGSLEMAEVQLVQSGAEVKKPGASVKVSCKASGYTFTSYGISWVRQAPGQGLEWMGWISAYNGNTNYAQKLQGRVTMTTDTSTSTAYMELRSLRSDDTAMYYCARSVYDLDTWGQGTLVTVSSTSGQAGQHHHHHHGAYPYDVPDYAS

SEQ ID NO: 4500 - protein, 256 aa, Artificial Sequence
  Description of Artificial Sequence: Synthetic scFv sequence
QSVLTQPPSVSAPPGQKVTISCSGSSSNIGNNYVSWYQQFPGTAPKLLIYDNNKRPSGISDRFSGSKSGTSATLGIAGLQTGDEADYYCGTWDTSLSGFYVFGSGTKVTVLGSRGGGGSGGGGSGGGGSLEMAEVQLVQSGAEVKKPGASVKVSCKASGYTFTSYTISWVRQAPGQGLEWMGWISTYNGLTNYAQNLQGRVTMTTDTFTTTAYMELRSLRSDDTAVYYCVREGSPDYGDFASFDYWGQGTLVTVSS

SEQ ID NO: 4501 - protein, 281 aa, Artificial Sequence
  Description of Artificial Sequence: Synthetic scFv sequence
QSVLTQPPSVSAPPGQKVTISCSGSSSNIGNNYVSWYQQFPGTAPKLLIYDNNKRPSGISDRFSGSKSGTSATLGIAGLQTGDEADYYCGTWDTSLSGFYVFGSGTKVTVLGSRGGGGSGGGGSGGGGSLEMAEVQLVQSGAEVKKPGASVKVSCKASGYTFTSYTISWVRQAPGQGLEWMGWISTYNGLTNYAQNLQGRVTMTTDTFTTTAYMELRSLRSDDTAVYYCVREGSPDYGDFASFDYWGQGTLVTVSSTSGQAGQHHHHHHGAYPYDVPDYAS

SEQ ID NO: 4502 - protein, 259 aa, Artificial Sequence
  Description of Artificial Sequence: Synthetic scFv sequence
QSVLTQPPSVSGAPGQGVTIPCTGSSSNIGAGYDVHWYQQLPGTAPKLLIYGNNNRPSGVPDRFSGSRSGSSASLAITGLQAEDEADYYCQSYDSSLSDVVFGGGTKVTVLGSRGGGGSGGGGSGGGGSLEMAEVQLVQSGAEVKKPGATVKISCKVSGYTFTDYYMHWVQQAPGKGLEWMGLVDPEDGETIYAEKFQGRVTITADTSTDTAYMELSSLRSEDTAVYYCARYWSYSFDYLYMPEGNDWWGQGTLVTVSS

SEQ ID NO: 4503 - protein, 284 aa, Artificial Sequence
  Description of Artificial Sequence: Synthetic scFv sequence
QSVLTQPPSVSGAPGQGVTIPCTGSSSNIGAGYDVHWYQQLPGTAPKLLIYGNNNRPSGVPDRFSGSRSGSSASLAITGLQAEDEADYYCQSYDSSLSDVVFGGGTKVTVLGSRGGGGSGGGGSGGGGSLEMAEVQLVQSGAEVKKPGATVKISCKVSGYTFTDYYMHWVQQAPGKGLEWMGLVDPEDGETIYAEKFQGRVTITADTSTDTAYMELSSLRSEDTAVYYCARYWSYSFDYLYMPEGNDWWGQGTLVTVSSTSGQAGQHHHHHHGAYPYDVPDYAS

SEQ ID NO: 4504 - protein, 251 aa, Artificial Sequence
  Description of Artificial Sequence: Synthetic scFv sequence
QSVLTQPPSVSGAPGQRVTISCTGSSSNIGAGFDVHWYQLLPGTAPKLLIYANSNRPSGVPDRFSGSKSGTSASLAITGLLAEDEADYYCQSYDSSLSGVVFGGGTKLTVLGSRGGGGSGGGGSGGGGSLEMAQVQLVQSGAEVKKPGSSVKVSCKASGGTFSSYAISWVRQAPGQGLEWMGGIIPIFGTANYAQKFQGRVTITADESTSTAYMELSSLRSEDTAVYYCARGASFDRHDNWGQGTLVTVSS

SEQ ID NO: 4505 - protein, 276 aa, Artificial Sequence
  Description of Artificial Sequence: Synthetic scFv sequence
QSVLTQPPSVSGAPGQRVTISCTGSSSNIGAGFDVHWYQLLPGTAPKLLIYANSNRPSGVPDRFSGSKSGTSASLAITGLLAEDEADYYCQSYDSSLSGVVFGGGTKLTVLGSRGGGGSGGGGSGGGGSLEMAQVQLVQSGAEVKKPGSSVKVSCKASGGTFSSYAISWVRQAPGQGLEWMGGIIPIFGTANYAQKFQGRVTITADESTSTAYMELSSLRSEDTAVYYCARGASFDRHDNWGQGTLVTVSSTSGQAGQHHHHHHGAYPYDVPDYAS

SEQ ID NO: 4506 - protein, 249 aa, Artificial Sequence
  Description of Artificial Sequence: Synthetic scFv sequence
QSVLTQPPSVSGAPGQRVTISCTGSSSNIGAGYDVHWYQQLPGTAPKLLIYGNSNRPSGVPDRFSGSKSGTSASLAITGLQAEDEADYYCQSYDSSLSGYVFGTGTKVTVLGSRGGGGSGGGGSGGGGSLEMAQVQLVQSGAEVKKPGASVKVSCKVSGYTLTELSMHWVRQAPGKGLEWMGGFDPEDGETIYAQKFQGRVTMTEDTSTDTAYMELSSLRSEDTAVYYCARYSGVYYDWGQGTLVTVSS

SEQ ID NO: 4507 - protein, 274 aa, Artificial Sequence
  Description of Artificial Sequence: Synthetic scFv sequence
QSVLTQPPSVSGAPGQRVTISCTGSSSNIGAGYDVHWYQQLPGTAPKLLIYGNSNRPSGVPDRFSGSKSGTSASLAITGLQAEDEADYYCQSYDSSLSGYVFGTGTKVTVLGSRGGGGSGGGGSGGGGSLEMAQVQLVQSGAEVKKPGASVKVSCKVSGYTLTELSMHWVRQAPGKGLEWMGGFDPEDGETIYAQKFQGRVTMTEDTSTDTAYMELSSLRSEDTAVYYCARYSGVYYDWGQGTLVTVSSTSGQAGQHHHHHHGAYPYDVPDYAS

SEQ ID NO: 4508 - protein, 253 aa, Artificial Sequence
  Description of Artificial Sequence: Synthetic scFv sequence
QSVLTQPPSVSGAPGQRVTISCTGSSSNIGARYDVHWYQQLPGTAPRLLISANYDRPSGVPDRFSGSKSGTSASLAITGLQAEDEADYYCQSYDSSVSAWVFGGGTKVTVLGSRGGGGSGGGGSGGGGSLEMAEVQLVQSGAEVKEPGASVRISCQASGYNFISYYMHWVRQAPGQGLEWMGTINPGSGETDYSQKLQGRVTMTRDPSTGTFDMGLSSLTSGDTAVYYCATGLIRGASDAFNRGRGTMVTVSS

SEQ ID NO: 4509 - protein, 278 aa, Artificial Sequence
  Description of Artificial Sequence: Synthetic scFv sequence
QSVLTQPPSVSGAPGQRVTISCTGSSSNIGARYDVHWYQQLPGTAPRLLISANYDRPSGVPDRFSGSKSGTSASLAITGLQAEDEADYYCQSYDSSVSAWVFGGGTKVTVLGSRGGGGSGGGGSGGGGSLEMAEVQLVQSGAEVKEPGASVRISCQASGYNFISYYMHWVRQAPGQGLEWMGTINPGSGETDYSQKLQGRVTMTRDPSTGTFDMGLSSLTSGDTAVYYCATGLIRGASDAFNRGRGTMVTVSSTSGQAGQHHHHHHGAYPYDVPDYAS

SEQ ID NO: 4510 - protein, 251 aa, Artificial Sequence
  Description of Artificial Sequence: Synthetic scFv sequence
QSVLTQPPSVSGAPGQRVTISCTGSTSNIGAGYDVHWYQQLPGTAPKLLINNNRNRPSGVPDRFSGSKSGTSATLGITGLQTGDEADYYCGTWDGSLTGAVFGGGTKLTVLGSRGGGGSGGGGSGGGGSLEMAEVQLVQSGAEVKKPGSSVKVSCKASGGTFSSYAISWVRQAPGQGLEWMGGIIPIFGTANYAQKFQGRVTITADESTSTAYMELSSLRSEDTAVYYCARGSALDHYDRWGQGTLVTVSS

SEQ ID NO: 4511 - protein, 276 aa, Artificial Sequence
  Description of Artificial Sequence: Synthetic scFv sequence
QSVLTQPPSVSGAPGQRVTISCTGSTSNIGAGYDVHWYQQLPGTAPKLLINNNRNRPSGVPDRFSGSKSGTSATLGITGLQTGDEADYYCGTWDGSLTGAVFGGGTKLTVLGSRGGGGSGGGGSGGGGSLEMAEVQLVQSGAEVKKPGSSVKVSCKASGGTFSSYAISWVRQAPGQGLEWMGGIIPIFGTANYAQKFQGRVTITADESTSTAYMELSSLRSEDTAVYYCARGSALDHYDRWGQGTLVTVSSTSGQAGQHHHHHHGAYPYDVPDYAS

SEQ ID NO: 4512 - protein, 260 aa, Artificial Sequence
  Description of Artificial Sequence: Synthetic scFv sequence
QSVLTQPPSVSGAPGQRVTVSCTGSRSNIGAGYDVHWYQQLPGTAPKLLIYGNSNRPPGVPDRFSGSKSGTSASLVITGLQAEDAADYYCQSYDNTVRESPYVFGTGTKVTVLGSRGGGGSGGGGSGGGGSLEMAEVQLVQSGAEVKKPGASVKVSCKVSGYTLTELSMHWVRQAPGKGLEWMGGFDPEDGETIYAQKFQGRVTMTEDTSTDTAYMELSSLRSEDTAVYYCATESNLVSRHYYYYGMDVWGQGTTVTVSS

SEQ ID NO: 4513 - protein, 285 aa, Artificial Sequence
  Description of Artificial Sequence: Synthetic scFv sequence
QSVLTQPPSVSGAPGQRVTVSCTGSRSNIGAGYDVHWYQQLPGTAPKLLIYGNSNRPPGVPDRFSGSKSGTSASLVITGLQAEDAADYYCQSYDNTVRESPYVFGTGTKVTVLGSRGGGGSGGGGSGGGGSLEMAEVQLVQSGAEVKKPGASVKVSCKVSGYTLTELSMHWVRQAPGKGLEWMGGFDPEDGETIYAQKFQGRVTMTEDTSTDTAYMELSSLRSEDTAVYYCATESNLVSRHYYYYGMDVWGQGTTVTVSSTSGQAGQHHHHHHGAYPYDVPDYAS

SEQ ID NO: 4514 - protein, 250 aa, Artificial Sequence
  Description of Artificial Sequence: Synthetic scFv sequence
QSVLTQPPSVSVSPGQTASISCSGNKLGTKYVYWYQKRPGQSPVLVMYEDNQRPSGIPERFSGSNSGNTATLTIRGTQTVDEADYYCQAWDSDTFVVFGGGTKVTVLGSRGGGGSGGGGSGGGGSLEMAEVQLVETGGGVVQPGRSLRLSCAASGFTFSSYGMHWVRQAPGKGLEWVAVISHDGSNKYYADSVKGRFTISRDNSKDTLYLQMNSLRGEDTAVYYCARSNQWSGYFSFDYWGQGTLVTVSS

SEQ ID NO: 4515 - protein, 275 aa, Artificial Sequence
  Description of Artificial Sequence: Synthetic scFv sequence
QSVLTQPPSVSVSPGQTASISCSGNKLGTKYVYWYQKRPGQSPVLVMYEDNQRPSGIPERFSGSNSGNTATLTIRGTQTVDEADYYCQAWDSDTFVVFGGGTKVTVLGSRGGGGSGGGGSGGGGSLEMAEVQLVETGGGVVQPGRSLRLSCAASGFTFSSYGMHWVRQAPGKGLEWVAVISHDGSNKYYADSVKGRFTISRDNSKDTLYLQMNSLRGEDTAVYYCARSNQWSGYFSFDYWGQGTLVTVSSTSGQAGQHHHHHHGAYPYDVPDYAS

SEQ ID NO: 4516 - protein, 248 aa, Artificial Sequence
  Description of Artificial Sequence: Synthetic scFv sequence
QSVLTQPPSVSVSPGQTATIACSGHKLGDKYASWYQQKSGQSPVLIIYQDNKRPSGIPERFSGSNSGNTATLTISGTQALDEADYYCQAWDSSTYVAFGGGTKLTVLGSRGGGGSGGGGSGGGGSLEMAQVQLQESGPGLVKPSETLSLTCVVSGGSISSSNWWSWVRQPPGKGLEWIGEIYHSGSPNYNPSLKSRVTISVDKSKNQFSLKLSSVTAADTAVYYCARMTTHTFGYDAWGQGTLVTVSS

SEQ ID NO: 4517 - protein, 273 aa, Artificial Sequence
  Description of Artificial Sequence: Synthetic scFv sequence
QSVLTQPPSVSVSPGQTATIACSGHKLGDKYASWYQQKSGQSPVLIIYQDNKRPSGIPERFSGSNSGNTATLTISGTQALDEADYYCQAWDSSTYVAFGGGTKLTVLGSRGGGGSGGGGSGGGGSLEMAQVQLQESGPGLVKPSETLSLTCVVSGGSISSSNWWSWVRQPPGKGLEWIGEIYHSGSPNYNPSLKSRVTISVDKSKNQFSLKLSSVTAADTAVYYCARMTTHTFGYDAWGQGTLVTVSSTSGQAGQHHHHHHGAYPYDVPDYAS

SEQ ID NO: 4518 - protein, 257 aa, Artificial Sequence
  Description of Artificial Sequence: Synthetic scFv sequence
QSVVTQPPSASGTPGQRVTISCSGSSSNIGSNYVYWYQQLPGTAPKLLIYSNNQRPSGVPDRFSGSKSGTSASLAISGLRSEDEADYYCAAWDDSLSGYVFGTGTKLTVLGSRGGGGSGGGGSGGGGSLEMAQVQLQQWGAGLLKPSETLSLTCAVYGGSFSGYYWSWIRQPPGKGLEWIGEINHSGSTNYNPSLKSRVTISVDTSKNQFSLKLSSVTAADTAVYYCARLYEGGYHGWGSWLSSDSWGQGTLVTVSS

SEQ ID NO: 4519 - protein, 282 aa, Artificial Sequence
  Description of Artificial Sequence: Synthetic scFv sequence
QSVVTQPPSASGTPGQRVTISCSGSSSNIGSNYVYWYQQLPGTAPKLLIYSNNQRPSGVPDRFSGSKSGTSASLAISGLRSEDEADYYCAAWDDSLSGYVFGTGTKLTVLGSRGGGGSGGGGSGGGGSLEMAQVQLQQWGAGLLKPSETLSLTCAVYGGSFSGYYWSWIRQPPGKGLEWIGEINHSGSTNYNPSLKSRVTISVDTSKNQFSLKLSSVTAADTAVYYCARLYEGGYHGWGSWLSSDSWGQGTLVTVSSTSGQAGQHHHHHHGAYPYDVPDYAS

SEQ ID NO: 4520 - protein, 256 aa, Artificial Sequence
  Description of Artificial Sequence: Synthetic scFv sequence
QSVVTQPPSVSAAPGEKVTISCSGSNFNVGNNDVSWYQQLPGAAPKLLIYDNNKRPSGIPDRFSGSKSGTSATLDITGLHSDDEADYYCGTWDSSLNTGGVFGTGTKVTVLGSRGGGGSGGGGSGGGGSLEMAEVQLVQSGAEVKKPGASVKVSCKASGYTFTSYTISWVRQAPGQGLEWMGWISTYNGLTNYAQNLQGRVTMTTDTFTTTAYMELRSLRSDDTAVYYCVREGSPDYGDFASFDYWGQGTLVTVSS

SEQ ID NO: 4521 - protein, 281 aa, Artificial Sequence
  Description of Artificial Sequence: Synthetic scFv sequence
QSVVTQPPSVSAAPGEKVTISCSGSNFNVGNNDVSWYQQLPGAAPKLLIYDNNKRPSGIPDRFSGSKSGTSATLDITGLHSDDEADYYCGTWDSSLNTGGVFGTGTKVTVLGSRGGGGSGGGGSGGGGSLEMAEVQLVQSGAEVKKPGASVKVSCKASGYTFTSYTISWVRQAPGQGLEWMGWISTYNGLTNYAQNLQGRVTMTTDTFTTTAYMELRSLRSDDTAVYYCVREGSPDYGDFASFDYWGQGTLVTVSSTSGQAGQHHHHHHGAYPYDVPDYAS

SEQ ID NO: 4522 - protein, 252 aa, Artificial Sequence
  Description of Artificial Sequence: Synthetic scFv sequence
QSVVTQPPSVSAAPGQKVTISCSGSSSNIGNNYVSWYQQLPGTAPKLLIYDNNKRPSGIPDRFSGSKSGTSATLGITGLQTGDEADYYCGTWDSSLGAPYVFGTGTKVTVLGSRGGGGSGGGGSGGGGSLEMAEVQLVQSWGGSEQPGRSLRLSCAASGFTFDDYAMHWVRQAPGKGLEWVSGISWNSGSIGYADSVKGRFTISRDNAKNSLYLQMNSLRAEDTAMYYCARYRQVGSAYDSWGQGTLVTVSS

SEQ ID NO: 4523 - protein, 277 aa, Artificial Sequence
  Description of Artificial Sequence: Synthetic scFv sequence
QSVVTQPPSVSAAPGQKVTISCSGSSSNIGNNYVSWYQQLPGTAPKLLIYDNNKRPSGIPDRFSGSKSGTSATLGITGLQTGDEADYYCGTWDSSLGAPYVFGTGTKVTVLGSRGGGGSGGGGSGGGGSLEMAEVQLVQSWGGSEQPGRSLRLSCAASGFTFDDYAMHWVRQAPGKGLEWVSGISWNSGSIGYADSVKGRFTISRDNAKNSLYLQMNSLRAEDTAMYYCARYRQVGSAYDSWGQGTLVTVSSTSGQAGQHHHHHHGAYPYDVPDYAS

SEQ ID NO: 4524 - protein, 256 aa, Artificial Sequence
  Description of Artificial Sequence: Synthetic scFv sequence
QSVVTQPPSVSAAPGQKVTISCSGSSSNIGNNYVSWYQQLPGTAPKLLIYDNNKRPSGIPDRFSGSKSGTSATLGITGLQTGDEADYYCGTWDSSLSAAYVFGTGTKVTVLGSRGGGGSGGGGSGGGGSLEMAQVQLVQSGAEVKKPGASVKVSCKASGYSFTSYTISWVRQAPGQGLEWMGWVSTYNGLRNYAQNLQGRVTMTTDTLTTTAYMELRSLRSDDTAVYYCVREGSPDYGDFAAFDYWGQGTLVTVSS

SEQ ID NO: 4525 - protein, 281 aa, Artificial Sequence
  Description of Artificial Sequence: Synthetic scFv sequence
QSVVTQPPSVSAAPGQKVTISCSGSSSNIGNNYVSWYQQLPGTAPKLLIYDNNKRPSGIPDRFSGSKSGTSATLGITGLQTGDEADYYCGTWDSSLSAAYVFGTGTKVTVLGSRGGGGSGGGGSGGGGSLEMAQVQLVQSGAEVKKPGASVKVSCKASGYSFTSYTISWVRQAPGQGLEWMGWVSTYNGLRNYAQNLQGRVTMTTDTLTTTAYMELRSLRSDDTAVYYCVREGSPDYGDFAAFDYWGQGTLVTVSSTSGQAGQHHHHHHGAYPYDVPDYAS

SEQ ID NO: 4526 - protein, 253 aa, Artificial Sequence
  Description of Artificial Sequence: Synthetic scFv sequence
QSVVTQPPSVSAAPGQKVTISCSGSSSNIGNNYVSWYQQLPGTAPKLLIYDNNKRPSGIPDRFSGSKSGTSATLGITGLQTGDEADYYCGTWDSSLSAYVFGTGTKVTVLGSRGGGGSGGGGSGGGGSLEMAQVQLVQSGAEVKKPGASVKVSCKASGYTFTNYALHWVRQAPGQGLEWMAWINGGNGNTKYSQNFQGRVTITRDTSASTAYMELSSLRSEDTAVYYCAKPEETAGTIHFDYWGQGTPVTVSS

SEQ ID NO: 4527 - protein, 278 aa, Artificial Sequence
  Description of Artificial Sequence: Synthetic scFv sequence
QSVVTQPPSVSAAPGQKVTISCSGSSSNIGNNYVSWYQQLPGTAPKLLIYDNNKRPSGIPDRFSGSKSGTSATLGITGLQTGDEADYYCGTWDSSLSAYVFGTGTKVTVLGSRGGGGSGGGGSGGGGSLEMAQVQLVQSGAEVKKPGASVKVSCKASGYTFTNYALHWVRQAPGQGLEWMAWINGGNGNTKYSQNFQGRVTITRDTSASTAYMELSSLRSEDTAVYYCAKPEETAGTIHFDYWGQGTPVTVSSTSGQAGQHHHHHHGAYPYDVPDYAS

SEQ ID NO: 4528 - protein, 249 aa, Artificial Sequence
  Description of Artificial Sequence: Synthetic scFv sequence
QSVVTQPPSVSAAPGQKVTISCSGSTSNIGNNDVSWYQQLPGTAPKLLIYDNNKRPSGIPDRFSGSKSGTSATLGITGLQTGDEADYYCGTWDSSVSASWVFGRGTKLTVLGSRGGGGSGGGGSGGGGSLEMAQVQLVQSGAEVKKPGASVKVSCKASGYTFTSYGISWVRQAPGQGLEWMGWISAYNGNTNYPQKLQGRVTMTTDPSTSTAYMELRSLRSDDTAVYYCARSMTSFDYWGQGTLVTVSS

SEQ ID NO: 4529 - protein, 274 aa, Artificial Sequence
  Description of Artificial Sequence: Synthetic scFv sequence
QSVVTQPPSVSAAPGQKVTISCSGSTSNIGNNDVSWYQQLPGTAPKLLIYDNNKRPSGIPDRFSGSKSGTSATLGITGLQTGDEADYYCGTWDSSVSASWVFGRGTKLTVLGSRGGGGSGGGGSGGGGSLEMAQVQLVQSGAEVKKPGASVKVSCKASGYTFTSYGISWVRQAPGQGLEWMGWISAYNGNTNYPQKLQGRVTMTTDPSTSTAYMELRSLRSDDTAVYYCARSMTSFDYWGQGTLVTVSSTSGQAGQHHHHHHGAYPYDVPDYAS

SEQ ID NO: 4530 - protein, 274 aa, Artificial Sequence
  Description of Artificial Sequence: Synthetic scFv sequence
QSVVTQPPSVSAAPGQRVTISCSGSSSNISIYDVSWYQQLPGTAPKLLIYGNNKRPSGIADRFSGSTSGTSATLGITGLQTGDEADYYCGTWDDSLSGGVFGGGTKLTVLGRGGGGSGGGGSGGGGSLEMAQMQLVQSGAEVKKPGSSVKVSCEASGGTLSSYAINWVRQAPGQGLEWMGGIIPMFGTAHYAQKFQGRVTITADESTKTAYMELSSLRSEDTAVYYCARGVHYASFDHWGQGTLVTVSSTSGQAGQHHHHHHGAYPYDVPDYAS

SEQ ID NO: 4531 - protein, 250 aa, Artificial Sequence
  Description of Artificial Sequence: Synthetic scFv sequence
QSVVTQPPSVSAAPGQRVTISCSGSSSNISIYDVSWYQQLPGTAPKLLIYGNNKRPSGIADRFSGSTSGTSATLGITGLQTGDEADYYCGTWDDSLSGGVFGGGTKLTVLGSRGGGGSGGGGSGGGGSLEMAQMQLVQSGAEVKKPGSSVKVSCEASGGTLSSYAINWVRQAPGQGLEWMGGIIPMFGTAHYAQKFQGRVTITADESTKTAYMELSSLRSEDTAVYYCARGVHYASFDHWGQGTLVTVSS

SEQ ID NO: 4532 - protein, 275 aa, Artificial Sequence
  Description of Artificial Sequence: Synthetic scFv sequence
QSVVTQPPSVSAAPGQRVTISCSGSSSNISIYDVSWYQQLPGTAPKLLIYGNNKRPSGIADRFSGSTSGTSATLGITGLQTGDEADYYCGTWDDSLSGGVFGGGTKLTVLGSRGGGGSGGGGSGGGGSLEMAQMQLVQSGAEVKKPGSSVKVSCEASGGTLSSYAINWVRQAPGQGLEWMGGIIPMFGTAHYAQKFQGRVTITADESTKTAYMELSSLRSEDTAVYYCARGVHYASFDHWGQGTLVTVSSTSGQAGQHHHHHHGAYPYDVPDYAS

SEQ ID NO: 4533 - protein, 250 aa, Artificial Sequence
  Description of Artificial Sequence: Synthetic scFv sequence
QSVVTQPPSVSGAPGQRVTISCTGSSSNIGAGYDVNWYQQFPGTAPKLLIYGNSNRPSGVPDRFSGSKSGTSASLAITGLQAEDEADYYCQSYDSSLSGSYVFGTGTKVTVLGSRGGGGSGGGGSGGGGSLEMAQMQLVQSGAEVKKPGASVKVSCKASGYTLTELSMHWVRQAPGKGLEWMGGFDPEDGETIYAQKFQGRVTMTEDTSTDTAYMELSSLRSEDTAVYYCARMSSMYYDWGQGTLVTVSS

SEQ ID NO: 4534 - protein, 275 aa, Artificial Sequence
  Description of Artificial Sequence: Synthetic scFv sequence
QSVVTQPPSVSGAPGQRVTISCTGSSSNIGAGYDVNWYQQFPGTAPKLLIYGNSNRPSGVPDRFSGSKSGTSASLAITGLQAEDEADYYCQSYDSSLSGSYVFGTGTKVTVLGSRGGGGSGGGGSGGGGSLEMAQMQLVQSGAEVKKPGASVKVSCKASGYTLTELSMHWVRQAPGKGLEWMGGFDPEDGETIYAQKFQGRVTMTEDTSTDTAYMELSSLRSEDTAVYYCARMSSMYYDWGQGTLVTVSSTSGQAGQHHHHHHGAYPYDVPDYAS

SEQ ID NO: 4535 - protein, 251 aa, Artificial Sequence
  Description of Artificial Sequence: Synthetic scFv sequence
QSVVTQPPSVSGAPGQRVTISCTGSTSNIGAGYDVHWYQQLPGTAPKLLIYTNNFRPSGVPDRFSASKSGTSASLAITGLQAEDEADYYCGTWDSSLSAVVFGGGTKLTVLGSRGGGGSGGGGSGGGGSLEMAEVQLVESGTEVKKPGASVKVSCKASGYMFTSYGLNWVRQAPGQGLEWMGWISANNGKTNYAKKFQDRVTMTRDTSTSTGYMELRSLRSDDTAVYYCARHIGGSYFDRWGQGTLVTVSS

SEQ ID NO: 4536 - protein, 276 aa, Artificial Sequence
  Description of Artificial Sequence: Synthetic scFv sequence
QSVVTQPPSVSGAPGQRVTISCTGSTSNIGAGYDVHWYQQLPGTAPKLLIYTNNFRPSGVPDRFSASKSGTSASLAITGLQAEDEADYYCGTWDSSLSAVVFGGGTKLTVLGSRGGGGSGGGGSGGGGSLEMAEVQLVESGTEVKKPGASVKVSCKASGYMFTSYGLNWVRQAPGQGLEWMGWISANNGKTNYAKKFQDRVTMTRDTSTSTGYMELRSLRSDDTAVYYCARHIGGSYFDRWGQGTLVTVSSTSGQAGQHHHHHHGAYPYDVPDYAS

SEQ ID NO: 4537 - protein, 255 aa, Artificial Sequence
  Description of Artificial Sequence: Synthetic scFv sequence
QSVVTQPPSVSGAPGQTVTISCTGGSSNIGTGYFVNWYQQVPGKAPKLLILGNNNRPSGVPDRLSGSTSGTSASLAITGLQAEDEGTYYCQSYDSSLSGYVFGTGTKVTVLGSRGGGGSGGGGSGGGGSLEMAQVQLQQSGPGLVKPSQTLSLTCGISGDSVSTNSVAWHWIRQSPSRGLEWLGRTYYRSKWSNDYGVSVKSRITIIPDTSKNQFSLQLNSVTPEDTAVYYCARSSSWYQIFDYWGQGTLVTVSS

SEQ ID NO: 4538 - protein, 280 aa, Artificial Sequence
  Description of Artificial Sequence: Synthetic scFv sequence
QSVVTQPPSVSGAPGQTVTISCTGGSSNIGTGYFVNWYQQVPGKAPKLLILGNNNRPSGVPDRLSGSTSGTSASLAITGLQAEDEGTYYCQSYDSSLSGYVFGTGTKVTVLGSRGGGGSGGGGSGGGGSLEMAQVQLQQSGPGLVKPSQTLSLTCGISGDSVSTNSVAWHWIRQSPSRGLEWLGRTYYRSKWSNDYGVSVKSRITIIPDTSKNQFSLQLNSVTPEDTAVYYCARSSSWYQIFDYWGQGTLVTVSSTSGQAGQHHHHHHGAYPYDVPDYAS

SEQ ID NO: 4539 - protein, 247 aa, Artificial Sequence
  Description of Artificial Sequence: Synthetic scFv sequence
QSVVTQPPSVSVAPGKTARITCGGNNIGSKSVHWYQQKPGQAPVLVIYYDSDRPSGIPERFSGSNSGNTATLTISRVEAGDEADYYCQVWDSSSDVVFGGGTKLTVLGSRGGGGSGGGGSGGGGSLEMAEVQLVQSGAEVKKPGASVKVSCKASGYTFTSYGISWVRQAPGQGLEWMGWISAYNGNTNYAQKLQGRVTMTTDTSTSTAYMELRSLRSDDTAVYYCARWGGFGAVDHWGQGTLVTVSS

SEQ ID NO: 4540 - protein, 272 aa, Artificial Sequence
  Description of Artificial Sequence: Synthetic scFv sequence
QSVVTQPPSVSVAPGKTARITCGGNNIGSKSVHWYQQKPGQAPVLVIYYDSDRPSGIPERFSGSNSGNTATLTISRVEAGDEADYYCQVWDSSSDVVFGGGTKLTVLGSRGGGGSGGGGSGGGGSLEMAEVQLVQSGAEVKKPGASVKVSCKASGYTFTSYGISWVRQAPGQGLEWMGWISAYNGNTNYAQKLQGRVTMTTDTSTSTAYMELRSLRSDDTAVYYCARWGGFGAVDHWGQGTLVTVSSTSGQAGQHHHHHHGAYPYDVPDYAS

SEQ ID NO: 4541 - protein, 245 aa, Artificial Sequence
  Description of Artificial Sequence: Synthetic scFv sequence
SSELTQDPAVSVALGQTVKITCQGDSLTDYHATWYQQKPGQAPVAVIYATNNRPTGIPDRFSGSSSGNTASLTITGAQAEDEADYYCNSRDSGTDEVLFGGGTKLTVLGSRGGGGSGGGGSGGGGSLEMAEVQLVETGGGLVKPGGSLRLSCAASGFTFSSYSMNWVRQAPGKGLEWVSSISSSSSYIYYADSVKGRFTISRDNAKNSLYLQMNSLRAEDTAVYYCARGQGYDYWGQGTLVTVSS

SEQ ID NO: 4542 - protein, 270 aa, Artificial Sequence
  Description of Artificial Sequence: Synthetic scFv sequence
SSELTQDPAVSVALGQTVKITCQGDSLTDYHATWYQQKPGQAPVAVIYATNNRPTGIPDRFSGSSSGNTASLTITGAQAEDEADYYCNSRDSGTDEVLFGGGTKLTVLGSRGGGGSGGGGSGGGGSLEMAEVQLVETGGGLVKPGGSLRLSCAASGFTFSSYSMNWVRQAPGKGLEWVSSISSSSSYIYYADSVKGRFTISRDNAKNSLYLQMNSLRAEDTAVYYCARGQGYDYWGQGTLVTVSSTSGQAGQHHHHHHGAYPYDVPDYAS

SEQ ID NO: 4543 - protein, 250 aa, Artificial Sequence
  Description of Artificial Sequence: Synthetic scFv sequence
SYELTQPPAASGTPGQRVTISCSGGVSNIGSGALNWYQQLPGTAPKLLIYSYNQRPSGVSDRFSGSRSATSASLAISGLQSEDEADYYCATWDDSVNGWVFGGGTKLTVLGSRGGGGSGGGGSGGGGSLEMAEVQLVESGAEVKKPGDSVKVSCKPSGYNFLNYGINWVRQAPGQGLEWMGWISTYTGNTNYAQKLQGRVTFTTDTSTSTAYMEMRSLRSDDTAVYYCARQQGGGWYDVWGQGTLVTVSS

SEQ ID NO: 4544 - protein, 275 aa, Artificial Sequence
  Description of Artificial Sequence: Synthetic scFv sequence
SYELTQPPAASGTPGQRVTISCSGGVSNIGSGALNWYQQLPGTAPKLLIYSYNQRPSGVSDRFSGSRSATSASLAISGLQSEDEADYYCATWDDSVNGWVFGGGTKLTVLGSRGGGGSGGGGSGGGGSLEMAEVQLVESGAEVKKPGDSVKVSCKPSGYNFLNYGINWVRQAPGQGLEWMGWISTYTGNTNYAQKLQGRVTFTTDTSTSTAYMEMRSLRSDDTAVYYCARQQGGGWYDVWGQGTLVTVSSTSGQAGQHHHHHHGAYPYDVPDYAS

SEQ ID NO: 4545 - protein, 284 aa, Artificial Sequence
  Description of Artificial Sequence: Synthetic scFv sequence
SYELTQPPSASGTPGQRVTISCSGSSSNIGSNTVNWYQQLPGTAPKLLIYSNNQRPSGVPDRFSGSKSGTSASLAISGLQSEDEADYYCAAWDDSLNGYVFGTGTKVTVLGSRGGGGSGGGGSGGGGSLEMAEVQLVESGAEVKKPGASVKVSCKASGYTFTSYGISWVRQAPGQGLEWMGWISAYNGNTNYAQKLQGRVTMTTDTSTSTAYMELRSLRSDDTAVYYCARDLSRGANPHYYYYYGMDVWGQGTTVTVSSTSGQAGQHHHHHHGAYPYDVPDYAS

SEQ ID NO: 4546 - protein, 252 aa, Artificial Sequence
  Description of Artificial Sequence: Synthetic scFv sequence
SYELTQPPSASGTPGQRVTISCSGSSSNIGSNYVYWYQQLPGTAPKLFIYRNNQRPSGVPDRFSGSKSGTSASLAISGLRSEDEADYYCAAWDDSLSGYLFGTGTKVTVLGSRGGGGSGGGGSGGGGSLEMAEVQLVESGGGLVQPGRSLRLSCAASGFTFDDYAMHWVRQAPGKGLEWVSGISWNSGSIGYADSVKGRFTISRDNAKNSLYLQMNSLRAEDTALYYCANGDSNYYYGMDVWGQGTTVTVSS

SEQ ID NO: 4547 - protein, 277 aa, Artificial Sequence
  Description of Artificial Sequence: Synthetic scFv sequence
SYELTQPPSASGTPGQRVTISCSGSSSNIGSNYVYWYQQLPGTAPKLFIYRNNQRPSGVPDRFSGSKSGTSASLAISGLRSEDEADYYCAAWDDSLSGYLFGTGTKVTVLGSRGGGGSGGGGSGGGGSLEMAEVQLVESGGGLVQPGRSLRLSCAASGFTFDDYAMHWVRQAPGKGLEWVSGISWNSGSIGYADSVKGRFTISRDNAKNSLYLQMNSLRAEDTALYYCANGDSNYYYGMDVWGQGTTVTVSSTSGQAGQHHHHHHGAYPYDVPDYAS

SEQ ID NO: 4548 - protein, 246 aa, Artificial Sequence
  Description of Artificial Sequence: Synthetic scFv sequence
SYVLTQPLSVSVAPGKTARITCGGNNIGSKTVHWYQQKPGQAPVLVIYYDSDRPSGIPERFSGSNSGNTATLTISRVEAGDEADYYCQVWDSSSDHRVFGGGTKLTVLGSRGGGGSGGGGSGGGGSLEMAQVQLQESGPGLVKPSETLSLTCNVSGYSISSGYFWGWIRQPPGKGLEWIGSIYHSRSTYYNPSLKSRVTISVDTSKNQFSLKLNSVTAADTAVYYCARGYGYFDYWGQGTLVTVSS

SEQ ID NO: 4549 - protein, 271 aa, Artificial Sequence
  Description of Artificial Sequence: Synthetic scFv sequence
SYVLTQPLSVSVAPGKTARITCGGNNIGSKTVHWYQQKPGQAPVLVIYYDSDRPSGIPERFSGSNSGNTATLTISRVEAGDEADYYCQVWDSSSDHRVFGGGTKLTVLGSRGGGGSGGGGSGGGGSLEMAQVQLQESGPGLVKPSETLSLTCNVSGYSISSGYFWGWIRQPPGKGLEWIGSIYHSRSTYYNPSLKSRVTISVDTSKNQFSLKLNSVTAADTAVYYCARGYGYFDYWGQGTLVTVSSTSGQAGQHHHHHHGAYPYDVPDYAS

SEQ ID NO: 4550 - protein, 253 aa, Artificial Sequence
  Description of Artificial Sequence: Synthetic scFv sequence
SYVLTQPPSVSVAPGKTARISCGGNDIGSKSVFWYQQRPGQAPVLVVYDDSDRPSGLPERFSGFNSGNTATLTISRVEAGDEADYYCQVWDSSSDHYVFGTGTKVTVLGSRGGGGSGGGGSGGGGSLEMAQVQLVESGGGLVQPGRSLRLSCAASGFTFDDYAMHWVRQAPGKGLEWVSGISWNSGSIGYADSVKGRFTISRDNAKNSLYLQMNSLRAEDTALYYCAKDITYGSGSYGAFDIWGQGTMVTVSS

SEQ ID NO: 4551 - protein, 278 aa, Artificial Sequence
  Description of Artificial Sequence: Synthetic scFv sequence
SYVLTQPPSVSVAPGKTARISCGGNDIGSKSVFWYQQRPGQAPVLVVYDDSDRPSGLPERFSGFNSGNTATLTISRVEAGDEADYYCQVWDSSSDHYVFGTGTKVTVLGSRGGGGSGGGGSGGGGSLEMAQVQLVESGGGLVQPGRSLRLSCAASGFTFDDYAMHWVRQAPGKGLEWVSGISWNSGSIGYADSVKGRFTISRDNAKNSLYLQMNSLRAEDTALYYCAKDITYGSGSYGAFDIWGQGTMVTVSSTSGQAGQHHHHHHGAYPYDVPDYAS

SEQ ID NO: 4552 - protein, 248 aa, Artificial Sequence
  Description of Artificial Sequence: Synthetic scFv sequence
SYVLTQPPSVSVAPGKTARITCGGNNIGSKSVHWYQQKPGQAPVLVIYYDSDRPSGIPERFSGSNSGNTATLTISRVEAGDEADYYCQVWDSSSDHPYVFGTGTKVTVLGSRGGGGSGGGGSGGGGSLEMAQMQLVQSGAEVKKPGASVKVSCKASGYTFTSYGISWVRQAPGQGLEWMGWISAYNGNTNYAQKLQGRVTMTTDTSTSTAYMELRSLRSDDTAVYYCARSMFGAHDSWGQGTLVTVSS

SEQ ID NO: 4553 - protein, 273 aa, Artificial Sequence
  Description of Artificial Sequence: Synthetic scFv sequence
SYVLTQPPSVSVAPGKTARITCGGNNIGSKSVHWYQQKPGQAPVLVIYYDSDRPSGIPERFSGSNSGNTATLTISRVEAGDEADYYCQVWDSSSDHPYVFGTGTKVTVLGSRGGGGSGGGGSGGGGSLEMAQMQLVQSGAEVKKPGASVKVSCKASGYTFTSYGISWVRQAPGQGLEWMGWISAYNGNTNYAQKLQGRVTMTTDTSTSTAYMELRSLRSDDTAVYYCARSMFGAHDSWGQGTLVTVSSTSGQAGQHHHHHHGAYPYDVPDYAS

SEQ ID NO: 4554 - protein, 249 aa, Artificial Sequence
  Description of Artificial Sequence: Synthetic scFv sequence
SYVLTQPPSVSVAPGKTARITCGGNNIGSKSVHWYQQKPGQAPVLVIYYDSDRPSGIPERFSGSNSGNTATLTISRVEAGDEADYYCQVWDSSSDHYVFGTGTKVTVLGSRGGGGSGGGGSGGGGSLEMAEVQLVETGGGLVQPGGSLRLSCAASGFTFSSYAMSWVRQAPGKGLEWVSAISGSDGSTYYADSVKGRFTISRDNSKNTLYLQMNSLRDEDTAVYYCARSHEANLVGDWWGQGTLVTVSS

SEQ ID NO: 4555 - protein, 274 aa, Artificial Sequence
  Description of Artificial Sequence: Synthetic scFv sequence
SYVLTQPPSVSVAPGKTARITCGGNNIGSKSVHWYQQKPGQAPVLVIYYDSDRPSGIPERFSGSNSGNTATLTISRVEAGDEADYYCQVWDSSSDHYVFGTGTKVTVLGSRGGGGSGGGGSGGGGSLEMAEVQLVETGGGLVQPGGSLRLSCAASGFTFSSYAMSWVRQAPGKGLEWVSAISGSDGSTYYADSVKGRFTISRDNSKNTLYLQMNSLRDEDTAVYYCARSHEANLVGDWWGQGTLVTVSSTSGQAGQHHHHHHGAYPYDVPDYAS

SEQ ID NO: 4556 - protein, 244 aa, Artificial Sequence
  Description of Artificial Sequence: Synthetic scFv sequence
SYVLTQPPSVSVAPGKTARITCGGNNIGSKSVHWYQQKPGQAPVLVIYYDSDRPSGIPERFSGSNSGNTATLTISRVEAGDEADYYCQVWDSSSDYVFGTGTKVTVLGSRGGGGSGGGGSGGGGSLEMAEVQLVETGGGLVKPGGSLRLSCAASGFTVSDYYMSWIRQAPGKGLEWISYISGSGNSIYYADSVKGRFTISRDNAKNSLDLQMTSLRAEDTAVYYCARSTKFDYWGQGTLVTVSS

SEQ ID NO: 4557 - protein, 269 aa, Artificial Sequence
  Description of Artificial Sequence: Synthetic scFv sequence
SYVLTQPPSVSVAPGKTARITCGGNNIGSKSVHWYQQKPGQAPVLVIYYDSDRPSGIPERFSGSNSGNTATLTISRVEAGDEADYYCQVWDSSSDYVFGTGTKVTVLGSRGGGGSGGGGSGGGGSLEMAEVQLVETGGGLVKPGGSLRLSCAASGFTVSDYYMSWIRQAPGKGLEWISYISGSGNSIYYADSVKGRFTISRDNAKNSLDLQMTSLRAEDTAVYYCARSTKFDYWGQGTLVTVSSTSGQAGQHHHHHHGAYPYDVPDYAS

SEQ ID NO: 4558 - protein, 270 aa, Artificial Sequence
  Description of Artificial Sequence: Synthetic scFv sequence
SYVLTQPPSVSVAPGKTARITCGGNNIGSKSVHWYQQKPGQAPVLVVYDDSDRPSGIPERFSGSNSGNTATLSISRVEAGDEADYYCQVWDSSSDHTVFGTGTKVTVLGSRGGGGSGGGGSGGGGSLEMAQVQLQQWGAGLLKPSETLSLTCAVYGGSFSGYYWSWIRQPPGKGLEWIGEINHSGSTNYNPSLKSRVTISVDTSKNQFSLKLSSVTAADTAVYYCARYYPGMDMWGQGTLVTVSSTSGQAGQHHHHHHGAYPYDVPDYAS

SEQ ID NO: 4559 - protein, 244 aa, Artificial Sequence
  Description of Artificial Sequence: Synthetic scFv sequence
SYVLTQPPSVSVAPGKTARITCGGNNIGSKSVHWYQQKPGQAPVLVVYDDSDRPSGIPERFSGSNSGNTATLSISRVEAGDEADYYCQVWDSSSDHTVFGTGTKVTVLGSRGGGGSGGGGSGGGGSLEMAQVQLQQWGAGLLKPSETLSLTCAVYGGSFSGYYWSWIRQPPGKGLEWIGEINHSGSTNYNPSLKSRVTISVDTSKNQFSLLSSVTAADTAVYYCARYYPGMDMWGQGTLVTVSS

SEQ ID NO: 4560 - protein, 248 aa, Artificial Sequence
  Description of Artificial Sequence: Synthetic scFv sequence
SYVLTQPPSVSVAPGKTARITCGGNNIGSKSVHWYQQKPGQAPVVVIHYDSDRPSGIPERFSGSNSGNTATLTISRVEAGDEADYYCQVWDSSSDHPYVFGTGTKVTVLGSRGGGGSGGGGSGGGGSLEMAEVQLVQSGAEVKKPGASVKVSCKASGYTFTTYGISWVRQAPGQGLEWMGWINTYNGHTNYAQKLQGRATMTADTSTNTAYMELRSLRSDDTAVYYCARVIYGSGDYWGQGTLVTVSS

SEQ ID NO: 4561 - protein, 273 aa, Artificial Sequence
  Description of Artificial Sequence: Synthetic scFv sequence
SYVLTQPPSVSVAPGKTARITCGGNNIGSKSVHWYQQKPGQAPVVVIHYDSDRPSGIPERFSGSNSGNTATLTISRVEAGDEADYYCQVWDSSSDHPYVFGTGTKVTVLGSRGGGGSGGGGSGGGGSLEMAEVQLVQSGAEVKKPGASVKVSCKASGYTFTTYGISWVRQAPGQGLEWMGWINTYNGHTNYAQKLQGRATMTADTSTNTAYMELRSLRSDDTAVYYCARVIYGSGDYWGQGTLVTVSSTSGQAGQHHHHHHGAYPYDVPDYAS

SEQ ID NO: 4562 - protein, 251 aa, Artificial Sequence
  Description of Artificial Sequence: Synthetic scFv sequence
SYVLTQPPSVSVSPGQTASITCSGDRLTNKYVSWYQQKPGQSPVLVIYEDAKRPSGIPARFSGSNSGNTATLTISGTQAMDESEYYCQAWDSSVVVFGGGTKLTVLGSRGGGGSGGGGSGGGGSLEMAEVQLVESGGGLVQPGRSLRLSCAASGFTFDDYAMHWVRQAPGKGLEWVSGISWNSGSIGYADSVKGRFTISRDNAKNSLYLQMNSLRDEDTALYYCAKDRGGGVIVKDAFDIWGQGTMVTVSS

SEQ ID NO: 4563 - protein, 276 aa, Artificial Sequence
  Description of Artificial Sequence: Synthetic scFv sequence
SYVLTQPPSVSVSPGQTASITCSGDRLTNKYVSWYQQKPGQSPVLVIYEDAKRPSGIPARFSGSNSGNTATLTISGTQAMDESEYYCQAWDSSVVVFGGGTKLTVLGSRGGGGSGGGGSGGGGSLEMAEVQLVESGGGLVQPGRSLRLSCAASGFTFDDYAMHWVRQAPGKGLEWVSGISWNSGSIGYADSVKGRFTISRDNAKNSLYLQMNSLRDEDTALYYCAKDRGGGVIVKDAFDIWGQGTMVTVSSTSGQAGQHHHHHHGAYPYDVPDYAS

SEQ ID NO: 4564 - protein, 256 aa, Artificial Sequence
  Description of Artificial Sequence: Synthetic scFv sequence
SRAAQPAMAQVQLQQSGAELVKPGASVKISCKASGYSFTGYFMNWVKQSHGKSLEWIGRIHPYDGDTFYNQNFKDKATLTVDKSSNTAHMELLSLTSEDFAVYYCTRYDGSRAMDYWGQGTTVTVSSGGGGSGGGGSGGGGSDIELTQSPASLAVSLGQRAIISCKASQSVSFAGTSLMHWYHQKPGQQPKLLIYRASNLEAGVPTRFSGSGSKTDFTLNIHPVEEEDAATYYCQQSREYPYTFGGGTKLEIKRAA

SEQ ID NO: 4565 - protein, 504 aa, Artificial Sequence
  Description of Artificial Sequence: Synthetic scFv sequence
QVQLQESGPGLVKPSQTLSLTCTVSGGSISSGAYYWTWIRQHPGKGLEWIGYIYYSGSTYYNPSLKSRVSISIDTSKNQFSLKLSSVTAADTAVYYCARGSSSWFDYWGQGTLVTVSSGGGGSGGGGSGGGGSQSVLTQPPSVSEAPRQRVTISCSGSSSNIGNNAVNWYQQLPGKAPKLLIYYDDMLSSGVSDRFSGSKSGTSASLAISGLQSEDEADYYCAAWDDSLNGVVFGGGTKLTVLSGGGGSEVQLVESGGGLVQPGGSLKLSCAASGFTFNKYAMNWVRQAPGKGLEWVARIRSKYNNYATYYADSVKDRFTISRDDSKNTAYLQMNNLKTEDTAVYYCVRHGNFGNSYISYWAYWGQGTLVTVSSGGGGSGGGGSGGGGSQTVVTQEPSLTVSPGGTVTLTCGSSTGAVTSGNYPNWVQQKPGQAPRGLIGGTKFLAPGTPARFSGSLLGGKAALTLSGVQPEDEAEYYCVLWYSNRWVFGGGTKLTVLHHHHHH

SEQ ID NO: 4566 - protein, 225 aa, Artificial Sequence
  Description of Artificial Sequence: Synthetic scFv sequence
EVQLQQSGPELVKPGASVKISCKASGYTFTDYYMNWVKQSHGKSLEWIGDINPNNGGTSYNQKFKGKATLTVDKSSSTAYMELRSLTSEDSAVYYCATYGLGGYWGQGTTLTVSSGNIVMTQSPKSMSMSVGERVTLTCKASENVVTYVSWYQQKPEQSPKLLIYGASNRYTGVPDRFTGSGSATDFTLTISSVQAEDLADYHCGQGYSYPYTFGGGTKLEVKKA

SEQ ID NO: 4567 - protein, 248 aa, Artificial Sequence
  Description of Artificial Sequence: Synthetic scFv sequence
HMQVQLQQPGAELVKPGASVKLSCKASGYTFTRYWMHWVRQRPGQGLEWIGEINPMDSRTNYNKKFKSKATLTVDKSSSTAYMQLSSLKSEDSAVYYCARPGRARGMDYWGQGNSVTVSSGGGGSGGGGSGGGGSGNIVLTQSPASLAVSLGQRAIISCLYGESVESYGNNFMHWYQQKPGQAPKLLIYLASNLESGVPARFSGSGSRTDFTLTIDPVEADDAATYYCQQNNEDPTFGGGTKLEIKKA

SEQ ID NO: 4568 - protein, 244 aa, Artificial Sequence
  Description of Artificial Sequence: Synthetic scFv sequence
MEVQLVESGGGLVKPGGSLKLSCAASGFTFSSYAMSWARQTPEKRLEWVATISDGGYYTYYPDNVKGRFTISRDNAKNNLYLQMSHLKSGDTAMYYCARYDSFDYWGQGTTLTVSSGGGGSGGGGSRGGGSGDIVLTQSPASLAVSLGQRATISYRASKSVSTSGYSYMHWNQQKPGQPPRLLIYLVSNLESGVPARFSGSGSGTDFTLNIHPVEEEDAATYYCQHIRELTTFGGGTKLEIKKA

SEQ ID NO: 4569 - protein, 230 aa, Artificial Sequence
  Description of Artificial Sequence: Synthetic scFv sequence
MQVQLQQPGAELVKPGASVKLSCKASGYTFTRYWMHWVRQRPGQGLEWIGEINPSNGRTNYNEKFKSKATLTVDKSSSTAYMQLSSLKSEDSAVYYCARPGRARGMDYWGQGNSVTVSSGNIVLTQSPASLAVSLGQRATISCRASESVESYGNNFMHWYQQKPGQAPKLLIYLASNLESGVPARFSGSGSRTDFTLTIDPVEADDAATYYCQQNNEDPTFGGGTKLEIK

SEQ ID NO: 4570 - protein, 237 aa, Artificial Sequence
  Description of Artificial Sequence: Synthetic scFv sequence
QAVVTQEPSLTVSPGGTVTLTCGSSTGAVTTSNYASWVQQKPDHLFRGLIGGTNNRAPGVPARFSGSLLGGKAALTISGAQPEDEAEYYCVLWYSDHWVFGGGTKLTVLGGGGSGGGGSGGGGSQVQLQESGPGLVKPSETLSITCTVSGFLLTDYGVNWVRQPPGKGLEWLGVLWGDGITDYNPSLKSRLTVSKDTSKNQVSLKMSSLTAADTAVYYCVTGLFDYWGQGTLLTVSS

SEQ ID NO: 4571 - protein, 237 aa, Artificial Sequence
  Description of Artificial Sequence: Synthetic scFv sequence
QAVVTQEPSLTVSPGGTVTLTCGSSTGAVTTSNYASWVQQKPDHLFRGLIGGTNNRAPGVPARFSGSLLGGKAALTISGAQPEDEAEYYCVLWYSDHWVFGGGTKLTVLGGGGSGGGGSGGGGSQVQLQESGPGLVKPSETLSLTCTVSGFLLTDYGVNWLRQPPGKGLEWIGVLWGDGITDYNPSLKSRVTISKDTSKNQFSLKLSSVTAADTAVYYCVTGLFDYWGQGTLVTVSS

SEQ ID NO: 4572 - protein, 237 aa, Artificial Sequence
  Description of Artificial Sequence: Synthetic scFv sequence
QAVVTQEPSLTVSPGGTVTLTCGSSTGAVTTSNYASWVQQKPGQAFRGLIGGTNNRAPGVPARFSGSLLGGKAALTISGAQPEDEAEYYCVLWYSDHWVFGGGTKLTVLGGGGSGGGGSGGGGSQVQLQESGPGLVKPSETLSITCTVSGFLLTDYGVNWVRQPPGKGLEWLGVLWGDGITDYNPSLKSRLTVSKDTSKNQVSLKMSSLTAADTAVYYCVTGLFDYWGQGTLLTVSS

SEQ ID NO: 4573 - protein, 237 aa, Artificial Sequence
  Description of Artificial Sequence: Synthetic scFv sequence
QAVVTQEPSLTVSPGGTVTLTCGSSTGAVTTSNYASWVQQKPGQAFRGLIGGTNNRAPGVPARFSGSLLGGKAALTISGAQPEDEAEYYCVLWYSDHWVFGGGTKLTVLGGGGSGGGGSGGGGSQVQLQESGPGLVKPSETLSLTCTVSGFLLTDYGVNWLRQPPGKGLEWIGVLWGDGITDYNPSLKSRVTISKDTSKNQFSLKLSSVTAADTAVYYCVTGLFDYWGQGTLVTVSS

SEQ ID NO: 4574 - protein, 237 aa, Artificial Sequence
  Description of Artificial Sequence: Synthetic scFv sequence
QAVVTQEPSLTVSPGGTVTLTCGSSTGAVTTSNYASWVQQKPGQAPRGLIGGTNNRAPGVPARFSGSLLGGKAALTISGAQPEDEAEYYCVLWYSDHWVFGGGTKLTVLGGGGSGGGGSGGGGSQVQLQESGPGLVKPSETLSITCTVSGFLLTDYGVNWVRQPPGKGLEWLGVLWGDGITDYNPSLKSRLTVSKDTSKNQVSLKMSSLTAADTAVYYCVTGLFDYWGQGTLLTVSS

SEQ ID NO: 4575 - protein, 237 aa, Artificial Sequence
  Description of Artificial Sequence: Synthetic scFv sequence
QAVVTQEPSLTVSPGGTVTLTCGSSTGAVTTSNYASWVQQKPGQAPRGLIGGTNNRAPGVPARFSGSLLGGKAALTISGAQPEDEAEYYCVLWYSDHWVFGGGTKLTVLGGGGSGGGGSGGGGSQVQLQESGPGLVKPSETLSLTCTVSGFLLTDYGVNWLRQPPGKGLEWIGVLWGDGITDYNPSLKSRVTISKDTSKNQFSLKLSSVTAADTAVYYCVTGLFDYWGQGTLVTVSS

SEQ ID NO: 4576 - protein, 239 aa, Artificial Sequence
  Description of Artificial Sequence: Synthetic scFv sequence
EIVMTQTPATLSVSAGERVTITCKASQSVSNDVTWYQQKPGQAPRLLIYSASNRYSGVPARFSGSGYGTEFTFTISSVQSEDFAVYFCQQDYSSFGQGTKLEIKRGGGGSGGGGSGGGGSQVQLVESGPGVVQPGRSLRISCAVSGFSVTNYGVHWVRQPPGKGLEWLGVIWAIGITNYNSAFMSRLTISKDNSKNTVYLQMNSLRAEDTAMYYCASRGGHYGYALDYWGQGTLVTVSS

SEQ ID NO: 4577 - protein, 524 aa, Artificial Sequence
  Description of Artificial Sequence: Synthetic scFv sequence
EIVMTQTPATLSVSAGERVTITCKASQSVSNDVTWYQQKPGQAPRLLIYSASNRYSGVPARFSGSGYGTEFTFTISSVQSEDFAVYFCQQDYSSFGQGTKLEIKRTVAAPSVFIFPPSDEQLKSGTASVVCLLNNFYPREAKVQWKVDNALQSGNSQESVTEQDSKDSTYSLSSTLTLSKADYEKHKVYACEVTHQGLSSPVTKSFNRGECGGGGSGGGGSASHVKLQESGPLTLSKADYEKHKVYACEVTHQGLSSPVTKSFNRGECGGGGSGGGGSASHVKLQESGPGLVQPSQSLSLTCTVSGFSLTDYGVHWVRQSPGKGLEWLGVIWSGGGTAYNTALISRLNIYRDNSKNQVFLEMNSLQAEDTAMYYCARRGSYPYNYFDAWGCGTTVTVSSGGGGSGGGGSGGGGSQAVVIQESALTTPPGETVTLTCGSSTGAVTASNYANWVQEKPDHCFTGLIGGHNNRPPGVPARFSGSLIGDKAALTIAGTQTEDEAIYFCALWYSDHWVIGGGTRLTVLG

SEQ ID NO: 4578 - protein, 518 aa, Artificial Sequence
  Description of Artificial Sequence: Synthetic scFv sequence
EIVMTQTPATLSVSAGERVTITCKASQSVSNDVTWYQQKPGQAPRLLIYSASNRYSGVPARFSGSGYGTEFTFTISSVQSEDFAVYFCQQDYSSFGQGTKLEIKRTVAAPSVFIFPPSDEQLKSGTASVVCLLNNFYPREAKVQWKVDNALQSGNSQESVTEQDSKDSTYSLSSTLTLSKADYEKHKVYACEVTHQGLSSPVTKSFNRGECGGGGSGGGGSQVQLVQSGGGLTLSKADYEKHKVYACEVTHQGLSSPVTKSFNRGECGGGGSGGGGSQVQLVQSGGGVVQPGRSLRLSCKASGYTFTRYTMHWVRQAPGKCLEWIGYINPSRGYTNYNQKFKDRFTISRDNSKNTAFLQMDSLRPEDTGVYFCARYYDDHYCLDYWGQGTPVTVSSGGGGSGGGGSGGGGSDIQMTQSPSSLSASVGDRVTITCSASSSVSYMNWYQQTPGKAPKRWIYDTSKLASGVPSRFSGSGSGTDYTFTISSLQPEDIATYYCQQWSSNPFTFGCGTKLQITR

SEQ ID NO: 4579 - protein, 239 aa, Artificial Sequence
  Description of Artificial Sequence: Synthetic scFv sequence
EIVMTQTPATLSVSAGERVTITCKASQSVSNHVTWYQQKPGQAPRLLIYSASNRYSGVPARFSGSGYGTEFTFTISSVQSEDFAVYFCQQDYSSFGQGTKLEIKRGGGGSGGGGSGGGGSQVQLVESGPGVVQPGRSLRISCAVSGFSVTNYGVHWVRQPPGKGLEWLGVIWAGGITNYNSAFMSRLTISKDNSKNTVYLQMNSLRAEDTAMYYCASRGGHYGYALDYWGQGTLVTVSS

SEQ ID NO: 4580 - protein, 239 aa, Artificial Sequence
  Description of Artificial Sequence: Synthetic scFv sequence
EIVMTQTPATLSVSAGERVTITCKASQSVSNHVTWYQQKPGQAPRLLIYSASNRYSGVPARFSGSGYGTEFTFTISSVQSEDFAVYFCQQDYSSFGQGTKLEIKRGGGGSGGGGSGGGGSQVQLVESGPGVVQPGRSLRISCAVSGFSVTNYGVHWVRQPPGKGLEWLGVIWAIGITNYNSAFMSRLTISKDNSKNTVYLQMNSLRAEDTAMYYCASRGGHYGYALDYWGQGTLVTVSS

SEQ ID NO: 4581 - protein, 239 aa, Artificial Sequence
  Description of Artificial Sequence: Synthetic scFv sequence
EIVMTQTPATLSVSAGERVTITCRASQSVSNDVTWYQQKPGQAPRLLIYSASNRYTGIPARFSGSGYGTEFTFTISSVQSEDFAVYFCQQDYSSFGQGTKLEIKRGGGGSGGGGSGGGGSQVQLVESGPGVVQPGRSLRLSCAVSGFSVTNYGVHWVRQPPGKGLEWLGVIWAGGITNYNSSVKGRLTISKDNSKNTVYLQMNSLRAEDTAVYYCASRGGHYGYALDYWGQGTLVTVSS

SEQ ID NO: 4582 - protein, 239 aa, Artificial Sequence
  Description of Artificial Sequence: Synthetic scFv sequence
EIVMTQTPATLSVSAGERVTITCRASQSVSNDVTWYQQKPGQAPRLLIYSASNRYTGIPARFSGSGYGTEFTFTISSVQSEDFAVYFCQQDYSSFGQGTKLEIKRGGGGSGGGGSGGGGSQVQLVESGPGVVQPGRSLRLSCAVSGFSVTNYGVHWVRQPPGKGLEWLGVIWAIGITNYNSSVKGRLTISKDNSKNTVYLQMNSLRAEDTAVYYCASRGGHYGYALDYWGQGTLVTVSS

SEQ ID NO: 4583 - protein, 239 aa, Artificial Sequence
  Description of Artificial Sequence: Synthetic scFv sequence
EIVMTQTPATLSVSAGERVTITCRASQSVSNHVTWYQQKPGQAPRLLIYSASNRYTGIPARFSGSGYGTEFTFTISSVQSEDFAVYFCQQDYSSFGQGTKLEIKRGGGGSGGGGSGGGGSQVQLVESGPGVVQPGRSLRLSCAVSGFSVTNYGVHWVRQPPGKGLEWLGVIWAGGITNYNSSVKGRLTISKDNSKNTVYLQMNSLRAEDTAVYYCASRGGHYGYALDYWGQGTLVTVSS

SEQ ID NO: 4584 - protein, 239 aa, Artificial Sequence
  Description of Artificial Sequence: Synthetic scFv sequence
EIVMTQTPATLSVSAGERVTITCRASQSVSNHVTWYQQKPGQAPRLLIYSASNRYTGIPARFSGSGYGTEFTFTISSVQSEDFAVYFCQQDYSSFGQGTKLEIKRGGGGSGGGGSGGGGSQVQLVESGPGVVQPGRSLRLSCAVSGFSVTNYGVHWVRQPPGKGLEWLGVIWAIGITNYNSSVKGRLTISKDNSKNTVYLQMNSLRAEDTAVYYCASRGGHYGYALDYWGQGTLVTVSS

SEQ ID NO: 4585 - protein, 249 aa, Artificial Sequence
  Description of Artificial Sequence: Synthetic scFv sequence
EVKLVESGGGLVLPGDSLRLSCATSEFTFTDYYMTWVRQPPRKALEWLGFIRNRANGYTTEYNPSVKGRFTISRDNSQSILYLQMNTLRTEDSATYYCARVSNWAFDYWGQGTTLTVSSGSTSGSGKPGSSEGSTKGDVVMTQTPLSLPVSLGDQASISCRSSQSLLKNNGNTFLHWYLQKSGQSPKLLIYKVSNRLSGVPDRFSGSGSGTYFTLKISRVEAEDLGVYFCSQSTHIPYTFGGGTKLEIK

SEQ ID NO: 4586 - protein, 244 aa, Artificial Sequence
  Description of Artificial Sequence: Synthetic scFv sequence
EVQLVQSGAEVEKPGASVKISCKASGSSFTGYNMNWVRQNIGKSLEWIGAIDPYYGGTSYNQKFKGRATLTVDKSTSTAYMHLKSLRSEDTAVYYCVSGMEYWGQGTSVTVSSGSTSGSGKPGSSEGSTKGDVVMTQTPLSLPVTPGEPASISCRSSQSLVHRNGNTYLHWYLQKPGQSPKLLIHKVSNRFSGVPDRFSGSGSGTDFTLKISRVEAEDLGVYFCSQSTHVPPLTFGAGTKLELK

SEQ ID NO: 4587 - protein, 239 aa, Artificial Sequence
  Description of Artificial Sequence: Synthetic scFv sequence
KIVMTQTPATLSVSAGERVTITCKASQSVSNDVTWYQQKPGQAPRLLIYSASNRYSGVPARFSGSGYGTEFTFTISSVQSEDFAVYFCQQDYSSFGQGTKLEIKRGGGGSGGGGSGGGGSQVQLVESGPGVVQPGRSLRISCAVSGFSVTNYGVHWVRQPPGKGLEWLGVIWAGGITNYNSAFMSRLTISKDNSKNTVYLQMNSLRAEDTAMYYCASRGGHYGYALDYWGQGTLVTVSS

SEQ ID NO: 4588 - protein, 239 aa, Artificial Sequence
  Description of Artificial Sequence: Synthetic scFv sequence
KIVMTQTPATLSVSAGERVTITCKASQSVSNDVTWYQQKPGQAPRLLIYSASNRYSGVPARFSGSGYGTEFTFTISSVQSEDFAVYFCQQDYSSFGQGTKLEIKRGGGGSGGGGSGGGGSQVQLVESGPGVVQPGRSLRISCAVSGFSVTNYGVHWVRQPPGKGLEWLGVIWAIGITNYNSAFMSRLTISKDNSKNTVYLQMNSLRAEDTAMYYCASRGGHYGYALDYWGQGTLVTVSS

SEQ ID NO: 4589 - protein, 239 aa, Artificial Sequence
  Description of Artificial Sequence: Synthetic scFv sequence
KIVMTQTPATLSVSAGERVTITCKASQSVSNHVTWYQQKPGQAPRLLIYSASNRYSGVPARFSGSGYGTEFTFTISSVQSEDFAVYFCQQDYSSFGQGTKLEIKRGGGGSGGGGSGGGGSQVQLVESGPGVVQPGRSLRISCAVSGFSVTNYGVHWVRQPPGKGLEWLGVIWAGGITNYNSAFMSRLTISKDNSKNTVYLQMNSLRAEDTAMYYCASRGGHYGYALDYWGQGTLVTVSS

SEQ ID NO: 4590 - protein, 239 aa, Artificial Sequence
  Description of Artificial Sequence: Synthetic scFv sequence
KIVMTQTPATLSVSAGERVTITCKASQSVSNHVTWYQQKPGQAPRLLIYSASNRYSGVPARFSGSGYGTEFTFTISSVQSEDFAVYFCQQDYSSFGQGTKLEIKRGGGGSGGGGSGGGGSQVQLVESGPGVVQPGRSLRISCAVSGFSVTNYGVHWVRQPPGKGLEWLGVIWAIGITNYNSAFMSRLTISKDNSKNTVYLQMNSLRAEDTAMYYCASRGGHYGYALDYWGQGTLVTVSS

SEQ ID NO: 4591 - protein, 239 aa, Artificial Sequence
  Description of Artificial Sequence: Synthetic scFv sequence
KIVMTQTPATLSVSAGERVTITCRASQSVSNDVTWYQQKPGQAPRLLIYSASNRYTGIPARFSGSGYGTEFTFTISSVQSEDFAVYFCQQDYSSFGQGTKLEIKRGGGGSGGGGSGGGGSQVQLVESGPGVVQPGRSLRLSCAVSGFSVTNYGVHWVRQPPGKGLEWLGVIWAGGITNYNSSVKGRLTISKDNSKNTVYLQMNSLRAEDTAVYYCASRGGHYGYALDYWGQGTLVTVSS

SEQ ID NO: 4592 - protein, 239 aa, Artificial Sequence
  Description of Artificial Sequence: Synthetic scFv sequence
KIVMTQTPATLSVSAGERVTITCRASQSVSNDVTWYQQKPGQAPRLLIYSASNRYTGIPARFSGSGYGTEFTFTISSVQSEDFAVYFCQQDYSSFGQGTKLEIKRGGGGSGGGGSGGGGSQVQLVESGPGVVQPGRSLRLSCAVSGFSVTNYGVHWVRQPPGKGLEWLGVIWAIGITNYNSSVKGRLTISKDNSKNTVYLQMNSLRAEDTAVYYCASRGGHYGYALDYWGQGTLVTVSS

SEQ ID NO: 4593 - protein, 100 aa, Artificial Sequence
  Description of Artificial Sequence: Synthetic scFv sequence
KIVMTQTPATLSVSAGERVTITCRASQSVSNHVTWYQQKPGQAPRLLIYSASNRYTGIPARFSGSGYGTEFTFTISSVQSEDFAVYFCQQDYSSFGQGTK

SEQ ID NO: 4594 - protein, 239 aa, Artificial Sequence
  Description of Artificial Sequence: Synthetic scFv sequence
KIVMTQTPATLSVSAGERVTITCRASQSVSNHVTWYQQKPGQAPRLLIYSASNRYTGIPARFSGSGYGTEFTFTISSVQSEDFAVYFCQQDYSSFGQGTKLEIKRGGGGSGGGGSGGGGSQVQLVESGPGVVQPGRSLRLSCAVSGFSVTNYGVHWVRQPPGKGLEWLGVIWAGGITNYNSSVKGRLTISKDNSKNTVYLQMNSLRAEDTAVYYCASRGGHYGYALDYWGQGTLVTVSS

SEQ ID NO: 4595 - protein, 139 aa, Artificial Sequence
  Description of Artificial Sequence: Synthetic scFv sequence
LEIKRGGGGSGGGGSGGGGSQVQLVESGPGVVQPGRSLRLSCAVSGFSVTNYGVHWVRQPPGKGLEWLGVIWAIGITNYNSSVKGRLTISKDNSKNTVYLQMNSLRAEDTAVYYCASRGGHYGYALDYWGQGTLVTVSS

SEQ ID NO: 4596 - protein, 243 aa, Artificial Sequence
  Description of Artificial Sequence: Synthetic scFv sequence
QVQLKESGPVLVAPSQTLSITCTVSGFSLASYNIHVWRQPPGKGLEWLGVIWAGGSTNYNSALMSRLSISKDNSKSQVFLQMNSLQTDDTAMYYCAKRSDDYSWFAYWGQGTLVTVSASGGGGSGGGGSGGGGSENVLTQSPAIMSASPGEKVTMTCRASSSVSSSYLHWYQQKSGASPKVWIYSTSNLASGVPGRFSGSGSGTSYSLTISSVEAEDAATYYCQQYSGYPITFGAGTKVEVKR

SEQ ID NO: 4597 - protein, 243 aa, Artificial Sequence
  Description of Artificial Sequence: Synthetic scFv sequence
QVQLKESGPVLVAPSQTLSITCTVSGFSLASYNIHWVRQPPGKGLEWLGVIWAGGSTNYNSALMSRLSISKDNSKSQVFLQMNSLQTDDTAMYYCAKRSDDYSWFAYWGQGTLVTVSASGGGGSGGGGSGGGGSENVLTQSPAIMSASPGEKVTMTCRASSSVSSSYLHWYQQKSGASPKVWIYSTSNLASGVPGRFSGSGSGTSYSLTISSVEAEDAATYYCQQYSGYPITFGAGTKVEVKR

SEQ ID NO: 4598 - protein, 242 aa, Artificial Sequence
  Description of Artificial Sequence: Synthetic scFv sequence
QVQLQESGPGLVKPSQTLSITCTVSGFSLASYNIHWVRQPPGKGLEWLGVIWAGGSTNYNSALMSRLTISKDNSKNQVFLKMSSLTAADTAVYYCAKRSDDYSWFAYWGQGTLVTVSSGGGGSGGGGSGGGGSENQMTQSPSSLSASVGDRVTMTCRASSSVSSSYLHWYQQKSGKAPKVWIYSTSNLASGVPSRFSGSGSGTDYTLTISSLQPEDFATYYCQQYSGYPITFGQGTKVEIKR

SEQ ID NO: 4599 - protein, 241 aa, Artificial Sequence
  Description of Artificial Sequence: Synthetic scFv sequence
QVQLQESGPGLVKPSQTLSITCTVSGFSLASYNIHWVRQPPGKGLEWLGVIWAGGSTNYNSALMSRLTISKDNSKNQVFLKMSSLTAADTAVYYCAKRSDDYSWFAYWGQTLVTVSSGGGGSGGGGSGGGGSENQMTQSPSSLSASVGDRVTMTCRASSSVSSSYLHWYQQKSGKAPKVWIYSTSNLASGVPSRFSGSGSGTDYTLTISSLQPEDFATYYCQQYSGYPITFGQGTKVEIKR

SEQ ID NO: 4600 - protein, 241 aa, Artificial Sequence
  Description of Artificial Sequence: Synthetic scFv sequence
QVQLVESGPGVVQPGRSLRISCAVSGFSVTNYGVHWVRQPPGKGLEWLGVIWAGGITNYNSAFMSRLTISKDNSKNTVYLQMNSLRAEDTAMYYCASRGGHYGYALDYWGQGTLVTVSSGSTSGSGKPGSSEGSTKGEIVMTQTPATLSVSAGERVTITCKASQSVSNDVTWYQQKPGQAPRLLIYSASNRYSGVPARFSGSGYGTEFTFTISSVQSEDFAVYFCQQDYSSFGQGTKLEIK

SEQ ID NO: 4601 - protein, 239 aa, Artificial Sequence
  Description of Artificial Sequence: Synthetic scFv sequence
EVQLLESGGGLVQPGGSLRLSCAASGFTFSSYAMSWVRQAPGKGLEWVSTIQKQGLPTEYADSVKGRFTISRDNSKNTLYLQMNSLRAEDTAVYYCAKNRAKFDYWGQGTLVTVSSGGGGSGGGGSGGGGSTDIQMTQSPSSLSASVGDRVTITCRASQSISSYLNWYQQKPGKAPKLLIYNASMLQSGVPSRFSGSGSGTDFTLTISSLQPEDFATYYCQQNRGFPLTFGQGTKVEIK

SEQ ID NO: 4602 - protein, 261 aa, Artificial Sequence
  Description of Artificial Sequence: Synthetic scFv sequence
MDWIWRILFLVGAATGAHSQVQLQQSGAELVRPGASVKLSCKASGYTFTDYEMHWVKQTPVHGLKWIGALDPKTGDTAYSQKFKGKATLTADKSSSTAYMELRSLTSEDSAVYYCTRFYSYTYWGQGTLVTVSAGGGGSGGGGSGGGGSDVVMTQTPLSLPVSLGDQASISCRSSQSLVHSNGNTYLHWYLQKPGQSPKLLIYKVSNRFSGVPDRFSGSGSGTDFTLKISRVEAEDLGVYFCSQNTHVPPTFGSGTKLEIK

SEQ ID NO: 4603 - protein, 242 aa, Artificial Sequence
  Description of Artificial Sequence: Synthetic scFv sequence
QVQLQQSGAELVRPGASVKLSCKASGYTFTDYEMHWVKQTPVHGLKWIGALDPKTGDTAYSQKFKGKATLTADKSSSTAYMELRSLTSEDSAVYYCTRFYSYTYWGQGTLVTVSAGGGGSGGGGSGGGGSDVVMTQTPLSLPVSLGDQASISCRSSQSLVHSNGNTYLHWYLQKPGQSPKLLIYKVSNRFSGVPDRFSGSGSGTDFTLKISRVEAEDLGVYFCSQNTHVPPTFGSGTKLEIK

SEQ ID NO: 4604 - protein, 248 aa, Artificial Sequence
  Description of Artificial Sequence: Synthetic scFv sequence
DIQLTQSPSSLSASVGDRVTITCRASQSISSYLNWYQQKPGKAPKLLIYAASSLQSGVPSRFSGSGSGTDFTLTISSLQPADFATYYCQQSYSVPYTFGQGTKLEIKRSRGGGGSGGGGSGGGGSLEMAEVQLVQSGGGLVQPGGSLRLSCATSGFTFNNYWMSWVRQAPGKGLEWVANIKQDGSEKYYADSVRGRFTISRDNAKNSLSLQLNNLRAEDTAVYYCARSMSTAWGYDEWGQGTLVTVSS

SEQ ID NO: 4605 - protein, 269 aa, Artificial Sequence
  Description of Artificial Sequence: Synthetic scFv sequence
MKKTAIAIAVALAGFATVAQAAELQAVLTQPPSASGTPGQRVTISCSGSSSNIGSNYVYWYQQLPGTAPKLLIYRNNQRPSGVPDRFSGSKSGTSASLAISGLRSEDEADYYCAAWDDSLSGRVFGTGTKVTVLGSRGGGGSGGGGSGGGGSLEMAQLQLVQSGAEVKKPGSSVKVSCKASGYTFNTYYLHWVRQAPGQGLEWMGRINPNNGGTNYAQKFQGRVTMTRDTSINTAYMELSRLRSDDTAVYYCARSYDYWGQGTLVTVSS

SEQ ID NO: 4606 - protein, 276 aa, Artificial Sequence
  Description of Artificial Sequence: Synthetic scFv sequence
MKKTAIAIAVALAGFATVAQAAELQPVLTQPPSASGTPGQRVTISCSGSSSNIGGNTVSWYQQVPGTAPRLLIFRNNQRPPGVPDRFSGSKSGTSASLAISGLRSEDEADYYCAAWDASRQGVFGGGTKLTVLGSRGGGGSGGGGSGGGGSLEMAQVQLVQSGAEVKKPGSSVKVSCKASGGTFRSYAITWVRQAPGQGLEWMGRIIPMLDITNYAQKFQGRVTITADKSTSTAYMELSSLRSEDTAVYYCARTYSRSPFHMEDFWGQGTLVTVSS

SEQ ID NO: 4607 - protein, 271 aa, Artificial Sequence
  Description of Artificial Sequence: Synthetic scFv sequence
MKKTAIAIAVALAGFATVAQAAELQSALTQPPSASGSPGQSVTISCTGTSRDAGGYNYFSWYQQHPGKAPKLLIYEVTKRPSGVPDRFSGSKSGKTASLTVSGLQADDEAVYYCSSYGGSNNFRVFGGGTKLTVLGSRGGGGSGGGGSGGGGSLEMAEVQLVESGGGVVRPGGSLRLSCAASGFTFGDYGMSWVRQAPGKGLEWVSGINWNGGSTGYADSVKGRFTISRDNAKNSLYLQMNSLRAEDTAVYYCARSKQDYWGQGTLVTVSS

SEQ ID NO: 4608 - protein, 273 aa, Artificial Sequence
  Description of Artificial Sequence: Synthetic scFv sequence
MKKTAIAIAVALAGFATVAQAAELQSVLTQPPSASGSPGQSLTISCTGTSSDVGGYNHVSWYQQYPGKAPKLMIYEVTKRPSGVPDRFSGSKSGNTASLTVSGLQAEDEADYYCSSYAGSAHWVFGGGTKLTVLGSRGGGGSGGGGSGGGGSLEMAEVQLVQSGAEVKKPGASVKVSCKASGYTFSRYYIHWVRQAPGQGLEWMGWMNPNSGNTGYAQKFQGRVTMTRNTSISTAYMELSSLRSEDTAVYYCARGRYHVIDYWGQGTLVTVSS

SEQ ID NO: 4609 - protein, 270 aa, Artificial Sequence
  Description of Artificial Sequence: Synthetic scFv sequence
MKKTAIAIAVALAGFATVAQAAELQSVLTQPPSASGTPGQRVTISCSGSSSNIGSNTVNWYQQLPGTAPKLLIYRNNQRPSGVPDRFSGSKSGTSASLAISGLRSEDEADYYCAAWDDSLSGRVFGGGTKLTVLGSRGGGGSGGGGSGGGGSLEMAEVQLVESGGGLVQPGGSLRLSCAASGFTFSSYAMSWVRQAPGKGLEWVSAISGSGGSTYYADSVKGRFTISRDNAKNTLYLQMNSLRAEDTAVYYCARKYQDVWGQGTLVTVSS

SEQ ID NO: 4610 - protein, 279 aa, Artificial Sequence
  Description of Artificial Sequence: Synthetic scFv sequence
MKKTAIAIAVALAGFATVAQAAELQSVLTQPPSVSGAPGQRVTISCTGSSSNIGAGYDVHWYQQLPGRAPKLLIYGNSNRPSGVPDRFSGSKSGTSASLAITGLQAEDEADYYCQSYDSSLRGYVFGTGTKVTVLGSRGGGGSGGGGSGGGGSLEMAQVQLVQSGGGVVQPGRSLRLSCAASGFSFSGTAMHWVRQAPGKGLEWVSTISSTGRSTYYRDSVKGRFTISRDNSKNTLYLQMNSLRGEDTAVYYCARPVSSMTLSIQSDGWGQGTLVTVSS

SEQ ID NO: 4611 - protein, 286 aa, Artificial Sequence
  Description of Artificial Sequence: Synthetic scFv sequence
MKKTAIAIAVALAGFATVAQAAELQSVVTQPPSVSAAPGQRVTISCSGGSSNIGNNYVSWFQQLPRTAPKLLIYDNNKRPSGIPDRFSGSKSGTSAALDITVLQTGDEADYYCGTWDSSLRNWVFGGGTKLTVLGSRGGGGSGGGGSGGGGSLEMAQMQLVQSGAEVKKPGASVKVSCKASGYTFTSYYMHWVRQAPGQGLEWMGIINPSGGSTSYAQKFQGRVTMTRDTSTSTVYMELSSLRSEDTAVYYCARGQKYHSQYSRGGTGGGMTQDMWGQGTLVTVSS

SEQ ID NO: 4612 - protein, 277 aa, Artificial Sequence
  Description of Artificial Sequence: Synthetic scFv sequence
MKKTAIAIAVALAGFATVAQAAELSYELTQPPSASGTPGQRVSISCSGSSSNIGSNTVNWYQQFPGTAPKLLIHSNNQRPSGVPDRFSGSKSGTSASLAISGPQSEDEADYYCAAWDDSVNGYVFGTGTKVTVLGSRGGGGSGGGGSGGGGSLEMAQLQLQESGGGSVQPGGSLRLSCAASGFTFSNYAMSWVRQAPGKGLEWVSAITNSGRSTYYADSVKGRFTISRDNSKNTLSLQMSSLRAEDTAVYYCARVTHRRYGSTFDSRGQGTLVTVSS

SEQ ID NO: 4613 - protein, 250 aa, Artificial Sequence
  Description of Artificial Sequence: Synthetic scFv sequence
NFMLTQPHSVSESPGKTVSISCTRTSGAIAGAYVQWFQQRPGSAPTTVIYDDNKRPSGVPDRFSGSIDKSSNSASLTISGLKTEDEADYYCQSYDYDSSNVLFGGGTKLTVLGSRGGGGSGGGGSGGGGSLEMAEVQLVESGGGLVQPGGSLRLSCAASGFTFSNYAMSWVRQAPGKGLEWVSAISGSGNTYYADSVKGRFTISRDNSKNTLYLQMNSLRAEDTAVYYCARGSVRYTDIWGQGTLVTVSS

SEQ ID NO: 4614 - protein, 253 aa, Artificial Sequence
  Description of Artificial Sequence: Synthetic scFv sequence
QAVLTQPPSASGTPGQRVTISCSGSSSNIGSNYVYWYQQLPGTAPKLLIYRNNQRPSGVPDRFSGSKSGTSASLAISGLRSEDEADYYCAAWDDSLSGYVFGTGTKVTVLGSRGGGGSGGGGSGGGGSLEMAQVQLVQSGAEVQRPGASVRVSCKAIAYTFTDYYIHWVRQAPGQGPEWMGWINPKSGRTQYAPKFQDRVTLARETPISTASMELRGLTSDDTAVYYCARVYGYSRWSGFDLWGQGTLVTVSS

SEQ ID NO: 4615 - protein, 256 aa, Artificial Sequence
  Description of Artificial Sequence: Synthetic scFv sequence
QSALTQPASVSGSPGQSITISCTGTSRDVGGYNYVSWYQQYPGKAPKLMIYEVSKRPSGVSNRFSGSKSGNTASLTISGLQAEDEADYYCSSYTSSSTLDFGTGTKVTVLGSRGGGGSGGGGSGGGGSLEMAQVQLVQSGAEVKQPGASVKVSCQASGYTFTTYYMHWVRQAPGQGLEWMGIINPNGGGTFYAQKFQDRVTMTRDTSTGTVYMELSSLRSDDTAVYYCARGHKVYKSHPTGGYDRWGQGTLVTVSS

SEQ ID NO: 4616 - protein, 253 aa, Artificial Sequence
  Description of Artificial Sequence: Synthetic scFv sequence
QSALTQPASVSGSPGQSITISCTGTSSDVGGYNFVSWYQQHPGKAPKVMIYDVSKRPSGISNRFSGSKSGNTASLTISGLQVEDEAEYYCSSYTSTRTVIFAGGTKVTVLGSRGGGGSGGGGSGGGGSLEMAQVQLVQSGAEVKKPGASVKVSCKASGYTFTSYYMHWVRQAPGQGLEWMGIINPSGGSTRYAQKFQGRVTMTRDTSTSTVYMELSSLRSEDTAVYYCARGSSRWGGWTGDYWGQGTLVTVSS

SEQ ID NO: 4617 - protein, 259 aa, Artificial Sequence
  Description of Artificial Sequence: Synthetic scFv sequence
QSALTQPASVSGSPGQSITISCTGTSSDVGGYNYVSWYQQHPGKAPKLMIYDVSKRPSGVSNRFSGSKSGNTASLTISGLQAEDEADYYCSSYTRSSTEVFGGGTKLTVLGSRGGGGSGGGGSGGGGSLEMAEVQLVQSGAEVKKPGASVKVSCKASGYTFTSYYMHWVRQAPGQGLEWMGIINPSGGSTSYAQKFQGRVTMTRDTSTSTVYMELSSLRSEDTAVYYCARGGSKKWSGEKWRRENFDYWGQGTLVTVSS

SEQ ID NO: 4618 - protein, 249 aa, Artificial Sequence
  Description of Artificial Sequence: Synthetic scFv sequence
QSALTQPASVSGSPGQSITISCTGTSSDVGGYNYVSWYQQSPGKAPRLMIYGVSKRPSGVPDRFSGSKSGNTASLTVSGLQAEDEADYYCSSYAGVNNLMFGGGTKLTVLGSRGGGGSGGGGSGGGGSLEMAQVQLVQSGAEVKKPGASVKVSCKASGYTFTSYYMHWVRQAPGQGLEWMGIINPSGGSTSYAQKFQGRVTMTRDTSTSTVYMELSSLRSEDTAVYYCARDVISGFDSWGQGTLVTVSS

SEQ ID NO: 4619 - protein, 247 aa, Artificial Sequence
  Description of Artificial Sequence: Synthetic scFv sequence
QSALTQPPSASGSPGQSVTISCTGTSRDAGGYNYFSWYQQHPGKAPKLLIYEVTKRPSGVPDRFSGSKSGKTASLTVSGLQADDEAVYYCSSYGGSNNFRVFGGGTKLTVLGSRGGGGSGGGGSGGGGSLEMAEVQLVESGGGVVRPGGSLRLSCAASGFTFGDYGMSWVRQAPGKGLEWVSGINWNGGSTGYADSVKGRFTISRDNAKNSLYLQMNSLRAEDTAVYYCARSKQDYWGQGTLVTVSS

SEQ ID NO: 4620 - protein, 249 aa, Artificial Sequence
  Description of Artificial Sequence: Synthetic scFv sequence
QSALTQPPSASGSPGQSVTISCTGTSSDIGGYNYVSWYQQHPGKAPKLMIYEVNKRPSGVPDRFSGSKSGNTASLTVSGLQAEDEADYYCASFAGRKTLVFGGGTKLTVLGSRGGGGSGGGGSGGGGSLEMAQVQLVQSGAEVKKPGASVKVSCRASGYTFTAYSLHWVRQAPGQGLEWMGWINPSSGGAVYAQKFQGRVTMTRDTSISTAYMELSGLRSDDTAVYYCARNVGGQADDWGQGTLVTVSS

SEQ ID NO: 4621 - protein, 248 aa, Artificial Sequence
  Description of Artificial Sequence: Synthetic scFv sequence
QSALTQPPSASGSPGQSVTISCTGTSSDVGGYNYVSWYQQHPGKAPKLMIYEVSKRPSGVPDRFSGSKSGNTASLTVSGLQAEDEADYYCSSYAGSNTLVFGGGTKLTVLGSRGGGGSGGGGSGGGGSLEMAQMQLVQSGAEVKKPGASVKVSCKASGYTFTSYYMHWVRQAPGQGLEWMGIINPSGGSSSYAQKFQGRVTMTRDTSTSTVYMELSSLRSEDTAVYYCARAGMGMDTWGQGTLVTVSS

SEQ ID NO: 4622 - protein, 248 aa, Artificial Sequence
  Description of Artificial Sequence: Synthetic scFv sequence
QSALTQPPSASGSPGQSVTISCTGTSSDVGGYNYVSWYQQHPGKAPKLMIYEVSKRPSGVPDRFSGSKSGNTASLTVSGLQAEDEADYYCSSYAGSNTLVFGGGTKLTVLGSRGGGGSGGGGSGGGGSLEMAQMQLVQSGAEVKKPGASVKVSCKASGYTFTSYYMHWVRQAPGQGLEWMGIINPSGGSTSYAQKFQGRVTMTRDTSTSTVYMELSSLRSEDTAVYYCARAGMGMDTWGQGTLVTVSS

SEQ ID NO: 4623 - protein, 249 aa, Artificial Sequence
  Description of Artificial Sequence: Synthetic scFv sequence
QSALTQPPSASGSPGQSVTISCTGTSTDIGGYNYVSWYQHHPSKAPKLMIYEVNKRPSGVPDRFSGSKSGNTASLTVSGLQAEDEADYYCASFAGRKTLVFGGGTKLTVLGSRGGGGSGGGGSGGGGSLEMAQVQLVQSGAEVKKPGASVKVSCRASGYTFTAYSLHWVRQAPGQGLEWMGWINPSSGGAVYAQKFQGRVTMTRDTSISTAYMELSGLRSDDTAVYYCARNVGGHADDWGQGTLVTVSS

SEQ ID NO: 4624 - protein, 246 aa, Artificial Sequence
  Description of Artificial Sequence: Synthetic scFv sequence
QSVLTQPASVSGSPGQSLTISCTGTSNDVGAYKYVSWYQQYPGKAPKLILYDVFKRPSGVSNRFSGSKSDNTASLTISGLQAEDEADYYCFSLTSSNTYVFGTGTKVTVLGSRGGGGSGGGGSGGGGSLEMAQMQLVQSGAEVKKPGASVKVSCKASGYTFNRYAITWVRQAPGQGLEWMGWISAYNGNSHYAQKLQGRVTMTTDTSTGTAYMELRRLRSDDTAVYYCARMAYDSWGQGTLVTVSS

SEQ ID NO: 4625 - protein, 249 aa, Artificial Sequence
  Description of Artificial Sequence: Synthetic scFv sequence
QSVLTQPPSASGTPGQRVTISCSGSRSNVGGNYVFWYQQVPGATPKLLIYRSNQRPSGVPDRFAGSKSGSSASLAISGLRSEDEADYYCATWDDSLSGFVFGTGTKVTVLGSRGGGGSGGGGSGGGGSLEMAEVQLVESGGGLVKPGGSLRLSCAASGFTFSDYYMSWIRQAPGKGLEWVSYISSSGSTIYYADSVKGRFTISRDNAKNSLYLQMNSLRAEDTAVYYCARGYGKAYDQWGQGTLVTVSS

SEQ ID NO: 4626 - protein, 252 aa, Artificial Sequence
  Description of Artificial Sequence: Synthetic scFv sequence
QSVLTQPPSASGTPGQRVTISCSGSSSNIGSNYVYWYQQLPGTAPKLLIYRNNQRPSGVPDRFSGSKSGTSASLAISGLRSEDEADYYCAAWDDSLSGWVFGGGTKLTVLGSRGGGGSGGGGSGGGGSLEMAQVQLVQSGAEVKKPGSSVKVSCKASGGTFSSYAISWVRQAPGQGLEWMGWMNPNSGNTGYAQKFQGRVTMTRNTSISTAYMELSSLRSEDTAVYYCARYQSYKGSQSDSWGQGTLVTVSS

SEQ ID NO: 4627 - protein, 249 aa, Artificial Sequence
  Description of Artificial Sequence: Synthetic scFv sequence
  MOD_RES (37)..(37): Any amino acid
QSVLTQPPSLSGAPGQRVTISCSGSRSNIGTNYVSWXQQLPGTAPKLLIYRNHQWPSGVPDRFTGSKSGTSASLAISGLRSEDEADYYCAAWDDNLSGVVFGGGTKLTVLGSRGGGGSGGGGSGGGGSLEMAEVQLVETGGGLVQPGGSLRLSCAASGSTFSSYAMSWVRQAPGKGLEWVSAISGRGRSTYYADSVKGRFTISRDNSKNTLYLQMNSLRAEDTAVYYCARYYKSSKDHWGQGTLVTVSS

SEQ ID NO: 4628 - protein, 252 aa, Artificial Sequence
  Description of Artificial Sequence: Synthetic scFv sequence
QSVLTQPPSVSAAPGQKVTIPCSGSRSNVGNYYVSWYQQLPGTAPKLLIYDNNKRPSGIPDRFSGSKSGTSATLGITGLQTGDEADYFCGTWDGSLSAHVFGTGTKVTVLGSRGGGGSGGGGSGGGGSLEMAQVQLVQSGSELKKPGASVRVSCTASGYTFTSYYMHWVRQAPGQGLEWMGVINPNAGSTRYAQKFQGRVTMSTDTSTSTAYMDLSSLRSEDTAVYYCARGMYRSLLFYDPWGQGTLVTVSS

SEQ ID NO: 4629 - protein, 250 aa, Artificial Sequence
  Description of Artificial Sequence: Synthetic scFv sequence
QSVVTQPASVSGSPGQSITISCTGTSSDVGGYNYVSWYQQHPGKAPKLMIYDVSKRPSGVSNRFSGSKSGNTASLTISGLQAEDEADYYCSSYTSSSTLVFGGGTKLTVLGSRGGGGSGGGGSGGGGSLEMAEVQLVESGGAFVQPGGSLRLSCAASGFTFSSYAMTWVRQAPGKGLEWVSTISGRGRSTFYADSVKGRFTISRDNSKNTLYLQMNSLRAEDTAVYYCARYYHAGAFDLWGQGTLVTVSS

SEQ ID NO: 4630 - protein, 248 aa, Artificial Sequence
  Description of Artificial Sequence: Synthetic scFv sequence
QSVVTQPPSMSAAPGQQVTISCSGGNSNIERNYVSWYLQLPGTAPKLVIFDNDRRPSGIPDRFSGSKSGTSATLGITGLQTGDEADYYCGTWDSSLRGWVFGGGTKLTVLGSRGGGGSGGGGSGGGGSLEMAEVQLVESGGGLIQPGGSLRLSCAASGFTFSNYAMNWVRQAPGKGLEWVSTINGRGSSTIYADSVKGRFTISRDNSKNTLYLQMNSLRAEDTATYYCARYISRGLGDSWGQGTLVTV

SEQ ID NO: 4631 - protein, 261 aa, Artificial Sequence
  Description of Artificial Sequence: Synthetic scFv sequence
QSVVTQPPSVSAAPGQKVTISCSGSSSNIGNNYVSWYQQLPGTAPKLLIYDNNKRPSGIPDRFSGSKSGTSATLGITGLQTGDEADYYCGTWDSSLSGVVFGGGTKLTVLGSRGGGGSGGGGSGGGGSLEMAQVQLVQSGGEVKKPGASVKVSCKASGFTFNTYGISWVRQAPGQGLEWMGWISANNGHTKSAQRFQDRVAMATDTSTSTAYMELRSLKFDDTAVYYCARGGYHHQMQRYYKATSVYSDYWGQGTLVTVSS

SEQ ID NO: 4632 - protein, 248 aa, Artificial Sequence
  Description of Artificial Sequence: Synthetic scFv sequence
QSVVTQPPSVSGAPGQRVTISCTGSSSNIGAGYDVHWYQQLPGTAPKLLIYGNSNRPSGVPDRFSGSKSGTSASLAITGLQAEDEADYYCQSYDSSLSGSYVFGTGTKLTVLGSRGGGGSGGGGSGGGGSLEMAEVQLVETGGNLVQPGASLRLSCAASGFSFSGTAMHWVRQAPGKGLEWVSTISSTGRSTYYRDSVKGRFTISRDNSKNTLYLQMNSLRGEDTAVYYCARVSFDYWGQGTLVTVSS

SEQ ID NO: 4633 - protein, 250 aa, Artificial Sequence
  Description of Artificial Sequence: Synthetic scFv sequence
SSELTQDPAVSVALGQTVRITCQGDSLRSYYASWYQQKPGQAPVLVIYGKNNRPSGIPDRFSGSSSGNTASLTITGAQAEDEADYYCNSRDSSGNPPVVFGGGTKLTVLGSRGGGGSGGGGSGGGGSLEMAQVQLVESGGGLVHPGGSLRLSCAASGFTFRSHSMNWVRQAPGKGLEWVSSISSDSTYTYYADSVKGRFTISRDNAKNSLYLQMNSLRAEDTAVYYCARSGGQWKYYDYWGQGTLVTVSS

SEQ ID NO: 4634 - protein, 251 aa, Artificial Sequence
  Description of Artificial Sequence: Synthetic scFv sequence
SYELTQPPSASGTPGQRVTISCSGSSSNIGSNYVSWYQQLPGTAPKLLIYRNNQRPSGVPDRFSGSKSGTSASLAISGLRSEDEADYYCAAWDDSLSGVVFGGGTKLTVLGSRGGGGSGGGGSGGGGSLEMAEVQLVQSGAEVKKPGSSVKVSCKASGGTFSSYAISWVRQAPGQGLEWMGGIIPIFGTAKYAQKFQGRVTITADESTSTAYMELSSLRSEDTAVYYCARSHVAWSLLDYWGQGTLVTVSS

SEQ ID NO: 4635 - protein, 244 aa, Artificial Sequence
  Description of Artificial Sequence: Synthetic scFv sequence
SYVLTQPPSASGTPGQRVTISCSGSSSNIGSNTVNWYQQLPGTAPKLLIYRNNQRPSGVPDRFSGSKSGTSASLAISGLRSEDEADYYCAAWDDSLSGLFGTGTKVTVLGSRGGGGSGGGGSGGGGSLEMAQMQLVQSGAEVKKPGASVKVSCKASEYTFTRHILHWVRQAPGQSLEWMGWINPGNGNTKYSQKFQVRVTFTRDTSASTVYMELSSLRSEDTAVYYCARLPDQWGQGTLVTVSS

SEQ ID NO: 4636 - protein, 263 aa, Artificial Sequence
  Description of Artificial Sequence: Synthetic scFv sequence
MAVLGLLFCLVTFPSCVLSQVQVKESGPFLVPPSQSLSITCTVSGFSLTTYGVSWIRQPPGKGLEWLGAIWGDGTTNYHSALISRLSISKDNSKSQVFLKLNSLQTDDTATYYCAKLGNYDALDYWGQGTSVTVSSGGGGSGGGGSGGGGSDVLMTQTPLSLPVSLGDQASISCRSSQSIVHSNGNTYLEWYLQKPGQSPNLLIYFVSNRFSGVPDRFSGSGSGTDFTLKISRVEAEDLGVYYCFQGSHVPWTFGGGTKLEIK

SEQ ID NO: 4637 - protein, 291 aa, Artificial Sequence
  Description of Artificial Sequence: Synthetic scFv sequence
MKYLLPTAAAGLLLLAAQPAMAQVQLVESGGGLVQPGGSLRLSCAASGFTFRSYAMSWVRQAPGKGLEWVSAISGRGDNTYYADSVKGRFTISRDNSKNTLYLQMNSLRAEDTAVYYCAKMTSNAFAFDYWGQGTLVTVSSGGGGSGGGGSGGGGSQSVLTQPPSVSGAPGQRVTISCTGSSSNIGAGYGVHWYQQLPGTAPKLLIYGNTNRPSGVPDRFSGFKSGTSASLAITGLQAEDEADYYCQSYDSSLSGWVFGGGTKLTVLGAAAEQKLISEEDLNGAAHHHHHH

SEQ ID NO: 4638 - protein, 291 aa, Artificial Sequence
  Description of Artificial Sequence: Synthetic scFv sequence
MKYLLPTAAAGLLLLAAQPAMAQVQLVQSGGGLVQPGRSLRLSCAASGFTFDDYAMHWVRQAPGKGLEWVSGISWNSGSIGYADSVKGRFTISRDNAKNSLYLQMNSLRPEDTAVYYCARDLGAKQWLEGFDYWGQGTLVTVSSGGGGSGGGGSGGGGSNFMLTQDPAVSVALGQTVRITCQGDSLRSYYASWYQQKPGQAPVLVIYGKNNRPSGIPDRFSGSTSGNSASLTITGAQAEDEADYYCNSRDSSGNHWVFGGGTKVTVLGAAAEQKLISEEDLNGAAHHHHHH

SEQ ID NO: 4639 - protein, 278 aa, Artificial Sequence
  Description of Artificial Sequence: Synthetic scFv sequence
MRFSTTLATAATALFFTASQVSAEVQLVESGGGLVQPGGSLRLSCAASGFNIKDTYIHWVRQAPGKGLEWVARIYPTNGYTRYADSVKGRFTISADTSKNTAYLQMNSLRAEDTAVYYCSRWGGDGFYAMDYWGQGTLVTVSSGGGGSGGGGSGGGGSGGGGSDIQMTQSPSSLSASVGDRVTITCRASQDVNTAVAWYQQKPGKAPKLLIYSASFLYSGVPSRFSGSRSGTDFTLTISSLQPEDFATYYCQQHYTTPPTFGQGTKVEIKSGHHHHHH

SEQ ID NO: 4640 - protein, 280 aa, Artificial Sequence
  Description of Artificial Sequence: Synthetic scFv sequence
MRFSTTLATAATALFFTASQVSAGHHHHHHSGEVQLVESGGGLVQPGGSLRLSCAASGFNIKDTYIHWVRQAPGKGLEWVARIYPTNGYTRYADSVKGRFTISADTSKNTAYLQMNSLRAEDTAVYYCSRWGGDGFYAMDYWGQGTLVTVSSGGGGSGGGGSGGGGSGGGGSDIQMTQSPSSLSASVGDRVTITCRASQDVNTAVAWYQQKPGKAPKLLIYSASFLYSGVPSRFSGSRSGTDFTLTISSLQPEDFATYYCQQHYTTPPTFGQGTKVEIKS

SEQ ID NO: 4641 - protein, 665 aa, Artificial Sequence
  Description of Artificial Sequence: Synthetic scFv sequence
MTVLAPAWSPTTYLLLLLLLSSGLSGTQDCSFQHSPISSDFAVKIRELSDYLLQDYPVTVASNLQDEELCGGLWRLVLAQRWMERLKTVAGSKMQGLLERVNTEIHFVTKCAFQPPPSCLRFVQTNISRLLQETSEQLVALKPWITRQNFSRCLELQCQPDSSTLPPPWSPRPLEATAPTAPEPKSCDKTHTCPPCPAPELLGGPSVFLFPPKPKDTLMISRTPEVTCVVVDVSHEDPEVKFNWYVDGVEVHNAKTKPREEQYNSTYRVVSVLTVLHQDWLNGKEYKCKVSNKALPAPIEKTISKAKGQPREPQVYTLPPSRDELTKNQVSLTCLVKGFYPSDIAVEWESNGQPENNYKTTPPVLDSDGSFFLYSKLTVDKSRWQQGNVFSCSVMHEALHNHYTQKSLSLSPGKEVQLVESGGGLVQPGGSLRLSCAASGFNIKDTYIHWVRQAPGKGLEWVARIYPTNGYTRYADSVKGRFTISADTSKNTAYLQMNSLRAEDTAVYYCSRWGGDGFYAMDYWGQGTLVTVSSASTKGPSVGGGGSGGGGSGGGGSDIQMTQSPSSLSASVGDRVTITCRASQDVNTAVAWYQQKPGKAPKLLIYSASFLYSGVPSRFSGSRSGTDFTLTISSLQPEDFATYYCQQHYTTPPTFGQGTKVEIKR

SEQ ID NO: 4642 - protein, 643 aa, Artificial Sequence
  Description of Artificial Sequence: Synthetic scFv sequence
EVQLLEQSGAELVRPGALVKLSCKASGFKIKDYFVNWVKQRPEQGLEWIGWIDPENDNSLYGPNFQDKASITADTSSNTGYLQLSGLTSEDTAVYYCALYYGSRGDAMDYWGQGTTVTVSSGGGGSGGGGSGGGGSELVMTQTPSSLSASLGDRVTISCRASQDISNYLNWYQQKPDGTVKLLIYYTSRLHSGVPSRFSGSGSGTDYSLTISNLEQEDIATYFCQQGNTLPLTFGAGTKLEIKSGGGGSEVQLVESGGGLVQPGGSLKLSCAASGFTFNSYAMNWVRQAPGKGLEWVARIRSKYNNYATYYADSVKGRFTISRDDSKNTAYLQMNNLKTEDTAVYYCVRHGNFGNSYVSWWAYWGQGTLVTVSSGGGGSGGGGSGGGGSQTVVTQEPSLTVSPGGTVTLTCGSSTGAVTSGNYPNWVQQKPGQAPRGLIGGTKFLAPGTPARFSGSLLGGKAALTLSGVQPEDEAEYYCVLWYSNRWVFGGGTKLTVLAAADYKDDDDKGSSHHHHHHEVQLVESGGGLVQPGGSLKLSCAASGFTFNKYAMNWVRQAPGKGLEWVARIRSKYNNYATYYADSVKDRFTISRDDSKNTAYLQMNNLKTEDTAVYYCVRHGNFGNSYISYWAYWGQGTLVTVSS

SEQ ID NO: 4643 - protein, 260 aa, Artificial Sequence
  Description of Artificial Sequence: Synthetic scFv sequence
DVQITQSPSYLAASPGETITINCRASKSISKYLAWYQEKPGKTNKLLIYSGSTLQSGIPSRFSGSGSGTDFTLTISSLEPEDFAMYYCQQHNEYPYTFGGGTKLEIKRGSTSGSGKPGSGEGSTKGEVMLVESGGGLVKPGGSLKLSCAASGFTFSSYAMSWVRQTPEKRLEWVATITSGGDYTFYPDSVKGRFTISRDNAKNTLYLQMSSRRSEDTAMYYCARHGEIGYGSSAWFAYWGQGTLVTVSAGGGGSGGGGSC

SEQ ID NO: 4644 - protein, 232 aa, Artificial Sequence
  Description of Artificial Sequence: Synthetic scFv sequence
QVQLVQSGAEVKEPGSSVKVSCKASGGTFSSYAIYWVRQAPGQGLEWMGWINPDSGDTNSAQQFQGRVTMTRDTSISTAYMELSRLRSDDTAMYYCARPPRGDGPDYWGQGTLVTVSSGGGGGSEIVLTQSPGTLSLSPGERATLSCRASQSVSSSYLAWYQQKPGQAPRLLIYGASSRATGIPDRFSGSGSGTDFTLTISRLEPEDFAVYYCQQYGSSPRTFGQGTKVDIK

SEQ ID NO: 4645 - protein, 244 aa, Artificial Sequence
  Description of Artificial Sequence: Synthetic scFv sequence
QVQLVQSGAEVKKPGASVKVSCKASGYTFSNYGITWVRQAPGQGLEWMGWINNGNTHYAQKFQGRVTMTTDTSTSTAYMELRSLRSDDTAVYYCARDPRGDDEPYWGQGTLVTVSSGGGGSGGGGSGGGGSEIVLTQSPLSLPVTLGQPASISCRSSQNLVYSDGNTYLSWFQQRPGQSPRRLIYKVSNRDSGVPDRFSGSGSGTDFTLKISRVEAEDIGVYYCMQGTHWPPRTFGQGTKVEIK

SEQ ID NO: 4646 - protein, 255 aa, Artificial Sequence
  Description of Artificial Sequence: Synthetic scFv sequence
EIVLTQSPGTLSLSPGERATLSCRASQSVGSSYLAWYQQKPGQAPRLLIYGAFSRATGIPDRFSGSGSGTDFTLTISRLEPEDFAVYYCQQYGSSPWTFGQGTKVEIKGSTSGSGKPGSGEGSTKGQVQLVESGGGVVQPGRSLRLSCAASGFTFSSYTMHWVRQAPGKGLEWVTFISYDGNNKYYADSVKGRFTISRDNSKNTLYLQMNSLRAEDTAIYYCARTGWLGPFDYWGQGTLVTVSSGGGGSGGGGSC

SEQ ID NO: 4647 - protein, 511 aa, Artificial Sequence
  Description of Artificial Sequence: Synthetic scFv sequence
METDTLLLWVLLLWVPAGNGEVQLVESGGGLVQPGGSLRLSCSFSGFSLSTSGMGVSWVRQAPGKGLEWLAHIYWDDDKRYNPSLKSRFTISRDNSKNTVYLQMNSLRAEDTAVYYCARRETVFYWYFDVWGQGTTVTVSSGGGGSGGGGSGGGTGDIVMTQSPDSLAVSLGDRATINCKASQSVDYDGDSYMNWYQQKPGQPPKLLIYAASNLESGVPDRFSGSGSGTDFTLTISSLQAEDVAVYYCQQSNEDPPTFGGGTKVEISSSSGSDKTHTCPPCPAPELLGGPSVFLFPPKPKDTLMISRTPEVTCWVDVSHEDPEVKFNWYVDGVEVHNAKTKPREEQYNSTYRWSVLTVLHQDWLNGKEYKCKVSNKALPAPIEKTISKAKGQPREPQVYTLPPSREEMTKNQVSLTCLVKGFYPSDIAVEWESNGQPENNYKTTPPVLDSDGSFFLYSKLTVDKSRWQQGNVFSCSVMHEALHNHYTQKSLSLSPGSSSSSSAWSHPQFEK

SEQ ID NO: 4648 - protein, 506 aa, Artificial Sequence
  Description of Artificial Sequence: Synthetic scFv sequence
METDTLLLWVLLLWVPAGNGEVQLVESGGGLVKPGGSLRLSCAASGFTFNTNAMNWVRQAPGKGLEWVARIRSKSNNYATYYADSVKDRFTLSRDDSKNTLYLQMNSLKTEDTAVYYCTRDRGWGAMDYWGQGTTVTVSSGGGGSGGGGSGGGTGDIQMTQSPSSLSASVGDRVTITCSASQDINNYLNWYQQKPGKAPKLLIYYTSSLHSGVPSRFSGSGSGTDFTLTLSSLQPEDFATYYCQQFSNLPWTFGGGTKLEISSSSGSDKTHTCPPCPAPELLGGPSVFLFPPKPKDTLMISRTPEVTCWVDVSHEDPEVKFNWYVDGVEVHNAKTKPREEQYNSTYRWSVLTVLHQDWLNGKEYKCKVSNKALPAPIEKTISKAKGQPREPQVYTLPPSREEMTKNQVSLTCLVKGFYPSDIAVEWESNGQPENNYKTTPPVLDSDGSFFLYSKLTVDKSRWQQGNVFSCSVMHEALHNHYTQKSLSLSPGSSSSSSAWSHPQFEK

SEQ ID NO: 4649 - protein, 244 aa, Artificial Sequence
  Description of Artificial Sequence: Synthetic scFv sequence
QVQLQQSGAEVKKPGASVKVSCKASGYTFTGYYMHWVRQAPGQGLEWMGRINPNSGGTNYAQKFQGRVTMTRDTSISTAYMELSRLRSEDTAVYYCARGRYYGMDVWGQGTMVTVSSGGGGSGGGGSGGGGSGGGGSEIVLTQSPATLSLSPGERATISCRASQSVSSNFAWYQQRPGQAPRLLIYDASNRATGIPPRFSGSGSGTDFTLTISSLEPEDFAAYYCHQRSNWLYTFGQGTKVDIK

SEQ ID NO: 4650 - protein, 252 aa, Artificial Sequence
  Description of Artificial Sequence: Synthetic scFv sequence
QVQLVQSGAEVKKPGASVKVSCKASGYTFTSYYMHWVRQAPGQGLEWMGIINPSGGSTSYAQKFQGRVTMTRDTSTSTVYMELSSLRSEDTAVYYCARYRLIAVAGDYYYYGMDVWGQGTMVTVSSGGGGSGGGGSGGGGSGGGGSDIQMTQSPSSVASVGDRVTITCRASQGVGRWLAWYQQKPGTAPKLLIYAASTLQSGVPSRFSGSGSGTDFTLTINNLQPEDFATYYCQQANSFPLTFGGGTRLEIK

SEQ ID NO: 4651 - protein, 508 aa, Artificial Sequence
  Description of Artificial Sequence: Synthetic scFv sequence
VLTQTPSPVSAAVGGTVTINCQSSPSLIYDSRLAWYQQKPGQPPKLLIYKASTLASGVPSRFSGSGSGTQFTLTISDVQSDDAATYYCQSHDTNPGSSTYGAPFGGGTEVVVQGGGGSGGGGSSGGGSEVQLMESGGGLVKPEGSLTLTCKVSGFSFSTSAISWVRQAPGKRPEWIAGIYNGGGSTYYASWVNGRFSISRSTSLNTVTLQMTRLTAADTATYFCARWIRIHYSFDLWGPGTLVTVSSSGGGGSEVQLVESGGGLVQPGGSLKLSCAASGFTFNKYAMNWVRQAPGKGLEWVARIRSKYNNYATYYADSVKDRFTISRDDSKNTAYLQMNNLKTEDTAVYYCVRHGNFGNSYISYWAYWGQGTLVTVSSGGGGSGGGGSGGGGSQTVVTQEPSLTVSPGGTVTLTCGSSTGAVTSGNYPNWVQQKPGQAPRGLIGGTKFLAPGTPARFSGSLLGGKAALTLSGVQPEDEAEYYCVLWYSNRWVFGGGTKLTVLHHHHHH

SEQ ID NO: 4652 - protein, 245 aa, Artificial Sequence
  Description of Artificial Sequence: Synthetic scFv sequence
EVQLVESGGGLVQPGRSLRLSCAASGFTFDDYAMHWVRQAPGKGLEWVSISWNSGSTGYADSVKGRFTISRDNAKNSLYLQMNSLRAEDTALYYCAKDSSSWYGGGSAFDIWGQGTMVTVSSGGGGSGGGGSGGGGSSSELTQDPAVSVALGQTVRITCQGDSLRSYYASWYQQKPGQAPVLVIYGKNNRPSGIPDRFSGSSSGNTASLTITGAQAEDEADYYCNSRGSSGNHYVFGTGTKVTVL

SEQ ID NO: 4653 - protein, 245 aa, Artificial Sequence
  Description of Artificial Sequence: Synthetic scFv sequence
EVQLVESGGGLVQPGRSLRLSCAASGFTFDDYAMHWVRQAPGKGLEWVSISWNSGSTGYADSVKGRFTISRDNAKNSLYLQMNSLRAEDTALYYCAKDSSSWYGGGSAFDIWGQGTMVTVSSGGGGSGGGGSGGGGSSSELTQEPAVSVALGQTVRITCQGDSLRSYYASWYQQKPGQAPVLVIFGRSRRPSGIPDRFSGSSSGNTASLIITGAQAEDEADYYCNSRDNTANHYVFGTGTKLTVL

SEQ ID NO: 4654 - protein, 268 aa, Artificial Sequence
  Description of Artificial Sequence: Synthetic scFv sequence
MVLLVTSLLLCELPHPAFLLIPDIQAQVQLVQSGAEVKRPGASVQVSCRASGYSINTYYMQWVRQAPGAGLEWMGVINPSGVTSYAQKFQGRVTLTNDTSTNTVYMQLNSLTSADTAVYYCARWALWGDFGMDVWGKGTLVTVSSGGGGSGGGGSGGGGSDIQMTQSPSTLSASIGDRVTITCRASEGIYHWLAWYQQKPGKAPKLLIYKASSLASGAPSRFSGSGSGTDFTLTISSLQPDDFATYYCQQYSNYPLTFGGGTKLEIKR

SEQ ID NO: 4655 - protein, 267 aa, Artificial Sequence
  Description of Artificial Sequence: Synthetic scFv sequence
MVLLVTSLLLCELPHPAFLLIPDIQQVQLQQSGPELEKPGASVKISCKASGYSFTGYTMNWVKQSHGKSLEWIGLITPYNGASSYNQKFRGKATLTVDKSSSTAYMDLLSLTSEDSAVYFCARGGYDGRGFDYWGQGTTVTVSSGGGGSGGGGSGGGGSDIELTQSPAIMSASPGEKVTMTCSASSSVSYMHWYQQKSGTSPKRWIYDTSKLASGVPGRFSGSGSGNSYSLTISSVEAEDDATYYCQQWSGYPLTFGAGTKLEIKAA

SEQ ID NO: 4656 - protein, 265 aa, Artificial Sequence
  Description of Artificial Sequence: Synthetic scFv sequence
MVLLVTSLLLCELPHPAFLLIPDIQQVQLQQSGPELEKPGASVKISCKASGYSFTGYTMNWVKQSHGKSLEWIGLITPYNGASSYNQKFRGKATLTVDKSSSTAYMDLLSLTSEDSAVYFCARGGYDGRGFDYWGQGTTVTVSSGGGGSGGGGSSGGGSDIELTQSPAIMSASPGEKVTMTCSASSSVSYMHWYQQKSGTSPKRWIYDTSKLASGVPGRFSGSGSGNSYSLTISSVEAEDDATYYCQQWSKHPLTFGAGTKLEIK

SEQ ID NO: 4657 - protein, 262 aa, Artificial Sequence
  Description of Artificial Sequence: Synthetic scFv sequence
QVQLQESGPGLVKPSETLSLTCTVSGGSVSSGSYYWSWIRQPPGKGLEWIGYIYYSGSTNYNPSHKSRVTISVDTSKNQFSLKLSSVTAADTAVYYCAREGKNGAFDIWGQGTMVTVSSSGGGGSGGGGSGGGGERHQMTQSPSSLSASVGDRVTITCRASQSISSYLNWYQQKPGKAPKLLIYAASSLQSGVPSRFSGSGSGTDFTLTISSLQPEDFATYYCQQSYSTPLTFGGGTKVEIKGQAGHHHHHHGDYKDDDDKG

SEQ ID NO: 4658 - protein, 243 aa, Artificial Sequence
  Description of Artificial Sequence: Synthetic scFv sequence
QVQLQQSGAEVKKPGASVKVSCKASGYTFTGYYMHWVRQAPGQGLEWMGINPNSGGTNYAQKFQGRVTMTRDTSISTAYMELSRLRSEDTAVYYCARGRYYGMDVWGQGTMVTVSSGGGGSGGGGSGGGGSGGGGSEIVLTQSPATLSLSPGERATISCRASQSVSSNFAWYQQRPGQAPRLLIYDASNRATGIPPRFSGSGSGTDFTLTISSLEPEDFAAYYCHQRSNWLYTFGQGTKVDIK

SEQ ID NO: 4659 - protein, 240 aa, Artificial Sequence
  Description of Artificial Sequence: Synthetic scFv sequence
QVQLQQSGAEVKKPGASVKVSCKASGYTFTGYYMHWVRQAPGQGLEWMGINPNSGGTNYAQNFQGRVTMTRDTSISTAYMELRRLRSDDTAVYYCASGWDFDYWGQGTLVTVSSGGGGSGGGGSGGGGSGGGGSDIRMTQSPSSLSASVGDRVTITCRASQSIRYYLSWYQQKPGKAPKLLIYTASILQNGVPSRFSGSGSGTDFTLTISSLQPEDFATYYCLQTYTTPDFGPGTKVEIK

SEQ ID NO: 4660 - protein, 249 aa, Artificial Sequence
  Description of Artificial Sequence: Synthetic scFv sequence
QVQLQQSGAEVKKPGASVKVSCKASGYTFTNYYMHWVRQAPGQGLEWMGLINPSGGYTTYAQKFQGRLTMTRDTSTSTVYMELSSLRSEDTAVYYCARIRSCGGDCYYFDNWGQGTLVTVSSGGGGSGGGGSGGGGSGGGGSDIQLTQSPSTLSASVGDRVTITCRASENVNIWLAWYQQKPGKAPKLLIYKSSSLASGVPSRFSGSGSGAEFTLTISSLQPDDFATYYCQQYQSYPLTFGGGTKVDIK

SEQ ID NO: 4661 - protein, 245 aa, Artificial Sequence
  Description of Artificial Sequence: Synthetic scFv sequence
QVQLQQSGAEVKKPGASVKVSCKTSGYPFTGYSLHWVRQAPGQGLEWMGINPNSGGTNYAQKFQGRVTMTRDTSISTAYMELSRLRSDDTAVYYCARDHYGGNSLFYWGQGTLVTVSSGGGGSGGGGSGGGGSGGGGSDIQLTQSPSSISASVGDTVSITCRASQDSGTWLAWYQQKPGKAPNLLMYDASTLEDGVPSRFSGSASGTEFTLTVNRLQPEDSATYYCQQYNSYPLTFGGGTKVDIK

SEQ ID NO: 4662 - protein, 239 aa, Artificial Sequence
  Description of Artificial Sequence: Synthetic scFv sequence
QVQLQQSGPELEKPGASVKISCKASGYSFTGYTMNWVKQSHGKSLEWIGLITPYNGASSYNQKFRGKATLTVDKSSSTAYMDLLSLTSEDSAVYFCARGGYDGRGFDYWGQGTTVTVSSGGGGSGGGGSGGGGSDIELTQSPAIMSASPGEKVTMTCSASSSVSYMHWYQQKSGTSPKRWIYDTSKLASGVPGRFSGSGSGNSYSLTISSVEAEDDATYYCQQWSGYPLTFGAGTKLEI

SEQ ID NO: 4663 - protein, 259 aa, Artificial Sequence
  Description of Artificial Sequence: Synthetic scFv sequence
QVQLQQSGPGLVTPSQTLSLTCAISGDSVSSNSATWNWIRQSPSRGLEWLGRTYYRSKWYNDYAVSVKSRMSINPDTSKNQFSLQLNSVTPEDTAVYYCARGMMTYYYGMDVWGQGTTVTVSSGILGSGGGGSGGGGSGGGGSQPVLTQSSSLSASPGASASLTCTLRSGINVGPYRIYWYQQKPGSPPQYLLNYKSDSDKQQGSGVPSRFSGSKDASANAGVLLISGLRSEDEADYYCMIWHSSAAVFGGGTQLTVLS

SEQ ID NO: 4664 - protein, 241 aa, Artificial Sequence
  Description of Artificial Sequence: Synthetic scFv sequence
QVQLVESGGGLVQPGGSLRLSCAASGFTFSSYWMHWVRQVPGKGLVWVSINTDGSTTTYADSVEGRFTISRDNAKNTLYLQMNSLRDDDTAVYYCVGGHWAVWGQGTTVTVSSGGGGSGGGGSGGGGSGGGGSDIQMTQSPSTLSASVGDRVTITCRASQSISDRLAWYQQKPGKAPKLLIYKASSLESGVPSRFSGSGSGTEFTLTISSLQPDDFAVYYCQQYGHLPMYTFGQGTKVEIK

SEQ ID NO: 4665 - protein, 240 aa, Artificial Sequence
  Description of Artificial Sequence: Synthetic scFv sequence
QVQLVQSGAEVEKPGASVKVSCKASGYTFTDYYMHWVRQAPGQGLEWMGINPNSGGTNYAQKFQGRVTMTRDTSISTAYMELSRLRSDDTAVYYCASGWDFDYWGQGTLVTVSSGGGGSGGGGSGGGGSGGGGSDIVMTQSPSSLSASVGDRVTITCRASQSIRYYLSWYQQKPGKAPKLLIYTASILQNGVPSRFSGSGSGTDFTLTISSLQPEDFATYYCLQTYTTPDFGPGTKVEIK

SEQ ID NO: 4666 - protein, 245 aa, Artificial Sequence
  Description of Artificial Sequence: Synthetic scFv sequence
QVQLVQSGAEVKKPGAPVKVSCKASGYTFTGYYMHWVRQAPGQGLEWMGINPNSGGTNYAQKFQGRVTMTRDTSISTAYMELSRLRSDDTAVYYCARGEWDGSYYYDYWGQGTLVTVSSGGGGSGGGGSGGGGSGGGGSDIVLTQTPSSLSASVGDRVTITCRASQSINTYLNWYQHKPGKAPKLLIYAASSLQSGVPSRFSGSGSGTDFTLTISSLQPEDFATYYCQQSFSPLTFGGGTKLEIK

SEQ ID NO: 4667 - protein, 248 aa, Artificial Sequence
  Description of Artificial Sequence: Synthetic scFv sequence
QVQLVQSGAEVKKPGASVEVSCKASGYTFTSYYMHWVRQAPGQGLEWMGLINPSGGSTGYAQKFQGRVTMTRDTSTSTVHMELSSLRSEDTAVYYCARGGYSSSSDAFDIWGQGTMVTVSSGGGGSGGGGSGGGGSGGGGSDIQMTQSPPSLSASVGDRVTITCRASQDISSALAWYQQKPGTPPKLLIYDASSLESGVPSRFSGSGSGTDFTLTISSLQPEDFATYYCQQFSSYPLTFGGGTRLEIK

SEQ ID NO: 4668 - protein, 252 aa, Artificial Sequence
  Description of Artificial Sequence: Synthetic scFv sequence
QVQLVQSGAEVKKPGASVKVSCKASGYTFTGYYMHWVRQAPGQGLEWMGINPNSGGTNYAQKFQGRVTMTRDTSISTAYMELSRLRSDDTAVYYCARDLRRTVVTPRAYYGMDVWGQGTTVTVSSGGGGSGGGGSGGGGSGGGGSDIQLTQSPSTLSASVGDRVTITCQASQDISNSLNWYQQKAGKAPKLLIYDASTLETGVPSRFSGSGSGTDFSFTISSLQPEDIATYYCQQHDNLPLTFGQGTKVEIK

SEQ ID NO: 4669 - protein, 245 aa, Artificial Sequence
  Description of Artificial Sequence: Synthetic scFv sequence
QVQLVQSGAEVKKPGASVKVSCKASGYTFTGYYMHWVRQAPGQGLEWMGINPNSGGTNYAQKFQGRVTMTTDTSTSTAYMELRSLRSDDTAVYYCARTTTSYAFDIWGQGTMVTVSSGGGGSGGGGSGGGGSGGGGSDIQLTQSPSTLSASVGDRVTITCRASQSISTWLAWYQQKPGKAPNLLIYKASTLESGVPSRFSGSGSGTEFTLTISSLQPDDFATYYCQQYNTYSPYTFGQGTKLEIK

SEQ ID NO: 4670 - protein, 254 aa, Artificial Sequence
  Description of Artificial Sequence: Synthetic scFv sequence
QVQLVQSGAEVKKPGASVKVSCKASGYTFTSYGISWVRQAPGQGLEWMGISAYNGNTNYAQKLQGRVTMTTDTSTSTAYMELRSLRSDDTAVYYCARVAGGIYYYYGMDVWGQGTTITVSSGGGGSGGGGSGGGGSGGGGSDIVMTQTPDSLAVSLGERATISCKSSHSVLYNRNNKNYLAWYQQKPGQPPKLLFYWASTRKSGVPDRFSGSGSGTDFTLTISSLQPEDFATYFCQQTQTFPLTFGQGTRLEIN

SEQ ID NO: 4671 - protein, 251 aa, Artificial Sequence
  Description of Artificial Sequence: Synthetic scFv sequence
QVQLVQSGAEVKKPGASVKVSCKASGYTFTSYYMHWVRQAPGQGLEWMGLINPSGGSTSYAQKFQGRVTMTRDTSTSTVYMELSSLRSEDTAVYYCARYRLIAVAGDYYYYGMDVWGQGTMVTVSSGGGGSGGGGSGGGGSGGGGSDIQMTQSPSSVASVGDRVTITCRASQGVGRWLAWYQQKPGTAPKLLIYAASTLQGVPSRFSGSGSGTDFTLTINNLQPEDFATYYCQQANSFPLTFGGGTRLEIK

SEQ ID NO: 4672 - protein, 249 aa, Artificial Sequence
  Description of Artificial Sequence: Synthetic scFv sequence
QVQLVQSGAEVRAPGASVKISCKASGFTFRGYYIHWVRQAPGQGLEWMGLINPSGGSRAYAQKFQGRVTMTRDTSTSTVYMELSSLRSDDTAMYYCARTASCGGDCYYLDYWGQGTLVTVSSGGGGSGGGGSGGGGSGGGGSDIQMTQSPPTLSASVGDRVTITCRASENVNIWLAWYQQKPGKAPKLLIYKSSSLASGVPSRFSGSGSGAEFTLTISSLQPDDFATYYCQQYQSYPLTFGGGTKVDIK

SEQ ID NO: 4673 - protein, 252 aa, Artificial Sequence
  Description of Artificial Sequence: Synthetic scFv sequence
QVQLVQSGAEVRRPGASVKISCRASGDTSTRHYIHWLRQAPGQGPEWMGINPTTGPATGSPAYAQMLQGRVTMTRDTSTRTVYMELRSLRFEDTAVYYCARSVVGRSAPYYFDYWGQGTLVTVSSGGGGSGGGGSGGGGSGGGGSDIQMTQSPSSLSASVGDRVTITCRASQGISDYSAWYQQKPGKAPKLLIYAASTLQSGVPSRFSGSGSGTDFTLTISYLQSEDFATYYCQQYYSYPLTFGGGTKVDIK

SEQ ID NO: 4674 - protein, 249 aa, Artificial Sequence
  Description of Artificial Sequence: Synthetic scFv sequence
QVQLVQSGGGLVKPGGSLRLSCEASGFIFSDYYMGWIRQAPGKGLEWVSIIGRSGSSMYYADSVKGRFTFSRDNAKNSLYLQMNSLRAEDTAVYYCAASPVVAATEDFQHWGQGTLVTVSSGGGGSGGGGSGGGGSGGGGSDIVMTQTPATLSLSPGERATLSCRASQSVTSNYLAWYQQKPGQAPRLLLFGASTRATGIPDRFSGSGSGTDFTLTINRLEPEDFAMYYCQQYGSAPVTFGQGTKLEIK

SEQ ID NO: 4675 - protein, 248 aa, Artificial Sequence
  Description of Artificial Sequence: Synthetic scFv sequence
QVQLVQSGGGLVQPGGSLRLSCAASGFTFSSYAMSWVRQAPGKGLEWVSISGSGGSTYYADSVKGRFTISRDNSKNTLYLQMNSLRAEDTAVYYCAKREAAAGHDWYFDLWGRGTLVTVSSGGGGSGGGGSGGGGSGGGGSDIRVTQSPSSLSASVGDRVTITCRASQSISSYLNWYQQKPGKAPKLLIYAASSLQSGVPSRFSGSGSGTDFTLTISSLQPEDFATYYCQQSYSIPLTFGQGTKVEIK

SEQ ID NO: 4676 - protein, 250 aa, Artificial Sequence
  Description of Artificial Sequence: Synthetic scFv sequence
QVQLVQSGGGLVQPGGSLRLSCAASGFTFSSYWMHWVRQAPGKGLVWVSINSDGSSTSYADSVKGRFTISRDNAKNTLYLQMNSLRAEDTAVYYCVRTGWVGSYYYYMDVWGKGTTVTVSSGGGGSGGGGSGGGGSGGGGSEIVLTQSPGTLSLSPGERATLSCRASQSVSSNYLAWYQQKPGQPPRLLIYDVSTRATGIPARFSGGGSGTDFTLTISSLEPEDFAVYYCQQRSNWPPWTFGQGTKVEIK

SEQ ID NO: 4677 - protein, 243 aa, Artificial Sequence
  Description of Artificial Sequence: Synthetic scFv sequence
QVQLVQSGGGLVQPGRSLRLSCAASGFTFDDYAMHWVRQAPGKGLEWVSISWNSGSIGYADSVKGRFTISRDNAKNSLYLQMNSLRAEDTAVYYCAKDGSSSWSWGYFDYWGQGTLVTVSSGGGGSGGGGSGGGGSSSELTQDPAVSVALGQTVRTTCQGDALRSYYASWYQQKPGQAPMLVIYGKNNRPSGIPDRFSGSDSGDTASLTITGAQAEDEADYYCNSRDSSGYPVFGTGTKVTVL

SEQ ID NO: 4678 - protein, 249 aa, Artificial Sequence
  Description of Artificial Sequence: Synthetic scFv sequence
QVQLVQSGGGVVQPGRSLRLSCAASGFTFSSYAMHWVRQAPGKGLEWVAISYDGSNKYYADSVKGRFTISRDNSKNTLYLQMNSLRAEDTAVYYCARWKVSSSSPAFDYWGQGTLVTVSSGGGGSGGGGSGGGGSGGGGSEIVLTQSPATLSLSPGERAILSCRASQSVYTKYLGWYQQKPGQAPRLLIYDASTRATGIPDRFSGSGSGTDFTLTINRLEPEDFAVYYCQHYGGSPLITFGQGTRLEIK

SEQ ID NO: 4679 - protein, 249 aa, Artificial Sequence
  Description of Artificial Sequence: Synthetic scFv sequence
QVQLVQSGGGVVQPGRSLRLSCAASGFTFSSYGMHWVRQAPGKGLEWVAISYDGSNKYYADSVKGRFTISRDNSKNTLYLQMNSLRAEDTAVYYCAKGYSRYYYYGMDVWGQGTTVTVSSGGGGSGGGGSGGGGSGGGGSEIVMTQSPATLSLSPGERAILSCRASQSVYTKYLGWYQQKPGQAPRLLIYDASTRATGIPDRFSGSGSGTDFTLTINRLEPEDFAVYYCQHYGGSPLITFGQGTKVDIK

SEQ ID NO: 4680 - protein, 247 aa, Artificial Sequence
  Description of Artificial Sequence: Synthetic scFv sequence
QVQLVQSWAEVKKPGASVKVSCKASGYTFTSYYMHWVRQAPGQGLEWMGLINPSGGSTSYAQKFQGRVTMTRDTSTSTVYMELSNLRSEDTAVYYCARSPRVTTGYFDYWGQGTLVTVSSGGGGSGGGGSGGGGSGGGGSDIQLTQSPSTLSASVGDRVTITCRASQSISSWLAWYQQKPGKAPKLLIYKASSLESGVPSRFSGSGSGTEFTLTISSLQPDDFATYYCQQYSSYPLTFGGGTRLEIK

SEQ ID NO: 4681 - protein, 246 aa, Artificial Sequence
  Description of Artificial Sequence: Synthetic scFv sequence
QITLKESGPALVKPTQTLTLTCTFSGFSLSTAGVHVGWIRQPPGKALEWLALISWADDKRYRPSLRSRLDITRVTSKDQVVLSMTNMQPEDTATYYCALQGFDGYEANWGPGTLVTVSSGGGGSGGGGSGGGGSGGGGSDIVMTQSPSSLSASAGDRVTITCRASRGISSALAWYQQKPGKPPKLLIYDASSLESGVPSRFSGSGSGTDFTLTIDSLEPEDFATYYCQQSYSTPWTFGQGTKVDIK

SEQ ID NO: 4682 - protein, 493 aa, Artificial Sequence
  Description of Artificial Sequence: Synthetic scFv sequence
MALPVTALLLPLALLLHAARPEVQLQQSGGERATPGASVKMSCKTSGYTFTNYWMHWVKQRPGQGLEWIGYINPSSGYTQYNQKFKDKATLTADKSSSTAYIQLSSLTSEDSAVYYCSTYYGDYLFPYWGQGTLVTVSAGGGGSGGGGSGGGGSDVLMTQTPLSLPVSLGDQASISCRSSQDIVYGNGNTYLEWYLQKPGQSPKLLIYKVSNRFSGVPDRFSGSGSGTDFTLKISRVEAEDLGVYYCFQGSHVPYTFGGGTKLEIKRAAAIEVEQKLISEEDLLDNEKSNGTIIHVKGKHLCPSPLFPGPSKPFWVLVVVGGVLACYSLLVTVAFIIFWVRSKRSRLLHSDYMNMTPRRPGPTRKHYQPYAPPRDFAAYRSRVKFSRSADAPAYQQGQNQLYNELNLGRREEYDVLDKRRGRDPEMGGKPRRKNPQEGLYNELQKDKMAEAYSEIGMKGERRRGKGHDGLYQGLSTATKDTYDALHMQALPPR

SEQ ID NO: 4683 - protein, 487 aa, Artificial Sequence
  Description of Artificial Sequence: Synthetic scFv sequence
MALPVTALLLPLALLLHAARPEVQLQQSGGERATPGASVKMSCKTSGYTFTNYWMHWVKQRPGQGLEWIGYINPSSGYTQYNQKFKDKATLTADKSSSTAYIQLSSLTSEDSAVYYCSTYYGDYLFPYWGQGTLVTVSAGGGGSGGGGSGGGGSDVLMTQTPLSLPVSLGDQASISCRSSQDIVYGNGNTYLEWYLQKPGQSPKLLIYKVSNRFSGVPDRFSGSGSGTDFTLKISRVEAEDLGVYYCFQGSHVPYTFGGGTKLEIKRAAAIEFMYPPPYLDNERSNGTIIHIKEKHLCHTQSSPKLFWALVVVAGVLFCYGLLVTVALCVIWTNSRRNRLLQSDYMNMTPRRPGLTRKPYQPYAPARDFAAYRPRAKFSRSAETAANLQDPNQLYNELNLGRREEYDVLEKKRARDPEMGGKQQRRRNPQEGVYNALQKDKMAEAYSEIGTKGERRRGKGHDGLYQGLSTATKDTYDALHMQTLAPR

SEQ ID NO: 4684 - protein, 252 aa, Artificial Sequence
  Description of Artificial Sequence: Synthetic scFv sequence
EIVLTQSPATLSLSPGERATLSCRASQSVSSYLAWYQQKPGQAPRLLIYDASNRATGIPARFSGSGSGTDFTLTISSLEPEDFAVYYCQQSSNWPRTFGQGTKVEIKRGSTSGSGKPGSGEGSTKGQVQLVESGGGVVQPGRSLRLDCKASGITFSNSGMHWVRQAPGKGLEWVAVIWYDGSKRYYADSVKGRFTISRDNSKNTLFLQMNSLRAEDTAVYYCATNDDYWGQGTLVTVSSSSGGGGSGGGGSC

SEQ ID NO: 4685 - protein, 241 aa, Artificial Sequence
  Description of Artificial Sequence: Synthetic scFv sequence
VQLQESGPDLVKPSQSLSLTCTVTGYSITSGYSWHWIRQFPGNKLEWMGYIHYSGDTDYNPSLKSRFSITRDTSKNQFFLQLNSVTTEDTATYYCATPGGFVYWGQGTLVTVSAGGGGSGGGGSGGGGSDVVMTQTPLTLSVTIGQPASISCKSSQSLLDSDGKTYLHWLLQRPGQSPKRLIFLVSKLDSGVPDRFTGSGSGTDFTLKISRVEAEDLGVYYCWQGTHFPQTFGGGTKLEIK

SEQ ID NO: 4686 - protein, 112 aa, Artificial Sequence
  Description of Artificial Sequence: Synthetic scFv sequence
DVVMTQTPLTLSVTIGQPASISCKSSQSLLDSDGKTYLHWLLQRPGQSPKRLIFLVSKLDSGVPDRFTGSGSGTDFTLKISRVEAEDLGVYYCWQGTHFPQTFGGGTKLEIK

SEQ ID NO: 4687 - protein, 114 aa, Artificial Sequence
  Description of Artificial Sequence: Synthetic scFv sequence
VQLQESGPDLVKPSQSLSLTCTVTGYSITSGYSWHWIRQFPGNKLEWMGYIHYSGDTDYNPSLKSRFSITRDTSKNQFFLQLNSVTTEDTATYYCATPGGFVYWGQGTLVTVSA

SEQ ID NO: 4688 - protein, 112 aa, Artificial Sequence
  Description of Artificial Sequence: Synthetic scFv sequence
DVVMTQTPLSLPVSLGDQASISCRSSQSLLKNNGNTFLHWYLQKSGQSPKLLIYKVSNRLSGVPDRFSGSGSGTYFTLKISRVEAEDLGVYFCSQSTHIPYTFGGGTKLEIK

SEQ ID NO: 4689 - protein, 47 aa, Artificial Sequence
  Description of Artificial Sequence: Synthetic scFv sequence
EVKLVESGGGLVLPGDSLRLSCATSEFTFTDYYMTWVRQPPRKALEW

SEQ ID NO: 4690 - protein, 219 aa, Artificial Sequence
  Description of Artificial Sequence: Synthetic scFv sequence
DIQMTQSPDSLPVTPGEPASISCRSSQSLLHSNGYNYLDWYLQKAGQSPQLLIYLGSNRASGVPDRFSGSGSGTDFTLKISRVEAEDVGVYYCQQYYNHPTTFGQGTKLEIKRTVAAPSVFIFPPSDEQLKSGTASVVCLLNNFYPREAKVQWKVDNALQSGNSQESVTEQDSKDSTYSLSSTLTLSKADYEKHKVYACEVTHQGLSSPVTKSFNRGEC

SEQ ID NO: 4691 - protein, 240 aa, Artificial Sequence
  Description of Artificial Sequence: Synthetic scFv sequence
QVQLQQSGAEVKKPGASVKVSCKASGYTFTGYYMHWVRQAPGQGLEWMGRINPNSGGTNYAQKFQGRVTMTRDTSISTAYMELSRLRSEDTAVYYCARGRYYGMDVWGQGTMVTVSSGGGGSGGGGSGGGGSGGGGSEIVLTQSPATLSLSPGERATISCRASQSVSSNFAWYQQRPGQAPRLLIYDASNRATGIPPRFSGSGSGTDFTLTISSLEPEDFAAYYCHQRSNWLYTFGQGTK

SEQ ID NO: 4692 - protein, 253 aa, Artificial Sequence
  Description of Artificial Sequence: Synthetic scFv sequence
QVQLVQSGAEVKKPGASVKVSCKASGYTFTSYYMHWVRQAPGQGLEWMGIINPSGGSTSYAQKFQGRVTMTRDTSTSTVYMELSSLRSEDTAVYYCARYRLIAVAGDYYYYGMDVWGQGTMVTVSSGGGGSGGGGSGGGGSGGGGSDIQMTQSPSSVSASVGDRVTITCRASQGVGRWLAWYQQKPGTAPKLLIYAASTLQSGVPSRFSGSGSGTDFTLTINNLQPEDFATYYCQQANSFPLTFGGGTRLEIK

SEQ ID NO: 4693 - protein, 255 aa, Artificial Sequence
  Description of Artificial Sequence: Synthetic scFv sequence
QVQLVQSGAEVKKPGASVKVSCKASGYTFTSYGISWVRQAPGQGLEWMGWISAYNGNTNYAQKLQGRVTMTTDTSTSTAYMELRSLRSDDTAVYYCARVAGGIYYYYGMDVWGQGTTITVSSGGGGSGGGGSGGGGSGGGGSDIVMTQTPDSLAVSLGERATISCKSSHSVLYNRNNKNYLAWYQQKPGQPPKLLFYWASTRKSGVPDRFSGSGSGTDFTLTISSLQPEDFATYFCQQTQTFPLTFGQGTRLEIN

SEQ ID NO: 4694 - protein, 241 aa, Artificial Sequence
  Description of Artificial Sequence: Synthetic scFv sequence
QVQLQQSGAEVKKPGASVKVSCKASGYTFTGYYMHWVRQAPGQGLEWMGWINPNSGGTNYAQNFQGRVTMTRDTSISTAYMELRRLRSDDTAVYYCASGWDFDYWGQGTLVTVSSGGGGSGGGGSGGGGSGGGGSDIRMTQSPSSLSASVGDRVTITCRASQSIRYYLSWYQQKPGKAPKLLIYTASILQNGVPSRFSGSGSGTDFTLTISSLQPEDFATYYCLQTYTTPDFGPGTKVEIK

SEQ ID NO: 4695 - protein, 246 aa, Artificial Sequence
  Description of Artificial Sequence: Synthetic scFv sequence
QVQLVQSGAEVKKPGASVKVSCKASGYTFTGYYMHWVRQAPGQGLEWMGRINPNSGGTNYAQKFQGRVTMTTDTSTSTAYMELRSLRSDDTAVYYCARTTTSYAFDIWGQGTMVTVSSGGGGSGGGGSGGGGSGGGGSDIQLTQSPSTLSASVGDRVTITCRASQSISTWLAWYQQKPGKAPNLLIYKASTLESGVPSRFSGSGSGTEFTLTISSLQPDDFATYYCQQYNTYSPYTFGQGTKLEIK

SEQ ID NO: 4696 - protein, 249 aa, Artificial Sequence
  Description of Artificial Sequence: Synthetic scFv sequence
QVQLVQSGGGLVKPGGSLRLSCEASGFIFSDYYMGWIRQAPGKGLEWVSYIGRSGSSMYYADSVKGRFTFSRDNAKNSLYLQMNSLRAEDTAVYYCAASPVVAATEDFQHWGQGTLVTVSSGGGGSGGGGSGGGGSGGGGSDIVMTQTPATLSLSPGERATLSCRASQSVTSNYLAWYQQKPGQAPRLLLFGASTRATGIPDRFSGSGSGTDFTLTINRLEPEDFAMYYCQQYGSAPVTFGQGTKLEIK

SEQ ID NO: 4697 - protein, 249 aa, Artificial Sequence
  Description of Artificial Sequence: Synthetic scFv sequence
QVQLVQSGAEVRAPGASVKISCKASGFTFRGYYIHWVRQAPGQGLEWMGIINPSGGSRAYAQKFQGRVTMTRDTSTSTVYMELSSLRSDDTAMYYCARTASCGGDCYYLDYWGQGTLVTVSSGGGGSGGGGSGGGGSGGGGSDIQMTQSPPTLSASVGDRVTITCRASENVNIWLAWYQQKPGKAPKLLIYKSSSLASGVPSRFSGSGSGAEFTLTISSLQPDDFATYYCQQYQSYPLTFGGGTKVDIK

SEQ ID NO: 4698 - protein, 244 aa, Artificial Sequence
  Description of Artificial Sequence: Synthetic scFv sequence
QVQLVQSGGGLVQPGRSLRLSCAASGFTFDDYAMHWVRQAPGKGLEWVSGISWNSGSIGYADSVKGRFTISRDNAKNSLYLQMNSLRAEDTAVYYCAKDGSSSWSWGYFDYWGQGTLVTVSSGGGGSGGGGSGGGGSSSELTQDPAVSVALGQTVRTTCQGDALRSYYASWYQQKPGQAPMLVIYGKNNRPSGIPDRFSGSDSGDTASLTITGAQAEDEADYYCNSRDSSGYPVFGTGTKVTVL

SEQ ID NO: 4699 - protein, 246 aa, Artificial Sequence
  Description of Artificial Sequence: Synthetic scFv sequence
EVQLVESGGGLVQPGRSLRLSCAASGFTFDDYAMHWVRQAPGKGLEWVSGISWNSGSTGYADSVKGRFTISRDNAKNSLYLQMNSLRAEDTALYYCAKDSSSWYGGGSAFDIWGQGTMVTVSSGGGGSGGGGSGGGGSSSELTQEPAVSVALGQTVRITCQGDSLRSYYASWYQQKPGQAPVLVIFGRSRRPSGIPDRFSGSSSGNTASLIITGAQAEDEADYYCNSRDNTANHYVFGTGTKLTVL

SEQ ID NO: 4700 - protein, 246 aa, Artificial Sequence
  Description of Artificial Sequence: Synthetic scFv sequence
EVQLVESGGGLVQPGRSLRLSCAASGFTFDDYAMHWVRQAPGKGLEWVSGISWNSGSTGYADSVKGRFTISRDNAKNSLYLQMNSLRAEDTALYYCAKDSSSWYGGGSAFDIWGQGTMVTVSSGGGGSGGGGSGGGGSSSELTQDPAVSVALGQTVRITCQGDSLRSYYASWYQQKPGQAPVLVIYGKNNRPSGIPDRFSGSSSGNTASLTITGAQAEDEADYYCNSRGSSGNHYVFGTGTKVTVL

SEQ ID NO: 4701 - protein, 251 aa, Artificial Sequence
  Description of Artificial Sequence: Synthetic scFv sequence
QVQLVQSGGGLVQPGGSLRLSCAASGFTFSSYWMHWVRQAPGKGLVWVSRINSDGSSTSYADSVKGRFTISRDNAKNTLYLQMNSLRAEDTAVYYCVRTGWVGSYYYYMDVWGKGTTVTVSSGGGGSGGGGSGGGGSGGGGSEIVLTQSPGTLSLSPGERATLSCRASQSVSSNYLAWYQQKPGQPPRLLIYDVSTRATGIPARFSGGGSGTDFTLTISSLEPEDFAVYYCQQRSNWPPWTFGQGTKVEIK

SEQ ID NO: 4702 - protein, 250 aa, Artificial Sequence
  Description of Artificial Sequence: Synthetic scFv sequence
QVQLVQSGGGVVQPGRSLRLSCAASGFTFSSYGMHWVRQAPGKGLEWVAVISYDGSNKYYADSVKGRFTISRDNSKNTLYLQMNSLRAEDTAVYYCAKGYSRYYYYGMDVWGQGTTVTVSSGGGGSGGGGSGGGGSGGGGSEIVMTQSPATLSLSPGERAILSCRASQSVYTKYLGWYQQKPGQAPRLLIYDASTRATGIPDRFSGSGSGTDFTLTINRLEPEDFAVYYCQHYGGSPLITFGQGTKVDIK

SEQ ID NO: 4703 - protein, 253 aa, Artificial Sequence
  Description of Artificial Sequence: Synthetic scFv sequence
QVQLVQSGAEVKKPGASVKVSCKASGYTFTGYYMHWVRQAPGQGLEWMGWINPNSGGTNYAQKFQGRVTMTRDTSISTAYMELSRLRSDDTAVYYCARDLRRTVVTPRAYYGMDVWGQGTTVTVSSGGGGSGGGGSGGGGSGGGGSDIQLTQSPSTLSASVGDRVTITCQASQDISNSLNWYQQKAGKAPKLLIYDASTLETGVPSRFSGSGSGTDFSFTISSLQPEDIATYYCQQHDNLPLTFGQGTKVEIK

SEQ ID NO: 4704 - protein, 249 aa, Artificial Sequence
  Description of Artificial Sequence: Synthetic scFv sequence
QVQLVQSGGGLVQPGGSLRLSCAASGFTFSSYAMSWVRQAPGKGLEWVSAISGSGGSTYYADSVKGRFTISRDNSKNTLYLQMNSLRAEDTAVYYCAKREAAAGHDWYFDLWGRGTLVTVSSGGGGSGGGGSGGGGSGGGGSDIRVTQSPSSLSASVGDRVTITCRASQSISSYLNWYQQKPGKAPKLLIYAASSLQSGVPSRFSGSGSGTDFTLTISSLQPEDFATYYCQQSYSIPLTFGQGTKVEIK

SEQ ID NO: 4705 - protein, 247 aa, Artificial Sequence
  Description of Artificial Sequence: Synthetic scFv sequence
QVQLVQSWAEVKKPGASVKVSCKASGYTFTSYYMHWVRQAPGQGLEWMGIINPSGGSTSYAQKFQGRVTMTRDTSTSTVYMELSNLRSEDTAVYYCARSPRVTTGYFDYWGQGTLVTVSSGGGGSGGGGSGGGGSGGGGSDIQLTQSPSTLSASVGDRVTITCRASQSISSWLAWYQQKPGKAPKLLIYKASSLESGVPSRFSGSGSGTEFTLTISSLQPDDFATYYCQQYSSYPLTFGGGTRLEIK

SEQ ID NO: 4706 - protein, 253 aa, Artificial Sequence
  Description of Artificial Sequence: Synthetic scFv sequence
QVQLVQSGAEVRRPGASVKISCRASGDTSTRHYIHWLRQAPGQGPEWMGVINPTTGPATGSPAYAQMLQGRVTMTRDTSTRTVYMELRSLRFEDTAVYYCARSVVGRSAPYYFDYWGQGTLVTVSSGGGGSGGGGSGGGGSGGGGSDIQMTQSPSSLSASVGDRVTITCRASQGISDYSAWYQQKPGKAPKLLIYAASTLQSGVPSRFSGSGSGTDFTLTISYLQSEDFATYYCQQYYSYPLTFGGGTKVDIK

SEQ ID NO: 4707 - protein, 249 aa, Artificial Sequence
  Description of Artificial Sequence: Synthetic scFv sequence
QVQLQQSGAEVKKPGASVKVSCKASGYTFTNYYMHWVRQAPGQGLEWMGIINPSGGYTTYAQKFQGRLTMTRDTSTSTVYMELSSLRSEDTAVYYCARIRSCGGDCYYFDNWGQGTLVTVSSGGGGSGGGGSGGGGSGGGGSDIQLTQSPSTLSASVGDRVTITCRASENVNIWLAWYQQKPGKAPKLLIYKSSSLASGVPSRFSGSGSGAEFTLTISSLQPDDFATYYCQQYQSYPLTFGGGTKVDIK

SEQ ID NO: 4708 - protein, 246 aa, Artificial Sequence
  Description of Artificial Sequence: Synthetic scFv sequence
QVQLVQSGAEVKKPGAPVKVSCKASGYTFTGYYMHWVRQAPGQGLEWMGWINPNSGGTNYAQKFQGRVTMTRDTSISTAYMELSRLRSDDTAVYYCARGEWDGSYYYDYWGQGTLVTVSSGGGGSGGGGSGGGGSGGGGSDIVLTQTPSSLSASVGDRVTITCRASQSINTYLNWYQHKPGKAPKLLIYAASSLQSGVPSRFSGSGSGTDFTLTISSLQPEDFATYYCQQSFSPLTFGGGTKLEIK

SEQ ID NO: 4709 - protein, 242 aa, Artificial Sequence
  Description of Artificial Sequence: Synthetic scFv sequence
QVQLVESGGGLVQPGGSLRLSCAASGFTFSSYWMHWVRQVPGKGLVWVSRINTDGSTTTYADSVEGRFTISRDNAKNTLYLQMNSLRDDDTAVYYCVGGHWAVWGQGTTVTVSSGGGGSGGGGSGGGGSGGGGSDIQMTQSPSTLSASVGDRVTITCRASQSISDRLAWYQQKPGKAPKLLIYKASSLESGVPSRFSGSGSGTEFTLTISSLQPDDFAVYYCQQYGHLPMYTFGQGTKVEIK

SEQ ID NO: 4710 - protein, 241 aa, Artificial Sequence
  Description of Artificial Sequence: Synthetic scFv sequence
QVQLVQSGAEVEKPGASVKVSCKASGYTFTDYYMHWVRQAPGQGLEWMGWINPNSGGTNYAQKFQGRVTMTRDTSISTAYMELSRLRSDDTAVYYCASGWDFDYWGQGTLVTVSSGGGGSGGGGSGGGGSGGGGSDIVMTQSPSSLSASVGDRVTITCRASQSIRYYLSWYQQKPGKAPKLLIYTASILQNGVPSRFSGSGSGTDFTLTISSLQPEDFATYYCLQTYTTPDFGPGTKVEIK

SEQ ID NO: 4711 - protein, 250 aa, Artificial Sequence
  Description of Artificial Sequence: Synthetic scFv sequence
QVQLVQSGGGVVQPGRSLRLSCAASGFTFSSYAMHWVRQAPGKGLEWVAVISYDGSNKYYADSVKGRFTISRDNSKNTLYLQMNSLRAEDTAVYYCARWKVSSSSPAFDYWGQGTLVTVSSGGGGSGGGGSGGGGSGGGGSEIVLTQSPATLSLSPGERAILSCRASQSVYTKYLGWYQQKPGQAPRLLIYDASTRATGIPDRFSGSGSGTDFTLTINRLEPEDFAVYYCQHYGGSPLITFGQGTRLEIK

SEQ ID NO: 4712 - protein, 246 aa, Artificial Sequence
  Description of Artificial Sequence: Synthetic scFv sequence
QVQLQQSGAEVKKPGASVKVSCKTSGYPFTGYSLHWVRQAPGQGLEWMGWINPNSGGTNYAQKFQGRVTMTRDTSISTAYMELSRLRSDDTAVYYCARDHYGGNSLFYWGQGTLVTVSSGGGGSGGGGSGGGGSGGGGSDIQLTQSPSSISASVGDTVSITCRASQDSGTWLAWYQQKPGKAPNLLMYDASTLEDGVPSRFSGSASGTEFTLTVNRLQPEDSATYYCQQYNSYPLTFGGGTKVDIK

SEQ ID NO: 4713 - protein, 248 aa, Artificial Sequence
  Description of Artificial Sequence: Synthetic scFv sequence
QVQLVQSGAEVKKPGASVEVSCKASGYTFTSYYMHWVRQAPGQGLEWMGIINPSGGSTGYAQKFQGRVTMTRDTSTSTVHMELSSLRSEDTAVYYCARGGYSSSSDAFDIWGQGTMVTVSSGGGGSGGGGSGGGGSGGGGSDIQMTQSPPSLSASVGDRVTITCRASQDISSALAWYQQKPGTPPKLLIYDASSLESGVPSRFSGSGSGTDFTLTISSLQPEDFATYYCQQFSSYPLTFGGGTRLEIK

SEQ ID NO: 4714 - protein, 262 aa, Artificial Sequence
  Description of Artificial Sequence: Synthetic scFv sequence
FGLRWVFLVAILKGVQCEVQLLESGGGLVQPGGSLRLSCAASGFTFSNFGMTWVRQAPGKGLEWVSGVSIRGIATYYADSVKGRFTISRDDSRNTLYLQMNSLRAEDTALYYCATGVRLLGREWGQGTLVTVSSGGGGSGGGGSGGGGSDVVMTQSPLSLPVPLGQPASISCRSSQSLVDNDGNTYLNWFQQRPGQSPRRLIYKVSMRDSGVPDRFTGSGSGTDFTLRISRVEADDVGVYYCMQGTHWPLTFGPGTKVEIKR

SEQ ID NO: 4715 - protein, 115 aa, Artificial Sequence
  Description of Artificial Sequence: Synthetic scFv sequence
EVQLVESGGGLVQAGGSLRLSCAASGSTFSQYDVGWYRQAPGKQRELVAFSSSGGRTIYPDSVKGRFTFSRDNTKNTVYLQMTSLKPEDTAVYYCKIDWYLNSYWGQGTQVTVSS

SEQ ID NO: 4716 - protein, 114 aa, Artificial Sequence
  Description of Artificial Sequence: Synthetic scFv sequence
EVQLVESGGGLVQAGGSLRLSCAASGVDASNSAMGWYRQAPGKQREWVARITGGGLIAYTDSVKGRFTISRDNAKSTVYLQMNSLEPEDTAVYYCNTINSRDGWGQGTQVTVSS

SEQ ID NO: 4717 - protein, 111 aa, Artificial Sequence
  Description of Artificial Sequence: Synthetic scFv sequence
EVQLVESGGGLVQAGGSLTISCAASGITFSDSIVSWYRRARGKQREWVAGISNGGTTKYAESVLGRFTISRDNAKNMVYLQMNGLNPEDTAVYLCKVRQYWGQGTQVTVSS

SEQ ID NO: 4718 - protein, 124 aa, Artificial Sequence
  Description of Artificial Sequence: Synthetic scFv sequence
EVQLVESGGGLVQPGGSLRLSCAASGFTFDYYAIGWFRQAPGKAREGVSCISGGDNSTYYADSVKGRFTISRDNAKNTVYLQMNSLKPEDTAVYYCATGGWKYCSGYDPEYIYWGQGTQVTVSS

SEQ ID NO: 4719 - protein, 126 aa, Artificial Sequence
  Description of Artificial Sequence: Synthetic scFv sequence
EVQLVESGGGLVQPGGSLRLSCAASGFTLDYYAIGWFRQAPGKEREWASSISSSDGSTYYADSVKGRFTISRDNAKNTVFLQMNSLKPEDTAVYSCAASQAPITIATMMKPFYDYWGQGTQVTVSS

SEQ ID NO: 4720 - protein, 123 aa, Artificial Sequence
  Description of Artificial Sequence: Synthetic scFv sequence
EVQLVESGGGLVQPGGSLRLSCAASGFTLDYYAKCWFRQAPGKEREWVSCISSSDGSTYYADSVKGRFTISRDNAKNTVYLQMNSLKPEDTAVYFCAARHGGPLTVEYFFDYWGQGTQVTVSS

SEQ ID NO: 4721 - protein, 114 aa, Artificial Sequence
  Description of Artificial Sequence: Synthetic scFv sequence
EVQLVESGGGLVEPGGSLRLSCVASGFTFSSYDMSWVRQAPGKGLEWVSTINSGGGITYRGSVKGRFTISRDNAKNTLYLQMNSLKPEDTAVYYCENGGSSYRRGQGTQVTVSS

SEQ ID NO: 4722 - protein, 120 aa, Artificial Sequence
  Description of Artificial Sequence: Synthetic scFv sequence
EVQLVESGGGLVQAGGSLRLSCAASGRTFSSGTMGWFRRAPGKEREFVASIPWSGGRTYYADSVKDRFTISRDNAQNTVFLQMNSLKPEDTAVYYCAFKERSTGWDFASWGQGIQVTVSS

SEQ ID NO: 4723 - protein, 119 aa, Artificial Sequence
  Description of Artificial Sequence: Synthetic scFv sequence
EVQLVESGGGLVQAGGSLRLSCAASGSTFSNYVSNYAMGWGRQAPGTQRELVASISNGDTTNYADSVKGRFTISRDNAKNTVYLQMNSLKPEDTAVYYCFEHQVAGLTWGQGTQVTVSS

SEQ ID NO: 4724 - protein, 118 aa, Artificial Sequence
  Description of Artificial Sequence: Synthetic scFv sequence
  MOD_RES (27)..(27): Any amino acid
  MOD_RES (32)..(32): Any amino acid
  MOD_RES (75)..(75): Any amino acid
EVQLVESGGGLVQAGGSLRLSCVASGXALKIXVMGWYRQAPGKQRELVAAITSGGRTNYSDSVKGRFTISGDNAXNTVYLQMNSLKSEDTAVYYCREWNSGYPPVDYWGQGTQVTVSS

SEQ ID NO: 4725 - protein, 113 aa, Artificial Sequence
  Description of Artificial Sequence: Synthetic scFv sequence
EVQLVESGGGLVQPGGSLRLSCAASGFTFSTYTMIWLRRAPGKGFEWVSTIDKDGNTNYVDSVKGRFAVSRDNTKNTLYLQMNSLKPEDTAMYYCTKHGSSARGQGTRVTVSS

SEQ ID NO: 4726 - protein, 127 aa, Artificial Sequence
  Description of Artificial Sequence: Synthetic scFv sequence
EVQLVESGGGLVQTGGSLRLSCAASGFTLDYYGIGWFRQAPGKEREGVSFISGSDGSTYYAESVKGRFTISRDKAKNTVYLQMNSLKPEDTAVYYCAADPWGPPSIATMTSYEYKHWGQGTQVTVSS

SEQ ID NO: 4727 - protein, 247 aa, Artificial Sequence
  Description of Artificial Sequence: Synthetic scFv sequence
DIQLTQSPSSLSASVGDRVTITCRASQSISSYLNWYQQKPGKAPKLLIYAASSLQSGVPSRFSGSGSGTDFTLTISSLQPEDFATYYCQQSYSTPRTFGQGTKVEIKRSRGGGGSGGGGSGGGGSLEMAQVQLVQSGAEVKKPGASVKVSCKASGYTFSSYGISWVRQAPGQGLEWMGWISPYNGNTNYAQNLQGRVTMTTDTSTTTAYMELRSLTSDDTAVYYCARYSGYYYVDYWGQGTLVTVSS

SEQ ID NO: 4728 - protein, 251 aa, Artificial Sequence
  Description of Artificial Sequence: Synthetic scFv sequence
KLLPVLTQPHSVSESPGKTVTISCTGSSGSIASNFVQWYQQRPGSAPTTVIYDDNQRPSGVPDRFSASIDRSSNSASLTISGLKTDDEADYYCQSYDGSNVIFGGGTKLTVLGSRGGGGSGGGGSGGGGSLEMAEVQLVESGAEVKKPGASVKVSCKASGYTFTSYYMHWVRQAPGQGLEWMGIINPSGGSTSYAQKFQGRVTMTRDTSTSTVYMELSSLRSEDTAVYYCAAGSYYSLDIWGQGTMVTVSS

SEQ ID NO: 4729 - protein, 251 aa, Artificial Sequence
  Description of Artificial Sequence: Synthetic scFv sequence
KLLPVLTQPPSVSVAPGKTARITCGGNNIGSKSVHWYQQKPGQAPVLVIYYDSDRPSGIPERFSGSNSGNTATLTISRVEAGDEADYYCQVWDSITDHYVFGTGTKVTVLGSRGGGGSGGGGSGGGGSLEMAEVQLVESGAEVKKPGSSVKVSCKASGGTFSSYAISWVRQAPGQGLEWMGRIIPILGIANYAQKFQGRVTITADKSTSTAYMELSSLRSEDTAVYYCARQGYVWSEMDFWGQGTLVTVSS

SEQ ID NO: 4730 - protein, 250 aa, Artificial Sequence
  Description of Artificial Sequence: Synthetic scFv sequence
QAVLTQPPSASGTPGQRVTISCSGSSSNIGSNTVNWYQQLPGTAPKLLIYSNNQRPSGVPDRFSGSKSGTSASLAISGLQSEDEADYYCAAWDDSLNGSYVFGTGTKVTVLGSRGGGGSGGGGSGGGGSLEMAQVQLVQSGAEVRKPGASVKVSCKASGGTFSSYAISWVRQAPGQGLEWMGRIIPILGIANYAQKFQGRVTITADKSTSTAYMELSSLRSEDTAVYYCARHYGQWWDYWGQGTLVTVSS

SEQ ID NO: 4731 - protein, 247 aa, Artificial Sequence
  Description of Artificial Sequence: Synthetic scFv sequence
QPVLTQPPSVSVAPGETASVSCGGNNFGSQSVHWYQQKSGQAPLLVIYYDQDRPSEIPARFSGSKSGNTATLTISRVEAGDEADYYCQVWDTYTDHVVFGGGTKLTVLGSRGGGGSGGGGSGGGGSLEMAEVQLVQSGAEVEKPGASVKVSCKASGYTFSSYYMDWVRQAPGQGLEWMGRINPTSGSTTYAQKFQGRVTMTRDTSTFTVYMDLSSLRSEDTAVYYCARSGGGYGDSWGQGTLVTVSS

SEQ ID NO: 4732 - protein, 249 aa, Artificial Sequence
  Description of Artificial Sequence: Synthetic scFv sequence
QSVLTQPPSVSGAPGQRVTISCTGSSSNIGAGFDVHWYQQLPGTAPKLLIFGNSNRPSGVPDRFSGSKSGTSASLAITGLQAEDEADYYCQSYDSSLSGYVFGSGTKVTVLGSRGGGGSGGGGSGGGGSLEMAEVQLVESGAEVKKPGSSVKVSCKASGGTFSSYAISWVRQAPGQGLEWMGRIIPIFGIANYAQKFQGRVTITADKSTSTAYMELSSLRSEDTAVYYCARSMWYMDSWGQGTLVTVSS

SEQ ID NO: 4733 - protein, 249 aa, Artificial Sequence
  Description of Artificial Sequence: Synthetic scFv sequence
QSVVTQPPAVSGALGQRVTISCTGTTSNIGAGFDVHWYQQRPGAAPKLLISGNTHRPSGVPDRISGSKSGTLASLAITGLQAEDEADYYCQSYDRSLSTILFGGGTKLTVLGSRGGGGSGGGGSGGGGSLEMAQVQLVQSGAEVKKPGSSVKVSCKASGGTFSSHPISWVRQAPGQGLEWMGRIIPMLDIPNNAQKFQGRVTITADKSTDTAYLELSSLTSEDTAVYYCARGLYYYDYWGQGTLVTVSS

SEQ ID NO: 4734 - protein, 253 aa, Artificial Sequence
  Description of Artificial Sequence: Synthetic scFv sequence
METDTLLLWVLLLWVPGSTGDIVMTQSPSSLSASVGDRVTITCKASQDVGTAVDWYQQKPGKAPKLLIYWASTRHTGVPDRFTGSGSGTDFTLTISSLQPEDFADYFCQQYNSYPLTFGGGTKLEIKGGGSGGGGEVQLVQSGAEVKKPGASVKISCKTSGYTFTEYTIHWVKQASGKGLEWIGNINPNNGGTTYNQKFEDRATLTVDKSTSTAYMELSSLRSEDTAVYYCAAGWNFDYWGQGTTVTVSSGGC

SEQ ID NO: 4735 - protein, 250 aa, Artificial Sequence
  Description of Artificial Sequence: Synthetic scFv sequence
METDTLLLWVLLLWVPGSTGDIVMTQSPSSLSASVGDRVTITCKASQDVGTAVDWYQQKPGKAPKLLIYWASTRHTGVPDRFTGSGSGTDFTLTISSLQPEDFADYFCQQYNSYPLTFGGGTKLEIKSGGGGEVQLVQSGAEVKKPGASVKISCKTSGYTFTEYTIHWVKQASGKGLEWIGNINPNNGGTTYNQKFEDRATLTVDKSTSTAYMELSSLRSEDTAVYYCAAGWNFDYWGQGTTVTVSSGGC

SEQ ID NO: 4736 - protein, 253 aa, Artificial Sequence
  Description of Artificial Sequence: Synthetic scFv sequence
METDTLLLWVLLLWVPGSTGEVQLVQSGAEVKKPGASVKISCKTSGYTFTEYTIHWVKQASGKGLEWIGNINPNNGGTTYNQKFEDRATLTVDKSTSTAYMELSSLRSEDTAVYYCAAGWNFDYWGQGTTVTVSSGGGSGGGGDIVMTQSPSSLSASVGDRVTITCKASQDVGTAVDWYQQKPGKAPKLLIYWASTRHTGVPDRFTGSGSGTDFTLTISSLQPEDFADYFCQQYNSYPLTFGGGTKLEIKGGC

SEQ ID NO: 4737 - protein, 250 aa, Artificial Sequence
  Description of Artificial Sequence: Synthetic scFv sequence
METDTLLLWVLLLWVPGSTGEVQLVQSGAEVKKPGASVKISCKTSGYTFTEYTIHWVKQASGKGLEWIGNINPNNGGTTYNQKFEDRATLTVDKSTSTAYMELSSLRSEDTAVYYCAAGWNFDYWGQGTTVTVSSSGGGGDIVMTQSPSSLSASVGDRVTITCKASQDVGTAVDWYQQKPGKAPKLLIYWASTRHTGVPDRFTGSGSGTDFTLTISSLQPEDFADYFCQQYNSYPLTFGGGTKLEIKGGC

SEQ ID NO: 4738 - protein, 242 aa, Artificial Sequence
  Description of Artificial Sequence: Synthetic scFv sequence
DIQMTQSPSAMSASVGDRVTITCRASKSISKYLAWFQQKPGKVPKLRIHSGSTLQSGVPSRFSGSGSGTEFTLTISSLQPEDFATYYCQQHIEYPWTFGQGTKVEIKRGGGGSGGGGSGGGGSEVQLVQSGAEVKKPGATVKISCKASGYTFTDYYMHWVQQAPGKGLEWMGYFNPYNDYTRYAEKFQGRVTITADTSTDTAYMELSSLRSEDTAVYYCARSDGYYDAMDYWGQGTTVTVSS

SEQ ID NO: 4739 - protein, 242 aa, Artificial Sequence
  Description of Artificial Sequence: Synthetic scFv sequence
DIQMTQSPSAMSASVGDRVTITCRASKSISKYLAWFQQKPGKVPKLRIHSGSTLQSGVPSRFSGSGSGTEFTLTISSLQPEDFATYYCQQHIEYPWTFGQGTKVEIKRGGGGSGGGGSGGGGSQVQLVQSGAEVKKPGASVKVSCKASGYTFTDYYMHWVRQAPGQGLEWMGYFNPYNDYTRYAQKFQGRVTMTRDTSISTAYMELSSLRSDDTAVYYCARSDGYYDAMDYWGQGTTVTVSS

SEQ ID NO: 4740 - protein, 244 aa, Artificial Sequence
  Description of Artificial Sequence: Synthetic scFv sequence
DVQITQSPSYLAASPGETITINCRASKSISKYLAWYQEKPGKANKLLIHSGSTLQSGIPSRFSGSGSGTDFTLTISSLEPEDFAMYYCQQHIEYPWTFGGGTKLEIKRAGGGGSGGGGSSGGGGSEIQLQQSGPELVKPGASVKMSCKASGYTFTDYYMHWVKQNNGESLEWIGYFNPYNDYTRYNQNFNGKATLTVDKSSSTAYMQLNSLTSEDSAFYYCARSDGYYDAMDYWGQGTSVTVSS

SEQ ID NO: 4741 - protein, 245 aa, Artificial Sequence
  Description of Artificial Sequence: Synthetic scFv sequence
EIQLQQSGPELVKPGASVKMSCKASGYTFTDYYMHWVKQNNGESLEWIGYFNPYNDYTRYNQNFNGKATLTVDKSSSTAYMQLNSLTSEDSAFYYCARSDGYYDAMDYWGQGTSVTVSSGGGGSGGGGSSGGGGSDVQITQSPSYLAASPGETITINCRASKSISKYLAWYQEKPGKANKLLIHSGSTLQSGIPSRFSGSGSGTDFTLTISSLEPEDFAMYYCQQHIEYPWTFGGGTKLEIKRAS

SEQ ID NO: 4742 - protein, 244 aa, Artificial Sequence
  Description of Artificial Sequence: Synthetic scFv sequence
EVQLVQSGAEVKKPGATVKISCKASGYTFTDYYMHWVQQAPGKGLEWMGYFNPYNDYTRYAEKFQGRVTITADTSTDTAYMELSSLRSEDTAVYYCARSDGYYDAMDYWGQGTTVTVSSGGGGSGGGGSGGGGSDIQMTQSPSAMSASVGDRVTITCRASKSISKYLAWFQQKPGKVPKLRIHSGSTLQSGVPSRFSGSGSGTEFTLTISSLQPEDFATYYCQQHIEYPWTFGQGTKVEIKRAS

SEQ ID NO: 4743 - protein, 244 aa, Artificial Sequence
  Description of Artificial Sequence: Synthetic scFv sequence
QVQLVQSGAEVKKPGASVKVSCKASGYTFTDYYMHWVRQAPGQGLEWMGYFNPYNDYTRYAQKFQGRVTMTRDTSISTAYMELSSLRSDDTAVYYCARSDGYYDAMDYWGQGTTVTVSSGGGGSGGGGSGGGGSDIQMTQSPSAMSASVGDRVTITCRASKSISKYLAWFQQKPGKVPKLRIHSGSTLQSGVPSRFSGSGSGTEFTLTISSLQPEDFATYYCQQHIEYPWTFGQGTKVEIKRAS

SEQ ID NO: 4744 - protein, 261 aa, Artificial Sequence
  Description of Artificial Sequence: Synthetic scFv sequence
MAQVKLQQSGPELVKPGASVKMSCKASGYTFTSYVMHWVKQSNGKSLEWIGTIDPYYGGTSYNQKFKGKATLTVDKSSTTAYIQLKSLTSEDSAVYYCARWDGYYGGFSYWGQGTMVTVSSGGGGSGGGGSGGGGSDIELTQSPAIMSATLGEKVTMSCRASSNVKYMYWYQQKSGASPKLWIYYTSNLASGVPARFSGSGSGTSYSLTISSVEAEDAATYYCQQFTSSPYTFGSGTKLEIKRAAAGAPVPYPDPLEPRAA

SEQ ID NO: 4745 - protein, 265 aa, Artificial Sequence
  Description of Artificial Sequence: Synthetic scFv sequence
MAQVQLQESGPGLVKPSQSLSLTCSVTGYSITSNYWGWIRKFPGNKMEWMGYISYSGSTSYNPSLKSRISITRDTSKNQLFLQLNSVTTEDTATYYCARYSLFNYGRRDYVMDAWGQGTTVTVSSGGGGSGGGGSGGGGSDIELTQSPATMAASPGEKVTITCRASSTVSYMHWFQQKPGASPKPWIYDTSKLASGVPDRFSGSGSGTDFTLTIDPVQADDIATYYCQQSKDDPRTFGGGTKLELKRRPQVRRCRIRIRWNRVPH

SEQ ID NO: 4746 - protein, 260 aa, Artificial Sequence
  Description of Artificial Sequence: Synthetic scFv sequence
DIQLTQSPSSLSASVGDRVTITCSASQDISNYLNWYQQKPGKAPKVLIYFTSSLHSGVPSRFSGSGSGTDFTLTISSLQPEDFATYYCQQYSTVPWTFGQGTKVEIKRGSTSGSGKPGSGEGSTKGEVQLVESGGGLVQPGGSLRLSCAASGYDFTHYGMNWVRQAPGKGLEWVGWINTYTGEPTYAADFKRRFTFSLDTSKSTAYLQMNSLRAEDTAVYYCAKYPYYYGTSHWYFDVWGQGTLVTVSSGGGGSGGGGSC

SEQ ID NO: 4747 - protein, 251 aa, Artificial Sequence
  Description of Artificial Sequence: Synthetic scFv sequence
QSVLTQPPSVSGAPGQRVTISCTGSSSNIGAGYDVHWYQQLPGTAPKLLIYGNSNRPSGVPDRFSGSKSGTSASLAITGLQAEDEADYYCQSYDSSLSGYVFGTGTKVTVLGSRGGGGSGGGGSGGGGSLEMAQVQLVQSGAEVKKPGSSVKVSCKASGGTFSSYAISWVRQAPGQGLEWMGGIIPIFGKGNYPQKFQGRVTITADESTGTAYMELSSLRSEDTAVYYCARHIPTFSFDYWGQGTLVTVSS

SEQ ID NO: 4748 - protein, 257 aa, Artificial Sequence
  Description of Artificial Sequence: Synthetic scFv sequence
QIVLSQSPAILSASPGEKVTMTCRASSSVSYIHWFQQKPGSSPKPWIYATSNLASGVPVRFSGSGSGTSYSLTISRVEAEDAATYYCQQWTSNPPTFGGGTKLEIKRGSTSGSGKPGSGEGSTKGQVQLQQPGAELVKPGASVKMSCKASGYTFTSYNMHWVKQTPGRGLEWIGAIYPGNGDTSYNQKFKGKATLTADKSSSTAYMQLSSLTSEDSAVYYCARSTYYGGDWYFNVWGAGTTVTVSAGGGGSGGGGSC

SEQ ID NO: 4749 - protein, 244 aa, Artificial Sequence
  Description of Artificial Sequence: Synthetic scFv sequence
DIKMTQSPSSMYASLGERVTITCKASPDINSYLSWFQQKPGKSPKTLIYRANRLVDGVPSRFSGGGSGQDYSLTINSLEYEDMGIYYCLQYDEFPYTFGGGTKLEMKGSTSGSGKPGSGEGSTKGEVKLVESGGGLVKPGGSLKLSCAASGFTFSSYAMSWVRQIPEKRLEWVASISRGGTTYYPDSVKGRFTISRDNVRNILYLQMSSLRSEDTAMYYCGRYDYDGYYAMDYWGQGTSVTVSS

SEQ ID NO: 4750 - protein, 269 aa, Artificial Sequence
  Description of Artificial Sequence: Synthetic scFv sequence
EFGSATMGWSCIILFLVATATGVHSDIKMTQSPSSMYASLGERVTITCKASPDINSYLSWFQQKPGKSPKTLIYRANRLVDGVPSRFSGGGSGQDYSLTINSLEYEDMGIYYCLQYDEFPYTFGGGTKLEMKGSTSGSGKPGSGEGSTKGEVKLVESGGGLVKPGGSLKLSCAASGFTFSSYAMSWVRQIPEKRLEWVASISRGGTTYYPDSVKGRFTISRDNVRNILYLQMSSLRSEDTAMYYCGRYDYDGYYAMDYWGQGTSVTVSS

SEQ ID NO: 4751 - protein, 229 aa, Artificial Sequence
  Description of Artificial Sequence: Synthetic scFv sequence
EVQLVESGGGLVKPGGSLRLSCAASGFTFSNAWMSWVRQAPGKGLEWVGRIKSKTDGGTTDYAAPVKGRFTISRDDSKNTLYLQMNSLKTEDTAVYYCARDFGRWSYYFDYWSQGTLVTVSSNIQMTQSPSSLSASVGDRVTITCRASQSINKWLAWYQQKPGKAPKLLIHDASTLESGVPSRFSGSGSGTEFTLTISSLHPDDSATYYCQQLKSPPAQFGEGTKLEIK

SEQ ID NO: 4752 - protein, 229 aa, Artificial Sequence
  Description of Artificial Sequence: Synthetic scFv sequence
EVQLVESGGGLVKPGGSLRLSCAASGFTFSNAWMSWVRQAPGKGLEWVGRIKSKTDGGTTDYAAPVKGRFTISRDDSKNTLYLQMNSLKTEDTAVYYCARDFGRWSYYFDYWSQGTLVTVSSNIQMTQSPSSLSASVGDRVTITCRASQSINKWLAWYQQKPGKAPKLLIHDASTLESGVPSRFSGSGSGTEFTLTISSLHPDDSATYYCQQLKSRPLSFGEGTKLEIK

SEQ ID NO: 4753 - protein, 232 aa, Artificial Sequence
  Description of Artificial Sequence: Synthetic scFv sequence
EVQLVESGGGLVKPGGSLRLSCAASGFTFSNAWMSWVRQAPGKGLEWVGRIKSKTDGGTTDYAAPVKGRFTISRDDSKNTLYLQMNSLKTEDTAVYYCARDFGRWSYYFDYWSQGTLVTVSSQSVLTQPSSVSGTPGQRVTISCSGSSSNIGSNYVYWYQQLPGTAPKLLIYRNNQRPSGVPDRFSGSKSGTSASLGHQWAPGPRMRLIITAAWDDSLSGVVFGGGTKLTVL

SEQ ID NO: 4754 - protein, 232 aa, Artificial Sequence
  Description of Artificial Sequence: Synthetic scFv sequence
EVQLVESGGGLVKPGGSLRLSCAASGFTFSNAWMSWVRQAPGKGLEWVGRIKSKTDGGTTDYAAPVKGRFTISRDDSKNTLYLQMNSLRTEDTAVYYCARDFGRWSYYFDYWSQGTLVTVSSQPVLTQPHSVSESPGKTVTISCTRSSGNIASNFVQWYQRRPDGATTNVIYEDTQRPSGVSGRFSGSIDRSSNSASLTISGLRAEDEADYYCQSYDGRNLMFGGGTKVTVL

SEQ ID NO: 4755 - protein, 234 aa, Artificial Sequence
  Description of Artificial Sequence: Synthetic scFv sequence
  MOD_RES (194)..(194): Any amino acid
EVQLVESGGGLVKPGRSLRLSCTASGFTFGDYAMSWFRQAPGKGLEWVGFIRSKAYGGTTEYAASVKGRFTISRDDSKSIAYLQMNSLKTEDTAVYYCAKDFEVREAHLSYFDYWGQGTLVTVSSQSVLTQPPSVSVAPGQTARITCGGNRIGTKAVHWYQQKSGQAPVLVVRDDTDRPSGSLRDSLAPTLGTXAAATLTISGVEAGDEADYYQVWDSSSDHRVFGGGTKLTVL

SEQ ID NO: 4756 - protein, 229 aa, Artificial Sequence
  Description of Artificial Sequence: Synthetic scFv sequence
EVQLVESGGGLVQPGRSLRLSCTASGFTFGDYAMSWVRQAPGKGLEWVSSISGSGRSTDHADYVKGRFTISRDNSKNTVYLQMNRLRAEDTAVYYCAKVSNYEYYFDYWAQGTLVTVSSQPVLTQPHSVSESPGKTVTISCTRSSGSIASNYVQWYQQRPGSAPTTVIYEDNQRPSGVPDRFSGSIDSSSNSASLTISGLKTEDEADYYCQSYDSSNHVFGTGTKLTVL

SEQ ID NO: 4757 - protein, 229 aa, Artificial Sequence
  Description of Artificial Sequence: Synthetic scFv sequence
EVQLVESGGGLVQPGRSLRLSCTASGFTFGDYAMSWVRQAPGKGLEWVSSISGSGRSTDHADYVKGRFTISRDNSKNTVYLQMNRLRAEDTAVYYCAKVSNYEYYFDYWAQGTLVTVSSQSVLTQPPSVPGTPGQRVTITCSGSRFNIGSNTVNWYQQLPGTAPKLLIYSNNQRPSGVPDRFSGSKSGTSASLAISGLQSEDEADYYCAAWDDSLNGYVFGTGTKLTVL

SEQ ID NO: 4758 - protein, 227 aa, Artificial Sequence
  Description of Artificial Sequence: Synthetic scFv sequence
EVQLVESGGGLVQPGRSLRLSCTASGFTFGDYAMSWVRQAPGKGLEWVSSISGSGRSTDHADYVKGRFTISRDNSKNTVYLQMNRLRAEDTAVYYCAKVSNYEYYFDYWAQGTLVTVSSQSVLTQPPSVSVAPGQTARITCGGNNIGSTSVHWFQQKPGQAPVLVVYDDSDRPSGIPERFSGSNSGNTATLTISRVEAGDEADYYCQVWDNDSDHRVFGGGTKLTVL

SEQ ID NO: 4759 - protein, 265 aa, Artificial Sequence
  Description of Artificial Sequence: Synthetic scFv sequence
MALPVTALLLPLALLLHAARPQVQLQQSGAELVRPGASVTLSCKASGYTFSDYEMHWVIQTPVHGLEWIGAIDPETGGTAYNQKFKGKAILTADKSSSTAYMELRSLTSEDSAVYYCTGYYDYDSFTYWGQGTLVTVSAGGGGSGGGGSGGGGSDIVMTQSQKIMSTTVGDRVSITCKASQNVDAAVAWYQQKPGQSPKLLIYSASNRYTGVPDRFTGSGSGTDFTLTISNMQSEDLADYFCQQYDIYPYTFGGGTKLEIKRSDP

SEQ ID NO: 4760 - protein, 247 aa, Artificial Sequence
  Description of Artificial Sequence: Synthetic scFv sequence
QEQLVESGGRLVTPGGSLTLSCKASGFDFSAYYMSWVRQAPGKGLEWIATIYPSSGKTYYATWVNGRFTISSDNAQNTVDLQMNSLTAADRATYFCARDSYADDGALFNIWGPGTLVTISSGGGGSGGGGSGGGGSELVLTQSPSVSAALGSPAKITCTLSSAHKTDTIDWYQQLQGEAPRYLMQVQSDGSYTKRPGVPDRFSGSSSGADRYLIIPSVQADDEADYYCGADYIGGYVFGGGTQLTVT

SEQ ID NO: 4761 - protein, 234 aa, Artificial Sequence
  Description of Artificial Sequence: Synthetic scFv sequence
  MOD_RES (187)..(187): Any amino acid
  MOD_RES (209)..(209): Any amino acid
QITLKESGGGLVKPGGSLRLSCAASGFTFSNAWMSWVRQAPGKGLEWVGRIKSKTDGGTTDYAAPVKGRFTISRDDSKNTLYLQMNSLKTEDTAVYYCARDFGRWSYYFDYWSQGTLVTVSSQSVLTQPPSVSVAPGQTARITCGGNNIGTKSVHWYQQKPGQAPVLVLYDESDRPSGIPERFSGSXAASGNTATLTISRVEAGDEADXAALLQVWDSSSDHYVFGSGTKLTVL

SEQ ID NO: 4762 - protein, 242 aa, Artificial Sequence
  Description of Artificial Sequence: Synthetic scFv sequence
  MOD_RES (187)..(187): Any amino acid
  MOD_RES (209)..(209): Any amino acid
  MOD_RES (218)..(218): Any amino acid
  MOD_RES (221)..(221): Any amino acid
  MOD_RES (224)..(224): Any amino acid
  MOD_RES (227)..(227): Any amino acid
QITLKESGGGLVKPGGSLRLSCAASGFTFSNAWMSWVRQAPGKGLEWVGRIKSKTDGGTTDYAAPVKGRFTISRDDSKNTLYLQMNSLKTEDTAVYYCARDFGRWSYYFDYWSQGTLVTVSSQSVLTQPPSVSVAPGQTARITCGGNNIGTKSVHWYQQKPGQAPVLVLYDESDRPSGIPERFSGSXAASGNTATLTISRVEAGDEADXAALLSGVGXAAXAAXAAXAASLCFGSGTKLTVL

SEQ ID NO: 4763 - protein, 232 aa, Artificial Sequence
  Description of Artificial Sequence: Synthetic scFv sequence
  MOD_RES (208)..(208): Any amino acid
  MOD_RES (211)..(211): Any amino acid
QITLKESGGGLVKPGGSLRLSCAASGFTFSNAWMSWVRQAPGKGLEWVGRIRSKTDGGTTDYAALVKGRFTISRDDSENTLYLQMNSLKTEDTAVYYCARDFGRWSYYFDYWSQGTLVTVSSSYELTQPPSVSVSPGQTASITCSGDKLGDKYACWYQQKPGQSPVLVIYQDSKRPSGIPERFSGSNSGNTATLTISGTQAMDEADYXAAXAAQAWDSSTVVFGGGTKLTVL

SEQ ID NO: 4764 - protein, 234 aa, Artificial Sequence
  Description of Artificial Sequence: Synthetic scFv sequence
  MOD_RES (208)..(208): Any amino acid
  MOD_RES (211)..(211): Any amino acid
  MOD_RES (214)..(214): Any amino acid
QITLKESGGGLVKPGGSLRLSCAASGFTFSNAWMSWVRQAPGKGLEWVGRIRSKTDGGTTDYAALVKGRFTISRDDSENTLYLQMNSLKTEDTAVYYCARDFGRWSYYFDYWSQGTLVTVSSSYELTQPPSVSVSPGQTASITCSGDKLGDKYACWYQQKPGQSPVLVIYQDSKRPSGIPERFSGSNSGNTATLTISGTQAMDEADYXAAXAAXAAAWDSSTVVFGGGTKLTVL

SEQ ID NO: 4765 - protein, 228 aa, Artificial Sequence
  Description of Artificial Sequence: Synthetic scFv sequence
QVQLVESGGGLVKPGGSLRLSCAASGFTFSNAWMSWVRQAPGKGLEWVGRIKSKTDGGTTDYAAPVKGRFTISRDDSKNSLYLQMNSLKTEDTAVYYCARDFGRWSYYFDYWGQGTLVTVSSVLTQPPSVSVAPGKTARITCGGNNLGSKNVHWYQQKPGQAPVLVIYDDDNRPSGIPERFSGSNSGNTATLTISRVEAGDEADYYCQVWDSSSRHVVFGGGTKLTVL

SEQ ID NO: 4766 - protein, 234 aa, Artificial Sequence
  Description of Artificial Sequence: Synthetic scFv sequence
  MOD_RES (194)..(194): Any amino acid
QVQLVESGGGLVKPGRSLRLSCTASGFTFGDYAMSWFRQAPGKGLEWVGFIRSKAYGGTTEYAASVKGRFTISRDDSKSIAYLQMNSLKTEDTAVYYCAKDFEVREAHLSYFDYWGQGTLVTVSSQSVLTQPPSVSVAPGQTARITCGGNRIGTKAVHWYQQKSGQAPVLVVRDDTDRPSGSLRDSLAPTLGTXAAATLTISGVEAGDEADYYQVWDSSSDHRVFGGGTKLTVL

SEQ ID NO: 4767 - protein, 210 aa, Artificial Sequence
  Description of Artificial Sequence: Synthetic scFv sequence
  MOD_RES (208)..(208): Any amino acid
QVTLKESGGGLVKPGGSLRLSCAASGFTFQRLDEWVRQAPGKGLEWVGRIKSKTDGGTTDYAAPVKGRFTISRDDSKNTLYLQMNSLKTEDTAVYYCARDFGRWSYYFDYWSQGTLVTVSSQSALTQDPAVSVALGTDSQDHMPRRQPQKTIMQWYQQKPGQAPALVIYGKNDRPSGIPDRFSGSTSGNTASLTITGAQAEDEADYYXAA

SEQ ID NO: 4768 - protein, 229 aa, Artificial Sequence
  Description of Artificial Sequence: Synthetic scFv sequence
QVTLKESGGGLVKPGGSLRLSCAASGFTFSNAWMSWVRQAPGKGLEWVGRIKSKTDGGTTDYAAPVKGRFTISRDDSKNTLYLQMNSLKTEDTAVYYCARDFGRWSYYFDYWSQGTLVTVSSNIQMTQSPSSLSASVGDRVTITCRASQSINKWLAWYQQKPGKAPKLLIHDASTLESGVPSRFSGSGSGTEFTLTISSLHPDDSATYYCQQLKSPPAQFGEGTKLEIK

SEQ ID NO: 4769 - protein, 229 aa, Artificial Sequence
  Description of Artificial Sequence: Synthetic scFv sequence
QVTLKESGGGLVKPGGSLRLSCAASGFTFSNAWMSWVRQAPGKGLEWVGRIKSKTDGGTTDYAAPVKGRFTISRDDSKNTLYLQMNSLKTEDTAVYYCARDFGRWSYYFDYWSQGTLVTVSSNIQMTQSPSSLSASVGDRVTITCRASQSINKWLAWYQQKPGKAPKLLIHDASTLESGVPSRFSGSGSGTEFTLTISSLHPDDSATYYCQQLKSRPLSFGEGTKLEIK

SEQ ID NO: 4770 - protein, 232 aa, Artificial Sequence
  Description of Artificial Sequence: Synthetic scFv sequence
QVTLKESGGGLVKPGGSLRLSCAASGFTFSNAWMSWVRQAPGKGLEWVGRIKSKTDGGTTDYAAPVKGRFTISRDDSKNTLYLQMNSLKTEDTAVYYCARDFGRWSYYFDYWSQGTLVTVSSQSVLTQPSSVSGTPGQRVTISCSGSSSNIGSNYVYWYQQLPGTAPKLLIYRNNQRPSGVPDRFSGSKSGTSASLGHQWAPGPRMRLIITAAWDDSLSGVVFGGGTKLTVL

SEQ ID NO: 4771 - protein, 232 aa, Artificial Sequence
  Description of Artificial Sequence: Synthetic scFv sequence
QVTLKESGGGLVKPGGSLRLSCAASGFTFSNAWMSWVRQAPGKGLEWVGRIKSKTDGGTTDYAAPVKGRFTISRDDSKNTLYLQMNSLRTEDTAVYYCARDFGRWSYYFDYWSQGTLVTVSSQPVLTQPHSVSESPGKTVTISCTRSSGNIASNFVQWYQRRPDGATTNVIYEDTQRPSGVSGRFSGSIDRSSNSASLTISGLRAEDEADYYCQSYDGRNLMFGGGTKVTVL

SEQ ID NO: 4772 - protein, 214 aa, Artificial Sequence
  Description of Artificial Sequence: Synthetic scFv sequence
  MOD_RES (4)..(4): Any amino acid
  MOD_RES (13)..(13): Any amino acid
RSPXAARSLGEAXAAVKPGGSLRLSCAASGFTFSNAWMSGSAQAPGKGLEWVGRIKSKTDGGTTDYAAPVKGRFTISRDDSKNTLYLQMNSLKTEDTAVYYCARDFGRWSYYFDYWSQGTLVTVSSEIVMTQSPSFLSASVGDRVTITCRASQGISSYLAWYQQKPGKAPKLLIYAASTLQSGSHQGFSGSGSGTEFTLTISSLQPEDFATYYC

SEQ ID NO: 4773 - protein, 255 aa, Artificial Sequence
  Description of Artificial Sequence: Synthetic scFv sequence
DIQMTQSPSSLSASVGDRVTITCSASSSVSYMNWYQQTPGKAPKRWIYDTSKLASGVPSRFSGSGSGTDYTFTISSLQPEDIATYYCQQWSSNPFTFGQGTKLQITRGSTSGSGKPGSGEGSTKGQVQLVQSGGGVVQPGRSLRLSCKASGYTFTRYTMHWVRQAPGKGLEWIGYINPSRGYTNYNQKVKDRFTISRDNSKNTAFLQMDSLRPEDTGVYFCARYYDDHYSLDYWGQGTPVTVSSGGGGSGGGGSC

SEQ ID NO: 4774 - protein, 246 aa, Artificial Sequence
  Description of Artificial Sequence: Synthetic scFv sequence
EVQLVETGGGLVQPGKSLELTCATSGFTFNTAWMHWVRQSPDKRLEWIARIKDTSNNYATDYVESMKGRFTISRDDSKGSVNLQMNSLKEEDTATYYCTTDFYDGTYYWNYWGQGVMVTVSSGGGGSGGGGSGGGGSSYELIQPPSAAVTLGNTVSLTCVGDELPKRYAYWYQQKPDQSIVRVIYEDSVRPPGISDRFSGSSSGTTATLTIRDAQNEDEADYYCQSTYGDDKLYIFGGGTKLTVLG

SEQ ID NO: 4775 - protein, 257 aa, Artificial Sequence
  Description of Artificial Sequence: Synthetic scFv sequence
DIQMTQSPSSLSASVGDRVTITCRASQDVNTAVAWYQQKPGKAPKLLIYSASFLYSGVPSRFSGSRSGTDFTLTISSLQPEDFATYYCQQHYTTPPTFGQGTKVEIKRGSTSGSGKPGSGEGSTKGEVQLVESGGGLVQPGGSLRLSCAASGFNIKDTYIHWVRQAPGKGLEWVARIYPTNGYTRYADSVKGRFTISADTSKNTAYLQMNSLRAEDTAVYYCSRWGGDGFYAMDYWGQGTLVTVSSGGGGSGGGGSC

SEQ ID NO: 4776 - protein, 246 aa, Artificial Sequence
  Description of Artificial Sequence: Synthetic scFv sequence
EVQLLESGGGAVQPGRSLRLSCAASGFTFSSYAMHWVRQAPGKGLEWVAVISYDGSNKYYADSVKGRFTISRDNSKNTLYLQMNSLRAEDTAVYYCASGYSSSWYLDYWGQGTLVTVSSGGGGSGGGGSGGGASDIQMTQSPSSVSASVGDRVTITCQASQDISNYLNWYQQKPGKAPKLLIYDASNLETGVPSRFSGSGSGTDFTFTISSLQPEDIATYYCQQYDNLPLTFGGGTKVEIKRTAAA

SEQ ID NO: 4777 - protein, 246 aa, Artificial Sequence
  Description of Artificial Sequence: Synthetic scFv sequence
EVQLLESGGGVVQPGRSLRLSCAASGFTFSSYAMHWVRQAPGKGLEWVAVISYDGSNKYYADSVKGRFTISRDNSKNTLYLQMNSLRAEDTAVYYCAKGGDTYGFLDNWGQGTMVTVSSGGGGSGGGGSGGGASDIQMTQSPSTLSASVGDRVTITCRASQSISSWLAWYQQKPGKAPKLLIYKASSLESGVPSRFSGSGSGTDFTLTISSLQPEDFATYYCQQFNAYPLTFGGGTKVEIKRTAAA

SEQ ID NO: 4778 - protein, 249 aa, Artificial Sequence
  Description of Artificial Sequence: Synthetic scFv sequence
EVQLLESGGGVVQPGRSLRLSCAASGFTFSSYGMHWVRQAPGKGLEWVAVISYDGSNKYYADSVKGRFTISRDNSKNTLYLQMNSLRAEDTAVYYCAKDDGAMRYWGQGTMVTVSSGGGGSGGGGSGGGASDIQMTQSPDSLAVSLGERATINCKSSQSVLYSSNNKNYLAWYQQKPGQPPKLLIYWASTRESGVPDRFSGSGSGTDFTLTISSLQAEDVAVYYCQQYYDSPYTFGQGTKVDIKRTAAA

SEQ ID NO: 4779 - protein, 247 aa, Artificial Sequence
  Description of Artificial Sequence: Synthetic scFv sequence
  MOD_RES (101)..(101): Any amino acid
EVQLVESGGGVVQPGRSLRLSCAASGFTFSSYAMHWVRQAPGKGLEWVAVISYDGSNKYYADSVKGRFTISRDNSKNTLYLQMNSLRAEDTAVYYCARGYXASSWSQGLWGQGTLVTVSSGGGGSGGGGSGGGASDIQMTQSPSSLSASVRDRVTITCQASQDISNYLNWYQQKPGKAPKLLIYDASNLETGVPSRFSGSGSGTDFTFTISSLQPEDIATYYCQQYDNLPPTFGGGTKVEIKRTAAA

SEQ ID NO: 4780 - protein, 252 aa, Artificial Sequence
  Description of Artificial Sequence: Synthetic scFv sequence
EVRLQQSGPDLIKPGASVKMSCKASGYTFTGYVMHWVKQRPGQGLEWIGFINPYNDDIQSNERFRGKATLTSDKSSTTAYMELSSLTSEDSAVYYCARGAGYNFDGAYRFFDFWGQGTTLTVSSGGGGSGGGGSGGGGSDVVMTQSPLSLPVSLGDQASISCRSSQRLVHSNGNTYLHWYLQKPGQSPKLLIYRVSNRFPGVPDRFSGSGSGTDFTLKISRVEAEDLGIYFCSQSTHVPYTFGGGTKLEIKR

SEQ ID NO: 4781 - protein, 245 aa, Artificial Sequence
  Description of Artificial Sequence: Synthetic scFv sequence
QVQLVESGAEVKKPGASVKVSCKASGYTFTGYYMHWVRQAPGQGLEWMGRINPNSGGTNYAQKFQGRVTMTRDTSISTAYMELSRLRSDDTAVYYCASGGAGWNWGQGTMVTVSSGGGGSGGGGSGGGASNFMLTQPHSVSESPGKTATISCTRSSGSIASNYVQWYQQRPGSAPTTVIYEDNQRPFGVPDRFSGSIDSSSNSASLTISGLKTEDEADYYCQSHDSSNVVFGGGTQLTVLGQPAA

SEQ ID NO: 4782 - protein, 246 aa, Artificial Sequence
  Description of Artificial Sequence: Synthetic scFv sequence
QVQLVESGGGLVQPGRSLRLSCAASGFTFSSYAMHWVRQAPGKGLEWVAVISYDGSSKYYADSVKGRFTISRDNSKNTLYLQMNSLRAEDTAVYYCAKGGGSFGAFDIWGQGTLVTVSSGGGGSGGGGSGGGASDIQMTQSPSSLSASVGDRVTITCRASQSISRYLNWYQQKPGKAPNLLIYAASSLQSGVPSRFSGSGSGTDFTLTISSLQPEDFATYYCQQYNSYPLTFGGGTKLEIKRTAAA

SEQ ID NO: 4783 - protein, 244 aa, Artificial Sequence
  Description of Artificial Sequence: Synthetic scFv sequence
QVQLVESGGGVVQPGRPLRLSCAASGFTFSSYAMHWVRQAPGKGLEWVAVISYDGSNKYYADSVKGRFTISRDNSKNTLYLQMNSLRAEDTAVYYCARAGYSYADYWGQGTMVTVSSGGGGSGGGGSGGGASDIQMTQSPSSLSASVGDRVTITCRASQGIRNDLGWYQQKPGKAPKRLIYAASSLQSGVPSRFSGSGSGTEFTLTISSLQPEDFATYYCLQHNSYPLTFGGGTKVDIKRTAAA

SEQ ID NO: 4784 - protein, 244 aa, Artificial Sequence
  Description of Artificial Sequence: Synthetic scFv sequence
QVQLVESGGGVVQPGRSLRLSCAAPGFTFSSYGMHWVRQAPGKGLEWVAVISYDGSNKYYADSVKGRFTISRDNSKNTLYLQMNSLRAEDTAVYYCARNKQYGMDVWGQGTLVTVSSGGGGSGGGGSGGGASDIVMTQSPATLSLAPGERATLSCRASQSVGSNLAWYQQKPGQAPSLLIYDASTRATGIPARFSGSGSGTDFTLTISSLQSEDIAVYYCQQYHRWPLTFGGGTKVEIKRTAAA

SEQ ID NO: 4785 - protein, 247 aa, Artificial Sequence
  Description of Artificial Sequence: Synthetic scFv sequence
QVQLVESGGGVVQPGRSLRLSCAASGFTFSSYAMHWVRQAPGKGLEWVAVISYDGSNKYYADSVKGRFTISRDNSKNTLYLQMNSLRAEDTAVYYCARAHNSSSWSFDYWGQGTLVTVSSGGGGSGGGGSGGGASDIQMTQSPSSLSASVGDRVTITCRASQSISSYLNWYQQKPGKAPKLLIYDASNLETGVPSRFSGSGSGTDFTFTISSLQPEDIATYYCQQYDNLPLTFGGGTKVDIKRTAAA

SEQ ID NO: 4786 - protein, 251 aa, Artificial Sequence
  Description of Artificial Sequence: Synthetic scFv sequence
QVQLVESGGGVVQPGRSLRLSCAASGFTFSSYGMHWVRQAPGKGLEWVAVISYDGSNKYYADSVKGRFTISRDNSKNTLYLQMNSLRAEDTAVYYCAKDLGGSGGAFDIWGQGTLVTVSSGGGGSGGGGSGGGASDIVMTQTPHSLSVTPGQPASISCKSSQSLLYSDGKTYLYWYLQKPGQPPQLLIYEVSNRFSGVPDRFSGSGSGTDFTLKISRVEAEDVGVYYCMQSIQLYTFGQGTKVDIKRTAAA

SEQ ID NO: 4787 - protein, 247 aa, Artificial Sequence
  Description of Artificial Sequence: Synthetic scFv sequence
EVQLVESGAEVKKPGASVKVSCKASGYTFTGYYMHWVRQAPGQGLEWMGRINPNSGGTNYAQKFQGRVTMTRDTSISTAYMELSSLRSEDTAVYYCARFGERYAFDIWGQGTLVTVSSGGGGSGGGGSGGGASQSELTQPPSASGSPGQSVTISCTGTSTDVGAFHFVSWYQHTPGKAPKLLISEVRKRASGVPDRFSGSRSGNTASLTVSGLQSEDEADYFCSAYTGSNYVFGSGTKLTVLGQPAA

SEQ ID NO: 4788 - protein, 249 aa, Artificial Sequence
  Description of Artificial Sequence: Synthetic scFv sequence
EVQLVESGGGVVQPGGSLRLSCAASGFTFSSYAMSWVRQAPGKGLEWVSAISGSGGSTYYADSVKGRFSISRDNSKNTLYLQMNSLRAEDTAVYYCARTRSSGAFDIWGQGTLVTVSSGGGGSGGGGSGGGASNFMLTQPHSVSESPGKTVTISCTRSSGSIASKYVQWYQQRPGSSPTTVIYEDNQRPSGVPDRFSGSIDTSSNSASLTISGLRTEDEADYYCHSYDSNNHSVFGGGTKVTVLGQPAA

SEQ ID NO: 4789 - protein, 251 aa, Artificial Sequence
  Description of Artificial Sequence: Synthetic scFv sequence
EVQLVESGGGVVQPGRSLRLSCAASGFTFSSYAMHWVRQAPGKGLEWVAVISYDGSNKYYADSVKGRFTISRDNSKNTLYLQMNSLRAEDTAVYYCARGGFTVPGGAFDIWGQGTLVTVSSGGGGSGGGGSGGGASNFMLTQPHSVSDSPGKTVTISCTRSSGRIGSNFVQWYQQRPGSSPTTVIYEDDQRPSGVPARFSGSIDSSSNSASLTISGLTTADEAGYYCQSYDASNVIFGGGTKLTVLGQPAA

SEQ ID NO: 4790 - protein, 248 aa, Artificial Sequence
  Description of Artificial Sequence: Synthetic scFv sequence
EVQLVQSGAEVKKPGASVKVSCKASGYTFTGYYMHWVRQAPGQGLEWMGWINPNSGGTNYAQKFQGRVTMTRDTSISTAYMELSSLRSEDTAVYYCARDTGPIDYWGQGTMVTVSSGGGGSGGGGSGGGASDIVMTQTPLSLSVTPGQPASISCKSSQSLLHSDGKTYLYWYLQKPGQPPQLLVYEVSNRFSGVPDKFSGSGSGTDFTLKISRVEAEDVGVYYCMQGIQLPPTFGGGTKVDIKRTAAA

SEQ ID NO: 4791 - protein, 249 aa, Artificial Sequence
  Description of Artificial Sequence: Synthetic scFv sequence
EVQLVQSGAEVKKPGSSVKVSCEASGYTFTSYAISWVRQAPGQGLEWMGWMNPNSGNTGYAQKFQGRVTMTRNTSISTAYMELSSLRSEDTAVYYCARVSSYYGMDVWGQGTLVTVSSGGGGSGGGGSGGGASNFMLTQPLSVSESPGKTVTISCTRSSGSIASNYVQWYQQRPGSAPTTVIYEDNQRPSGVPDRFSGSIDSSSNSASLTISGLKTEDEADYYCQSYNSSNHWVFGGGTKVTVLGQPAA

SEQ ID NO: 4792 - protein, 249 aa, Artificial Sequence
  Description of Artificial Sequence: Synthetic scFv sequence
EVQLVQSGAEVKKPGSSVKVSCKASGGTFSSYAISWVRQAPGQGLEWMGIINPSGGSTSYAQKFQGRVTMTRDTSTSIVYMELSSLRSEDTAVYYCARGVWNSGSYLGFDYWGQGTLVTVSSGGGGSGGGGSGGGASDIQMTQSPSSLSASVGDRVTITCQASQDISNYLNWYQQKPGKAPKLLIYAASSLQSGVPSRFSGSGSGTDFTLTISSLQPEDFATYYCQQSYSTPLTFGGGTKLEIKRTAAA

SEQ ID NO: 4793 - protein, 252 aa, Artificial Sequence
  Description of Artificial Sequence: Synthetic scFv sequence
QMQLVQSGAEVKKPGASVKVSCKASGYTFASYYMHWVRQAPGQGLEWMGIINPSGGSTSYAQKFQGRVTMTRDTSTSTVYMELSRLRSDDTAVYYCASNRGGSYKSVGMDVWGQGTTVTVSSGGGGSGGGGSGGGASNFMLTQPQSVSESPGKTVTISCTRSSGNFASKYVQWYQQRPGSSPTTVIYENYQRPSGVPDRFSGSIDSSSNSATLTISGLKTEDEADYYCQSYDEVSVVFGGGTQLTVLGQPAA

SEQ ID NO: 4794 - protein, 252 aa, Artificial Sequence
  Description of Artificial Sequence: Synthetic scFv sequence
QVQLQQSGPGLVKPSQTLSLTCAISGDSVSSNSAAWNWIRQSPSRGLEWLGRTYYRSKWYNDYAVSVKSRITINPDTSKNQFSLQLNSVTPEDTAVYYCARDQWLANYYYYGMDVWGQGTLVTVSSGGGGSGGGGSGGGASSYELTQPLSVSVALGQTARITCGGNNIGSKNVHWYQQKPGQAPVLVIYRDNNRPSGIPERFSGSNSGNTATLTISKAQAGDEADYYCQVWDSNSWVFGGGTKLTVLGQPAA

SEQ ID NO: 4795 - protein, 246 aa, Artificial Sequence
  Description of Artificial Sequence: Synthetic scFv sequence
QVQLVESGAEVKKPGASVKVSCKASGYTFTGYYMHWVRQAPGQGLEWMGRINPNSGGTNYAQKFQGRVTMTRDTSISTAYMELSRLRSDDTAVYYCASPRGRGSAFDIWGQGTLVTVSSGGGGSGGGGSGGGASSYELTQPPSVSVSPGQTATISCSGDQLGGKYGHWYQKKPGQSPVLVLYQDRKRPAGIPERFSGSSSGNTITLTISGTQAVDEADYYCQAWDTNLGGVFGGGTKVTVLGQPAA

SEQ ID NO: 4796 - protein, 249 aa, Artificial Sequence
  Description of Artificial Sequence: Synthetic scFv sequence
QVQLVESGGGLVKPGGSLRLSCAASGFTFSDYYMSWIRQAPGKGLEWVSYISSSGSTIYYADSVEGRFTISRDNAKNSLYLQMNSLRTEDTAVYYCARARVGGMDVWGQGTMVTVSSGGGGSGGGGSGGGASNFMLTQPHSVSESPGKTVTISCTRSSGSIASNYVQWYQQRPGSSPTTVIYEDNQRPSGVPDRFSGSIDSSSNSASLTISGLKTEDEADYYCQSFDADNLHVVFGGGTKLTVLGQPAA

SEQ ID NO: 4797 - protein, 240 aa, Artificial Sequence
  Description of Artificial Sequence: Synthetic scFv sequence
QVTLESGPGILPSQTLSLTCSFSGFSLSTSGMGVGWIRQPSGKGLEWLAHIWWDDDKYYNPSLKSQLTISDTSRNQVFLKITSVDTADTATYYCSRRPRGTMDAMDYWGQGTSVTVSSGGGGSGGGGSGGGGSDIVMTQAASSLSASLGDRVTISCRASQDISKYLNWYQQKPDGTVKLLIYYTSRLHSGVPSRFSGSGSGTDYSLTIRNLEQEDIATYFCQQVYTLPWTFGGGTKLEIK

SEQ ID NO: 4798 - protein, 245 aa, Artificial Sequence
  Description of Artificial Sequence: Synthetic scFv sequence
QVTLKESGPGILKPSQTLSLTCSFSGFSLNTSGMGVGWIRQPSGKGLEWLAHIWWDDDKYYNPSLKSQLTISKDTSRNQVFLKITSVDTADSATYYCARRASHVSTVDSFDFWGQGTTLTVSSGGGGSGGGGSGGGGSDIQMTQTTSSLSASLGDRVTISCRASQDISNYLNWFQQKPDGTVKLLIYYTSRLHSGVPSKFSGSGSGTDYSLTISNLEQEDIATYFCQQGYTLPWTFGGGTKLEIK

SEQ ID NO: 4799 - protein, 242 aa, Artificial Sequence
  Description of Artificial Sequence: Synthetic scFv sequence
QVTLKESGPGILKPSQTLSLTCSFSGFSLNTSGMGVGWIRQPSGKGLEWLAHIWWDDDKYYNPSLKSQLTISKDTSRNQVFLKITSVDTADSATYYCARRASHVSTVDSFDFWGQGTTLTVSSGGGGSGGGGSGGGGSDIQMTQTTSSLSASLGDRVTISCRASQDISNYLNWFQQPDGTVLLIYYTSRLHSGVPSFSGSGSGTDYSLTISNLEQEDIATYFCQQGYTLPWTFGGGTKLEIK

SEQ ID NO: 4800 - protein, 243 aa, Artificial Sequence
  Description of Artificial Sequence: Synthetic scFv sequence
QVTLKESGPGILKPSQTLSLTCSFSGFSLSTSGMGVGWIRQPSGKGLEWLAHIWWDDDKYYNPSLKSQLTISKDTSRNQVFLKITSVDTADTATYYCSRRPRGTMDAMDYWGQGTSVTVSSGGGGSGGGGSGGGGSDIVMTQAASSLSASLGDRVTISCRASQDISKYLNWYQQKPDGTVKLLIYYTSRLHSGVPSRFSGSGSGTDYSLTIRNLEQEDIATYFCQQVYTLPWTFGGGTKLEIK

SEQ ID NO: 4801 - protein, 247 aa, Artificial Sequence
  Description of Artificial Sequence: Synthetic scFv sequence
EVQLLESGGGLVQPGGSLRLSCAASGFTFSDYYMSWVRQAPGKGLEWVSAIYSGGGSIYYADSVKGRFTISRDNSKNTLYLQMNSLRAEDTAVYYCARDVQWNKAPRFDYWGQGTLVTVSSGGGGSGGGGSGGGGSQSVLTQPPSASGAPGQRVTISCSGSSSNIGSNDVSWYQQLPGTAPKLLIYADSNRPSGVPDRFSGSKSGTSASLAISGLRSEDEADYYCGSWDYSLSGYVFGGGTKLTVLG

SEQ ID NO: 4802 - protein, 247 aa, Artificial Sequence
  Description of Artificial Sequence: Synthetic scFv sequence
EVQLLESGGGLVQPGGSLRLSCAASGFTFSGYAMSWVRQAPGKGLEWVSGISHDGGNTYYADSVKGRFTISRDNSKNTLYLQMNSLRAEDTAVYYCARDRRKGPSTEFDYWGQGTLVTVSSGGGGSGGGGSGGGGSQSVLTQPPSLSGTPGQRVTISCTGSSSNIGSNSVSWYQQLPGTAPKLLIYDDNNRPSGVPDRFSGSKSGTSASLAISGLRSEDEADYYCGAWDYSLSAYVFGGGTKLTVLG

SEQ ID NO: 4803 - protein, 253 aa, Artificial Sequence
  Description of Artificial Sequence: Synthetic scFv sequence
EVQLLESGGGLVQPGGSLRLSCAASGFTFSGYAMSWVRQAPGKGLEWVSSIYSSSGSKYYADSVKGRFTISRDNSKNTLYLQMNSLRAEDTAVYYCARASSTCTRTWCSYDDAMDVWGQGTLVTVSSGGGGSGGGGSGGGGSQSVLTQPPSASGTPGQRVTISCTGSSSNIGNNAVTWYQQLPGTAPKLLIYDDSHRPSGVPDRFSGSKSGTSASLAISGLRSEDEADYYCGTWDYSLSGYVFGGGTKLTVLG

SEQ ID NO: 4804 - protein, 253 aa, Artificial Sequence
  Description of Artificial Sequence: Synthetic scFv sequence
EVQLLESGGGLVQPGGSLRLSCAASGFTFSNYDMSWVRQAPGKGLEWVSGIYPNGGSKYYADSVKGRFTISRDNSKNTLYLQMNSLRAEDTAVYYCARALRQCQRYWCSYADGMDVWGQGTLVTVSSGGGGSGGGGSGGGGSQSVLTQPPSASGTPGQRVTISCTGSSSNIGSNYVSWYQQLPGTAPKLLIYADSQRPSGVPDRFSGSKSGTSASLAISGLRSEDEADYYCGTWDYSLSGYVLGGGTKLTVLG

SEQ ID NO: 4805 - protein, 253 aa, Artificial Sequence
  Description of Artificial Sequence: Synthetic scFv sequence
EVQLLESGGGLVQPGGSLRLSCAASGFTFSNYDMSWVRQAPGKGLEWVSLISHGGGNIYYADSVKGRFTISRDNSKNTLYLQMNSLRAEDTAVYYCARVPVMCTNHWCSYANGMDVWGQGTLVTVSSGGGGSGGGGSGGGGSQSVLTQPPSASGTPGQRVIISCSASSSNIGSNAVYWYQQLPGTAPKLLIYSDNQRPSGVPDRFSGSKSGTSASLAISGLRSEDEADYYCGSWDYSLSAYVFGGGTKLTVLG

SEQ ID NO: 4806 - protein, 247 aa, Artificial Sequence
  Description of Artificial Sequence: Synthetic scFv sequence
EVQLLESGGGLVQPGGSLRLSCAASGFTFSSYSMSWVRQAPGKGLEWVSGISHGGGNKYYADSVKGRFTISRDNSKNTLYLQMNSLRAEDTAVYYCARDLRANNDTGFDYWGQGTLVTVSSGGGGSGGGGSGGGGTQSVLTQPPSSSGTPGQRVTISCTGSSSNIGSNAVTWYQQLPGTAPKLLIYDDNHRPSGVPDRFSGSKSGTSASLAISGLRSEDEADYYCGAWDYSLNAYVFGGGTKLTVLG

SEQ ID NO: 4807 - protein, 247 aa, Artificial Sequence
  Description of Artificial Sequence: Synthetic scFv sequence
EVQLLESGGGLVQTGGSLRLSCAASGFTFSDYAMSWVRQAPGKGLEWVSSIYPGSGSKYYADSVKGRFAISRDNSKNTLYLQMNSLRAEDTAVYYCARDAWFRGHNVFDYWGQGTLVTVSSGGGGSGGGGSGGGGSQSVLTQPPSASGTPGQRVTISCTGSSSNIGSNNVTWYQQLPGTAPKLLIYSDSHRPSGVPDRFSGSKSGTSASLAISGLQSEDEADYYCGSWDYSLSAYVFGGGTKLTVLG

SEQ ID NO: 4808 - protein, 253 aa, Artificial Sequence
  Description of Artificial Sequence: Synthetic scFv sequence
EVQLLESGGGLVQTGGSLRLSCAASGFTFSDYAMSWVRQAPGKGLEWVSWIYPGDSSIYYADSVKGRFTISRDNSKNTLYLQMNSLRAEDTAVYYCARLLSIDQAQLHYYYDAMDVWGQGTLVTVSSGGGGSGGGGSGGGGSQSVLTQPPSPSGTPGQRVTISCTGSSSNIGNYYVYWYQQLPGTAPKLLIYANSHRPSGVPDRFSGSKSGTSASLAISGLRSEDEADYYCGSWDDSLSAYVFGGGTKLTVLG

SEQ ID NO: 4809 - protein, 251 aa, Artificial Sequence
  Description of Artificial Sequence: Synthetic scFv sequence
AIQMTQSPSSLSASVGDRVTITCRASQSISSYLNWYQQKPGKAPKLLIHAASNLQSGVPSRFSGSGSGTDFTLTISSLQPEDFATYYCQQSYSTPLTFGGGTKVEIKLGSGGSGGGGSGGGGSGGGGSGGSGGEVQLLESGGGLVQPGGSLRLSCAASGFTFSHYEMGWVRQAPGKGLEWVSYISSSGGWTAYADSVKGRFTISRDNSKNTLYLQMNSLRAEDTAVYYCARIGYADAFDIWGQGTTVTVSS

SEQ ID NO: 4810 - protein, 248 aa, Artificial Sequence
  Description of Artificial Sequence: Synthetic scFv sequence
EVQLLESGGGLVQPGGSLRLSCAASGFTFSGYIMWWVRQAPGKGLEWVSVISPSGGDTWYADSVKGRFTISRDNSKNTLYLQMNSLRAEDTAVYYCATAGDYWGQGTLVTVSSVGSGGSGGGGSGGGGSGGGGSGGSGGQSELTQPPSASGTPGQRVTISCSGSSSNIGRNPVNWYQHLPGTAPKLLIYGDNQRPSGVPDRFSGSRSGTSASLAISGLQSEDEADYYCAAWDDSLNGVVFGGGTKLTV

SEQ ID NO: 4811 - protein, 254 aa, Artificial Sequence
  Description of Artificial Sequence: Synthetic scFv sequence
EVQLLESGGGLVQPGGSLRLSCAASGFTFSKYDMHWVRQAPGKGLEWVSVISPSGGWTSYADSVKGRFTISRDNSKNTLYLQMNSLRAEDTAMYYCARDDYSKGRDAFDIWGQGTLVTVSSVGSGGSGGGGSGGGGSGGGGSGGSGGDIQLTQSPSSLSASVGDRVTITCRASQSISSYLNWYQQKPGKAPKLLIYAASSLQSGVPSRFSGSGSGTDFTLTISSLQPEDFATYYCQQSYSTPYTFGQGTKLEIK

SEQ ID NO: 4812 - protein, 252 aa, Artificial Sequence
  Description of Artificial Sequence: Synthetic scFv sequence
EVQLLESGGGLVQPGGSLRLSCAASGFTFSTYDMHWVRQAPGKGLEWVSVISPSGGWTAYADSVKGRFTISRDNSKNTLYLQMNSLRAEDTAVYYCARAAAGYDAFDIWGQGTMVTVSSVGSGGSGGGGSGGGGSGGGGSGGSGGEIVLTQSPSPLSASVGDRVTITCRASHNINKYLNWYQQKPGKAPKLLIFGASSLRSGVPSRFSGSGSGTDFTLTISSLEPEDLATYFCQQTYNTPLTFGGGTKLEIK

SEQ ID NO: 4813 - protein, 255 aa, Artificial Sequence
  Description of Artificial Sequence: Synthetic scFv sequence
EVQLLESGGGLVQPGGSLRLSCAASGFTFSWYDMDWVRQAPGKGLEWVSVISPSGGWTAYADSVKGRFTISRDNSKNTLYLQMNSLRAEDTAVYYCARDSSGYYSPDAFDIWGQGTLVTVSSVGSGGSGGGGSGGGGSGGGGSGGSGGNIQMTQSPSSLSASVGDRVTITCRASQSISSYLNWYQQKPGKAPKLLIYDASSLQSGVPLRFSGSGSGTDFTLTISSLQPEDFATYYCQQSYSTPLTFGGGTKVDIK

SEQ ID NO: 4814 - protein, 254 aa, Artificial Sequence
  Description of Artificial Sequence: Synthetic scFv sequence
EVQLLESGGGLVQPGGSLRLSCAASGFTFSWYDMVWVRQAPGKGLEWVSVISPSGGWTSYADSVKGRFTISRDNSKNTLYLQMNSLRAEDTAVYYCARDHSGYDSEYFDYWGQGTLVTVSSVGSGGSGGGGSGGGGSGGGGSGGSGGNIQMTQSPSSLSASVGDRVTITCRASQSISSYLNWYQQKPGKAPKLLIYAASSLQSGVPSRFSGSGSGTDFTLTISSLQPEDFATYYCQQSYSTPYTFGQGTKLEIK

SEQ ID NO: 4815 - protein, 260 aa, Artificial Sequence
  Description of Artificial Sequence: Synthetic scFv sequence
MDFQVQIFSFLLISASVIMSRGDIQMTQSPSSVSASIGDRVTITCRASQGIDNWLGWYQQKPGKAPKLLIYDASNLDTGVPSRFSGSGSGTYFTLTISSLQAEDFAVYFCQQAKAFPPTFGGGTKVDIKGSTSGSGKPGSGEGSEVQLVQSGGGLVKPGGSLRLSCAASGFTFSSYSMNWVRQAPGKGLEWVSSISSSSSYIYYADSVKGRFTISRDNAKNSLYLQMNSLRAEDTAVYYCARVTDAFDIWGQGTMVTVSS

SEQ ID NO: 4816 - protein, 265 aa, Artificial Sequence
  Description of Artificial Sequence: Synthetic scFv sequence
MGWSCIILFLVATATGVHSEVQLVETGGGLVQPGNSLKLSCATSGFIFSTTWMNWIRQTPGKRLEWLAQIEDKSNNYFISYSESVKGRFTISRDDSKSSVYLQMNNLKEEDTAIYYCSWKYRSNYYFDYWGQGVMVTVSSGSTSGSGKPGSGEGSDIVLTQSPALAVSLEQRATISCKTSQNVDYYGISYLHWYQQKPGQQPKLLIYEGSNLASGIPARFSGSGSGTDFTLTIDPVEADDIVTYYCQQSKDYPYTFGAGTKLELK

SEQ ID NO: 4817 - protein, 250 aa, Artificial Sequence
  Description of Artificial Sequence: Synthetic scFv sequence
DIQMTQSPSSLSASVGDRVTITCRASQSISSYLNWYQQKPGKAPKLLIYAASSLQSGVPSRFSGSGSGTDFTLTISSLQPEDFATYYCQQSYSTPLTFGGGTKVDIKRSRGGGGSGGGGSGGGGSLEMAQVQLQQSGPGLVKPSQTLSLTCAISGDSVSSNSAAWNWIRQSPSRGLEWLGRTYYGSKWYNDYAVSVKSRITINPDTSKNQFSLQLNSVTPEDTAVYYCARGRLGDAFDIWGQGTMVTVSS

SEQ ID NO: 4818 - protein, 246 aa, Artificial Sequence
  Description of Artificial Sequence: Synthetic scFv sequence
DIQMTQSPSTLSASVGDRVTITCRASQNINKWLAWYQQRPGKAPQLLIYKASSLESGVPSRFSGSGSGTEYTLTISSLQPDDFATYYCQQYNSYATFGQGTKVEIKRSRGGGGSGGGGSGGGGSLEMAQVQLVQSGAEVKKPGESLKISCKGSGYNFSNKWIGWVRQLPGRGLEWIAIIYPGYSDITYSPSFQGRVTISADTSINTAYLHWHSLKASDTAMYYCVRHTALAGFDYWGLGTLVTVSS

SEQ ID NO: 4819 - protein, 243 aa, Artificial Sequence
  Description of Artificial Sequence: Synthetic scFv sequence
DVQLVQSGAEVKKPGASVKVSCKASGYTFTRYTMHWVRQAPGQGLEWIGYINPSRGYTNYADSVKGRFTITTDKSTSTAYMELSSLRSEDTATYYCARYYDDHYCLDYWGQGTTVTVSSGEGTSTGSGGSGGSGGADDIVLTQSPATLSLSPGERATLSCRASQSVSYMNWYQQKPGKAPKRWIYDTSKVASGVPARFSGSGSGTDYSLTINSLEAEDAATYYCQQWSSNPLTFGGGTKVEIK

SEQ ID NO: 4820 - protein, 253 aa, Artificial Sequence
  Description of Artificial Sequence: Synthetic scFv sequence
QAVVTQPPSASGTPGQRVTISCSGSSSNIGSNTVNWYQQVPGTAPKLLIYSNNQRPSGVPDRFSGSKSGTSASLAISGLQSEDEADYYCAAWDDSLNGWVFGGGTKLTVLGSRGGGGSGGGGSGGGGSLEMAQMQLVQSGAEVKEPGESLRISCKGSGYSFTNFWISWVRQMPGKGLEWMGRVDPGYSYSTYSPSFQGHVTISADKSTSTAYLQWNSLKASDTAMYYCARVQYSGYYDWFDPWGQGTLVTVSS

SEQ ID NO: 4821 - protein, 251 aa, Artificial Sequence
  Description of Artificial Sequence: Synthetic scFv sequence
QSVLTQPPSVSGAPGQRVTISCTGSSSNIGAGYDVHWYQQLPGTAPKLLIYGNSNRPSGVPDRFSGSKSGTSASLAISGLQSEDEADYYCAAWDDSLNGYVFGTGTKLTVLGSRGGGGSGGGGSGGGGSLEMAEVQLVETGGGLLQPGGSLRLSCAASGFSVSGTYMGWVRQAPGKGLEWVALLYSGGGTYHPASLQGRFIVSRDSSKNMVYLQMNSLKAEDTAVYYCAKGGAGGGHFDSWGQGTLVTVSS

SEQ ID NO: 4822 - protein, 249 aa, Artificial Sequence
  Description of Artificial Sequence: Synthetic scFv sequence
QSVVTQPPSVSVAPGKTARITCGRNNIGSKSVHWYQQKPGQAPVLVVYDDSDRPSGIPERFSGSNSGNTATLTISRVEAGDEADYYCQVWDSSSDHVVFGGGTKLTVLGSRGGGGSGGGGSGGSLEMAEVQLVQSGGGVVRPGGSLRLSCAASGFTFDDYGMSWVRQAPGKGLEWVSGINWNGGSTGYADSVRGRFTISRDNAKNSLYLQMNSLRAEDTALYYCARERGYGYHDPHDYWGQGTLVTVSS

SEQ ID NO: 4823 - protein, 250 aa, Artificial Sequence
  Description of Artificial Sequence: Synthetic scFv sequence
QTVVTQPPSASGTPGQRVTISCSGSSSNIGSNYVYWYQQLPGTAPKLLIYRSNQRPSGVPDRFSGSKSGTSASLAISGPRSVDEADYYCAAWDDSLNGVVFGGGTKLTVLGSRGGGGSGGGGSGGGSLEMAQVQLVQSGAEVKKPGSSVKVSCKASGGTFSSYAISWVRQAPGQGLEWMGGIIPIFGTANYAQKFQGRVTITADESTSTAYMELSSLRSEDTAVYYCARRIPPYYGMDVWGQGTTVTVSS

SEQ ID NO: 4824 - protein, 243 aa, Artificial Sequence
  Description of Artificial Sequence: Synthetic scFv sequence
QLVESGGGLVQPGRSLRLSCTTSGFTFGDYAMIWARQAPGKGLEWVSSISSSSSYIYYADSVKGRFTISRDNAKNSLYLQMNSLRAEDTAVYYCARERYDFWSGMDVWGKGTTVTVSSGGGGSGGGGSGGSAQSALTQPASVSGSPGQSITISCTGTSSDVGSYNLVSWYQQHPGKAPKLMIYEGSKRPSGVSNRFSGSKSGNAASLTISGLQAEDEADYYCQSYDSSLSVVFGGGTKLTVLG

SEQ ID NO: 4825 - protein, 258 aa, Artificial Sequence
  Description of Artificial Sequence: Synthetic scFv sequence
SRAAQPAMAQVQLQQSGAELVKPGASVKISCKASGYSFTGYFMNWVKQSHGKSLEWIGRIHPYDGDTFYNQNFKDKATLTVDKSSNTAHMELLSLTSEDFAVYYCTRYDGSRAMDYWGQGTTVTVSSGGGGSGGGGSETGGGGSDIELTQSPASLAVSLGQRAIISCKASQSVSFAGTSLMHWYHQKPGQQPKLLIYRASNLEAGVPTRFSGSGSKTDFTLNIHPVEEEDAATYYCQQSREYPYTFGGGTKLEIKRAA

SEQ ID NO: 4826 - protein, 243 aa, Artificial Sequence
  Description of Artificial Sequence: Synthetic scFv sequence
DIQMTQSPSSLSASVGDRVTITCRASQDVNTAVAWYQQKPGKAPKLLIYSASFLYSGVPSRFSGSRSGTDFTLTISSLQPEDFATYYCQQHYTTPPTFGQGTKVEIKGSTSGSGKPGSGEGSGEVQLVESGGGLVQPGGSLRLSCAASGFNIKDTYIHWVRQAPGKGLEWVARIYPTNGYTRYADSVKGRFTISADTSKNTAYLQMNSLRAEDTAVYYCSRWGGDGFYAMDVWGQGTLVTVSS

SEQ ID NO: 4827 - DNA, 729 bp, Artificial Sequence
  Description of Artificial Sequence: Synthetic scFv sequence
gatatccagatgacccagtccccgagctccctgtccgcctctgtgggcgatagggtcaccatcacctgccgtgccagtcaggatgtgaatactgctgtagcctggtatcaacagaaaccaggaaaagctccgaaactactgatttactcggcatccttcctttattctggagtcccttctcgcttctctggatctagatctgggacggatttcactctgaccatcagcagtctgcagccggaagacttcgcaacttattactgtcagcaacattatactactcctcccacgttcggacagggtaccaaggtggagatcaaagggtctacatctggatctgggaagccgggttctggtgagggttctggtgaggttcagctggtggagtctggcggtggcctggtgcagccagggggctcactccgtttgtcctgtgcagcttctggcttcaacattaaagacacctatatacactgggtgcgtcaggccccgggtaagggcctggaatgggttgcaaggatttatcctacgaatggttatactagatatgccgatagcgtcaagggccgtttcactataagcgcagacacatccaaaaacacagcctacctgcagatgaacagcctgcgtgctgaggacactgccgtctattattgttctagatggggaggggacggcttctatgctatggacgtgtggggtcaaggaaccctggtcaccgtctcctcg

SEQ ID NO: 4828 - protein, 120 aa, Homo sapiens
WRRKRKEKQSETSPKEFLTIYEDVKDLKTRRNHEQEQTFPGGGSTIYSMIQSQSSAPTSQEPAYTLYSLIQPSRKSGSRKRNHSPSFNSTIYEVIGKSQPKAQNPARLSRKELENFDVYS

SEQ ID NO: 4829 - protein, 220 aa, Homo sapiens
MLRLLLALNLFPSIQVTGNKILVKQSPMLVAYDNAVNLSCKYSYNLFSREFRASLHKGLDSAVEVCVVYGNYSQQLQVYSKTGFNCDGKLGNESVTFYLQNLYVNQTDIYFCKIEVMYPPPYLDNEKSNGTIIHVKGKHLCPSPLFPGPSKPFWVLVVVGGVLACYSLLVTVAFIIFWVRSKRSRLLHSDYMNMTPRRPGPTRKHYQPYAPPRDFAAYRS

SEQ ID NO: 4830 - protein, 187 aa, Homo sapiens
RRACRKRIRQKLHLCYPVQTSQPKLELVDSRPRRSSTQLRSGASVTEPVAEERGLMSQPLMETCHSVGAAYLESLPLQDASPAGGPSSPRDLPEPRVSTEHTNNKIEKIYIMKADTVIVGTVKAELPEGRGLAGPAEPELEEELEADHTPHYPEQETEPPLGSCSDVMLSVEEEGKEDPLPTAASGK

SEQ ID NO: 4831 - protein, 187 aa, Homo sapiens; identical to SEQ ID NO: 4830

SEQ ID NO: 4832 - protein, 54 aa, Homo sapiens
HIWQLRSQCMWPRETQLLLEVPPSTEDARSCQFPEEERGERSAEEKGRLGDLWV

SEQ ID NO: 4833 - protein, 60 aa, Homo sapiens
CVKRRKPRGDVVKVIVSVQRKRQEAEGEATVIEALQAPPDVTTVAVEETIPSFTGRSPNH

SEQ ID NO: 4834 - protein, 38 aa, Homo sapiens
CWLTKKKYSSSVHDPNGEYMFMRAVNTAKKSRLTDVTL

SEQ ID NO: 4835 - protein, 54 aa, Homo sapiens
HLWRRQWRPRRFSALEQGIHPPQAQSKIEELEQEPEPEPEPEPEPEPEPEPEQL

SEQ ID NO: 4836 - protein, 42 aa, Homo sapiens
ALYLLRRDQRLPPDAHKPPGGGSFRTPIQEEQADAHSTLAKI

SEQ ID NO: 4837 - protein, 37 aa, Homo sapiens
RRDQRLPPDAHKPPGGGSFRTPIQEEQADAHSTLAKI

SEQ ID NO: 4838 - protein, 49 aa, Homo sapiens
HQRRKYRSNKGESPVEPAEPCRYSCPREEEGSTIPIQEDYRKPEPACSP

SEQ ID NO: 4839 - protein, 111 aa, Homo sapiens
RRHQGKQNELSDTAGREINLVDAKLKSEQTEASTRQNSQVLLSETGIYDNDPDLCFRMQEGSEVYSNPCLEENKPGIVYASLNHSVIGPNSRLARNVKEAPTEYASICVRS

SEQ ID NO: 4840 - protein, 111 aa, Homo sapiens
RRHQGKQNELSDTAGREINLVDAHLKSEQTEASTRQNSQVLLSETGIYDNDPDLCFRMQEGSEVYSNPCLEENKPGIVYASLNHSVIGPNSRLARNVKEAPTEYASICVRS

SEQ ID NO: 4841 - protein, 114 aa, Homo sapiens
CCLRRHQGKQNELSDTAGREINLVDAHLKSEQTEASTRQNSQVLLSETGIYDNDPDLCFRMQEGSEVYSNPCLEENKPGIVYASLNHSVIGPNSRLARNVKEAPTEYASICVRS

SEQ ID NO: 4842 - protein, 44 aa, Homo sapiens
FWVRSKRSRLLHSDYMNMTPRRPGPTRKHYQPYAPPRDFAAYRS

SEQ ID NO: 4843 - protein, 41 aa, Homo sapiens
RSKRSRGGHSDYMNMTPRRPGPTRKHYQPYAPPRDFAAYRS

SEQ ID NO: 4844 - protein, 43 aa, Homo sapiens
RSKRSRGGHSDYIVINMTPRRPGPTRKHYQPYAPPRDFAAYRS

SEQ ID NO: 4845 - protein, 5 aa, Homo sapiens
DKTHT

SEQ ID NO: 4846 - protein, 4 aa, Homo sapiens
CPPC

SEQ ID NO: 4847 - protein, 15 aa, Homo sapiens
CPEPKSCDTPPPCPR

SEQ ID NO: 4848 - protein, 12 aa, Homo sapiens
ELKTPLGDTTHT

SEQ ID NO: 4849 - protein, 10 aa, Homo sapiens
KSCDKTHTCP

SEQ ID NO: 4850 - protein, 7 aa, Homo sapiens
KCCVDCP

SEQ ID NO: 4851 - protein, 7 aa, Homo sapiens
KYGPPCP

SEQ ID NO: 4852 - protein, 16 aa, Homo sapiens
VEPKSPDKTHTCPPCP

SEQ ID NO: 4853 - protein, 16 aa, Homo sapiens
LDPKSSDKTHTCPPCP

SEQ ID NO: 4854 - protein, 39 aa, Homo sapiens
IEVMYPPPYLDNEKSNGTIIHVKGKHLCPSPLFPGPSKP

SEQ ID NO: 4855 - protein, 12 aa, Homo sapiens
GGAVHTRGLDFA

SEQ ID NO: 4856 - protein, 45 aa, Homo sapiens
TTTPAPRPPTPAPTIASQPLSLRPEACRPAAGGAVHTRGLDFACD

SEQ ID NO: 4857 - DNA, 135 bp, Artificial Sequence
  Description of Artificial Sequence: Synthetic Construct
accacaaccccagcacctcgcccaccaacaccagcaccaaccatcgcatcccagccactgtctctgaggcccgaggcatgtaggcctgcagcaggaggcgccgtgcacaccaggggcctggactttgcctgcgat

SEQ ID NO: 4858 - DNA, 135 bp, Artificial Sequence
  Description of Artificial Sequence: Synthetic Construct
acaacaaccccagcacccagacctccaacacctgcaccaaccatcgcaagccagcctctgtccctgaggcccgaggcatgtaggccagcagcaggaggcgccgtgcacacccggggcctggactttgcctgcgat

SEQ ID NO: 4859 - DNA, 135 bp, Artificial Sequence
  Description of Artificial Sequence: Synthetic Construct
accacaaccccagcaccccgcccaccaacacctgcaccaaccatcgcctcccagccactgtctctgaggcccgaggcatgtaggcctgcagcaggaggcgccgtgcacaccaggggcctggactttgcctgcgat

SEQ ID NO: 4860 - DNA, 135 bp, Artificial Sequence
  Description of Artificial Sequence: Synthetic Construct
accacaaccccagcacccagaccaccaacacctgcaccaaccatcgcaagccagcctctgtccctgcgcccagaggcatgcaggccagcagcaggaggagcagtgcacacccggggcctggacttcgcatgtgat

SEQ ID NO: 4861 - DNA, 135 bp, Artificial Sequence
  Description of Artificial Sequence: Synthetic Construct
accacaaccccagcacctcgcccaccaacaccagcaccaaccatcgcatcccagccactgtctctgcgccccgaggcatgcaggcctgcagcaggcggcgccgtgcacaccaggggcctggacttcgcctgtgat

SEQ ID NO: 4862 - DNA, 135 bp, Artificial Sequence
  Description of Artificial Sequence: Synthetic Construct
accacgacgccagcgccgcgaccaccaacaccggcgcccaccatcgcgtcgcagcccctgtccctgcgcccagaggcgtgccggccagcggcggggggcgcagtgcacacgagggggctggacttcgcctgtgat

SEQ ID NO: 4863 - protein, 48 aa, Homo sapiens
AKPTTTPAPRPPTPAPTIASQPLSLRPEACRPAAGGAVHTRGLDFACD

SEQ ID NO: 4864 - protein, 79 aa, Homo sapiens
TTTPAPRPPTPAPTIASQPLSLRPEACRPAAGGAVHTRGLDFACDEPKSPDKTHTCPPCPAPPVAGPSVFLFPPKPKDT

SEQ ID NO: 4865 - protein, 51 aa, Homo sapiens
PAKPTTTPAPRPPTPAPTIASQPLSLRPEACRPAAGGAVHTRGLDFACDIY

SEQ ID NO: 4866 - protein, 69 aa, Homo sapiens
TTTPAPRPPTPAPTIASQPLSLRPEACRPAAGGAVHTRGLDFACDIYIWAPLAGTCGVLLLSLVITLYC

SEQ ID NO: 4867 - DNA, 207 bp, Homo sapiens
accacaaccccagcacctcgcccaccaacaccagcaccaaccatcgcatcccagccactgtctctgaggcccgaggcatgtaggcctgcagcaggaggcgccgtgcacaccaggggcctggactttgcctgcgatatctatatctgggcaccactggcaggaacatgtggcgtgctgctgctgtccctggtcatcaccctgtattgc

SEQ ID NO: 4868 - DNA, 207 bp, Homo sapiens
accacgacgccagcgccgcgaccaccaacaccggcgcccaccatcgcgtcgcagcccctgtccctgcgcccagaggcgtgccggccagcggcggggggcgcagtgcacacgagggggctggacttcgcctgtgatatctacatctgggcgcccttggccgggacttgtggggtccttctcctgtcactggttatcaccctttactgc

SEQ ID NO: 4869 - DNA, 207 bp, Homo sapiens
accacgacgccagcgccgcgaccaccaacaccggcgcccaccatcgcgtcgcagcccctgtccctgcgcccagaggcgtgccggccagcggcggggggcgcagtgcacacgagggggctggacttcgcctgtgatatctacatctgggcgcccttggccgggacttgtggggtccttctcctgtcactggttatcactttactgccc

SEQ ID NO: 4870 - DNA, 207 bp, Homo sapiens
acaacaaccccagcacccagacctccaacacctgcaccaaccatcgcaagccagcctctgtccctgaggcccgaggcatgtaggccagcagcaggaggcgccgtgcacacccggggcctggactttgcctgcgatatctatatctgggcaccactggcaggaacatgtggcgtgctgctgctgtccctggtcatcaccctgtattgc

SEQ ID NO: 4871 - DNA, 207 bp, Homo sapiens
accacaaccccagcaccccgcccaccaacacctgcaccaaccatcgcctcccagccactgtctctgaggcccgaggcatgtaggcctgcagcaggaggcgccgtgcacaccaggggcctggactttgcctgcgatatctacatctgggcacctctggcaggaacatgtggcgtgctgctgctgtccctggtcatcaccctgtattgc

SEQ ID NO: 4872 - DNA, 207 bp, Homo sapiens
accacaaccccagcacccagaccaccaacacctgcaccaaccatcgcaagccagcctctgtccctgcgcccagaggcatgcaggccagcagcaggaggagcagtgcacacccggggcctggacttcgcatgtgatatctacatctgggcaccactggcaggaacatgcggcgtgctgctgctgtccctggtcatcaccctgtattgt

SEQ ID NO: 4873 - DNA, 207 bp, Homo sapiens
accacaaccccagcacctcgcccaccaacaccagcaccaaccatcgcatcccagccactgtctctgcgccccgaggcatgcaggcctgcagcaggcggcgccgtgcacaccaggggcctggacttcgcctgtgatatctacatctgggcacctctggcaggaacatgcggcgtgctgctgctgtctctggtcatcaccctgtattgt

SEQ ID NO: 4874 - DNA, 207 bp, Homo sapiens
accacaaccccagcacctagaccaccaacaccagcacccaccatcgcctctcagccactgagcctgcgccccgaggcatgtaggcctgcagcaggcggcgccgtgcacaccaggggcctggactttgcctgcgatatctacatctgggcaccactggcaggaacatgtggcgtgctgctgctgtccctggtcatcaccctgtactgc

SEQ ID NO: 4875 - protein, 44 aa, Homo sapiens
TTPAPRPPTPAPTIASQPLSLRPEACRPAAGGAVHTRGLDFACD

SEQ ID NO: 4876 - protein, 47 aa, Homo sapiens
TTTPAPRPPTPAPTIASQPLSLRPEACRPAAGGAVHTRGLDFACDIY

SEQ ID NO: 4877 - protein, 11 aa, Homo sapiens
LDKTHTCPPCP

SEQ ID NO: 4878 - protein, 16 aa, Homo sapiens
GLAVSTISSFFPPGYQ

SEQ ID NO: 4879 - protein, 282 aa, Homo sapiens
RWPESPKAQASSVPTAQPQAEGSLAKATTAPATTRNTGRGGEEKKKEKEKEEQEERETKTPECPSHTQPLGVYLLTPAVQDLWLRDKATFTCFVVGSDLKDAHLTWEVAGKVPTGGVEEGLLERHSNGSQSQHSRLTLPRSLWNAGTSVTCTLNHPSLPPQRLMALREPAAQAPVKLSLNLLASSDPPEAASWLLCEVSGFSPPNILLMWLEDQREVNTSGFAPARPPPQPGSTTFWAWSVLRVPAPPSPQPATYTCVVSHEDSRTLLNASRSLEVSYVTDH

SEQ ID NO: 4880 - protein, 246 aa, Homo sapiens
YVTVSSQDPAEPKSPDKTHTCPPCPAPELLGGPSVFLFPPKPKDTLMISRTPEVTCVVVDVSHEDPEVKFNWYVDGVEVHNAKTKPREEQYNSTYRVVSVLTVLHQDWLNGKEYKCKVSNKALPAPIEKTISKAKGQPREPQVYTLPPSRDELTKNQVSLTCLVKGFYPSDIAVEWESNGQPENNYKTTPPVLDSDGSFFLYSKLTVDKSRWQQGNVFSCSVMHEALHNHYTQKSLSLSPGKKDPK

SEQ ID NO: 4881 - protein, 45 aa, Homo sapiens
KPTTTPAPRPPTPAPTIASQPLSLRPEACRPAAGGAVHTRGLDFA

SEQ ID NO: 4882 - protein, 16 aa, Homo sapiens
LEPKSCDKTHTCPPCP

SEQ ID NO: 4883 - protein, 43 aa, Homo sapiens
KPTTTPAPRPPTPAPTIASQPLSLRPEACRPAAGGAVHTRGLD

SEQ ID NO: 4884 - protein, 15 aa, Homo sapiens
EPKSCDKTHTCPPCP

SEQ ID NO: 4885 - protein, 16 aa, Homo sapiens
ELKTPLGDTHTCPRCP

SEQ ID NO: 4886 - protein, 15 aa, Homo sapiens
EPKSCDTPPPCPRCP

SEQ ID NO: 4887 - protein, 12 aa, Homo sapiens
ESKYGPPCPSCP

SEQ ID NO: 4888 - protein, 12 aa, Homo sapiens
ERKCCVECPPCP

SEQ ID NO: 4889 - protein, 229 aa, Homo sapiens
ESKYGPPCPPCPAPEFLGGPSVFLFPPKPKDTLMISRTPEVTCVVVDVSQEDPEVQFNWYVDGVEVHNAKTKPREEQFNSTYRVVSVLTVLHQDWLNGKEYKCKVSNKGLPSSIEKTISKAKGQPREPQVYTLPPSQEEMTKNQVSLTCLVKGFYPSDIAVEWESNGQPENNYKTTPPVLDSDGSFFLYSRLTVDKSRWQEGNVFSCSVMHEALHNHYTQKSLSLSLGK

SEQ ID NO: 4890 - protein, 119 aa, Homo sapiens
ESKYGPPCPPCPGQPREPQVYTLPPSQEEMTKNQVSLTCLVKGFYPSDIAVEWESNGQPENNYKTTPPVLDSDGSFFLYSRLTVDKSRWQEGNVFSCSVMHEALHNHYTQKSLSLSLGK

SEQ ID NO: 4891 - protein, 281 aa, Homo sapiens
RWPESPKAQASSVPTAQPQAEGSLAKATTAPATTRNTGRGGEEKKKEKEKEEQEERETKTPECPSHTQPLGVYLLTPAVQDLWLRDKATFTCFVVGSDLKDAHLTWEVAGKVPTGGVEEGLLERHSNGSQSQHSRLTLPRSLWNAGTSVTCTLHPSLPPQRLMALREPAAQAPVKLSLNLLASSDPPEAASWLLCEVSGFSPPNILLMWLEDQREVNTSGFAPARPPPQPGSTTFWAWSVLRVPAPPSPQPATYTCVVSHEDSRTLLNASRSLEVSYVTDH

SEQ ID NO: 4892 - protein, 283 aa, Homo sapiens
RWPESPKAQASSVPTAQPQAEGSLAKATTAPATTRNTGRGGEEKKKEKEKEEQEERETKTPECPSHTQPLGVYLLTPAVQDLWLRDKATFTCFVVGSDLKDAHLTWEVAGKVPTGGVEEGLLERHSNGSQSQHSRLTLPRSLWNAGTSVTCTLNHPSLPPQRLMALREPAAQAPVKLSLNLLASSDPPEAASWLLCEVSGFSPPNILLMVVLEDQREVNTSGFAPARPPPQPGSTTFWAWSVLRVPAPPSPQPATYTCVVSHEDSRTLLNASRSLEVSYVTDH

SEQ ID NO: 4893 - protein, 58 aa, Homo sapiens
ESPKAQASSVPTAQPQAEGSLAKATTAPATTRNTGRGGEEKKKEKEKEEQEERETKTP

SEQ ID NO: 4894 - protein, 234 aa, Homo sapiens
AEPKSPDKTHTCPPCPAPPVAGPSVFLFPPKPKDTLMIARTPEVTCVVVDVSHEDPEVKFNWYVDGVEVHNAKTKPREEQYNSTYRVVSVLTVLHQDWLNGKEYKCKVSNKALPAPIEKTISKAKGQPREPQVYTLPPSRDELTKNQVSLTCLVKGFYPSDIAVEWESNGQPENNYKTTPPVLDSDGSFFLYSKLTVDKSRWQQGNVFSCSVMHEALHNHYTQKSLSLSPGKKD

SEQ ID NO: 4895 - protein, 234 aa, Homo sapiens; identical to SEQ ID NO: 4894

SEQ ID NO: 4896 - protein, 20 aa, Homo sapiens
AEPKSPDKTHTCPPCPKDPK

SEQ ID NO: 4897 - protein, 233 aa, Homo sapiens
EPKSPDKTHTCPPCPAPPVAGPSVFLFPPKPKDTLMIARTPEVTCVVVDVSHEDPEVKFNWYVDGVEVHNAKTKPREEQYNSTYRVVSVLTVLHQDWLNGKEVKCKVSNKALPAPIEKTISKAKGQPREPQVYTLPPSRDELTKNQVSLTCLVKGFYPSDIAVEWESNGQPENNYKTTPPVLDSDGSFFLVSKLTVDKSRWQQGNVFSCSVMHEALHNHYTQKSLSLSPGKKD

SEQ ID NO: 4898 - protein, 13 aa, Homo sapiens
SVFLFPPKPKDTL

SEQ ID NO: 4899 - protein, 231 aa, Homo sapiens
EPKSPDKTHTCPPCPAPPVAGPSVFLFPPKPKDTLMIARTPEVTCVVVDVSHEDPEVKFNWYVDGVEVHNAKTKPREEQYNSTYRVVSVLTVLHQDWLNGKEYKCKVSNKALPAPIEKTISKAKGQPREPQVYTLPPSRDELTKNQVSLTCLVKGFYPSDIAVEWESNGQPENNYKTTPPVLDSDGSFFLYSKLTVDKSRWQQGNVFSCSVMHEALHNHYTQKSLSLSPGK

SEQ ID NO: 4900 - protein, 235 aa, Homo sapiens
EPKSPDKTHTCPPCPAPPVAGPSVFLFPPKPKDTLMIARTPEVTCVVVDVSHEDPEVKFNWYVDGVEVHNAKTKPREEQYNSTYRVVSVLTVLHQDWLNGKEYKCKVSNKALPAPIEKTISKAKGQPREPQVYTLPPSRDELTKNQVSLTCLVKGFYPSDIAVEWESNGQPENNYKTTPPVLDSDGSFFLYSKLTVDKSRWQQGNVFSCSVMHEALHNHYTQKSLSLSPGKKDPK

SEQ ID NO: 4901 - protein, 223 aa, Homo sapiens
VECPPCPAPPVAGPSVFLFPPKPKDTLMISRTPEVTCVVVDVSHEDPEVKFNWYVDGVEVHNAKTKPREEQYNSTYRVVSVLTVLHQDWLNGKEYKCKVSNKGLPSSIEKTISKAKGQPREPQVYTLPPSREEMTKNQVSLTCLVKGFYPSDIAVEWESNGQPENNYKTTPPVLDSDGSFFLYSKLTVDKSRWQQGNVFSCSVMHEALHNHYTQKSLSLSPGK

SEQ ID NO: 4902 - protein, 235 aa, Homo sapiens
DPAEPKSPDKTHTCPPCPAPPVAGPSVFLFPPKPKDTLMIARTPEVTCVVVDVSHEDPEVKFNWYVDGVEVHNAKTKPREEQYNSTYRVVSVLTVLHQDWLNGKEYKCKVSNKALPAPIEKTISKAKGQPREPQVYTLPPSRDELTKNQVSLTCLVKGFYPSDIAVEWESNGQPENNYKTTPPVLDSDGSFFLYSKLTVDKSRWQQGNVFSCSVMHEALHNHYTQKSLSLSPGKK

SEQ ID NO: 4903 - protein, 17 aa, Homo sapiens
ELKTPLGDTTHTCPRCP

SEQ ID NO: 4904 - protein, 61 aa, Homo sapiens
ELKTPLGDTHTCPRCPEPKSCDTPPPCPRCPEPKSCDTPPPCPRCPEPKSCDTPPPCPRCP

SEQ ID NO: 4905 - protein, 230 aa, Homo sapiens
ESKYGPPCPPCPAPEFLGGPSVFLFPPKPKDTLMISRTPEVTCVVVDVSQEDPEVQFNWYVDGVEVHNAKTKPREEQFNSTYRVVSVLTVLHQDWLNGKEYKCKVSNKGLPSSIEKTISKAKGQPREPQVYTLPPSQEEMTKNQVSLTCLVKGFYPSDIAVEWESNGQPENNYKTTPPVLDSDGSFFLYSRLTVDKSRWQEGNVFSCSVMHEALHNHYTQKSLSLSLGKM

SEQ ID NO: 4906 - protein, 230 aa, Homo sapiens
ESKYGPPCPPCPAPEFEGGPSVFLFPPKPKDTLMISRTPEVTCVVVDVSQEDPEVQFNWYVDGVEVHNAKTKPREEQFQSTYRVVSVLTVLHQDWLNGKEYKCKVSNKGLPSSIEKTISKAKGQPREPQVYTLPPSQEEMTKNQVSLTCLVKGFYPSDIAVEWESNGQPENNYKTTPPVLDSDGSFFLYSRLTVDKSRWQEGNVFSCSVMHEALHNHYTQKSLSLSLGKM

SEQ ID NO: 4907 - protein, 12 aa, Homo sapiens
SPNMVPHAHHAQ

SEQ ID NO: 4908 - protein, 107 aa, Homo sapiens
GQPREPQVYTLPPSQEEMTKNQVSLTCLVKGFYPSDIAVEWESNGQPENNYKTTPPVLDSDGSFFLYSRLTVDKSRWQEGNVFSCSVMHEALHNHYTQKSLSLSLGK

SEQ ID NO: 4909 - protein, 129 aa, Homo sapiens
ESKYGPPCPPCPGGGSSGGGSGGQPREPQVYTLPPSQEEMTKNQVSLTCLVKGFYPSDIAVEWESNGQPENNYKTTPPVLDSDGSFFLYSRLTVDKSRWQEGNVFSCSVMHEALHNHYTQKSLSLSLGK

SEQ ID NO: 4910 - protein, 229 aa, Homo sapiens
ESKYGPPCPSCPAPEFEGGPSVFLFPPKPKDTLMISRTPEVTCVVVDVSQEDPEVQFNWYVDGVEVHQAKTKPREEQFNSTYRVVSVLTVLHQDWLNGKEYKCKVSNKGLPSSIEKTISKAKGQPREPQVYTLPPSQEEMTKNQVSLTCLVKGFVPSDIAVEWESNGQPENNYKTTPPVLDSDGSFFLYSRLTVDKSRWQEGNVFSCSVMHEALHNHYTQKSLSLSLGK

SEQ ID NO: 4911 - protein, 229 aa, Homo sapiens
ESKYGPPCPPCPAPEFEGGPSVFLFPPKPKDTLMISRTPEVTCVVVDVSQEDPEVQFNWYVDGVEVHQAKTKPREEQFNSTYRVVSVLTVLHQDWLNGKEYKCKVSNKGLPSSIEKTISKAKGQPREPQVYTLPPSQEEMTKNQVSLTCLVKGFVPSDIAVEWESNGQPENNYKTTPPVLDSDGSFFLYSRLTVDKSRWQEGNVFSCSVMHEALHNHYTQKSLSLSLGK

SEQ ID NO: 4912 - DNA, 36 bp, Homo sapiens
gaatctaagtacggaccgccctgccccccttgccct

SEQ ID NO: 4913 - protein, 12 aa, Homo sapiens
ESKYGPPCPPCP

SEQ ID NO: 4914 - protein, 9 aa, Homo sapiens
YGPPCPPCP

SEQ ID NO: 4915 - protein, 10 aa, Homo sapiens
KYGPPCPPCP

SEQ ID NO: 4916 - protein, 13 aa, Homo sapiens
EVVKYGPPCPPCP

SEQ ID NO: 4917 - protein, 229 aa, Homo sapiens
ESKYGPPCPSCPAPEFLGGPSVFLFPPKPKDTLMISRTPEVTCVVVDVSQEDPEVQFNWYVDGVEVHNAKTKPREEQFNSTYRVVSVLTVLHQDWLNGKEYKCKVSNKGLPSSIEKTISKAKGQPREPQVYTLPPSQEEMTKNQVSLTCLVKGFYPSDIAVEWESNGQPENNYKTTPPVLDSDGSFFLYSRLTVDLSRWQEGNVFSCSVMHEALHNHYTQKSLSLSLGK

SEQ ID NO: 4918 - protein, 22 aa, Homo sapiens
ESKYGPPCPPCPGGGSSGGGSG

SEQ ID NO: 4919 - protein, 231 aa, Homo sapiens
EPKSPDKTHTCPPCPAPPVAGPSVFLFPPKPKDTLMIARTPEVTCVVVDVSHEDPEVKFNWYVDGVEVHNAKTKPREEQYNSTYRVVSVLTVLHQDWLNGKEYKCKVSNKALPAPIEKTISKAKGQPREPQVYTLPPSRDELTKNQVSLTCLVKGFYPSDIAVEWESNGQPENNYKTIPPVLDSDGSFFLYSKLTVDKSRWQQGNVFSCSVMHEALHNHYTQKSLSLSPGK

SEQ ID NO: 4920 - protein, 231 aa, Homo sapiens
EPKSPDKTHTCPPCPAPPVAGPSVFLFPPKPKDTLMIARTPEVTCVVVDVSHEDPEVKFNWYVDGVEVHNAKTKPREEQYNSTYRVVSVLTVLHQDWLNGKEYKCKVSNKALPAPLEKTISKAKGQPREPQVYTLPPSRDELTKNQVSLTCLVKGFYPSDIAVEWESNGQPENNYKTIPPVLDSDGSFFLYSKLTVDKSRWQQGNVFSCSVMHEALHNHYTQKSLSLSPGK

SEQ ID NO: 4921 - protein, 236 aa, Homo sapiens
EPKSCDKTHTCPPCPAPELLGGPSVFLFPPKPKDTLMISRTPEVTCVVVDVSHEDPEVKFNWYVDGVEVHNAKTKPREEQYNSTYRVVSVLTVLHQDWLNGKEYKCKVSNKALPAPIEKTISKAKGQPREPQVYTLPPSRDELTKNQVSLTCLVKGFYPSDIAVEWESNGQPENNYKTTPPVLDSDGSFFLYSKLTVDKSRWQQGNVFSCSVMHEALHNHYTQKSLSLSPGKKDPK

SEQ ID NO: 4922 - DNA, 135 bp, Artificial Sequence; identical to SEQ ID NO: 4862
  Description of Artificial Sequence: Synthetic polynucleotide

SEQ ID NO: 4923 - DNA, 690 bp, Artificial Sequence
  Description of Artificial Sequence: Synthetic polynucleotide
gagagcaagtacggccctccctgccccccttgccctgcccccgagttcctgggcggacccagcgtgttcctgttcccccccaagcccaaggacaccctgatgatcagccggacccccgaggtgacctgtgtggtggtggacgtgtcccaggaggaccccgaggtccagttcaactggtacgtggacggcgtggaggtgcacaacgccaagaccaagccccgggaggagcagttcaatagcacctaccgggtggtgtccgtgctgaccgtgctgcaccaggactggctgaacggcaaggaatacaagtgtaaggtgtccaacaagggcctgcccagcagcatcgagaaaaccatcagcaaggccaagggccagcctcgggagccccaggtgtacaccctgccccctagccaagaggagatgaccaagaaccaggtgtccctgacctgcctggtgaagggcttctaccccagcgacatcgccgtggagtgggagagcaacggccagcccgagaacaactacaagaccaccccccctgtgctggacagcgacggcagcttcttcctgtacagccggctgaccgtggacaagagccggtggcaggagggcaacgtctttagctgctccgtgatgcacgaggccctgcacaaccactacacccagaagagcctgagcctgtccctgggcaagatg

SEQ ID NO: 4924 - DNA, 847 bp, Artificial Sequence
  Description of Artificial Sequence: Synthetic polynucleotide
aggtggcccgaaagtcccaaggcccaggcatctagtgttcctactgcacagccccaggcagaaggcagcctagccaaagctactactgcacctgccactacgcgcaatactggccgtggcggggaggagaagaaaaaggagaaagagaaagaagaacaggaagagagggagaccaagacccctgaatgtccatcccatacccagccgctgggcgtctatctcttgactcccgcagtacaggacttgtggcttagagataaggccacctttacatgtttcgtcgtgggctctgacctgaaggatgcccatttgacttgggaggttgccggaaaggtacccacagggggggttgaggaagggttgctggagcgccattccaatggctctcagagccagcactcaagactcacccttccgagatccctgtggaacgccgggacctctgtcacatgtactctaaatcatcctagcctgcccccacagcgtctgatggcccttagagagccagccgcccaggcaccagttaagcttagcctgaatctgctcgccagtagtgatcccccagaggccgccagctggctcttatgcgaagtgtccggctttagcccgcccaacatcttgctcatgtggctggaggaccagcgagaagtgaacaccagcggcttcgctccagcccggcccccaccccagccgggttctaccacattctgggcctggagtgtcttaagggtcccagcaccacctagcccccagccagccacatacacctgtgttgtgtcccatgaagatagcaggaccctgctaaatgcttctaggagtctggaggtttcctacgtgactgaccatt

SEQ ID NO: 4925 - protein, 619 aa, Homo sapiens
MPDPAAHLPFFYGSISRAEAEEHLKLAGMADGLFLLRQCLRSLGGYVLSLVHDVRFHHFPIERQLNGTYAIAGGKAHCGPAELCEFYSRDPDGLPCNLRKPCNRPSGLEPQPGVFDCLRDAMVRDYVRQTWKLEGEALEQAIISQAPQVEKLIATTAHERMPWYHSSLTREEAERKLYSGAQTDGKFLLRPRKEQGTYALSLIYGKTVYHYLISQDKAGKYCIPEGTKFDTLWQLVEYLKLKADGLIYCLKEACPNSSASNASGAAAPTLPAHPSTLTHPQRRIDTLNSDGYTPEPARITSPDKPRPMPMDTSVYESPYSDPEELKDKKLFLKRDNLLIADIELGCGNFGSVRQGVYRMRKKQIDVAIKVLKQGTEKADTEEMMREAQIMHQLDNPYIVRLIGVCQAEALMLVMEMAGGGPLHKFLVGKREEIPVSNVAELLHQVSMGMKYLEEKNFVHRDLAARNVLLVNRHYAKISDFGLSKALGADDSYYTARSAGKWPLKWYAPECINFRKFSSRSDVWSYGVTMWEALSYGQKPYKKMKGPEVMAFIEQGKRMECPPECPPELYALMSDCWIYKWEDRPDFLTVEQRMRACYYSLASKVEGPPGSTQKAEAACA

SEQ ID NO: 4926 - protein, 180 aa, Homo sapiens
MLRLLLALNLFPSIQVTGNKILVKQSPMLVAYDNAVNLSCKYSYNLFSREFRASLHKGLDSAVEVCVVYGNYSQQLQVYSKTGFNCDGKLGNESVTFYLQNLYVNQTDIYFCKIEVMYPPPYLDNEKSNGTIIHVKGKHLCPSPLFPGPSKPFWVLVVVGGVLACYSLLVTVAFIIFWVR

SEQ ID NO: 4927 - protein, 240 aa, Homo sapiens
MGNSCYNIVATLLLVLNFERTRSLQDPCSNCPAGTFCDNNRNQICSPCPPNSFSSAGGQRTCDICRQCKGVFRTRKECSSTSNAECDCTPGFHCLGAGCSMCEQDCKQGQELTKKGCKDCCFGTFNDQKRGICRPWTNCSLDGKSVLVNGTKERDVVCGPSPADLSPGASSVTPPAPAREPGHSPQIISFFLALTSTALLFLLFFLTLRFSVVKRGRKKLLYIFKQPFMRPVQTTQEEDG

SEQ ID NO: 4928 - protein, 21 aa, Homo sapiens
DGVYTGLSTRNQETYETLKHE

SEQ ID NO: 4929 - protein, 66 aa, Homo sapiens
DPKLCYILDAILFLYGIVLTLLYCRLKIQVRKAAITSYEKSDGVYTGLSTRNQETYETLKHEKPPQ

SEQ ID NO: 4930 - protein, 21 aa, Homo sapiens
DGVYTGLSTRNQETYETLKHE

SEQ ID NO: 4931 - protein, 67 aa, Homo sapiens
IEVMYPPPYLDNEKSNGTIIHVKGKHLCPSPLFPGPSKPFWVLVVVGGVLACYSLLVTVAFIIFWVR

SEQ ID NO: 4932 - protein, 219 aa, Homo sapiens
IEVMYPPPYLDNEKSNGTIIHVKGKHLCPSPLFPGPSKPFWVLVVVGGVLACYSLLVTVAFIIFWVRSKRSRLLHSDYMNMTPRRPGPTRKHYQPYAPPRDFAAYRSRVKFSRSADAPAYQQGQNQLYNELNLGRREEYDVLDKRRGRDPEMGGKPRRKNPQEGLYNELQKDKMAEAYSEIGMKGERRRGKGHDGLYQGLSTATKDTYDALHMQALPPR

SEQ ID NO: 4933 - protein, 283 aa, Homo sapiens
FVPVFLPAKPTTTPAPRPPTPAPTIASQPLSLRPEACRPAAGGAVHTRGLDFACDIYIWAPLAGTCGVLLLSLVITLYCNHRNRSKRSRLLHSDYMNMTPRRPGPTRKHYQPYAPPRDFAAYRSRFSVVKRGRKKLLYIFKQPFMRPVQTTQEEDGCSCRFPEEEEGGCELRVKFSRSADAPAYQQGQNQLYNELNLGRREEYDVLDKRRGRDPEMGGKPRRKNPQEGLYNELQKDKMAEAYSEIGMKGERRRGKGHDGLYQGLSTATKDTYDALHMQALPPR

SEQ ID NO: 4934 - protein, 48 aa, Artificial Sequence
  Description of Artificial Sequence: Synthetic polypeptide
QRRKYRSNKGESPVEPAEPCRYSCPREEEGSTIPIQEDYRKPEPACSP

SEQ ID NO: 4935 - DNA, 123 bp, Artificial Sequence
  Description of Artificial Sequence: Synthetic polynucleotide
aggagtaagaggagcaggctcctgcacagtgactacatgaacatgactccccgccgccccgggcccacccgcaagcattaccagccctatgccccaccacgcgacttcgcagcctatcgctcc

SEQ ID NO: 4936 - DNA, 336 bp, Artificial Sequence
  Description of Artificial Sequence: Synthetic polynucleotide
cgcgtgaaattcagccgcagcgcagatgctccagcctacaagcaggggcagaaccagctctacaacgaactcaatcttggtcggagagaggagtacgacgtgctggacaagcggagaggacgggacccagaaatgggcgggaagccgcgcagaaagaatccccaagagggcctgtacaacgagctccaaaaggataagatggcagaagcctatagcgagattggtatgaaaggggaacgcagaagaggcaaaggccacgacggactgtaccagggactcagcaccgccaccaaggacacctatgacgctcttcacatgcaggccctgccgcctcgg

SEQ ID NO: 4937 - DNA, 336 bp, Artificial Sequence
  Description of Artificial Sequence: Synthetic polynucleotide
agagtgaagttcagcaggagcgcagacgcccccgcgtaccagcagggccagaaccagctctataacgagctcaatctaggacgaagagaggagtacgatgttttggacaagagacgtggccgggaccctgagatggggggaaagccgagaaggaagaaccctcaggaaggcctgtacaatgaactgcagaaagataagatggcggaggcctacagtgagattgggatgaaaggcgagcgccggaggggcaaggggcacgatggcctttaccagggtctcagtacagccaccaaggacacctacgacgcccttcacatgcaggccctgccccctcgc

SEQ ID NO: 4938 - DNA, 105 bp, Artificial Sequence
  Description of Artificial Sequence: Synthetic polynucleotide
acaaaaaagaagtattcatccagtgtgcacgaccctaacggtgaatacatgttcatgagagcagtgaacacagccaaaaaatccagactcacagatgtgacccta

SEQ ID NO: 4939 - protein, 42 aa, Homo sapiens
KRGRKKLLYIFKQPFMRPVQTIQEEDGCSCRFPEEEEGGCEL

SEQ ID NO: 4940 - protein, 42 aa, Homo sapiens
KRGRKKLLYIFKQPFMRPVQTTQEEDGCSCRFPEEEEGGYEL

SEQ ID NO: 4941 - protein, 225 aa, Homo sapiens
TGTTTPAPRPPTPAPTIASQPLSLRPEACRPAAGGAVHTRGLDFACDIYIWAPLAGTCGVLLLSLVITLYCKRGRKKLLYIFKQPFMRPVQTTQEEDGCSCRFPEEEEGGCELRVKFSRSADAPAYQQGQNQLYNELNLGRREEYDVLDKRRGRDPEMGGKPRRKNPQEGLYNELQKDKMAEAYSEIGMKGERRRGKGHDGLYQGLSTATKDTYDALHMQALPPR

SEQ ID NO: 4942 - protein, 154 aa, Homo sapiens
KRGRKKLLYIFKQPFMRPVQTTQEEDGCSCRFPEEEEGGCELRVKFSRSADAPAYQQGQNQLYNELNLGRREEYDVLDKRRGRDPEMGGKPRRKNPQEGLYNELQKDKMAEAYSEIGMKGERRRGKGHDGLYQGLSTATKDTYDALHMQALPPR

SEQ ID NO: 4943 - protein, 194 aa, Homo sapiens
KRIKPIVWPSLPDHKKTLEHLCKKPRKNLNVSFNPESFLDCQIHRVDDIQARDEVEGFLQDTFPQQLEESEKQRLGGDVQSPNCPSEDVVITPESFGRDSSLTCLAGNVSACDAPILSSSRSLDCRESGKNGPHVYQDLLLSLGTTNSTLPPPFSLQSGILTLNPVAQGQPILTSLGSNQEEAYVTMSSFYQNQ

SEQ ID NO: 4944 - protein, 47 aa, Homo sapiens
RFSVVKRGRKKLLYIFKQPFMRPVQTTQEEDGCSCRFPEEEEGGCEL

SEQ ID NO: 4945 - protein, 341 aa, Homo sapiens
RKKRKDAKNNEVSFSQIKPKKSKLIRVENFEAYFKKQQADSNCGFAEEYEDLKLVGISQPKYAAELAENRGKNRYNNVLPYDISRVKLSVQTHSTDDYINANYMPGYHSKKDFIATQGPLPNTLKDFWRMVWEKNVYAIIMLTKCVEQGRTKCEEYWPSKQAQDYGDITVAMTSEIVLPEWTIRDFTVKNIQTSESHPLRQFHFTSWPDHGVPDTTDLLINFRYLVRDYMKQSPPESPILVHCSAGVGRTGTFIAIDRLIYQIENENTVDVYGIVYDLRMHRPLMVQTEDQYVFLNQCVLDIVRSQKDSKVDLIYQNTTAMTIYENLAPVTTFGKTNGYIA

SEQ ID NO: 4946 - protein, 48 aa, Homo sapiens
QRRKYRSNKGESPVEPAEPCHYSCPREEEGSTIPIQEDYRKPEPACSP

SEQ ID NO: 4947 - protein, 6 aa, Homo sapiens
FAAYRS

SEQ ID NO: 4948 - protein, 68 aa, Homo sapiens; identical to SEQ ID NO: 4226

SEQ ID NO: 4949 - protein, 41 aa, Homo sapiens
RSKRSRLLHSDYMNMTPRRPGPTRKHYQPYAPPRDFAAYRS

SEQ ID NO: 4950 - protein, 40 aa, Homo sapiens
SKRSRLLHSDYMNMTPRRPGPTRKHYQPYAPPRDFAAYRS

SEQ ID NO: 4951 - protein, 106 aa, Homo sapiens
IEVMYPPPYLDNEKSNGTIIHVKGKHLCPSPLFPGPSKPFWVLVVVGGVLACYSLLVTVAFIIFWRSKRSRLLHSDYMNMTPRRPGPTRKHYQPYAPPRDFAAYRS

SEQ ID NO: 4952 - protein, 200 aa, Homo sapiens
RSKRSRLLHSDYMNMTPRRPGPTRKHYQPYAPPRDFAAYRSRFSVVKRGRKKLLYIFKQPFMRPVQTTQEEDGCSCRFPEEEEGGCELRVKFSRSADAPAYQQGQNQLYNELNLGRREEYDVLDKRRGRDPEMGGKPRRKNPQEGLYNELQKDKMAEAYSEIGMKGERRRGKGHDGLYQGLSTATKDTYDALHMQALPPR

SEQ ID NO: 4953 - protein, 188 aa, Homo sapiens
RSKRSRLLHSDYNMTPRRPGPTRKHYQPYAPPRDFAAYRSRDQRLPPDAHKPPGGGSFRTPIQEEQADAHSTLAKIRVKFSRSADAPAYQQGQNQLYNELNLGRREEYDVLDKRRGRDPEMGGKPRRKNPQEGLYNELQKDKMAEAYSEIGMKGERRRGKGHDGLYQGLSTATKDTYDALHMQALPPR

SEQ ID NO: 4954 - protein, 70 aa, Homo sapiens
MFWVLVVVGGVLACYSLLVTVAFIIFWVKRGRKKLLYIFKQPFMRPVQTTQEEDGCSCRFPEEEEGGCEL

SEQ ID NO: 4955 - protein, 108 aa, Homo sapiens
IEVMYPPPYLDNEKSNGTIIHVKGKHLCPSPLFPGPSKPFWVLVVVGGVLACYSLLVTVAFIIFWVKRGRKKLLYIFKQPFMRPVQTTQEEDGCSCRFPEEEEGGCEL

SEQ ID NO: 4956 - protein, 153 aa, Homo sapiens
RSKRSRLLHSDYMNMTPRRPGPTRKHYQPYAPPRDFAAYRSRVKFSRSADAPAYQQGQNQLYNELNLGRREEYDVLDKRRGRDPEMGGKPRRKNPQEGLYNELQKDKMAEAYSEIGMKGERRRGKGHDGLYQGLSTATKDTYDALHMQALPPR

SEQ ID NO: 4957 - protein, 151 aa, Homo sapiens
KRSRLLHSDYMNMTPRRPGPTRKHYQPYAPPRDFAAYRSRVKFSRSADAPAYQQGQNQLYNELNLGRREEYDVLDKRRGRDPEMGGKPRRKNPQEGLYNELQKDKMAEAYSEIGMKGERRRGKGHDGLYQGLSTATKDTYDALHMQALPPR

SEQ ID NO: 4958 - protein, 171 aa, Homo sapiens
MEHSTFLSGLVLATLLSQVSPFKIPIEELEDRVFVNCNTSITWVEGTVGTLLSDITRLDLGKRILDPRGIYRCNGTDIYKDKESTVQVHYRMCQSCVELDPATVAGIIVTDVIATLLLALGVFCFAGHETGRLSGAADTQALLRNDQVYQPLRDRDDAQYSHLGGNWARNK

SEQ ID NO: 4959 - protein, 127 aa, Homo sapiens
MEHSTFLSGLVLATLLSQVSPFKIPIEELEDRVFVNCNTSITWVEGTVGTLLSDITRLDLGKRILDPRGIYRCNGTDIYKDKESTVQVHYRTADTQALLRNDQVYQPLRDRDDAQYSHLGGNWARNK

SEQ ID NO: 4960 - protein, 21 aa, Homo sapiens
DQVYQPLRDRDDAQYSHLGGN

SEQ ID NO: 4961 - protein, 171 aa, Homo sapiens; identical to SEQ ID NO: 4958

SEQ ID NO: 4962 - protein, 127 aa, Homo sapiens; identical to SEQ ID NO: 4959

SEQ ID NO: 4963 - protein, 21 aa, Homo sapiens
DQVYQPLRDRDDAQYSHLGGN

SEQ ID NO: 4964 - protein, 207 aa, Homo sapiens
MQSGTHWRVLGLCLLSVGVWGQDGNEEMGGITQTPYKVSISGTTVILTCPQYPGSEILWQHNDKNIGGDEDDKNIGSDEDHLSLKEFSELEQSGYYVCYPRGSKPEDANFYLYLRARVCENCMEMDVMSVATIVIVDICITGGLLLLVYYWSKNRKAKAKPVTRGAGAGGRQRGQNKERPPPVPNPDYEPIRKGQRDLYSGLNQRRI

SEQ ID NO: 4965 - protein, 21 aa, Homo sapiens
NPDYEPIRKGQRDLYSGLNQR

SEQ ID NO: 4966 - protein, 182 aa, Homo sapiens
MEQGKGLAVLILAIILLQGTLAQSIKGNHLVKVYDYQEDGSVLLTCDAEAKNITWFKDGKMIGFLTEDKKKWNLGSNAKDPRGMYQCKGSQNKSKPLQVYYRMCQNCIELNAATISGFLFAEIVSIFVLAVGVYFIAGQDGVRQSRASDKQTLLPNDQLYQPLKDREDDQYSHLQGNQLRRN

SEQ ID NO: 4967 - protein, 21 aa, Homo sapiens
DQLYQPLKDREDDQYSHLQGN

SEQ ID NO: 4968 - protein, 21 aa, Homo sapiens
DQLYQPLKDREDDQYSHLQGN

SEQ ID NO: 4969 - protein, 182 aa, Homo sapiens; identical to SEQ ID NO: 4966

SEQ ID NO: 4970 - protein, 163 aa, Homo sapiens
MKWKALFTAAILQAQLPITEAQSFGLLDPKLCYLLDGILFIYGVILTALFLRVKFSRSADAPAYQQGQNQLYNELNLGRREEYDVLDKRRGRDPEMGGKPRRKNPQEGLYNELQKDKMAEAYSEIGMKGERRRGKGHDGLYQGLSTATKDTYDALHMQALPPR

SEQ ID NO: 4971 - protein, 164 aa, Homo sapiens
MKWKALFTAAILQAQLPITEAQSFGLLDPKLCYLLDGILFIYGVILTALFLRVKFSRSADAPAYQQGQNQLYNELNLGRREEYDVLDKRRGRDPEMGGKPQRRKNPQEGLYNELQKDKMAEAYSEIGMKGERRRGKGHDGLYQGLSTATKDTYDALHMQALPPR

SEQ ID NO: 4972 - protein, 164 aa, Homo sapiens; identical to SEQ ID NO: 4971

SEQ ID NO: 4973 - protein, 21 aa, Homo sapiens
NQLYNELNLGRREEYDVLDKR

SEQ ID NO: 4974 - protein, 112 aa, Homo sapiens
RVKFSRSADAPAYQQGQNQLYNELNLGRREEYDVLDKRRGRDPEMGGKPRRKNPQEGLYNELQKDKMAEAYSEIGMKGERRRGKGHDGLYQGLSTATKDTYDALHMQALPPR

SEQ ID NO: 4975 - protein, 21 aa, Homo sapiens
DGLYQGLSTATKDTYDALHMQ

SEQ ID NO: 4976 - protein, 112 aa, Homo sapiens
RVKFSRSAEPPAYQQGQNQLYNELNLGRREEYDVLDKRRGRDPEMGGKPRRKNPQEGLYNELQKDKMAEAYSEIGMKGERRRGKGHDGLYQGLSTATKDTYDALHMQALPPR

SEQ ID NO: 4977 - protein, 113 aa, Homo sapiens
RVKFSRSADAPAYQQGQNQLYNELNLGRREEYDVLDKRRGRDPEMGGKPQRRKNPQEGLYNELQKDKMAEAYSEIGMKGERRRGKGHDGLYQGLSTATKDTYDALHMQALPPR

SEQ ID NO: 4978 - protein, 114 aa, Homo sapiens
RSRVKFSRSADAPAYQQGQNQLYNELNLGRREEYDVLDKRRGRDPEMGGKPRRKNPQEGLYNELQKDKMAEAYSEIGMKGERRRGKGHDGLYQGLSTATKDTYDALHMQALPPR

SEQ ID NO: 4979 - protein, 98 aa, Homo sapiens
RVKFSRSADAPAYQQGEYDVLDKRRGRDPEMGGKPRRKNPQEGLYNELQKDKMAEAYSEIGMKGERRRGKGHDGLYQGLSTATKDTYDALHMQALPPR

SEQ ID NO: 4980 - protein, 112 aa, Homo sapiens
RVKFSRSADAPAYQQGQNQLYNELNLGRREEVDVLDKRRGRDPEMGGKPRRKNPQEGLYNELQKDKMAEAYSEIGMKGERRRGKGHDGLYQGLSTATKDTYDALHMQALPPR

SEQ ID NO: 4981 - protein, 173 aa, Homo sapiens
MIPAVVLLLLLLVEQAAALGEPQLCYILDAILFLVGIVLTLLVCRLKIQVRKAAITSYEKSRVKFSRSADAPAYQQGQNQLYNELNLGRREEYDVLDKRRGRDPEMGGKPRRKNPQEGLYNELQKDKMAEAVSEIGMKGERRRGKGHDGLYQGLSTATKDTYDALHMQALPPR

SEQ ID NO: 4982 - protein, 113 aa, Homo sapiens
LRVKFSRSADAPAYQQGQNQLYNELNLGRREEYDVLDKRRGRDPEMGGKPRRKNPQEGLYNELQKDKMAEAYSEIGMKGERRRGKGHDGLYQGLSTATKDTYDALHMQALPPR

SEQ ID NO: 4983 - protein, 60 aa, Homo sapiens
RVKFSRSADAPAYQQGQNQLYNELNLGRREEYDVLDKRRGRDPEMGGKPQRRKNPQEGLY

SEQ ID NO: 4984 - protein, 114 aa, Homo sapiens
LRVKFSRSADAPAYQQGQNQLYNELNLGRREEYDVLDKRRGRDPEMGGKPQRRKNPQEGLYNELQKDKMAEAYSEIGMKGERRRGKGHDGLYQGLSTATKDTYDALHMQALPPR

SEQ ID NO: 4985 - protein, 113 aa, Homo sapiens
RRVKFSRSADAPAYQQGQNQLYNELNLGRREEYDVLDKRRGRDPEMGGKPRRKNPQEGLYNELQKDKMAEAYSEIGMKGERRRGKGHDGLYQGLSTATKDTYDALHMQALPPR

SEQ ID NO: 4986 - protein, 21 aa, Homo sapiens
NQLYNELNLGRREEYDVLDKR

SEQ ID NO: 4987 - protein, 22 aa, Homo sapiens
EGLYNELQKDKMAEAYSEIGMK

SEQ ID NO: 4988 - protein, 21 aa, Homo sapiens
DGLYQGLSTATKDTYDALHMQ

SEQ ID NO: 4989 - protein, 112 aa, Homo sapiens; identical to SEQ ID NO: 4974

SEQ ID NO: 4990 - protein, 112 aa, Homo sapiens
RVKFSRSADAPAYKQGQNQLYNELNLGRREEYDVLDKRRGRDPEMGGKPRRKNPQEGLYNELQKDKMAEAYSEIGMKGERRRGKGHDGLYQGLSTATKDTYDALHMQALPPR

SEQ ID NO: 4991 - DNA, 338 bp, Artificial Sequence
  Description of Artificial Sequence: Synthetic Construct
agggtgaagttttctaggagcgccgatgcaccagcatataagcagggacagaaccagctgtacaacgagctgaatctgggcaggagagaggagtacgacgtgctggataagaggaggggaagggaccccgagatgggaggcaagccaaggagaaagaacccccaggagggcctgtataatgagctgcagaaggacaagatggccgaggcctactccgagatcggcatgaagggagagcggcgcaggggcaagggacacgatggcctgtatcagggcctgtctacagccaccaaggacacctacgatgcactgcacatgcaggccctgcctccaaggtg

SEQ ID NO: 4992 - DNA, 338 bp, Artificial Sequence
  Description of Artificial Sequence: Synthetic Construct
agggtgaagttttccaggtctgccgatgcccccgcctataagcagggccagaatcagctgtacaacgagctgaatctgggcaggagagaggagtacgacgtgctggataagaggaggggacgcgaccccgagatgggaggcaagcctaggagaaagaacccacaggagggcctgtataatgagctgcagaaggacaagatggccgaggcctactctgagatcggcatgaagggagagcggcgcaggggcaagggacacgatggcctgtatcagggcctgagcacagccaccaaggacacctacgatgcactgcacatgcaggccctgccacctaggtg

SEQ ID NO: 4993 - DNA, 338 bp, Artificial Sequence
  Description of Artificial Sequence: Synthetic Construct
agggtgaagtttagcaggtccgccgatgccccagcctataagcagggccagaaccagctgtacaacgagctgaatctgggcaggagggaagagtacgacgtgctggataagaggagaggaagggaccccgagatgggaggcaagccaaggaggaagaacccacaggagggcctgtataatgagctgcagaaggacaagatggccgaggcctacagcgagatcggcatgaagggagagaggagacggggcaagggacacgatggcctgtatcagggcctgtccacagccaccaaggacacctacgatgcactgcacatgcaggccctgcctccaaggtg

SEQ ID NO: 4994 - DNA, 338 bp, Artificial Sequence
  Description of Artificial Sequence: Synthetic Construct
agggtgaagttttccaggtctgccgatgccccagcctataagcagggccagaatcagctgtacaacgagctgaatctgggcaggagagaggagtacgacgtgctggataagaggaggggacgcgaccccgagatgggaggcaagcctaggagaaagaacccacaggagggcctgtataatgagctgcagaaggacaagatggccgaggcctactctgagatcggcatgaagggagagcggcgcaggggcaagggacacgatggcctgtatcagggcctgagcacagccaccaaggacacctacgatgcactgcacatgcaggccctgccacctaggtg

SEQ ID NO: 4995 - DNA, 338 bp, Artificial Sequence
  Description of Artificial Sequence: Synthetic Construct
agggtgaagtttagcaggtccgccgatgccccagcctataagcagggccagaaccagctgtacaacgagctgaatctgggcaggagggaagagtacgacgtgctggataagaggagaggaagggaccccgagatgggaggcaagccaaggaggaagaacccacaggagggcctgtataatgagctgcagaaggacaagatggccgaggcctactccgagatcggcatgaagggagagaggagacggggcaagggacacgatggcctgtatcagggcctgtctacagccaccaaggacacctacgatgcactgcacatgcaggccctgcctccaaggtg

SEQ ID NO: 4996 - DNA, 336 bp, Artificial Sequence
  Description of Artificial Sequence: Synthetic polynucleotide
agagtgaagttcagcaggagcgcagacgcccccgcgtacaagcagggccagaaccagctctataacgagctcaatctaggacgaagagaggagtacgatgttttggacaagagacgtggccgggaccctgagatggggggaaagccgagaaggaagaaccctcaggaaggcctgtacaatgaactgcagaaagataagatggcggaggcctacagtgagattgggatgaaaggcgagcgccggaggggcaaggggcacgatggcctttaccagggtctcagtacagccaccaaggacacctacgacgcccttcacatgcaggccctgccccctcgc

SEQ ID NO: 4997 - DNA, 336 bp, Artificial Sequence
  Description of Artificial Sequence: Synthetic Construct
agagtgaagttttccaggtctgccgatgccccagcctacaagcagggccagaatcagctgtataacgagctgaatctgggccggagagaggagtacgacgtgctggataagaggaggggacgggaccccgagatgggaggcaagccacggagaaagaacccccaggagggcctgtacaatgagctgcagaaggacaagatggccgaggcctattctgagatcggcatgaagggagagaggcgccggggcaagggacacgatggcctgtaccagggcctgagcacagccaccaaggacacctatgatgcactgcacatgcaggccctgcctccaagg

SEQ ID NO: 4998 - DNA, 336 bp, Artificial Sequence
  Description of Artificial Sequence: Synthetic Construct
agggtgaagttttctaggagcgccgatgcaccagcatataagcagggacagaaccagctgtacaacgagctgaatctgggcaggagagaggagtacgacgtgctggataagaggaggggaagggaccccgagatgggaggcaagccaaggagaaagaacccccaggagggcctgtataatgagctgcagaaggacaagatggccgaggcctactccgagatcggcatgaagggagagcggcgcaggggcaagggacacgatggcctgtatcagggcctgtctacagccaccaaggacacctacgatgcactgcacatgcaggccctgcctccaagg

SEQ ID NO: 4999 - DNA, 336 bp, Artificial Sequence
  Description of Artificial Sequence: Synthetic Construct
agggtgaagttttccaggtctgccgatgcccccgcctataagcagggccagaatcagctgtacaacgagctgaatctgggcaggagagaggagtacgacgtgctggataagaggaggggacgcgaccccgagatgggaggcaagcctaggagaaagaacccacaggagggcctgtataatgagctgcagaaggacaagatggccgaggcctactctgagatcggcatgaagggagagcggcgcaggggcaagggacacgatggcctgtatcagggcctgagcacagccaccaaggacacctacgatgcactgcacatgcaggccctgccacctagg

SEQ ID NO: 5000 - DNA, 336 bp, Artificial Sequence
  Description of Artificial Sequence: Synthetic Construct
agggtgaagtttagcaggtccgccgatgccccagcctataagcagggccagaaccagctgtacaacgagctgaatctgggcaggagggaagagtacgacgtgctggataagaggagaggaagggaccccgagatgggaggcaagccaaggaggaagaacccacaggagggcctgtataatgagctgcagaaggacaagatggccgaggcctacagcgagatcggcatgaagggagagaggagacggggcaagggacacgatggcctgtatcagggcctgtccacagccaccaaggacacctacgatgcactgcacatgcaggccctgcctccaagg

SEQ ID NO: 5001 - DNA, 336 bp, Artificial Sequence
  Description of Artificial Sequence: Synthetic Construct
agggtgaagttttccaggtctgccgatgccccagcctataagcagggccagaatcagctgtacaacgagctgaatctgggcaggagagaggagtacgacgtgctggataagaggaggggacgcgaccccgagatgggaggcaagcctaggagaaagaacccacaggagggcctgtataatgagctgcagaaggacaagatggccgaggcctactctgagatcggcatgaagggagagcggcgcaggggcaagggacacgatggcctgtatcagggcctgagcacagccaccaaggacacctacgatgcactgcacatgcaggccctgccacctagg

SEQ ID NO: 5002 - DNA, 336 bp, Artificial Sequence
  Description of Artificial Sequence: Synthetic Construct
agggtgaagtttagcaggtccgccgatgccccagcctataagcagggccagaaccagctgtacaacgagctgaatctgggcaggagggaagagtacgacgtgctggataagaggagaggaagggaccccgagatgggaggcaagccaaggaggaagaacccacaggagggcctgtataatgagctgcagaaggacaagatggccgaggcctactccgagatcggcatgaagggagagaggagacggggcaagggacacgatggcctgtatcagggcctgtctacagccaccaaggacacctacgatgcactgcacatgcaggccctgcctccaagg

SEQ ID NO: 5003 - protein, 110 aa, Homo sapiens
RVKFSRSADAPAYQQGQNQLYNELNLGRREEYDVLDKRRGRDPEMGGKPRRKNPQEGLYNELQKDKMAEAYSEIGMKGERRRGKGHDGLYQGLSTATKDTYDALHMQALP

SEQ ID NO: 5004 - protein, 137 aa, Homo sapiens
DPKLCYLLDGILFIYGVILTALFLRVKFSRSADAPAYQQGQNQLYNELNLGRREEYDVLDKRRGRDPEMGGKPQRRKNPQEGLYNELQKDKMAEAYSEIGMKGERRRGKGHDGLYQGLSTATKDTYDALHMQALPPR

SEQ ID NO: 5005 - protein, 163 aa, Homo sapiens; identical to SEQ ID NO: 4970

SEQ ID NO: 5006 - protein, 38 aa, Homo sapiens
RSRDQRLPPDAHKPPGGGSFRTPIQEEQADAHSTLAKI

SEQ ID NO: 5007 - protein, 226 aa, Homo sapiens
MPGGPGVLQALPATIFLLFLLSAVYLGPGCQALWMHKVPASLMVSLGEDAHFQCPHNSSNNANVTWWRVLHGNYTWPPEFLGPGEDPNGTLIIQNVNKSHGGIYVCRVQEGNESYQQSCGTYLRVRQPPPRPFLDMGEGTKNRIITAEGIILLFCAVVPGTLLLFRKRWQNEKLGLDAGDEYEDENLYEGLNLDDCSMYEDISRGLQGTYQDVGSLNIGDVQLEKP

SEQ ID NO: 5008 - protein, 188 aa, Homo sapiens
MPGGPGVLQALPATIFLLFLLSAVYLGPGCQALWMHKVPASLMVSLGEDAHFQCPHNSSNNANVTWWRVLHGNYTWPPEFLGPGEDPNEPPPRPFLDMGEGTKNRIITAEGIILLFCAVVPGTLLLFRKRWQNEKLGLDAGDEYEDENLYEGLNLDDCSMYEDISRGLQGTYQDVGSLNIGDVQLEKP

SEQ ID NO: 5009 - protein, 226 aa, Homo sapiens; identical to SEQ ID NO: 5007

SEQ ID NO: 5010 - protein, 21 aa, Homo sapiens
ENLYEGLNLDDCSMYEDISRG

SEQ ID NO: 5011 - protein, 84 aa, Homo sapiens
FVPVFLPAKPTTTPAPRPPTPAPTIASQPLSLRPEACRPAAGGAVHTRGLDFACDIYIWAPLAGTCGVLLLSLVITLYCNHRNR

SEQ ID NO: 5012 - protein, 84 aa, Homo sapiens
FVPVFLPAKPITTPAPRPPTPAPTIASQPLSLRPEACRPAAGGAVHTRGLDFACDIYIWAPLAGTCGVLLLSLVITLYCNHRNR

SEQ ID NO: 5013 - protein, 47 aa, Homo sapiens
PTTTPAPRPPTPAPTIASQPLSLRPEACRPAAGGAVHTRGLDFACDI

SEQ ID NO: 5014 - protein, 41 aa, Homo sapiens
AVSLSKMLKKRSPLTTGVFVKMAPTEAECEKQFQPYFIPIN

SEQ ID NO: 5015 - protein, 47 aa, Homo sapiens
AVSLSKMLKKRSPLTTGVYMNMTPRRPECEKQFQPYAPPRDFAAYRS

SEQ ID NO: 5016 - protein, 20 aa, Homo sapiens
RPRRSPAQDGKVYINMPGRG

SEQ ID NO: 5017 - protein, 113 aa, Homo sapiens
MGGLEPCSRLLLLPLLLAVSGLRPVQAQAQSDCSCSTVSPGVLAGIVMGDLVLTVLIALAVYFLGRLVPRGRGAAEAATRKQRITETESPYQELQGQRSDVYSDLNTQRPYYK

SEQ ID NO: 5018 - protein, 112 aa, Homo sapiens
MGGLEPCSRLLLLPLLLAVSGLRPVQAQAQSDCSCSTVSPGVLAGIVMGDLVLTVLIALAVYFLGRLVPRGRGAAEATRKQRITETESPYQELQGQRSDVYSDLNTQRPYYK

SEQ ID NO: 5019 - protein, 102 aa, Homo sapiens
MGGLEPCSRLLLLPLLLAVSDCSCSTVSPGVLAGIVMGDLVLTVLIALAVYFLGRLVPRGRGAAEAATRKQRITETESPYQELQGQRSDVYSDLNTQRPYYK

SEQ ID NO: 5020 - protein, 101 aa, Homo sapiens
MGGLEPCSRLLLLPLLLAVSDCSCSTVSPGVLAGIVMGDLVLTVLIALAVYFLGRLVPRGRGAAEATRKQRITETESPYQELQGQRSDVYSDLNTQRPYYK

SEQ ID NO: 5021 - protein, 113 aa, Homo sapiens; identical to SEQ ID NO: 5017

SEQ ID NO: 5022 - protein, 112 aa, Homo sapiens; identical to SEQ ID NO: 5018

SEQ ID NO: 5023 - protein, 102 aa, Homo sapiens; identical to SEQ ID NO: 5019

SEQ ID NO: 5024 - protein, 101 aa, Homo sapiens; identical to SEQ ID NO: 5020

SEQ ID NO: 5025 - protein, 21 aa, Homo sapiens
ESPYQELQGQRSDVYSDLNTQ

SEQ ID NO: 5026 - protein, 21 aa, Homo sapiens
ESPYQELQGQRSDVYSDLNTQ

SEQ ID NO: 5027 - protein, 49 aa, Homo sapiens
RSQCMWPRETQLLLEVPPSTEDARSCQFPEEERGERSAEEKGRLGDLWV

SEQ ID NO: 5028 - protein, 35 aa, Homo sapiens
TKKKYSSSVHDPNGEFMFMRAVNTAKKSRLTDVTL

SEQ ID NO: 5029 - protein, 39 aa, Homo sapiens
KSRQTPPLASVEMEAMEALPVTWGTSSRDEDLENCSHHL

SEQ ID NO: 5030 - protein, 149 aa, Homo sapiens
RRDQRLPPDAHKPPGGGSFRTPIQEEQADAHSTLAKIRVKFSRSADAPAYQQGQNQLYNELNLGRREEYDVLDKRRGRDPEMGGKPRRKNPQEGLYNELQKDKMAEAYSEIGMKGERRRGKGHDGLYQGLSTATKDTYDALHMQALPPR

SEQ ID NO: 5031 - protein, 69 aa, Artificial Sequence
  Description of Artificial Sequence: Synthetic polypeptide
TTTPAPRPPTPAPTIASQPLSLRPEACRPAAGGAVHTRGLDFACDFWLPIGCAAFVVVCILGCILICWL

SEQ ID NO: 5032 - DNA, 207 bp, Artificial Sequence
  Description of Artificial Sequence: Synthetic polynucleotide
accacgacgccagcgccgcgaccaccaacaccggcgcccaccatcgcgtcgcagcccctgtccctgcgcccagaggcgtgccggccagcggcggggggcgcagtgcacacgagggggctggacttcgcctgtgatttctggttacccataggatgtgcagcctttgttgtagtctgcattttgggatgcatacttatttgttggctt

SEQ ID NO: 5033 - protein, 46 aa, Homo sapiens
TTTPAPRPPTPAPTIASQPLSLRPEACRPAAGGAVHTRGLDFACDI

SEQ ID NO: 5034 - protein, 21 aa, Homo sapiens
FLVIIVILSALFLGTLACFCV

SEQ ID NO: 5035 - protein, 31 aa, Homo sapiens
IISFFLALTSTALLFLLFFLTLRFSVVKRGR

SEQ ID NO: 5036 - protein, 27 aa, Homo sapiens
IISFFLALTSTALLFLLFFLTLRFSVV

SEQ ID NO: 5037 - protein, 26 aa, Homo sapiens
VAAILGLGLVLGLLGPLAILLALYLL

SEQ ID NO: 5038 - protein, 363 aa, Homo sapiens
AVFGCIFGALVIVTVGGFIFWRKKRKDAKNNEVSFSQIKPKKSKLIRVENFEAYFKKQQADSNCGFAEEYEDLKLVGISQPKYAAELAENRGKNRYNNVLPYDISRVKLSVQTHSTDDYINANYMPGYHSKKDFIATQGPLPNTLKDFWRMVWEKNVYAIIMLTKCVEQGRTKCEEYWPSKQAQDYGDITVAMTSEIVLPEVVTIRDFTVKNIQTSESHPLRQFHFTSWPDHGVPDTTDLLINFRYLVRDYMKQSPPESPILVHCSAGVGRTGTFIAIDRLIYQIENENTVDVYGIVYDLRMHRPLMVQTEDQYVFLNQCVLDIVRSQKDSKVDLIYQNTTAMTIYENLAPVTTFGKTNGYIA

SEQ ID NO: 5039 - protein, 21 aa, Homo sapiens
AVFGCIFGALVIVTVGGFIFW

SEQ ID NO: 5040 - protein, 185 aa, Homo sapiens
KEITNALETWGALGQDINLDIPSFQMSDDIDDIKWEKTSDKKKIAQFRKEKETFKEKDTYKLFKNGTLKIKHLKTDDQDIYKVSIYDTKGKNVLEKIFDLKIQERVSKPKISWTCINTTLTCEVMNGTDPELNLYQDGKHLKLSQRVITHKWTTSLSAKFKCTAGNKVSKESSVEPVSCPEKGLD

SEQ ID NO: 5041 - protein, 106 aa, Homo sapiens
IEVMYPPPYLDNEKSNGTITHVKGKHLCPSPLFPGPSKPFWVLVVVGGVLACYSLLVTVAHIFWVRSKRSRLLHSDYMNMTPRRPGPTRKHYQPYAPPRDFAAYRS

SEQ ID NO: 5042 - protein, 66 aa, Homo sapiens
IEVMYPPPYLDNEKSNGTIIHVKGKHLCPSPLFPGPSKPFWVLVVVGGVLACYSLLVTVAFIIFWV

SEQ ID NO: 5043 - protein, 33 aa, Homo sapiens
IFWVLVVVGGVLACYSLLVTVAFIIFWVRSKRR

SEQ ID NO: 5044 - protein, 68 aa, Homo sapiens; identical to SEQ ID NO: 4226

SEQ ID NO: 5045 - protein, 28 aa, Homo sapiens
MFWVLVVVGGVLACYSLLVTVAFIIFWV

SEQ ID NO: 5046 - protein, 26 aa, Homo sapiens
FWVLVVVGGVLACYSLLVTVAFHFWV

SEQ ID NO: 5047 - protein, 68 aa, Homo sapiens
FWVLVVVGGVLACYSLLVTVAFIIFWVRSKRSRLLHSDYMNMTPRRPGPTRKHYQAYAAARDFAAYRS

SEQ ID NO: 5048 - protein, 106 aa, Homo sapiens
IEVMYPPPYLDNEKSNGTIIHVKGKHLCPSPLFPGPSKPFWVLWVGGVLACYSLLVTVAFIIFWVRSKRSRLLHSDYMNMTPRRPGPTRKHYQPYAPPRDFAAYRS

SEQ ID NO: 5049 - protein, 28 aa, Homo sapiens
MFWVLVVVGGVLACYSGGVTVAFIIFWV

SEQ ID NO: 5050 - protein, 26 aa, Homo sapiens
WVLVVVGGVLACYSLLVTVAFIIFWV

SEQ ID NO: 5051 - protein, 28 aa, Homo sapiens
FWVLVVVGGVLACYSLLVTVAFIIFWVR

SEQ ID NO: 5052 - protein, 69 aa, Homo sapiens
PFWVLVVVGGVLACYSLLVTVAFIIFWVRSKRSRLLHSDYMNMTPRRPGPTRKHYQPYAPPRDFAAYRS

SEQ ID NO: 5053 - protein, 180 aa, Homo sapiens
FWVLVVVGGVLACYSLLVTVAFIIFWVRSKRSRLLHSDYMNMTPRRPGPTRKHYQPYAPPRDFAAYRSRVKFSRSADAPAYQQGQNQLYNELNLGRREEYDVLDKRRGRDPEMGGKPRRKNPQEGLYNELQKDKMAEAYSEIGMKGERRRGKGHDGLYQGLSTATKDTYDALHMQALPPR

SEQ ID NO: 5054 - protein, 216 aa, Homo sapiens
FWVLVVVGGVLACYSLLVTVAFIIFWVRSKRSRLLHSDYMNMTPRRPGPTRKHYQPYAPPRDFAAYRSRDQRLPPDAHKPPGGGSFRTPIQEEQADAHSTLAKIRVKFSRSADAPAYQQGQNQLYNELNLGRREEYDVLDKRRGRDPEMGGKPRRKNPQEGLYNELQKDKMAEAYSEIGMKGERRRGKGHDGLYQGLSTATKDTYDALHMQALPPR

SEQ ID NO: 5055 - protein, 140 aa, Homo sapiens
FWVLVVVGGVLACYSLLVTVAFIIFWVRRVKFSRSADAPAYQQGQNQLYNELNLGRREEYDVLDKRRGRDPEMGGKPRRKNPQEGLYNELQKDKMAEAYSEIGMKGERRRGKGHDGLYQGLSTATKDTYDALHMQALPPR

SEQ ID NO: 5056 - protein, 23 aa, Homo sapiens
LCYLLDGILFIYGVILTALFLRV

SEQ ID NO: 5057 - protein, 51 aa, Homo sapiens
MKWKALFTAAILQAQLPITEAQSFGLLDPKLCYLLDGILFIYGVILTALFL

SEQ ID NO: 5058 - protein, 21 aa, Homo sapiens
LCYLLDGILFIYGVILTALFL

SEQ ID NO: 5059 - protein, 25 aa, Homo sapiens
ALIVLGGVAGLLLFIGLGIFFCVRC

SEQ ID NO: 5060 - protein, 22 aa, Homo sapiens
MALIVLGGVAGLLLFIGLGIFF

SEQ ID NO: 5061 - protein, 725 aa, Homo sapiens
ALIAFLAFLIIVTSIALLVVLYKIYDLHKKRSCNLDEQQELVERDDEKQLMNVEPIHADILLETYKRKIADEGRLFLAEFQSIPRVFSKFPIKEARKPFNQNKNRYVDILPYDYNRVELSEINGDAGSNYINASYIDGFKEPRKYIAAQGPRDETVDDFWRMIWEQKATVIVMVTRCEEGNRNKCAEYWPSMEEGTRAFGDVVVKINQHKRCPDYIIQKLNIVNKKEKATGREVTHIQFTSWPDHGVPEDPHLLLKLRRRVNAFSNFFSGPIWHCSAGVGRTGTYIGIDAMLEGLEAENKVDVYGYVVKLRRQRCLMVQVEAQYILIHQALVEYNQFGETEVNLSELHPYLHNMKKRDPPSEPSPLEAEFQRLPSYRSWRTQHIGNQEENKSKNRNSNVIPYDYNRVPLKHELEMSKESEHDSDESSDDDSDSEEPSKYINASFIMSYWKPEVMIAAQGPLKETIGDFWQMIFQRKVKVIVMLTELKHGDQEICAQYWGEGKQTYGDIEVDLKDTDKSSTYTLRVFELRHSKRKDSRTVYQYQYTNWSVEQLPAEPKELISMIQWKQKLPQKNSSEGNKHHKSTPLLIHCRDGSQQTGIFCALLNLLESAETEEWDIFQWKALRKARPGMVSTFEQYQFLYDVIASTYPAQNGQVKKNNHQEDKIEFDNEVDKVKQDANCVNPLGAPEKLPEAKEQAEGSEPTSGTEGPEHSVNGPASPALNQGS

SEQ ID NO: 5062 - protein, 23 aa, Homo sapiens
PLFIPVAVMVTAFSGLAFIIWLA

SEQ ID NO: 5063 - protein, 24 aa, Homo sapiens
ALPAALAVISFLLGLGLGVACVLA

SEQ ID NO: 5064 - protein, 21 aa, Homo sapiens
MALPVTALLLPLALLLHAARP

SEQ ID NO: 5065 - protein, 286 aa, Homo sapiens
AAAFVPVFLPAKPTTTPAPRPPTPAPTIASQPLSLRPEACRPAAGGAVHTRGLDFACDIYIWAPLAGTCGVLLLSLVITLYCNHRNRSKRSRLLHSDYMNMTPRRPGPTRKHYQPYAPPRDFAAYRSRFSVVKRGRKKLLYIFKQPFMRPVQTTQEEDGCSCRFPEEEEGGCELRVKFSRSADAPAYQQGQNQLYNELNLGRREEYDVLDKRRGRDPEMGGKPRRKNPQEGLYNELQKDKMAEAYSEIGMKGERRRGKGHDGLYQGLSTATKDTYDALHMQALPPR

SEQ ID NO: 5066 - protein, 226 aa, Homo sapiens
AAATTTPAPRPPTPAPTIASQPLSLRPEACRPAAGGAVHTRGLDFACDIYIWAPLAGTCGVLLLSLVITLYCKRGRKKLLYIFKQPFMRPVQTTQEEDGCSCRFPEEEEGGCELRVKFSRSADAPAYKQGQNQLYNELNLGRREEYDVLDKRRGRDPEMGGKPRRKNPQEGLYNELQKDKMAEAYSEIGMKGERRRGKGHDGLYQGLSTATKDTYDALHMQALPPR

SEQ ID NO: 5067 - protein, 83 aa, Homo sapiens
FVPVFLPAKPTTTPAPRPPTPAPTIASQPLSLRPEACRPAAGGAVHTRGLDFACDIYIWAPLAGTCGVLLLSLVITLYCNHRN

SEQ ID NO: 5068 - protein, 22 aa, Homo sapiens
IWAPLAGTCGVLLLSLVITLYC

SEQ ID NO: 5069 - protein, 24 aa, Homo sapiens
IYIWAPLAGTCGVLLLSLVITLYC

SEQ ID NO: 5070 - DNA, 72 bp, Artificial Sequence
  Description of Artificial Sequence: Synthetic Construct
atctacatctgggcaccactggcaggaacatgcggcgtgctgctgctgtccctggtcatcaccctgtattgt

SEQ ID NO: 5071 - DNA, 72 bp, Artificial Sequence
  Description of Artificial Sequence: Synthetic Construct
atctacatctgggcacctctggcaggaacatgcggcgtgctgctgctgtctctggtcatcaccctgtattgt

SEQ ID NO: 5072 - DNA, 72 bp, Artificial Sequence
  Description of Artificial Sequence: Synthetic oligonucleotide
atctacatctgggcgcccttggccgggacttgtggggtccttctcctgtcactggttatcaccctttactgc

SEQ ID NO: 5073 - DNA, 72 bp, Artificial Sequence
  Description of Artificial Sequence: Synthetic oligonucleotide
atctacatttgggcccctctggctggtacttgcggggtcctgctgctttcactcgtgatcactctttactgt

SEQ ID NO: 5074 - protein, 25 aa, Homo sapiens
IYIWAPLAGTCGVLLLSLVITLYCR

SEQ ID NO: 5075 - protein, 71 aa, Homo sapiens
PTTTPAPRPPTPAPTIASQPLSLRPEACRPAAGGAVHTRGLDFACDIYIWAPLAGTCGVLLLSLVITLYCN

SEQ ID NO: 5076 - protein, 25 aa, Homo sapiens
IYIWAPLAGTCGVLLLSLVITLVCR

SEQ ID NO: 5077 - protein, 21 aa, Homo sapiens
IYIWAPLAGTCGVLLLSLVIT

SEQ ID NO: 5078 - protein, 23 aa, Homo sapiens
IYIWAPLAGTCGVLLLSLVITLY

SEQ ID NO: 5079 - protein, 23 aa, Homo sapiens
LGLLVAGVLVLLVSLGVAIHLCC

SEQ ID NO: 5080 - protein, 73 aa, Homo sapiens
TPAPRPPTPAPTIASQPLSLRPEACRPAAGGAWTRGLDFACDIYIWAPLAGTCGVLLLSLVITLYCNHRNRRR

SEQ ID NO: 5081 - protein, 27 aa, Homo sapiens
ILLAGLVAADAVASLLIVGAVFLCARR

SEQ ID NO: 5082 - protein, 52 aa, Homo sapiens
FFIPLLVVILFAVDTGLFISTQQQVTFLLKIKRTRKGFRLLNPHPKPNPKNN

SEQ ID NO: 5083 - protein, 257 aa, Homo sapiens
MAPAMESPTLLCVALLFFAPDGVLAVPQKPKVSLNPPWNRIFKGENVTLTCNGNNFFEVSSTKWFHNGSLSEETNSSLNIVNAKFEDSGEYKCQHQQVNESEPVYLEVFSDWLLLQASAEVVMEGQPLFLRCHGWRNWDVYKVIYYKDGEALKYWYENHNISITNATVEDSGTYYCTGKVWQLDYESEPLNITVIKAPREKYWLQFFIPLLVVILFAVDTGLFISTQQQVTFLLKIKRTRKGFRLLNPHPKPNPKNN

SEQ ID NO: 5084 - protein, 54 aa, Homo sapiens
DIFIPLLVVILFAVDTGLFISTQQQVTFLLKIKRTRKGFRLLNPHPKPNPKNNR

SEQ ID NO: 5085 - protein, 31 aa, Homo sapiens
PLGWLTVVLLAVAACVLLLTSAQLGLHIWQL

SEQ ID NO: 5086 - protein, 24 aa, Homo sapiens
SIISAVVGILLVVVLGVVFGILII

SEQ ID NO: 5087 - protein, 113 aa, Homo sapiens
CHPECQPQNGSVTCFGPEADQCVACAHYKDPPFCVARCPSGVKPDLSYMPIWKFPDEEGACQPCPINCTHSCVDLDDKGCPAEQRASPLTSIISAVVGILLVVVLGVVFGILI

SEQ ID NO: 5088 - protein, 21 aa, Homo sapiens
FWLPIGCAAFVVVCILGCILI

SEQ ID NO: 5089 - protein, 233 aa, Homo sapiens
EPKSPDKTHTCPPCPAPPVAGPSVFLFPPKPKDTLMIARTPEVTCVVVDVSHEDPEVKFNWYVDGVEVHNAKTKPREEQYNSTYRVVSVLTVLHQDWLNGKEYKCKVSNKALPAPIEKTISKAKGQPREPQVYTLPPSRDELTKNQVSLTCLVKGFYPSDIAVEWESNGQPENNYKTTPPVLDSDGSFFLYSKLTVDKSRWQQGNVFSCSVMHEALHNHYTQKSLSLSPGKKD

SEQ ID NO: 5090 - protein, 21 aa, Homo sapiens
VAAILGLGLVLGLLGPLAILL

SEQ ID NO: 5091 - protein, 244 aa, Homo sapiens
MDTESNRRANLALPQEPSSVPAFEVLEISPQEVSSGRLLKSASSPPLHTWLTVLKKEQEFLGVTQILTAMICLCFGTVVCSVLDISHIEGDIFSSFKAGYPFWGAIFFSISGMLSIISERRNATYLVRGSLGANTASSIAGGTGITILIINLKKSLAYIHIHSCQKFFETKCFMASFSTEIVVMMLFLTILGLGSAVSLTICGAGEELKGNKVPEDRVYEELNIYSATYSELEDPGEMSPPIDL

SEQ ID NO: 5092 - protein, 21 aa, Homo sapiens
LLFLILGVLSLLLLVTGAFGF

SEQ ID NO: 5093 - protein, 20 aa, Homo sapiens
VGWGGLLGSLVLLVWVLAVI

SEQ ID NO: 5094 - protein, 27 aa, Homo sapiens
FWALVVVAGVLFCYGLLVTVALCVIWT

SEQ ID NO: 5095 - protein, 107 aa, Homo sapiens
IEVMYPPPYLDNEKSNGTIIHVKGKHLCPSPLFPGPSKPFWVLVVVGGVLACYSLLVTVAFIIFWVRSKRSRLLHSDYMNMTPRRPGPTRKHYQPYAPPRDFAAYRS

SEQ ID NO: 5096 - protein, 65 aa, Homo sapiens
VMYPPPYLDNEKSNGTIIHVKGKHLCPSPLFPGPSKPFWVLVVVGGVLACYSLLVTVAFIIFWVR

SEQ ID NO: 5097 - protein, 101 aa, Homo sapiens
APVGLVARLADESGHVVLRWLPPPETPMTSHIRYEVDVSAGNGAGSVQRVEILEGRTECVLSNLRGRTRYTFAVRARMAEPSFGGFWSAWSEPVSLLTPSD

SEQ ID NO: 5098 - protein, 68 aa, Homo sapiens
TTPAPRPPTPAPTIASQPLSLRPEACRPAAGGAVHTRGLDFACDIYIWAPLAGTCGVLLLSLVITLYC

SEQ ID NO: 5099 - protein, 243 aa, Homo sapiens
DIQMTQSSSYLSVSLGGRVTITCKASDHINNWLAWYQQKPGNAPRLLISGATSLETGVPSRFSGSGSGKDYTLSITSLQTEDVATYYCQQYWSTPFTFGSGTKLEIKGGGGSGGGGSGGGGSQVQLKESGPGLVAPSQSLSITSTVSGFSLSRYSVHWVRQPPGKGLEWLGMIWGGGSTDYNSALKSRLSISKDNSKSQVFLKMNSLQTDDTAMYYCARNEGDTTAGTWFAYWGQGTLVTVSS

SEQ ID NO: 5100 - protein, 62 aa, Homo sapiens
ALSNSIMYFSHFVPVFLPAKPTTTPAPRPPTPAPTIASQPLSLRPEACRPAAGGAVHTRGLD

SEQ ID NO: 5101 - protein, 68 aa, Homo sapiens
TTTPAPRPPTPAPTIASQPLSLRPEACRPAAGGAVHTRGLDFACDIYIWAPLAGTCGVLLLSLVITLY

SEQ ID NO: 5102 - protein, 70 aa, Homo sapiens
KPTTTPAPRPPTPAPTIASQPLSLRPEACRPAAGGAVHTRGLDFACDIYIWAPLAGTCGVLLLSLVITLY

SEQ ID NO: 5103 - protein, 42 aa, Homo sapiens
KRGRKKLLYIFKQPFMRPVQTTQEEDGCSCRFPEEEEGGCEL

SEQ ID NO: 5104 - DNA, 126 bp, Artificial Sequence
  Description of Artificial Sequence: Synthetic Domain
aagagaggccggaagaagctgctgtacatcttcaagcagcccttcatgaggcccgtgcagacaacccaggaggaggacggctgcagctgtcggttcccagaggaggaggagggaggatgtgagctg

SEQ ID NO: 5105 - DNA, 126 bp, Artificial Sequence
  Description of Artificial Sequence: Synthetic Domain
aagcgcggcaggaagaagctgctgtacatcttcaagcagccctttatgcgccctgtgcagacaacccaggaggaggacggctgcagctgtaggttcccagaggaggaggagggaggatgtgagctg

SEQ ID NO: 5106 - DNA, 126 bp, Artificial Sequence
  Description of Artificial Sequence: Synthetic Domain
aagcgcggcaggaagaagctgctgtacatcttcaagcagccttttatgcgcccagtgcagacaacccaggaggaggacggctgcagctgtaggttccctgaggaggaggagggaggatgtgagctg

SEQ ID NO: 5107 - DNA, 126 bp, Artificial Sequence
  Description of Artificial Sequence: Synthetic Domain
aagcgcggcaggaagaagctgctgtacatcttcaagcagccctttatgcgccctgtgcagacaacccaggaggaggacggctgcagctgtaggttccctgaggaggaggagggaggatgtgagctg

SEQ ID NO: 5108 - DNA, 126 bp, Artificial Sequence
  Description of Artificial Sequence: Synthetic Domain
aagcgcggcaggaagaagctgctgtacatcttcaagcagccttttatgcgcccagtgcagacaacccaggaggaggacggctgcagctgtaggttccctgaggaggaggagggaggatgcgagctg

SEQ ID NO: 5109 - DNA, 126 bp, Artificial Sequence
  Description of Artificial Sequence: Synthetic Domain
aagcgcggccggaagaagctgctgtatatcttcaagcagcccttcatgcggcccgtgcagacaacccaggaggaggacggctgcagctgtaggttccctgaggaggaggagggcggctgtgagctg

SEQ ID NO: 5110 - DNA, 126 bp, Artificial Sequence
  Description of Artificial Sequence: Synthetic polynucleotide
aaacggggcagaaagaaactcctgtatatattcaaacaaccatttatgagaccagtacaaactactcaagaggaagatggctgtagctgccgatttccagaagaagaagaaggaggatgtgaactg

SEQ ID NO: 5111 - DNA, 126 bp, Artificial Sequence
  Description of Artificial Sequence: Synthetic polynucleotide
aagcgcggtcggaagaagctgctgtacatctttaagcaacccttcatgaggcctgtgcagactactcaagaggaggacggctgttcatgccggttcccagaggaggaggaaggcggctgcgaactg

SEQ ID NO: 5112 - protein, 35 aa, Homo sapiens
TKKKYSSSVHDPNGEYMFMRAVNTAKKSRLTDVTL

SEQ ID NO: 5113 - protein, 27 aa, Homo sapiens
FWVLVVVGGVLACYSLLVTVAFIIFWV

SEQ ID NO: 5114 - protein, 86 aa, Homo sapiens
MIPAVVLLLLLLVEQAAALGEPQLCYILDAILFLYGIVLTLLYCRLKIQVRKAAITSYEKSDGVYTGLSTRNQETYETLKHEKPPQ

SEQ ID NO: 5115 - protein, 222 aa, Homo sapiens
AAAIEVMYPPPYLDNEKSNGTIIHVKGKHLCPSPLFPGPSKPFWVLVVVGGVLACYSLLVTVAFIIFWVRSKRSRLLHSDYMNMTPRRPGPTRKHYQPYAPPRDFAAYRSRVKFSRSADAPAYQQGQNQLYNELNLGRREEYDVLDKRRGRDPEMGGKPRRKNPQEGLYNELQKDKMAEAYSEIGMKGERRRGKGHDGLYQGLSTATKDTYDALHMQALPPR

SEQ ID NO: 5116 - protein, 705 aa, Artificial Sequence
  Description of Artificial Sequence: Synthetic Chimeric Antigen Receptor sequence
ADAPAYQQGQNQLYNELNLGRREEYDVLDKRRGRDPEMGGKPRRKNPQEGLYNELQKDKMAEAYSEIGMKGERRRGKGHDGLYQGLSTATKDTYDALHMQALPPRRAEGRGSLLTCGDVEENPGPMAVPTQVLGLLLLWLTDARCDIQMTQSPSSLSASVGDRVTITCRASEDIYFNLVWYQQKPGKAPKLLIYDTNRLADGVPSRFSGSGSGTQYTLTISSLQPEDFATYYCQHYKNYPLTFGQGTKLEIKRSGGGGSGGGGSGGGGSRSEVQLVESGGGLVQPGGSLRLSCAASGFTLSNYGMHWIRQAPGKGLEWVSSISLNGGSTYYRDSVKGRFTISRDNAKSTLYLQMNSLRAEDTAVYYCAAQDAYTGGYFDYWGQGTLVTVSSMPCPAPPVAGPSVFLFPPKPKDTLMIARTPEVTCVVVDVSHEDPEVKFNWYVDGVEVHNAKTKPREEQYNSTYRVVSVLTVLHQDWLNGKEYKCKVSNKALPAPIEKTISKAKPCPAPPVAGPSVFLFPPKPKDTLMIARTPEVTCVVVDVSHEDPEVKFNWYVDGVEVHNAKTKPREEQYNSTYRVVSVLTVLHQDWLNGKEYKCKVSNKALPAPIEKTISKAKMALIVLGGVAGLLLFIGLGIFFMALIVLGGVAGLLLFIGLGIFFCVRCRHRRRSGGGGSAQLEKKLQALKKKNAQLKWKLQALKKKLAQ

SEQ ID NO: 5117 - protein, 482 aa, Artificial Sequence
  Description of Artificial Sequence: Synthetic Chimeric Antigen Receptor sequence
MALPVTALLLPLALLLHAARPEVQLLETGGGLVQPGGSLRLSCAVSGFALSNHGMSWVRRAPGKGLEWVSGIVYSGSTYYAASVKGRFTISRDNSRNTLYLQMNSLRPEDTAIYYCSAHGGESDVWGQGTTVTVSSASGGGGSGGRASGGGGSEIVLTQSPATLSVSPGESATLSCRASQSVSSNLAWYQQKPGQAPRLLIYGASTRASGIPDRFSGSGSGTDFTLTISSLQAEDVAVYYCQQYGSSLTFGGGTKVEIKTTTPAPRPPTPAPTIASQPLSLRPEACRPAAGGAVHTRGLDFACDIYIWAPLAGTCGVLLLSLVITLYCKRGRKKLLYIFKQPFMRPVQTTQEEDGCSCRFPEEEEGGCELRVKFSRSADAPAYKQGQNQLYNELNLGRREEYDVLDKRRGRDPEMGGKPRRKNPQEGLYNELQKDKMAEAYSEIGMKGERRRGKGHDGLYQGLSTATKDTYDALHMQALPPR

SEQ ID NO: 5118 - protein, 222 aa, Artificial Sequence; identical to SEQ ID NO: 5115
  Description of Artificial Sequence: Synthetic Chimeric Antigen Receptor sequence

SEQ ID NO: 5119 - protein, 226 aa, Artificial Sequence; identical to SEQ ID NO: 5066
  Description of Artificial Sequence: Synthetic Chimeric Antigen Receptor sequence

SEQ ID NO: 5120 - protein, 286 aa, Artificial Sequence; identical to SEQ ID NO: 5065
  Description of Artificial Sequence: Synthetic Chimeric Antigen Receptor sequence

SEQ ID NO: 5121 - protein, 487 aa, Artificial Sequence
  Description of Artificial Sequence: Synthetic Chimeric Antigen Receptor sequence
LLVTSLLLCELPHPAFLLIPDTALQLQQSGAELVRPGASVTLSCKASGYTFTDYEMHWVKQTPVHGLEWIGAIDPETGGTAYNQKFEGKAILTADKSSSTAYMELRSLTSEDSPVYYCARRRYYGSSSFDYWGQGTTLTVSSGGGGSGGGGSGGGGSDVQMIQTPSSLSASLGDRVTISCRASQDIGNYLNWYQQKPDGTVKLLIYYTSRLHSGVPSRFSGSGSGTEYSLTISNLEQEDIATYFCQQGSALPPTFGGGTKLEINRAAAIEVMYPPPYLDNEKSNGTIIHVKGKHLCPSPLFPGPSKPFWVLVVVGGVLACYSLLVTVAFIIFWVRSKRSRLLHSDYMNMTPRRPGPTRKHYQPYAPPRDFAAYRSRVKFSRSADAPAYQQGQNQLYNELNLGRREEYDVLDKRRGRDPEMGGKPRRKNPQEGLYNELQKDKMAEAYSEIGMKGERRRGKGHDGLYQGLSTATKDTYDALHMQALPPR

SEQ ID NO: 5122 - protein, 487 aa, Artificial Sequence
  Description of Artificial Sequence: Synthetic Chimeric Antigen Receptor sequence
LLVTSLLLCELPHPAFLLIPDTQVQLQQSGAEVKKPGSSVKVSCKASGYTFTDYEISWVRQAPGQGLEWMGGIDPETGGTNYAQKFQGRVTITADESTSTAYMELSSLRSEDTAVYYCARRRYYGSSSFDYWWGQGTMVTVSSGGGGSGGGGSGGGGSEIVLTQSPATLSLSPGERATLSCRASQDIGNYAWYQQKPGQAPRLLIYYTSRATGIPARFSGSGSGTDFTLTISSLEPEDFAVYYCQQGSALPPTFFGQGTKLEIKRAAAIEVMYPPPYLDNEKSNGTIIHVKGKHLCPSPLFPGPSKPFWVLVVVGGVLACYSLLVTVAFIIFWVRSKRSRLLHSDYMNMTPRRPGPTRKHYQPYAPPRDFAAYRSRVKFSRSADAPAYQQGQNQLYNELNLGRREEYDVLDKRRGRDPEMGGKPRRKNPQEGLYNELQKDKMAEAYSEIGMKGERRRGKGHDGLYQGLSTATKDTYDALHMQALPPR

SEQ ID NO: 5123 - protein, 489 aa, Artificial Sequence
  Description of Artificial Sequence: Synthetic Chimeric Antigen Receptor sequence
LLVTSLLLCELPHPAFLLIPDTDVQLQESGPVLVKTGASVKMSCTASGYTFTDHFMDWVKQSHGKSLEWIGSLNPYSGGTSYNQKFKGKATLTVDKSSSTAYMELNSLTSVDSAVYYCARHNWGAYFDYWGQGTTLTVSSGGGGSGGGGSGGGGSDIVMTQAAPSVPVTPGESVSISCRSSKSLLHSNGNTYLYWFLQRPGQSPQRLIYYMSNLASGVPDRFSGRGSGTDFTLRISRVEAEDVGVYYCMQGLEDPYTFGGGTKLEIKAAAIEVMYPPPYLDNEKSNGTIIHVKGKHLCPSPLFPGPSKPFWVLVVVGGVLACYSLLVTVAFIIFWVRSKRSRLLHSDYMNMTPRRPGPTRKHYQPYAPPRDFAAYRSRVKFSRSADAPAYQQGQNQLYNELNLGRREEYDVLDKRRGRDPEMGGKPRRKNPQEGLYNELQKDKMAEAYSEIGMKGERRRGKGHDGLYQGLSTATKDTYDALHMQALPPR

SEQ ID NO: 5124 - protein, 490 aa, Artificial Sequence
  Description of Artificial Sequence: Synthetic Chimeric Antigen Receptor sequence
LLVTSLLLCELPHPAFLLIPDTDVKLQESGPGLVAPSQSLSITCTVSGFSLTSYAVSWVRQPPGKGLEWLGIIWSGGATNYNSALKSRLSISKDNSKSQVFLKMNGLQTDDTARYYCAREHYYGSSAMDYWGQGASITVSSGGGGSGGGGSGGGGSGIVMTQSPLSLPVSLGDQASISCRSSQSIVHSYGNTYLFWYLQKPGQSPKLLIYRVSNRFSGVPDRFSGSGSGTNFTLKISRVEAEDMGVYYCFQGTHVPYTFGGGTKLEIKAAAIEVMYPPPYLDNEKSNGTIIHVKGKHLCPSPLFPGPSKPFWVLVVVGGVLACYSLLVTVAFIIFWVRSKRSRLLHSDYMNMTPRRPGPTRKHYQPYAPPRDFAAYRSRVKFSRSADAPAYQQGQNQLYNELNLGRREEYDVLDKRRGRDPEMGGKPRRKNPQEGLYNELQKDKMAEAYSEIGMKGERRRGKGHDGLYQGLSTATKDTYDALHMQALPPR

SEQ ID NO: 5125 - protein, 490 aa, Artificial Sequence
  Description of Artificial Sequence: Synthetic Chimeric Antigen Receptor sequence
LLVTSLLLCELPHPAFLLIPDTQVQLQQSGAEVKKPGSSVKVSCKASGYTFTDHFISWVRQAPGQGLEWMGGLNPYSGGTNYAQKFQGRVTITADESTSTAYMELSSLRSEDTAVYYCARHNWGAYFDYWWGQGTMVTVSSGGGGSGGGGSGGGGSEIVLTQSPATLSLSPGERATLSCRASKSLLHSNGNTYAWYQQKPGQAPRLLIYYMSRATGIPARFSGSGSGTDFTLTISSLEPEDFAVYYCMQGLEDPYTFFGQGTKLEIKRAAAIEVMYPPPYLDNEKSNGTIIHVKGKHLCPSPLFPGPSKPFWVLVVVGGVLACYSLLVTVAFIIFWVRSKRSRLLHSDYMNMTPRRPGPTRKHYQPYAPPRDFAAYRSRVKFSRSADAPAYQQGQNQLYNELNLGRREEYDVLDKRRGRDPEMGGKPRRKNPQEGLYNELQKDKMAEAYSEIGMKGERRRGKGHDGLYQGLSTATKDTYDALHMQALPPR

SEQ ID NO: 5126 - protein, 491 aa, Artificial Sequence
  Description of Artificial Sequence: Synthetic Chimeric Antigen Receptor sequence
LLVTSLLLCELPHPAFLLIPDTALQLQQSGAELVRPGASVTLSCKASGYTFTDYEMHWVKQTPVHGLEWIGAIDPETGGTAYNQKFEGKAILTADKSSSTAYMELRSLTSEDSPVYYCARRRYYGSSSFDYWGQGTTLTVSSGGGGSGGGGSGGGGSDVQMIQTPSSLSASLGDRVTISCRASQDIGNYLNWYQQKPDGTVKLLIYYTSRLHSGVPSRFSGSGSGTEYSLTISNLEQEDIATYFCQQGSALPPTFGGGTKLEINRAAATTTPAPRPPTPAPTIASQPLSLRPEACRPAAGGAVHTRGLDFACDIYIWAPLAGTCGVLLLSLVITLYCKRGRKKLLYIFKQPFMRPVQTTQEEDGCSCRFPEEEEGGCELRVKFSRSADAPAYKQGQNQLYNELNLGRREEYDVLDKRRGRDPEMGGKPRRKNPQEGLYNELQKDKMAEAYSEIGMKGERRRGKGHDGLYQGLSTATKDTYDALHMQALPPR

SEQ ID NO: 5127 - protein, 491 aa, Artificial Sequence
  Description of Artificial Sequence: Synthetic Chimeric Antigen Receptor sequence
LLVTSLLLCELPHPAFLLIPDTQVQLQQSGAELVKPGASVKISCKASGYAFSSYWMNWVKQRPGKGLEWIGQIYPGDGDTTYNGKFKGKATLTADKSSSTVYMQLNSLTSEDSAVYFCVRYYYGSSGYFDYWGQGTTLTVSSGGGGSGGGGSGGGGSDVQMIQTPDSLAVSLGQRATISCRASESVDNYGISFMHWYQQKPGQSPKLLIYRASNLESGIPARFSGSGSRTDFTLTINPVETDDVATYYCQQNNKDPPTFGGGTKLEIKRAAAIEVMYPPPYLDNEKSNGTIIHVKGKHLCPSPLFPGPSKPFWVLVVVGGVLACYSLLVTVAFIIFWVRSKRSRLLHSDYMNMTPRRPGPTRKHYQPYAPPRDFAAYRSRVKFSRSADAPAYQQGQNQLYNELNLGRREEYDVLDKRRGRDPEMGGKPRRKNPQEGLYNELQKDKMAEAYSEIGMKGERRRGKGHDGLYQGLSTATKDTYDALHMQALPPR

SEQ ID NO: 5128 - protein, 491 aa, Artificial Sequence
  Description of Artificial Sequence: Synthetic Chimeric Antigen Receptor sequence
LLVTSLLLCELPHPAFLLIPDTQVQLQQSGAEVKKPGSSVKVSCKASGYAFSSYISWVRQAPGQGLEWMGGQIYPGDGDTNYAQKFQGRVTITADESTSTAYMELSSLRSEDTAVYYCVRYYYGSSGYFDYWWGQGTMVTVSSGGGGSGGGGSGGGGSEIVLTQSPATLSLSPGERATLSCRASESVDNYGISFAWYQQKPGQAPRLLIYRASRATGIPARFSGSGSGTDFTLTISSLEPEDFAVYYCQQNNKDPPTFFGQGTKLEIKRAAAIEVMYPPPYLDNEKSNGTIIHVKGKHLCPSPLFPGPSKPFWVLVVVGGVLACYSLLVTVAFIIFWVRSKRSRLLHSDYMNMTPRRPGPTRKHYQPYAPPRDFAAYRSRVKFSRSADAPAYQQGQNQLYNELNLGRREEYDVLDKRRGRDPEMGGKPRRKNPQEGLYNELQKDKMAEAYSEIGMKGERRRGKGHDGLYQGLSTATKDTYDALHMQALPPR

SEQ ID NO: 5129 - protein, 491 aa, Artificial Sequence
  Description of Artificial Sequence: Synthetic Chimeric Antigen Receptor sequence
LLVTSLLLCELPHPAFLLIPDTQVQLQQSGAEVKKPGSSVKVSCKASGYTFTDYEISWVRQAPGQGLEWMGGIDPETGGTNYAQKFQGRVTITADESTSTAYMELSSLRSEDTAVYYCARRRYYGSSSFDYWWGQGTMVTVSSGGGGSGGGGSGGGGSEIVLTQSPATLSLSPGERATLSCRASQDIGNYAWYQQKPGQAPRLLIYYTSRATGIPARFSGSGSGTDFTLTISSLEPEDFAVYYCQQGSALPPTFFGQGTKLEIKRAAATTTPAPRPPTPAPTIASQPLSLRPEACRPAAGGAVHTRGLDFACDIYIWAPLAGTCGVLLLSLVITLYCKRGRKKLLYIFKQPFMRPVQTTQEEDGCSCRFPEEEEGGCELRVKFSRSADAPAYKQGQNQLYNELNLGRREEYDVLDKRRGRDPEMGGKPRRKNPQEGLYNELQKDKMAEAYSEIGMKGERRRGKGHDGLYQGLSTATKDTYDALHMQALPPR

SEQ ID NO: 5130 - protein, 492 aa, Artificial Sequence
  Description of Artificial Sequence: Synthetic Chimeric Antigen Receptor sequence
LLVTSLLLCELPHPAFLLIPDTQVQLQQSGAEVKKPGSSVKVSCKASGFSLTSYAISWVRQAPGQGLEWMGGIIWSGGATNYAQKFQGRVTITADESTSTAYMELSSLRSEDTAVYYCAREHYYGSSAMDYWWGQGTMVTVSSGGGGSGGGGSGGGGSEIVLTQSPATLSLSPGERATLSCRASQSIVHSYGNTYAWYQQKPGQAPRLLIYRVSRATGIPARFSGSGSGTDFTLTISSLEPEDFAVYYCFQGTHVPYTFFGQGTKLEIKRAAAIEVMYPPPYLDNEKSNGTIIHVKGKHLCPSPLFPGPSKPFWVLVVVGGVLACYSLLVTVAFIIFWVRSKRSRLLHSDYMNMTPRRPGPTRKHYQPYAPPRDFAAYRSRVKFSRSADAPAYQQGQNQLYNELNLGRREEYDVLDKRRGRDPEMGGKPRRKNPQEGLYNELQKDKMAEAYSEIGMKGERRRGKGHDGLYQGLSTATKDTYDALHMQALPPR

SEQ ID NO: 5131 - protein, 493 aa, Artificial Sequence
  Description of Artificial Sequence: Synthetic Chimeric Antigen Receptor sequence
LLVTSLLLCELPHPAFLLIPDTDVQLQESGPVLVKTGASVKMSCTASGYTFTDHFMDWVKQSHGKSLEWIGSLNPYSGGTSYNQKFKGKATLTVDKSSSTAYMELNSLTSVDSAVYYCARHNWGAYFDYWGQGTTLTVSSGGGGSGGGGSGGGGSDIVMTQAAPSVPVTPGESVSISCRSSKSLLHSNGNTYLYWFLQRPGQSPQRLIYYMSNLASGVPDRFSGRGSGTDFTLRISRVEAEDVGVYYCMQGLEDPYTFGGGTKLEIKAAATTTPAPRPPTPAPTIASQPLSLRPEACRPAAGGAVHTRGLDFACDIYIWAPLAGTCGVLLLSLVITLYCKRGRKKLLYIFKQPFMRPVQTTQEEDGCSCRFPEEEEGGCELRVKFSRSADAPAYKQGQNQLYNELNLGRREEYDVLDKRRGRDPEMGGKPRRKNPQEGLYNELQKDKMAEAYSEIGMKGERRRGKGHDGLYQGLSTATKDTYDALHMQALPPR

SEQ ID NO: 5132 - protein, 493 aa, Artificial Sequence
  Description of Artificial Sequence: Synthetic Chimeric Antigen Receptor sequence
MALPVTALLLPLALLLHAARPDIVLTQSPPSLAMSLGKRATISCRASESVTILGSHLIHWYQQKPGQPPTLLIQLASNVQTGVPARFSGSGSRTDFTLTIDPVEEDDVAVYYCLQSRTIPRTFGGGTKLEIKGSTSGSGKPGSGEGSTKGQIQLVQSGPELKKPGETVKISCKASGYTFTDYSINWVKRAPGKGLKWMGWINTETREPAYAYDFRGRFAFSLETSASTAYLQINNLKYEDTATYFCALDYSYAMDYWGQGTSVTVSSAAATTTPAPRPPTPAPTIASQPLSLRPEACRPAAGGAVHTRGLDFACDIYIWAPLAGTCGVLLLSLVITLYCKRGRKKLLYIFKQPFMRPVQTTQEEDGCSCRFPEEEEGGCELRVKFSRSADAPAYQQGQNQLYNELNLGRREEYDVLDKRRGRDPEMGGKPRRKNPQEGLYNELQKDKMAEAYSEIGMKGERRRGKGHDGLYQGLSTATKDTYDALHMQALPPR

SEQ ID NO: 5133 - protein, 494 aa, Artificial Sequence
  Description of Artificial Sequence: Synthetic Chimeric Antigen Receptor sequence
LLVTSLLLCELPHPAFLLIPDTDVKLQESGPGLVAPSQSLSITCTVSGFSLTSYAVSWVRQPPGKGLEWLGIIWSGGATNYNSALKSRLSISKDNSKSQVFLKMNGLQTDDTARYYCAREHYYGSSAMDYWGQGASITVSSGGGGSGGGGSGGGGSGIVMTQSPLSLPVSLGDQASISCRSSQSIVHSYGNTYLFWYLQKPGQSPKLLIYRVSNRFSGVPDRFSGSGSGTNFTLKISRVEAEDMGVYYCFQGTHVPYTFGGGTKLEIKAAATTTPAPRPPTPAPTIASQPLSLRPEACRPAAGGAVHTRGLDFACDIYIWAPLAGTCGVLLLSLVITLYCKRGRKKLLYIFKQPFMRPVQTTQEEDGCSCRFPEEEEGGCELRVKFSRSADAPAYKQGQNQLYNELNLGRREEYDVLDKRRGRDPEMGGKPRRKNPQEGLYNELQKDKMAEAYSEIGMKGERRRGKGHDGLYQGLSTATKDTYDALHMQALPPR

SEQ ID NO: 5134 - protein, 494 aa, Artificial Sequence
  Description of Artificial Sequence: Synthetic Chimeric Antigen Receptor sequence
LLVTSLLLCELPHPAFLLIPDTQVQLQQSGAEVKKPGSSVKVSCKASGYTFTDHFISWVRQAPGQGLEWMGGLNPYSGGTNYAQKFQGRVTITADESTSTAYMELSSLRSEDTAVYYCARHNWGAYFDYWWGQGTMVTVSSGGGGSGGGGSGGGGSEIVLTQSPATLSLSPGERATLSCRASKSLLHSNGNTYAWYQQKPGQAPRLLIYYMSRATGIPARFSGSGSGTDFTLTISSLEPEDFAVYYCMQGLEDPYTFFGQGTKLEIKRAAATTTPAPRPPTPAPTIASQPLSLRPEACRPAAGGAVHTRGLDFACDIYIWAPLAGTCGVLLLSLVITLYCKRGRKKLLYIFKQPFMRPVQTTQEEDGCSCRFPEEEEGGCELRVKFSRSADAPAYKQGQNQLYNELNLGRREEYDVLDKRRGRDPEMGGKPRRKNPQEGLYNELQKDKMAEAYSEIGMKGERRRGKGHDGLYQGLSTATKDTYDALHMQALPPR

SEQ ID NO: 5135 - protein, 495 aa, Artificial Sequence
  Description of Artificial Sequence: Synthetic Chimeric Antigen Receptor sequence
LLVTSLLLCELPHPAFLLIPDTQVQLQQSGAELVKPGASVKISCKASGYAFSSYWMNWVKQRPGKGLEWIGQIYPGDGDTTYNGKFKGKATLTADKSSSTVYMQLNSLTSEDSAVYFCVRYYYGSSGYFDYWGQGTTLTVSSGGGGSGGGGSGGGGSDVQMIQTPDSLAVSLGQRATISCRASESVDNYGISFMHWYQQKPGQSPKLLIYRASNLESGIPARFSGSGSRTDFTLTINPVETDDVATYYCQQNNKDPPTFGGGTKLEIKRAAATTTPAPRPPTPAPTIASQPLSLRPEACRPAAGGAVHTRGLDFACDIYIWAPLAGTCGVLLLSLVITLYCKRGRKKLLYIFKQPFMRPVQTTQEEDGCSCRFPEEEEGGCELRVKFSRSADAPAYKQGQNQLYNELNLGRREEYDVLDKRRGRDPEMGGKPRRKNPQEGLYNELQKDKMAEAYSEIGMKGERRRGKGHDGLYQGLSTATKDTYDALHMQALPPR

SEQ ID NO: 5136 - protein, 495 aa, Artificial Sequence
  Description of Artificial Sequence: Synthetic Chimeric Antigen Receptor sequence
LLVTSLLLCELPHPAFLLIPDTQVQLQQSGAEVKKPGSSVKVSCKASGYAFSSYISWVRQAPGQGLEWMGGQIYPGDGDTNYAQKFQGRVTITADESTSTAYMELSSLRSEDTAVYYCVRYYYGSSGYFDYWWGQGTMVTVSSGGGGSGGGGSGGGGSEIVLTQSPATLSLSPGERATLSCRASESVDNYGISFAWYQQKPGQAPRLLIYRASRATGIPARFSGSGSGTDFTLTISSLEPEDFAVYYCQQNNKDPPTFFGQGTKLEIKRAAATTTPAPRPPTPAPTIASQPLSLRPEACRPAAGGAVHTRGLDFACDIYIWAPLAGTCGVLLLSLVITLYCKRGRKKLLYIFKQPFMRPVQTTQEEDGCSCRFPEEEEGGCELRVKFSRSADAPAYKQGQNQLYNELNLGRREEYDVLDKRRGRDPEMGGKPRRKNPQEGLYNELQKDKMAEAYSEIGMKGERRRGKGHDGLYQGLSTATKDTYDALHMQALPPR

SEQ ID NO: 5137 - protein, 496 aa, Artificial Sequence
  Description of Artificial Sequence: Synthetic Chimeric Antigen Receptor sequence
LLVTSLLLCELPHPAFLLIPDTQVQLQQSGAEVKKPGSSVKVSCKASGFSLTSYAISWVRQAPGQGLEWMGGIIWSGGATNYAQKFQGRVTITADESTSTAYMELSSLRSEDTAVYYCAREHYYGSSAMDYWWGQGTMVTVSSGGGGSGGGGSGGGGSEIVLTQSPATLSLSPGERATLSCRASQSIVHSYGNTYAWYQQKPGQAPRLLIYRVSRATGIPARFSGSGSGTDFTLTISSLEPEDFAVYYCFQGTHVPYTFFGQGTKLEIKRAAATTTPAPRPPTPAPTIASQPLSLRPEACRPAAGGAVHTRGLDFACDIYIWAPLAGTCGVLLLSLVITLYCKRGRKKLLYIFKQPFMRPVQTTQEEDGCSCRFPEEEEGGCELRVKFSRSADAPAYKQGQNQLYNELNLGRREEYDVLDKRRGRDPEMGGKPRRKNPQEGLYNELQKDKMAEAYSEIGMKGERRRGKGHDGLYQGLSTATKDTYDALHMQALPPR

SEQ ID NO: 5138 - protein, 551 aa, Artificial Sequence
  Description of Artificial Sequence: Synthetic Chimeric Antigen Receptor sequence
LLVTSLLLCELPHPAFLLIPDTALQLQQSGAELVRPGASVTLSCKASGYTFTDYEMHWVKQTPVHGLEWIGAIDPETGGTAYNQKFEGKAILTADKSSSTAYMELRSLTSEDSPVYYCARRRYYGSSSFDYWGQGTTLTVSSGGGGSGGGGSGGGGSDVQMIQTPSSLSASLGDRVTISCRASQDIGNYLNWYQQKPDGTVKLLIYYTSRLHSGVPSRFSGSGSGTEYSLTISNLEQEDIATYFCQQGSALPPTFGGGTKLEINRAAAFVPVFLPAKPTTTPAPRPPTPAPTIASQPLSLRPEACRPAAGGAVHTRGLDFACDIYIWAPLAGTCGVLLLSLVITLYCNHRNRSKRSRLLHSDYMNMTPRRPGPTRKHYQPYAPPRDFAAYRSRFSVVKRGRKKLLYIFKQPFMRPVQTTQEEDGCSCRFPEEEEGGCELRVKFSRSADAPAYQQGQNQLYNELNLGRREEYDVLDKRRGRDPEMGGKPRRKNPQEGLYNELQKDKMAEAYSEIGMKGERRRGKGHDGLYQGLSTATKDTYDALHMQALPPR

SEQ ID NO: 5139 - protein, 551 aa, Artificial Sequence
  Description of Artificial Sequence: Synthetic Chimeric Antigen Receptor sequence
LLVTSLLLCELPHPAFLLIPDTQVQLQQSGAEVKKPGSSVKVSCKASGYTFTDYEISWVRQAPGQGLEWMGGIDPETGGTNYAQKFQGRVTITADESTSTAYMELSSLRSEDTAVYYCARRRYYGSSSFDYWWGQGTMVTVSSGGGGSGGGGSGGGGSEIVLTQSPATLSLSPGERATLSCRASQDIGNYAWYQQKPGQAPRLLIYYTSRATGIPARFSGSGSGTDFTLTISSLEPEDFAVYYCQQGSALPPTFFGQGTKLEIKRAAAFVPVFLPAKPTTTPAPRPPTPAPTIASQPLSLRPEACRPAAGGAVHTRGLDFACDIYIWAPLAGTCGVLLLSLVITLYCNHRNRSKRSRLLHSDYMNMTPRRPGPTRKHYQPYAPPRDFAAYRSRFSVVKRGRKKLLYIFKQPFMRPVQTTQEEDGCSCRFPEEEEGGCELRVKFSRSADAPAYQQGQNQLYNELNLGRREEYDVLDKRRGRDPEMGGKPRRKNPQEGLYNELQKDKMAEAYSEIGMKGERRRGKGHDGLYQGLSTATKDTYDALHMQALPPR

SEQ ID NO: 5140 - protein, 553 aa, Artificial Sequence
  Description of Artificial Sequence: Synthetic Chimeric Antigen Receptor sequence
LLVTSLLLCELPHPAFLLIPDTDVQLQESGPVLVKTGASVKMSCTASGYTFTDHFMDWVKQSHGKSLEWIGSLNPYSGGTSYNQKFKGKATLTVDKSSSTAYMELNSLTSVDSAVYYCARHNWGAYFDYWGQGTTLTVSSGGGGSGGGGSGGGGSDIVMTQAAPSVPVTPGESVSISCRSSKSLLHSNGNTYLYWFLQRPGQSPQRLIYYMSNLASGVPDRFSGRGSGTDFTLRISRVEAEDVGVYYCMQGLEDPYTFGGGTKLEIKAAAFVPVFLPAKPTTTPAPRPPTPAPTIASQPLSLRPEACRPAAGGAVHTRGLDFACDIYIWAPLAGTCGVLLLSLVITLYCNHRNRSKRSRLLHSDYMNMTPRRPGPTRKHYQPYAPPRDFAAYRSRFSVVKRGRKKLLYIFKQPFMRPVQTTQEEDGCSCRFPEEEEGGCELRVKFSRSADAPAYQQGQNQLYNELNLGRREEYDVLDKRRGRDPEMGGKPRRKNPQEGLYNELQKDKMAEAYSEIGMKGERRRGKGHDGLYQGLSTATKDTYDALHMQALPPR

SEQ ID NO: 5141 - protein, 554 aa, Artificial Sequence
  Description of Artificial Sequence: Synthetic Chimeric Antigen Receptor sequence
LLVTSLLLCELPHPAFLLIPDTDVKLQESGPGLVAPSQSLSITCTVSGFSLTSYAVSWVRQPPGKGLEWLGIIWSGGATNYNSALKSRLSISKDNSKSQVFLKMNGLQTDDTARYYCAREHYYGSSAMDYWGQGASITVSSGGGGSGGGGSGGGGSGIVMTQSPLSLPVSLGDQASISCRSSQSIVHSYGNTYLFWYLQKPGQSPKLLIYRVSNRFSGVPDRFSGSGSGTNFTLKISRVEAEDMGVYYCFQGTHVPYTFGGGTKLEIKAAAFVPVFLPAKPTTTPAPRPPTPAPTIASQPLSLRPEACRPAAGGAVHTRGLDFACDIYIWAPLAGTCGVLLLSLVITLYCNHRNRSKRSRLLHSDYMNMTPRRPGPTRKHYQPYAPPRDFAAYRSRFSVVKRGRKKLLYIFKQPFMRPVQTTQEEDGCSCRFPEEEEGGCELRVKFSRSADAPAYQQGQNQLYNELNLGRREEYDVLDKRRGRDPEMGGKPRRKNPQEGLYNELQKDKMAEAYSEIGMKGERRRGKGHDGLYQGLSTATKDTYDALHMQALPPR

SEQ ID NO: 5142 - protein, 554 aa, Artificial Sequence
  Description of Artificial Sequence: Synthetic Chimeric Antigen Receptor sequence
LLVTSLLLCELPHPAFLLIPDTQVQLQQSGAEVKKPGSSVKVSCKASGYTFTDHFISWVRQAPGQGLEWMGGLNPYSGGTNYAQKFQGRVTITADESTSTAYMELSSLRSEDTAVYYCARHNWGAYFDYWWGQGTMVTVSSGGGGSGGGGSGGGGSEIVLTQSPATLSLSPGERATLSCRASKSLLHSNGNTYAWYQQKPGQAPRLLIYYMSRATGIPARFSGSGSGTDFTLTISSLEPEDFAVYYCMQGLEDPYTFFGQGTKLEIKRAAAFVPVFLPAKPTTTPAPRPPTPAPTIASQPLSLRPEACRPAAGGAVHTRGLDFACDIYIWAPLAGTCGVLLLSLVITLYCNHRNRSKRSRLLHSDYMNMTPRRPGPTRKHYQPYAPPRDFAAYRSRFSVVKRGRKKLLYIFKQPFMRPVQTTQEEDGCSCRFPEEEEGGCELRVKFSRSADAPAYQQGQNQLYNELNLGRREEYDVLDKRRGRDPEMGGKPRRKNPQEGLYNELQKDKMAEAYSEIGMKGERRRGKGHDGLYQGLSTATKDTYDALHMQALPPR

SEQ ID NO: 5143 - protein, 555 aa, Artificial Sequence
  Description of Artificial Sequence: Synthetic Chimeric Antigen Receptor sequence
LLVTSLLLCELPHPAFLLIPDTQVQLQQSGAELVKPGASVKISCKASGYAFSSYWMNWVKQRPGKGLEWIGQIYPGDGDTTYNGKFKGKATLTADKSSSTVYMQLNSLTSEDSAVYFCVRYYYGSSGYFDYWGQGTTLTVSSGGGGSGGGGSGGGGSDVQMIQTPDSLAVSLGQRATISCRASESVDNYGISFMHWYQQKPGQSPKLLIYRASNLESGIPARFSGSGSRTDFTLTINPVETDDVATYYCQQNNKDPPTFGGGTKLEIKRAAAFVPVFLPAKPTTTPAPRPPTPAPTIASQPLSLRPEACRPAAGGAVHTRGLDFACDIYIWAPLAGTCGVLLLSLVITLYCNHRNRSKRSRLLHSDYMNMTPRRPGPTRKHYQPYAPPRDFAAYRSRFSVVKRGRKKLLYIFKQPFMRPVQTTQEEDGCSCRFPEEEEGGCELRVKFSRSADAPAYQQGQNQLYNELNLGRREEYDVLDKRRGRDPEMGGKPRRKNPQEGLYNELQKDKMAEAYSEIGMKGERRRGKGHDGLYQGLSTATKDTYDALHMQALPPR

SEQ ID NO: 5144 - protein, 555 aa, Artificial Sequence
  Description of Artificial Sequence: Synthetic Chimeric Antigen Receptor sequence
LLVTSLLLCELPHPAFLLIPDTQVQLQQSGAEVKKPGSSVKVSCKASGYAFSSYISWVRQAPGQGLEWMGGQIYPGDGDTNYAQKFQGRVTITADESTSTAYMELSSLRSEDTAVYYCVRYYYGSSGYFDYWWGQGTMVTVSSGGGGSGGGGSGGGGSEIVLTQSPATLSLSPGERATLSCRASESVDNYGISFAWYQQKPGQAPRLLIYRASRATGIPARFSGSGSGTDFTLTISSLEPEDFAVYYCQQNNKDPPTFFGQGTKLEIKRAAAFVPVFLPAKPTTTPAPRPPTPAPTIASQPLSLRPEACRPAAGGAVHTRGLDFACDIYIWAPLAGTCGVLLLSLVITLYCNHRNRSKRSRLLHSDYMNMTPRRPGPTRKHYQPYAPPRDFAAYRSRFSVVKRGRKKLLYIFKQPFMRPVQTTQEEDGCSCRFPEEEEGGCELRVKFSRSADAPAYQQGQNQLYNELNLGRREEYDVLDKRRGRDPEMGGKPRRKNPQEGLYNELQKDKMAEAYSEIGMKGERRRGKGHDGLYQGLSTATKDTYDALHMQALPPR

SEQ ID NO: 5145 - protein, 556 aa, Artificial Sequence
  Description of Artificial Sequence: Synthetic Chimeric Antigen Receptor sequence
LLVTSLLLCELPHPAFLLIPDTQVQLQQSGAEVKKPGSSVKVSCKASGFSLTSYAISWVRQAPGQGLEWMGGIIWSGGATNYAQKFQGRVTITADESTSTAYMELSSLRSEDTAVYYCAREHYYGSSAMDYWWGQGTMVTVSSGGGGSGGGGSGGGGSEIVLTQSPATLSLSPGERATLSCRASQSIVHSYGNTYAWYQQKPGQAPRLLIYRVSRATGIPARFSGSGSGTDFTLTISSLEPEDFAVYYCFQGTHVPYTFFGQGTKLEIKRAAAFVPVFLPAKPTTTPAPRPPTPAPTIASQPLSLRPEACRPAAGGAVHTRGLDFACDIYIWAPLAGTCGVLLLSLVITLYCNHRNRSKRSRLLHSDYMNMTPRRPGPTRKHYQPYAPPRDFAAYRSRFSVVKRGRKKLLYIFKQPFMRPVQTTQEEDGCSCRFPEEEEGGCELRVKFSRSADAPAYQQGQNQLYNELNLGRREEYDVLDKRRGRDPEMGGKPRRKNPQEGLYNELQKDKMAEAYSEIGMKGERRRGKGHDGLYQGLSTATKDTYDALHMQALPPR

SEQ ID NO: 5146 - protein, 724 aa, Artificial Sequence
  Description of Artificial Sequence: Synthetic Chimeric Antigen Receptor sequence
LLVTSLLLCELPHPAFLLIPDTALQLQQSGAELVRPGASVTLSCKASGYTFTDYEMHWVKQTPVHGLEWIGAIDPETGGTAYNQKFEGKAILTADKSSSTAYMELRSLTSEDSPVYYCARRRYYGSSSFDYWGQGTTLTVSSGGGGSGGGGSGGGGSDVQMIQTPSSLSASLGDRVTISCRASQDIGNYLNWYQQKPDGTVKLLIYYTSRLHSGVPSRFSGSGSGTEYSLTISNLEQEDIATYFCQQGSALPPTFGGGTKLEINRAEPKSCDKTHTCPPCPAPELLGGPSVFLFPPKPKDTLMISRTPEVTCVVVDVSHEDPEVKFNWYVDGVEVHNAKTKPREEQYNSTYRVVSVLTVLHQDWLNGKEYKCKVSNKALPAPIEKTISKAKGQPREPQVYTLPPSRDELTKNQVSLTCLVKGFYPSDIAVEWESNGQPENNYKTTPPVLDSDGSFFLYSKLTVDKSRWQQGNVFSCSVMHEALHNHYTQKSLSLSPGKKDPKAAAIEVMYPPPYLDNEKSNGTIIHVKGKHLCPSPLFPGPSKPFWVLVVVGGVLACYSLLVTVAFIIFWVRSKRSRLLHSDYMNMTPRRPGPTRKHYQPYAPPRDFAAYRSRVKFSRSADAPAYQQGQNQLYNELNLGRREEYDVLDKRRGRDPEMGGKPRRKNPQEGLYNELQKDKMAEAYSEIGMKGERRRGKGHDGLYQGLSTATKDTYDALHMQALPPR

SEQ ID NO: 5147 - protein, 724 aa, Artificial Sequence
  Description of Artificial Sequence: Synthetic Chimeric Antigen Receptor sequence
LLVTSLLLCELPHPAFLLIPDTQVQLQQSGAEVKKPGSSVKVSCKASGYTFTDYEISWVRQAPGQGLEWMGGIDPETGGTNYAQKFQGRVTITADESTSTAYMELSSLRSEDTAVYYCARRRYYGSSSFDYWWGQGTMVTVSSGGGGSGGGGSGGGGSEIVLTQSPATLSLSPGERATLSCRASQDIGNYAWYQQKPGQAPRLLIYYTSRATGIPARFSGSGSGTDFTLTISSLEPEDFAVYYCQQGSALPPTFFGQGTKLEIKRAEPKSCDKTHTCPPCPAPELLGGPSVFLFPPKPKDTLMISRTPEVTCVVVDVSHEDPEVKFNWYVDGVEVHNAKTKPREEQYNSTYRVVSVLTVLHQDWLNGKEYKCKVSNKALPAPIEKTISKAKGQPREPQVYTLPPSRDELTKNQVSLTCLVKGFYPSDIAVEWESNGQPENNYKTTPPVLDSDGSFFLYSKLTVDKSRWQQGNVFSCSVMHEALHNHYTQKSLSLSPGKKDPKAAAIEVMYPPPYLDNEKSNGTIIHVKGKHLCPSPLFPGPSKPFWVLVVVGGVLACYSLLVTVAFIIFWVRSKRSRLLHSDYMNMTPRRPGPTRKHYQPYAPPRDFAAYRSRVKFSRSADAPAYQQGQNQLYNELNLGRREEYDVLDKRRGRDPEMGGKPRRKNPQEGLYNELQKDKMAEAYSEIGMKGERRRGKGHDGLYQGLSTATKDTYDALHMQALPPR

SEQ ID NO: 5148 - protein, 725 aa, Artificial Sequence
  Description of Artificial Sequence: Synthetic Chimeric Antigen Receptor sequence
LLVTSLLLCELPHPAFLLIPDTDVQLQESGPVLVKTGASVKMSCTASGYTFTDHFMDWVKQSHGKSLEWIGSLNPYSGGTSYNQKFKGKATLTVDKSSSTAYMELNSLTSVDSAVYYCARHNWGAYFDYWGQGTTLTVSSGGGGSGGGGSGGGGSDIVMTQAAPSVPVTPGESVSISCRSSKSLLHSNGNTYLYWFLQRPGQSPQRLIYYMSNLASGVPDRFSGRGSGTDFTLRISRVEAEDVGVYYCMQGLEDPYTFGGGTKLEIKEPKSCDKTHTCPPCPAPELLGGPSVFLFPPKPKDTLMISRTPEVTCVVVDVSHEDPEVKFNWYVDGVEVHNAKTKPREEQYNSTYRVVSVLTVLHQDWLNGKEYKCKVSNKALPAPIEKTISKAKGQPREPQVYTLPPSRDELTKNQVSLTCLVKGFYPSDIAVEWESNGQPENNYKTTPPVLDSDGSFFLYSKLTVDKSRWQQGNVFSCSVMHEALHNHYTQKSLSLSPGKKDPKAAAIEVMYPPPYLDNEKSNGTIIHVKGKHLCPSPLFPGPSKPFWVLVVVGGVLACYSLLVTVAFIIFWVRSKRSRLLHSDYMNMTPRRPGPTRKHYQPYAPPRDFAAYRSRVKFSRSADAPAYQQGQNQLYNELNLGRREEYDVLDKRRGRDPEMGGKPRRKNPQEGLYNELQKDKMAEAYSEIGMKGERRRGKGHDGLYQGLSTATKDTYDALHMQALPPR

SEQ ID NO: 5149 - protein, 726 aa, Artificial Sequence
  Description of Artificial Sequence: Synthetic Chimeric Antigen Receptor sequence
LLVTSLLLCELPHPAFLLIPDTQVQLQQSGAEVKKPGSSVKVSCKASGYTFTDHFISWVRQAPGQGLEWMGGLNPYSGGTNYAQKFQGRVTITADESTSTAYMELSSLRSEDTAVYYCARHNWGAYFDYWWGQGTMVTVSSGGGGSGGGGSGGGGSEIVLTQSPATLSLSPGERATLSCRASKSLLHSNGNTYAWYQQKPGQAPRLLIYYMSRATGIPARFSGSGSGTDFTLTISSLEPEDFAVYYCMQGLEDPYTFFGQGTKLEIKREPKSCDKTHTCPPCPAPELLGGPSVFLFPPKPKDTLMISRTPEVTCVVVDVSHEDPEVKFNWYVDGVEVHNAKTKPREEQYNSTYRVVSVLTVLHQDWLNGKEYKCKVSNKALPAPIEKTISKAKGQPREPQVYTLPPSRDELTKNQVSLTCLVKGFYPSDIAVEWESNGQPENNYKTTPPVLDSDGSFFLYSKLTVDKSRWQQGNVFSCSVMHEALHNHYTQKSLSLSPGKKDPKAAAIEVMYPPPYLDNEKSNGTIIHVKGKHLCPSPLFPGPSKPFWVLVVVGGVLACYSLLVTVAFIIFWVRSKRSRLLHSDYMNMTPRRPGPTRKHYQPYAPPRDFAAYRSRVKFSRSADAPAYQQGQNQLYNELNLGRREEYDVLDKRRGRDPEMGGKPRRKNPQEGLYNELQKDKMAEAYSEIGMKGERRRGKGHDGLYQGLSTATKDTYDALHMQALPPR

SEQ ID NO: 5150 - protein, 728 aa, Artificial Sequence
  Description of Artificial Sequence: Synthetic Chimeric Antigen Receptor sequence
LLVTSLLLCELPHPAFLLIPDTALQLQQSGAELVRPGASVTLSCKASGYTFTDYEMHWVKQTPVHGLEWIGAIDPETGGTAYNQKFEGKAILTADKSSSTAYMELRSLTSEDSPVYYCARRRYYGSSSFDYWGQGTTLTVSSGGGGSGGGGSGGGGSDVQMIQTPSSLSASLGDRVTISCRASQDIGNYLNWYQQKPDGTVKLLIYYTSRLHSGVPSRFSGSGSGTEYSLTISNLEQEDIATYFCQQGSALPPTFGGGTKLEINRAEPKSCDKTHTCPPCPAPELLGGPSVFLFPPKPKDTLMISRTPEVTCVVVDVSHEDPEVKFNWYVDGVEVHNAKTKPREEQYNSTYRVVSVLTVLHQDWLNGKEYKCKVSNKALPAPIEKTISKAKGQPREPQVYTLPPSRDELTKNQVSLTCLVKGFYPSDIAVEWESNGQPENNYKTTPPVLDSDGSFFLYSKLTVDKSRWQQGNVFSCSVMHEALHNHYTQKSLSLSPGKKDPKAAATTTPAPRPPTPAPTIASQPLSLRPEACRPAAGGAVHTRGLDFACDIYIWAPLAGTCGVLLLSLVITLYCKRGRKKLLYIFKQPFMRPVQTTQEEDGCSCRFPEEEEGGCELRVKFSRSADAPAYKQGQNQLYNELNLGRREEYDVLDKRRGRDPEMGGKPRRKNPQEGLYNELQKDKMAEAYSEIGMKGERRRGKGHDGLYQGLSTATKDTYDALHMQALPPR

SEQ ID NO: 5151 - protein, 728 aa, Artificial Sequence
  Description of Artificial Sequence: Synthetic Chimeric Antigen Receptor sequence
LLVTSLLLCELPHPAFLLIPDTQVQLQQSGAELVKPGASVKISCKASGYAFSSYWMNWVKQRPGKGLEWIGQIYPGDGDTTYNGKFKGKATLTADKSSSTVYMQLNSLTSEDSAVYFCVRYYYGSSGYFDYWGQGTTLTVSSGGGGSGGGGSGGGGSDVQMIQTPDSLAVSLGQRATISCRASESVDNYGISFMHWYQQKPGQSPKLLIYRASNLESGIPARFSGSGSRTDFTLTINPVETDDVATYYCQQNNKDPPTFGGGTKLEIKRAEPKSCDKTHTCPPCPAPELLGGPSVFLFPPKPKDTLMISRTPEVTCVVVDVSHEDPEVKFNWYVDGVEVHNAKTKPREEQYNSTYRVVSVLTVLHQDWLNGKEYKCKVSNKALPAPIEKTISKAKGQPREPQVYTLPPSRDELTKNQVSLTCLVKGFYPSDIAVEWESNGQPENNYKTTPPVLDSDGSFFLYSKLTVDKSRWQQGNVFSCSVMHEALHNHYTQKSLSLSPGKKDPKAAAIEVMYPPPYLDNEKSNGTIIHVKGKHLCPSPLFPGPSKPFWVLVVVGGVLACYSLLVTVAFIIFWVRSKRSRLLHSDYMNMTPRRPGPTRKHYQPYAPPRDFAAYRSRVKFSRSADAPAYQQGQNQLYNELNLGRREEYDVLDKRRGRDPEMGGKPRRKNPQEGLYNELQKDKMAEAYSEIGMKGERRRGKGHDGLYQGLSTATKDTYDALHMQALPPR

SEQ ID NO: 5152 - protein, 728 aa, Artificial Sequence
  Description of Artificial Sequence: Synthetic Chimeric Antigen Receptor sequence
LLVTSLLLCELPHPAFLLIPDTQVQLQQSGAEVKKPGSSVKVSCKASGFSLTSYAISWVRQAPGQGLEWMGGIIWSGGATNYAQKFQGRVTITADESTSTAYMELSSLRSEDTAVYYCAREHYYGSSAMDYWWGQGTMVTVSSGGGGSGGGGSGGGGSEIVLTQSPATLSLSPGERATLSCRASQSIVHSYGNTYAWYQQKPGQAPRLLIYRVSRATGIPARFSGSGSGTDFTLTISSLEPEDFAVYYCFQGTHVPYTFFGQGTKLEIKREPKSCDKTHTCPPCPAPELLGGPSVFLFPPKPKDTLMISRTPEVTCVVVDVSHEDPEVKFNWYVDGVEVHNAKTKPREEQYNSTYRVVSVLTVLHQDWLNGKEYKCKVSNKALPAPIEKTISKAKGQPREPQVYTLPPSRDELTKNQVSLTCLVKGFYPSDIAVEWESNGQPENNYKTTPPVLDSDGSFFLYSKLTVDKSRWQQGNVFSCSVMHEALHNHYTQKSLSLSPGKKDPKAAAIEVMYPPPYLDNEKSNGTIIHVKGKHLCPSPLFPGPSKPFWVLVVVGGVLACYSLLVTVAFIIFWVRSKRSRLLHSDYMNMTPRRPGPTRKHYQPYAPPRDFAAYRSRVKFSRSADAPAYQQGQNQLYNELNLGRREEYDVLDKRRGRDPEMGGKPRRKNPQEGLYNELQKDKMAEAYSEIGMKGERRRGKGHDGLYQGLSTATKDTYDALHMQALPPR

SEQ ID NO: 5153 - protein, 728 aa, Artificial Sequence
  Description of Artificial Sequence: Synthetic Chimeric Antigen Receptor sequence
LLVTSLLLCELPHPAFLLIPDTQVQLQQSGAEVKKPGSSVKVSCKASGYAFSSYISWVRQAPGQGLEWMGGQIYPGDGDTNYAQKFQGRVTITADESTSTAYMELSSLRSEDTAVYYCVRYYYGSSGYFDYWWGQGTMVTVSSGGGGSGGGGSGGGGSEIVLTQSPATLSLSPGERATLSCRASESVDNYGISFAWYQQKPGQAPRLLIYRASRATGIPARFSGSGSGTDFTLTISSLEPEDFAVYYCQQNNKDPPTFFGQGTKLEIKRAEPKSCDKTHTCPPCPAPELLGGPSVFLFPPKPKDTLMISRTPEVTCVVVDVSHEDPEVKFNWYVDGVEVHNAKTKPREEQYNSTYRVVSVLTVLHQDWLNGKEYKCKVSNKALPAPIEKTISKAKGQPREPQVYTLPPSRDELTKNQVSLTCLVKGFYPSDIAVEWESNGQPENNYKTTPPVLDSDGSFFLYSKLTVDKSRWQQGNVFSCSVMHEALHNHYTQKSLSLSPGKKDPKAAAIEVMYPPPYLDNEKSNGTIIHVKGKHLCPSPLFPGPSKPFWVLVVVGGVLACYSLLVTVAFIIFWVRSKRSRLLHSDYMNMTPRRPGPTRKHYQPYAPPRDFAAYRSRVKFSRSADAPAYQQGQNQLYNELNLGRREEYDVLDKRRGRDPEMGGKPRRKNPQEGLYNELQKDKMAEAYSEIGMKGERRRGKGHDGLYQGLSTATKDTYDALHMQALPPR

SEQ ID NO: 5154 - protein, 728 aa, Artificial Sequence
  Description of Artificial Sequence: Synthetic Chimeric Antigen Receptor sequence
LLVTSLLLCELPHPAFLLIPDTQVQLQQSGAEVKKPGSSVKVSCKASGYTFTDYEISWVRQAPGQGLEWMGGIDPETGGTNYAQKFQGRVTITADESTSTAYMELSSLRSEDTAVYYCARRRYYGSSSFDYWWGQGTMVTVSSGGGGSGGGGSGGGGSEIVLTQSPATLSLSPGERATLSCRASQDIGNYAWYQQKPGQAPRLLIYYTSRATGIPARFSGSGSGTDFTLTISSLEPEDFAVYYCQQGSALPPTFFGQGTKLEIKRAEPKSCDKTHTCPPCPAPELLGGPSVFLFPPKPKDTLMISRTPEVTCVVVDVSHEDPEVKFNWYVDGVEVHNAKTKPREEQYNSTYRVVSVLTVLHQDWLNGKEYKCKVSNKALPAPIEKTISKAKGQPREPQVYTLPPSRDELTKNQVSLTCLVKGFYPSDIAVEWESNGQPENNYKTTPPVLDSDGSFFLYSKLTVDKSRWQQGNVFSCSVMHEALHNHYTQKSLSLSPGKKDPKAAATTTPAPRPPTPAPTIASQPLSLRPEACRPAAGGAVHTRGLDFACDIYIWAPLAGTCGVLLLSLVITLYCKRGRKKLLYIFKQPFMRPVQTTQEEDGCSCRFPEEEEGGCELRVKFSRSADAPAYKQGQNQLYNELNLGRREEYDVLDKRRGRDPEMGGKPRRKNPQEGLYNELQKDKMAEAYSEIGMKGERRRGKGHDGLYQGLSTATKDTYDALHMQALPPR

SEQ ID NO: 5155 - protein, 729 aa, Artificial Sequence
  Description of Artificial Sequence: Synthetic Chimeric Antigen Receptor sequence
LLVTSLLLCELPHPAFLLIPDTDVQLQESGPVLVKTGASVKMSCTASGYTFTDHFMDWVKQSHGKSLEWIGSLNPYSGGTSYNQKFKGKATLTVDKSSSTAYMELNSLTSVDSAVYYCARHNWGAYFDYWGQGTTLTVSSGGGGSGGGGSGGGGSDIVMTQAAPSVPVTPGESVSISCRSSKSLLHSNGNTYLYWFLQRPGQSPQRLIYYMSNLASGVPDRFSGRGSGTDFTLRISRVEAEDVGVYYCMQGLEDPYTFGGGTKLEIKEPKSCDKTHTCPPCPAPELLGGPSVFLFPPKPKDTLMISRTPEVTCVVVDVSHEDPEVKFNWYVDGVEVHNAKTKPREEQYNSTYRVVSVLTVLHQDWLNGKEYKCKVSNKALPAPIEKTISKAKGQPREPQVYTLPPSRDELTKNQVSLTCLVKGFYPSDIAVEWESNGQPENNYKTTPPVLDSDGSFFLYSKLTVDKSRWQQGNVFSCSVMHEALHNHYTQKSLSLSPGKKDPKAAATTTPAPRPPTPAPTIASQPLSLRPEACRPAAGGAVHTRGLDFACDIYIWAPLAGTCGVLLLSLVITLYCKRGRKKLLYIFKQPFMRPVQTTQEEDGCSCRFPEEEEGGCELRVKFSRSADAPAYKQGQNQLYNELNLGRREEYDVLDKRRGRDPEMGGKPRRKNPQEGLYNELQKDKMAEAYSEIGMKGERRRGKGHDGLYQGLSTATKDTYDALHMQALPPR

SEQ ID NO: 5156 - protein, 730 aa, Artificial Sequence
  Description of Artificial Sequence: Synthetic Chimeric Antigen Receptor sequence
LLVTSLLLCELPHPAFLLIPDTDVKLQESGPGLVAPSQSLSITCTVSGFSLTSYAVSWVRQPPGKGLEWLGIIWSGGATNYNSALKSRLSISKDNSKSQVFLKMNGLQTDDTARYYCAREHYYGSSAMDYWGQGASITVSSGGGGSGGGGSGGGGSGIVMTQSPLSLPVSLGDQASISCRSSQSIVHSYGNTYLFWYLQKPGQSPKLLIYRVSNRFSGVPDRFSGSGSGTNFTLKISRVEAEDMGVYYCFQGTHVPYTFGGGTKLEIKEPKSCDKTHTCPPCPAPELLGGPSVFLFPPKPKDTLMISRTPEVTCVVVDVSHEDPEVKFNWYVDGVEVHNAKTKPREEQYNSTYRVVSVLTVLHQDWLNGKEYKCKVSNKALPAPIEKTISKAKGQPREPQVYTLPPSRDELTKNQVSLTCLVKGFYPSDIAVEWESNGQPENNYKTTPPVLDSDGSFFLYSKLTVDKSRWQQGNVFSCSVMHEALHNHYTQKSLSLSPGKKDPKAAATTTPAPRPPTPAPTIASQPLSLRPEACRPAAGGAVHTRGLDFACDIYIWAPLAGTCGVLLLSLVITLYCKRGRKKLLYIFKQPFMRPVQTTQEEDGCSCRFPEEEEGGCELRVKFSRSADAPAYKQGQNQLYNELNLGRREEYDVLDKRRGRDPEMGGKPRRKNPQEGLYNELQKDKMAEAYSEIGMKGERRRGKGHDGLYQGLSTATKDTYDALHMQALPPR

SEQ ID NO: 5157 - protein, 730 aa, Artificial Sequence
  Description of Artificial Sequence: Synthetic Chimeric Antigen Receptor sequence
LLVTSLLLCELPHPAFLLIPDTQVQLQQSGAEVKKPGSSVKVSCKASGYTFTDHFISWVRQAPGQGLEWMGGLNPYSGGTNYAQKFQGRVTITADESTSTAYMELSSLRSEDTAVYYCARHNWGAYFDYWWGQGTMVTVSSGGGGSGGGGSGGGGSEIVLTQSPATLSLSPGERATLSCRASKSLLHSNGNTYAWYQQKPGQAPRLLIYYMSRATGIPARFSGSGSGTDFTLTISSLEPEDFAVYYCMQGLEDPYTFFGQGTKLEIKREPKSCDKTHTCPPCPAPELLGGPSVFLFPPKPKDTLMISRTPEVTCVVVDVSHEDPEVKFNWYVDGVEVHNAKTKPREEQYNSTYRVVSVLTVLHQDWLNGKEYKCKVSNKALPAPIEKTISKAKGQPREPQVYTLPPSRDELTKNQVSLTCLVKGFYPSDIAVEWESNGQPENNYKTTPPVLDSDGSFFLYSKLTVDKSRWQQGNVFSCSVMHEALHNHYTQKSLSLSPGKKDPKAAATTTPAPRPPTPAPTIASQPLSLRPEACRPAAGGAVHTRGLDFACDIYIWAPLAGTCGVLLLSLVITLYCKRGRKKLLYIFKQPFMRPVQTTQEEDGCSCRFPEEEEGGCELRVKFSRSADAPAYKQGQNQLYNELNLGRREEYDVLDKRRGRDPEMGGKPRRKNPQEGLYNELQKDKMAEAYSEIGMKGERRRGKGHDGLYQGLSTATKDTYDALHMQALPPR

SEQ ID NO: 5158 - protein, 732 aa, Artificial Sequence
  Description of Artificial Sequence: Synthetic Chimeric Antigen Receptor sequence
LLVTSLLLCELPHPAFLLIPDTQVQLQQSGAELVKPGASVKISCKASGYAFSSYWMNWVKQRPGKGLEWIGQIYPGDGDTTYNGKFKGKATLTADKSSSTVYMQLNSLTSEDSAVYFCVRYYYGSSGYFDYWGQGTTLTVSSGGGGSGGGGSGGGGSDVQMIQTPDSLAVSLGQRATISCRASESVDNYGISFMHWYQQKPGQSPKLLIYRASNLESGIPARFSGSGSRTDFTLTINPVETDDVATYYCQQNNKDPPTFGGGTKLEIKRAEPKSCDKTHTCPPCPAPELLGGPSVFLFPPKPKDTLMISRTPEVTCVVVDVSHEDPEVKFNWYVDGVEVHNAKTKPREEQYNSTYRVVSVLTVLHQDWLNGKEYKCKVSNKALPAPIEKTISKAKGQPREPQVYTLPPSRDELTKNQVSLTCLVKGFYPSDIAVEWESNGQPENNYKTTPPVLDSDGSFFLYSKLTVDKSRWQQGNVFSCSVMHEALHNHYTQKSLSLSPGKKDPKAAATTTPAPRPPTPAPTIASQPLSLRPEACRPAAGGAVHTRGLDFACDIYIWAPLAGTCGVLLLSLVITLYCKRGRKKLLYIFKQPFMRPVQTTQEEDGCSCRFPEEEEGGCELRVKFSRSADAPAYKQGQNQLYNELNLGRREEYDVLDKRRGRDPEMGGKPRRKNPQEGLYNELQKDKMAEAYSEIGMKGERRRGKGHDGLYQGLSTATKDTYDALHMQALPPR

SEQ ID NO: 5159 - protein, 732 aa, Artificial Sequence [sequence omitted]

SEQ ID NO: 5160 - protein, 732 aa, Artificial Sequence
  Description of Artificial Sequence: Synthetic Chimeric Antigen Receptor sequence
LLVTSLLLCELPHPAFLLIPDTQVQLQQSGAEVKKPGSSVKVSCKASGYAFSSYISWVRQAPGQGLEWMGGQIYPGDGDTNYAQKFQGRVTITADESTSTAYMELSSLRSEDTAVYYCVRYYYGSSGYFDYWWGQGTMVTVSSGGGGSGGGGSGGGGSEIVLTQSPATLSLSPGERATLSCRASESVDNYGISFAWYQQKPGQAPRLLIYRASRATGIPARFSGSGSGTDFTLTISSLEPEDFAVYYCQQNNKDPPTFFGQGTKLEIKRAEPKSCDKTHTCPPCPAPELLGGPSVFLFPPKPKDTLMISRTPEVTCVVVDVSHEDPEVKFNWYVDGVEVHNAKTKPREEQYNSTYRVVSVLTVLHQDWLNGKEYKCKVSNKALPAPIEKTISKAKGQPREPQVYTLPPSRDELTKNQVSLTCLVKGFYPSDIAVEWESNGQPENNYKTTPPVLDSDGSFFLYSKLTVDKSRWQQGNVFSCSVMHEALHNHYTQKSLSLSPGKKDPKAAATTTPAPRPPTPAPTIASQPLSLRPEACRPAAGGAVHTRGLDFACDIYIWAPLAGTCGVLLLSLVITLYCKRGRKKLLYIFKQPFMRPVQTTQEEDGCSCRFPEEEEGGCELRVKFSRSADAPAYKQGQNQLYNELNLGRREEYDVLDKRRGRDPEMGGKPRRKNPQEGLYNELQKDKMAEAYSEIGMKGERRRGKGHDGLYQGLSTATKDTYDALHMQALPPR

SEQ ID NO: 5161 - protein, 788 aa, Artificial Sequence
  Description of Artificial Sequence: Synthetic Chimeric Antigen Receptor sequence
LLVTSLLLCELPHPAFLLIPDTALQLQQSGAELVRPGASVTLSCKASGYTFTDYEMHWVKQTPVHGLEWIGAIDPETGGTAYNQKFEGKAILTADKSSSTAYMELRSLTSEDSPVYYCARRRYYGSSSFDYWGQGTTLTVSSGGGGSGGGGSGGGGSDVQMIQTPSSLSASLGDRVTISCRASQDIGNYLNWYQQKPDGTVKLLIYYTSRLHSGVPSRFSGSGSGTEYSLTISNLEQEDIATYFCQQGSALPPTFGGGTKLEINRAEPKSCDKTHTCPPCPAPELLGGPSVFLFPPKPKDTLMISRTPEVTCVVVDVSHEDPEVKFNWYVDGVEVHNAKTKPREEQYNSTYRVVSVLTVLHQDWLNGKEYKCKVSNKALPAPIEKTISKAKGQPREPQVYTLPPSRDELTKNQVSLTCLVKGFYPSDIAVEWESNGQPENNYKTTPPVLDSDGSFFLYSKLTVDKSRWQQGNVFSCSVMHEALHNHYTQKSLSLSPGKKDPKAAAFVPVFLPAKPTTTPAPRPPTPAPTIASQPLSLRPEACRPAAGGAVHTRGLDFACDIYIWAPLAGTCGVLLLSLVITLYCNHRNRSKRSRLLHSDYMNMTPRRPGPTRKHYQPYAPPRDFAAYRSRFSVVKRGRKKLLYIFKQPFMRPVQTTQEEDGCSCRFPEEEEGGCELRVKFSRSADAPAYQQGQNQLYNELNLGRREEYDVLDKRRGRDPEMGGKPRRKNPQEGLYNELQKDKMAEAYSEIGMKGERRRGKGHDGLYQGLSTATKDTYDALHMQALPPR

SEQ ID NO: 5162 - protein, 788 aa, Artificial Sequence [sequence omitted]

SEQ ID NO: 5163 - protein, 789 aa, Artificial Sequence [sequence omitted]

SEQ ID NO: 5164 - protein, 790 aa, Artificial Sequence
  Description of Artificial Sequence: Synthetic Chimeric Antigen Receptor sequence
LLVTSLLLCELPHPAFLLIPDTDVKLQESGPGLVAPSQSLSITCTVSGFSLTSYAVSWVRQPPGKGLEWLGIIWSGGATNYNSALKSRLSISKDNSKSQVFLKMNGLQTDDTARYYCAREHYYGSSAMDYWGQGASITVSSGGGGSGGGGSGGGGSGIVMTQSPLSLPVSLGDQASISCRSSQSIVHSYGNTYLFWYLQKPGQSPKLLIYRVSNRFSGVPDRFSGSGSGTNFTLKISRVEAEDMGVYYCFQGTHVPYTFGGGTKLEIKEPKSCDKTHTCPPCPAPELLGGPSVFLFPPKPKDTLMISRTPEVTCVVVDVSHEDPEVKFNWYVDGVEVHNAKTKPREEQYNSTYRVVSVLTVLHQDWLNGKEYKCKVSNKALPAPIEKTISKAKGQPREPQVYTLPPSRDELTKNQVSLTCLVKGFYPSDIAVEWESNGQPENNYKTTPPVLDSDGSFFLYSKLTVDKSRWQQGNVFSCSVMHEALHNHYTQKSLSLSPGKKDPKAAAFVPVFLPAKPTTTPAPRPPTPAPTIASQPLSLRPEACRPAAGGAVHTRGLDFACDIYIWAPLAGTCGVLLLSLVITLYCNHRNRSKRSRLLHSDYMNMTPRRPGPTRKHYQPYAPPRDFAAYRSRFSVVKRGRKKLLYIFKQPFMRPVQTTQEEDGCSCRFPEEEEGGCELRVKFSRSADAPAYQQGQNQLYNELNLGRREEYDVLDKRRGRDPEMGGKPRRKNPQEGLYNELQKDKMAEAYSEIGMKGERRRGKGHDGLYQGLSTATKDTYDALHMQALPPR

SEQ ID NO: 5165 - protein, 790 aa, Artificial Sequence
  Description of Artificial Sequence: Synthetic Chimeric Antigen Receptor sequence
LLVTSLLLCELPHPAFLLIPDTQVQLQQSGAEVKKPGSSVKVSCKASGYTFTDHFISWVRQAPGQGLEWMGGLNPYSGGTNYAQKFQGRVTITADESTSTAYMELSSLRSEDTAVYYCARHNWGAYFDYWWGQGTMVTVSSGGGGSGGGGSGGGGSEIVLTQSPATLSLSPGERATLSCRASKSLLHSNGNTYAWYQQKPGQAPRLLIYYMSRATGIPARFSGSGSGTDFTLTISSLEPEDFAVYYCMQGLEDPYTFFGQGTKLEIKREPKSCDKTHTCPPCPAPELLGGPSVFLFPPKPKDTLMISRTPEVTCVVVDVSHEDPEVKFNWYVDGVEVHNAKTKPREEQYNSTYRVVSVLTVLHQDWLNGKEYKCKVSNKALPAPIEKTISKAKGQPREPQVYTLPPSRDELTKNQVSLTCLVKGFYPSDIAVEWESNGQPENNYKTTPPVLDSDGSFFLYSKLTVDKSRWQQGNVFSCSVMHEALHNHYTQKSLSLSPGKKDPKAAAFVPVFLPAKPTTTPAPRPPTPAPTIASQPLSLRPEACRPAAGGAVHTRGLDFACDIYIWAPLAGTCGVLLLSLVITLYCNHRNRSKRSRLLHSDYMNMTPRRPGPTRKHYQPYAPPRDFAAYRSRFSVVKRGRKKLLYIFKQPFMRPVQTTQEEDGCSCRFPEEEEGGCELRVKFSRSADAPAYQQGQNQLYNELNLGRREEYDVLDKRRGRDPEMGGKPRRKNPQEGLYNELQKDKMAEAYSEIGMKGERRRGKGHDGLYQGLSTATKDTYDALHMQALPPR

SEQ ID NO: 5166 - protein, 792 aa, Artificial Sequence
  Description of Artificial Sequence: Synthetic Chimeric Antigen Receptor sequence
LLVTSLLLCELPHPAFLLIPDTQVQLQQSGAELVKPGASVKISCKASGYAFSSYWMNWVKQRPGKGLEWIGQIYPGDGDTTYNGKFKGKATLTADKSSSTVYMQLNSLTSEDSAVYFCVRYYYGSSGYFDYWGQGTTLTVSSGGGGSGGGGSGGGGSDVQMIQTPDSLAVSLGQRATISCRASESVDNYGISFMHWYQQKPGQSPKLLIYRASNLESGIPARFSGSGSRTDFTLTINPVETDDVATYYCQQNNKDPPTFGGGTKLEIKRAEPKSCDKTHTCPPCPAPELLGGPSVFLFPPKPKDTLMISRTPEVTCVVVDVSHEDPEVKFNWYVDGVEVHNAKTKPREEQYNSTYRVVSVLTVLHQDWLNGKEYKCKVSNKALPAPIEKTISKAKGQPREPQVYTLPPSRDELTKNQVSLTCLVKGFYPSDIAVEWESNGQPENNYKTTPPVLDSDGSFFLYSKLTVDKSRWQQGNVFSCSVMHEALHNHYTQKSLSLSPGKKDPKAAAFVPVFLPAKPTTTPAPRPPTPAPTIASQPLSLRPEACRPAAGGAVHTRGLDFACDIYIWAPLAGTCGVLLLSLVITLYCNHRNRSKRSRLLHSDYMNMTPRRPGPTRKHYQPYAPPRDFAAYRSRFSVVKRGRKKLLYIFKQPFMRPVQTTQEEDGCSCRFPEEEEGGCELRVKFSRSADAPAYQQGQNQLYNELNLGRREEYDVLDKRRGRDPEMGGKPRRKNPQEGLYNELQKDKMAEAYSEIGMKGERRRGKGHDGLYQGLSTATKDTYDALHMQALPPR

SEQ ID NO: 5167 - protein, 792 aa, Artificial Sequence
  Description of Artificial Sequence: Synthetic Chimeric Antigen Receptor sequence
LLVTSLLLCELPHPAFLLIPDTQVQLQQSGAEVKKPGSSVKVSCKASGFSLTSYAISWVRQAPGQGLEWMGGIIWSGGATNYAQKFQGRVTITADESTSTAYMELSSLRSEDTAVYYCAREHYYGSSAMDYWWGQGTMVTVSSGGGGSGGGGSGGGGSEIVLTQSPATLSLSPGERATLSCRASQSIVHSYGNTYAWYQQKPGQAPRLLIYRVSRATGIPARFSGSGSGTDFTLTISSLEPEDFAVYYCFQGTHVPYTFFGQGTKLEIKREPKSCDKTHTCPPCPAPELLGGPSVFLFPPKPKDTLMISRTPEVTCVVVDVSHEDPEVKFNWYVDGVEVHNAKTKPREEQYNSTYRVVSVLTVLHQDWLNGKEYKCKVSNKALPAPIEKTISKAKGQPREPQVYTLPPSRDELTKNQVSLTCLVKGFYPSDIAVEWESNGQPENNYKTTPPVLDSDGSFFLYSKLTVDKSRWQQGNVFSCSVMHEALHNHYTQKSLSLSPGKKDPKAAAFVPVFLPAKPTTTPAPRPPTPAPTIASQPLSLRPEACRPAAGGAVHTRGLDFACDIYIWAPLAGTCGVLLLSLVITLYCNHRNRSKRSRLLHSDYMNMTPRRPGPTRKHYQPYAPPRDFAAYRSRFSVVKRGRKKLLYIFKQPFMRPVQTTQEEDGCSCRFPEEEEGGCELRVKFSRSADAPAYQQGQNQLYNELNLGRREEYDVLDKRRGRDPEMGGKPRRKNPQEGLYNELQKDKMAEAYSEIGMKGERRRGKGHDGLYQGLSTATKDTYDALHMQALPPR

SEQ ID NO: 5168 - protein, 792 aa, Artificial Sequence
  Description of Artificial Sequence: Synthetic Chimeric Antigen Receptor sequence
LLVTSLLLCELPHPAFLLIPDTQVQLQQSGAEVKKPGSSVKVSCKASGYAFSSYISWVRQAPGQGLEWMGGQIYPGDGDTNYAQKFQGRVTITADESTSTAYMELSSLRSEDTAVYYCVRYYYGSSGYFDYWWGQGTMVTVSSGGGGSGGGGSGGGGSEIVLTQSPATLSLSPGERATLSCRASESVDNYGISFAWYQQKPGQAPRLLIYRASRATGIPARFSGSGSGTDFTLTISSLEPEDFAVYYCQQNNKDPPTFFGQGTKLEIKRAEPKSCDKTHTCPPCPAPELLGGPSVFLFPPKPKDTLMISRTPEVTCVVVDVSHEDPEVKFNWYVDGVEVHNAKTKPREEQYNSTYRVVSVLTVLHQDWLNGKEYKCKVSNKALPAPIEKTISKAKGQPREPQVYTLPPSRDELTKNQVSLTCLVKGFYPSDIAVEWESNGQPENNYKTTPPVLDSDGSFFLYSKLTVDKSRWQQGNVFSCSVMHEALHNHYTQKSLSLSPGKKDPKAAAFVPVFLPAKPTTTPAPRPPTPAPTIASQPLSLRPEACRPAAGGAVHTRGLDFACDIYIWAPLAGTCGVLLLSLVITLYCNHRNRSKRSRLLHSDYMNMTPRRPGPTRKHYQPYAPPRDFAAYRSRFSVVKRGRKKLLYIFKQPFMRPVQTTQEEDGCSCRFPEEEEGGCELRVKFSRSADAPAYQQGQNQLYNELNLGRREEYDVLDKRRGRDPEMGGKPRRKNPQEGLYNELQKDKMAEAYSEIGMKGERRRGKGHDGLYQGLSTATKDTYDALHMQALPPR

SEQ ID NO: 5169 - protein, 614 aa, Artificial Sequence
  Description of Artificial Sequence: Synthetic Chimeric Antigen Receptor sequence
METDTLLLWVLLLWVPGSTGSVLHLVPINATSKDDSDVTEVMWQPALRRGRGLQAQGYGVRIQDAGVYLLYSQVLFQDVTFTMGQVVSREGQGRQETLFRCIRSMPSHPDRAYNSCYSAGVFHLHQGDILSVIIPRARAKLNLSPHGTFLGFVKLSGGGSDPAEPKSPDKTHTCPPCPAPPVAGPSVFLFPPKPKDTLMIARTPEVTCVVVDVSHEDPEVKFNWYVDGVEVHNAKTKPREEQYNSTYRVVSVLTVLHQDWLNGKEYKCKVSNKALPAPIEKTISKAKGQPREPQVYTLPPSRDELTKNQVSLTCLVKGFYPSDIAVEWESNGQPENNYKTTPPVLDSDGSFFLYSKLTVDKSRWQQGNVFSCSVMHEALHNHYTQKSLSLSPGKKDPKFWVLVVVGGVLACYSLLVTVAFIIFWVRSKRSRLLHSDYMNMTPRRPGPTRKHYQPYAPPRDFAAYRSRDQRLPPDAHKPPGGGSFRTPIQEEQADAHSTLAKIRVKFSRSADAPAYQQGQNQLYNELNLGRREEYDVLDKRRGRDPEMGGKPRRKNPQEGLYNELQKDKMAEAYSEIGMKGERRRGKGHDGLYQGLSTATKDTYDALHMQALPPR

SEQ ID NO: 5170 - protein, 398 aa, Artificial Sequence
  Description of Artificial Sequence: Synthetic Chimeric Antigen Receptor sequence
METDTLLLWVLLLWVPGSTGSVLHLVPINATSKDDSDVTEVMWQPALRRGRGLQAQGYGVRIQDAGVYLLYSQVLFQDVTFTMGQVVSREGQGRQETLFRCIRSMPSHPDRAYNSCYSAGVFHLHQGDILSVIIPRARAKLNLSPHGTFLGFVKLSGGGSDPAEPKSPDKTHTCPPCPKDPKFWVLVVVGGVLACYSLLVTVAFIIFWVRSKRSRLLHSDYMNMTPRRPGPTRKHYQPYAPPRDFAAYRSRDQRLPPDAHKPPGGGSFRTPIQEEQADAHSTLAKIRVKFSRSADAPAYQQGQNQLYNELNLGRREEYDVLDKRRGRDPEMGGKPRRKNPQEGLYNELQKDKMAEAYSEIGMKGERRRGKGHDGLYQGLSTATKDTYDALHMQALPPR

SEQ ID NO: 5171 - protein, 482 aa, Artificial Sequence; identical to SEQ ID NO: 5117
  Description of Artificial Sequence: Synthetic polypeptide

SEQ ID NO: 5172 - protein, 480 aa, Artificial Sequence
  Description of Artificial Sequence: Synthetic polypeptide
MALPVTALLLPLALLLHAARPEVQLVESGGGLVQPGGSLRLSCAVSGFALSNHGMSWVRRAPGKGLEWVSGIVYSGSTYYAASVKGRFTISRDNSRNTLYLQMNSLRPEDTAIYYCSAHGGESDVWGQGTTVTVSSASGGGGSGGRASGGGGSDIQLTQSPSSLSASVGDRVTITCRASQSISSYLNWYQQKPGKAPKLLIYAASSLQSGVPSRFSGSGSGTDFTLTISSLQPEDFATYYCQQSYSTPYTFGQGTKVEIKTTTPAPRPPTPAPTIASQPLSLRPEACRPAAGGAVHTRGLDFACDIYIWAPLAGTCGVLLLSLVITLYCKRGRKKLLYIFKQPFMRPVQTTQEEDGCSCRFPEEEEGGCELRVKFSRSADAPAYKQGQNQLYNELNLGRREEYDVLDKRRGRDPEMGGKPRRKNPQEGLYNELQKDKMAEAYSEIGMKGERRRGKGHDGLYQGLSTATKDTYDALHMQAL

SEQ ID NO: 5173 - protein, 136 aa, Artificial Sequence
  Description of Artificial Sequence: Synthetic Chimeric Antigen Receptor sequence
CPYSNPSLCSGGGGSELPTQGTFSNVSTNVSPAKPTTTACPYSNPSLCSGGGGSPAPRPPTPAPTIASQPLSLRPEACRPAAGGAVHTRGLDFACDIYIWAPLAGTCGVLLLSLVITLYCNHRNRRRVCKCPRPVV

SEQ ID NO: 5174 - protein, 212 aa, Artificial Sequence
  Description of Artificial Sequence: Synthetic Chimeric Antigen Receptor sequence
MALPVTALLLPLALLLHAARPEVQLVETGGGLVQPGGSLRLSCAASGFTFSSYAMSWVRQAPGKGLEWVSAISGSGGSTYYADSVKGRFTISRDNSKNTLYLQMNTLKAEDTAVYYCARATYKRELRYYYGMDVWGQGTTVTVSSGGGGSGGGGSGGGGSEIVLTQSPSTLSLSPGESATLSCRASQSVSTTFLAWYQQKPGQAPRLLIYGS

SEQ ID NO: 5175 - protein, 391 aa, Artificial Sequence
  Description of Artificial Sequence: Synthetic Chimeric Antigen Receptor sequence
MALPVTALLLPLALLLHAARPGSGSGAQAAQVQLVQSGAEVKKPGASVKVSCKASGYSFPDYYINWVRQAPGQGLEWMGWIYFASGNSEYNQKFTGRVTMTRDTSSSTAYMELSSLRSEDTAVYFCASLYDYDWYFDVWGQGTMVTVSSGGGGSGGGGSGGGGSDIVMTQTPLSLSVTPGEPASISCKSSQSLVHSNGNTYLHWYLQKPGQSPQLLIYKVSNRFSGVPDRFSGSGSGADFTLKISRVEAEDVGVYYCAETSHVPWTFGQGTKLEIKRSDPASGAGSGSGSAIELLPVPGAKKSAKLYIPYIILTIIILTIVGFIWLLKVNGCRKYKLNKTESTPVVEEDEMQPYASYTEKNNPLYDTTNKVKASEALQSEVDTDLHTLSHG

SEQ ID NO: 5176 - protein, 394 aa, Artificial Sequence
  Description of Artificial Sequence: Synthetic Chimeric Antigen Receptor sequence
METDTLLLWVLLLWVPGSTGSVLHLVPINATSKDDSDVTEVMWQPALRRGRGLQAQGYGVRIQDAGVYLLYSQVLFQDVTFTMGQVVSREGQGRQETLFRCIRSMPSHPDRAYNSCYSAGVFHLHQGDILSVIIPRARAKLNLSPHGTFLGFVLSGGGSDPAEPKSPDKTHTCPPCPDPFWVLWVGGVLACYSLLVTVAFIIFWVRSKRSRLLHSDYMNMTPRRPGPTRKHYQPYAPPRDFAAYRSRDQRLPPDAHKPPGGGSFRTPIQEEQADAHSTLAKIRVKFSRSADAPAYQQGQNQLYNELNLGRREEYDVLDKRRGRDPEMGGKPRRKNPQEGLYNELQKDKMAEAYSEIGMKGERRRGKGHDGLYQGLSTATKDTYDALHMQALPPR

SEQ ID NO: 5177 - protein, 416 aa, Artificial Sequence
  Description of Artificial Sequence: Synthetic Chimeric Antigen Receptor sequence
MGTSLLCWMALCLLGADHADGKPIPNPLLGLDSTSGGGGSVLHLVPINATSKDDSDVTEVMWQPALRRGRGLQAQGYGVRIQDAGVYLLYSQVLFQDVTFTMGQVVSREGQGRQETLFRCIRSMPSHPDRAYNSCYSAGVFHLHQGDILSVIIPRARAKLNLSPHGTFLGFVKLSGGGSDPAEPKSPDKTHTCPPCPKDPKFWVLVVVGGVLACYSLLVTVAFIIFVRSKRSRLLHSDYMNMTPRRPGPTRKHYQPYAPPRDFAAYRSRDQRLPPDAHKPPGGGSFRTPIQEEQADAHSTLAKIRVKFSRSADAPAYQQGQNQLYNELNLGRREEYDVLDKRRGRDPEMGGKPRRKNPQEGLYNELQKDKMAEAYSEIGMKGERRRGKGHDGLYQGLSTATKDTYDALHMQALPPR

SEQ ID NO: 5178 - protein, 417 aa, Artificial Sequence
  Description of Artificial Sequence: Synthetic Chimeric Antigen Receptor sequence
MGTSLLCWMALCLLGADHADGKPIPNPLLGLDSTSGGGGSVLHLVPINATSKDDSDVTEVMWQPALRRGRGLQAQGYGVRIQDAGVYLLYSQVLFQDVTFTMGQVVSREGQGRQETLFRCIRSMPSHPDRAYNSCYSAGVFHLHQGDILSVIIPRARAKLNLSPHGTFLGFVKLSGGGSDPAEPKSPDKTHTCPPCPKDPKFWVLVVVGGVLACYSLLVTVAFIIFWVRSKRSRLLHSDYMNMTPRRPGPTRKHYQPYAPPRDFAAYRSRDQRLPPDAHKPPGGGSFRTPIQEEQADAHSTLAKIRVKFSRSADAPAYQQGQNQLYNELNLGRREEYDVLDKRRGRDPEMGGKPRRKNPQEGLYNELQKDKMAEAYSEIGMKGERRRGKGHDGLYQGLSTATKDTYDALHMQALPPR

SEQ ID NO: 5179 - protein, 422 aa, Artificial Sequence
  Description of Artificial Sequence: Synthetic Chimeric Antigen Receptor sequence
METDTLLLWVLLLWVPGSTGSVLHLVPINATSKDDSDVTEVMWQPALRRGRGLQAQGYGVRIQDAGVYLLYSQVLFQDVTFTMGQVVSREGQGRQETLFRCIRSMPSHPDRAYNSCYSAGVFHLHQGDILSVIIPRARAKLNLSPHGTFLGFVKLSGGGSDPTTTPAPRPPTPAPTIASQPLSLRPEACRPAAGGAVHTRGLDFACDIFWVLVVVGGVLACYSLLVTVAFIIFWVRSKRSRLLHSDYMNMTPRRPGPTRKHYQPYAPPRDFAAYRSRDQRLPPDAHKPPGGGSFRTPIQEEQADAHSTLAKIRVKFSRSADAPAYQQGQNQLYNELNLGRREEYDVLDKRRGRDPEMGGKPRRKNPQEGLYNELQKDKAEAYSEIGMKGERRRGKGHDGLYQGLSTATKDYDALHMQALPPR

SEQ ID NO: 5180 - protein, 438 aa, Artificial Sequence
  Description of Artificial Sequence: Synthetic Chimeric Antigen Receptor sequence
MGTSLLCMALCLLGADHADGKPIPNPLLGLDSTSGGGGSVLHLVPINATSKDDSDVTEVMWQPALRRGRGLQAQGYGVRIQDAGVYLLYSQVLFQDVTFTMGQWSREGQGRQETLFRCIRSMPSHPDRAYNSCYSAGVFHLHQGDILSIIPRARAKLNLSPHGTFLGFVKLSGGGSDPTTTPAPRPPTPAPTIASQPLSLRPEACRPAAGGAVHTRGLDFACDIFWVLWVGGVLACYSLLVTVAFIIFWVRSKRSRLLHSDYMNMTPRRPGPTRKHYQPYAPPRDFAAYRSRDQRLPPDAHKPPGGGSFRTPIQEEQADAHSTLAKIRVKFSRSADAPAYQQGQNQLYNELNLGRREEYDVLDKRRGRDPEMGGKPRRKNPQEGLYNELQKDKMAEAYSEIGMKGERRRGKGHDGLYQGLSATKDTYDALHMQALPPR

SEQ ID NO: 5181 - protein, 443 aa, Artificial Sequence
  Description of Artificial Sequence: Synthetic Chimeric Antigen Receptor sequence
MGTSLLCWMALCLLGADHADGKPIPNPLLGLDSTSGGGGSVLHLVPINATSKDDSDVTEVMWQPALRRGRGLQAQGYGVRIQDAGVYLLYSQVLFQDVTFTMGQVVSREGQGRQETLFRCIRSMPSHPDRAYNSCYSAGVFHLHQGDILSVIIPRARAKLNLSPHGTFLGFVKLSGGGSDPTTTPAPRPPTPAPTIASQPLSLRPEACRPAAGGAVHTRGLDFACDIFWVLVVVGGVLACYSLLVTVAFIIFWVRSKRSRLLHSDYMNMTPRRPGPTRKHYQPYAPPRDFAAYRSRDQRLPPDAHKPPGGGSFRTPIQEEQADAHSTLAKIRVKFSRSADAPAYQQGQNQLYNELNLGRREEYDVLDKRRGRDPEMGGKPRRKNPQEGLYNELQKDKMAEAYSEIGMKGERRRGKGHDGLYQGLSTATKDTYDALHMQALPPR

SEQ ID NO: 5182 - protein, 461 aa, Artificial Sequence
  Description of Artificial Sequence: Synthetic Chimeric Antigen Receptor sequence
MALPVTALLLPLALLLHAARPQVQLVQSGAEVKKPGASVKVSCKASGYSFPDYYINWVRQAPGQGLEWMGWIYFASGNSEYNQKFTGRVTMTRDTSINTAYMELSSLTSEDTAVYFCASLYDYDWYFDVWGQGTMVTVSSGGGGSGGGGSGGGGSDIVMTQTPLSLSVTPGQPASISCKSSQSLVHSNGNTYLHWYLQKPGQSPQLLIYKVSNRFSGVPDRFSGSGSGTDFTLKISRVEAEDVGIYYCSQSSIYPWTFGQGTKLEIKGLAVSTISSFFPPGYQIYIWAPLAGTCGVLLLSLVITLYCKRGRKKLLYIFKQPFMRPVQTTQEEDGCSCRFPEEEEGGCELRVKFSRSADAPAYQQGQNQLYNELNLGRREEYDVLDKRRGRDPEMGGKPRRKNPQEGLYNELQKDKMAEAYSEIGMKGERRRGKGHDGLYQGLSTATKDTYDALHMQALPPR

SEQ ID NO: 5183 - protein, 461 aa, Artificial Sequence
  Description of Artificial Sequence: Synthetic Chimeric Antigen Receptor sequence
MALPVTALLLPLALLLHAARPQVQLVQSGAEVKKPGASVKVSCKASGYSFPDYYINWVRQAPGQGLEWMGWIYFASGNSEYNQKFTGRVTMTRDTSSSTAYMELSSLRSEDTAVYFCASLYDYDWYFDVWGQGTMVTVSSGGGGSGGGGSGGGGSDIVMTQTPLSLSVTPGEPASISCKSSQSLVHSNGNTYLHWYLQKPGQSPQLLIYKVSNRFSGVPDRFSGSGSGADFTLKISRVEAEDVGVYYCAETSHVPWTFGQGTKLEIKGLAVSTISSFFPPGYQIYIWAPLAGTCGVLLLSLVITLYCKRGRKKLLYIFKQPFMRPVQTTQEEDGCSCRFPEEEEGGCELRVKFSRSADAPAYQQGQNQLYNELNLGRREEYDVLDKRRGRDPEMGGKPRRKNPQEGLYNELQKDKMAEAYSEIGMKGERRRGKGHDGLYQGLSTATKDTYDALHMQALPPR

SEQ ID NO: 5184 - protein, 464 aa, Artificial Sequence
  Description of Artificial Sequence: Synthetic Chimeric Antigen Receptor sequence
EVQLLESGGGLVQPGGSLRLSCAASGFTFSSYAMNWVRQAPGKGLEWVSAILSSGGSTYYADSVKGRFTISRDNSKNTLYLQMNSLRAEDTAVYYCARYWPMDIWGQGTLVTVSSGGGGSGGGGSGGGGSEIVLTQSPGTLSLSPGERATLSCRGGQSVSSSYLAWYQQKPGQAPRLLMYDASIRATGIPDRFSGSGSGTDFTLTISRLEPEDFAVYYCQQYQSWPLTFGQGTKVEIKAPTTTPAPRPPTPAPTIASQPLSLRPEACRPAAGGAVHTRGLDFACDIYIWAPLAGTCGVLLLSLVITLYCRRGRKKLLYIFKQPFMRPVQTTQEEDGCSCRFPEEEEGGCELRVKFSRSADAPAYQQGQNQLYNELNLGRREEYDVLDKRRGRDPEMGGKPRRKNPQEGLYNELQKDKMAEAYSEIGMKGERRRGKGHDGLYQGLSTATKDTYDALHMQALPPRE

SEQ ID NO: 5185 - protein, 464 aa, Artificial Sequence
  Description of Artificial Sequence: Synthetic Chimeric Antigen Receptor sequence
MALPVTALLLPLALLLHAARPQVQLVQSGAEVKKPGASVKVSCKASGYSFPDYYINWVRQAPGQGLEWMGWIYFASGNSEYNQKFTGRVTMTRDTSINTAYMELSSLTSEDTAVYFCASLYDYDWYFDVWGQGTMVTVSSGGGGSGGGGSGGGGSDIVMTQTPLSLSVTPGQPASISCKSSQSLVHSNGNTYLHWYLQKPGQSPQLLIYKVSNRFSGVPDRFSGSGSGTDFTLKISRVEAEDVGIYYCSQSSIYPWTFGQGTKLEIKGLAVSTISSFFPPGYQIISFFLALTSTALLFLLFFLTLRFSVVKRGRKKLLYIFKQPFMRPVQTTQEEDGCSCRFPEEEEGGCELRVKFSRSADAPAYQQGQNQLYNELNLGRREEYDVLDKRRGRDPEMGGKPRRKNPQEGLYNELQKDKMAEAYSEIGMKGERRRGKGHDGLYQGLSTATKDTYDALHMQALPPR

SEQ ID NO: 5186 - protein, 464 aa, Artificial Sequence
  Description of Artificial Sequence: Synthetic Chimeric Antigen Receptor sequence
MALPVTALLLPLALLLHAARPQVQLVQSGAEVKKPGASVKVSCKASGYSFPDYYINWVRQAPGQGLEWMGWIYFASGNSEYNQKFTGRVTMTRDTSSSTAYMELSSLRSEDTAVYFCASLYDYDWYFDVWGQGTMVTVSSGGGGSGGGGSGGGGSDIVMTQTPLSLSVTPGEPASISCKSSQSLVHSNGNTYLHWYLQKPGQSPQLLIYKVSNRFSGVPDRFSGSGSGADFTLKISRVEAEDVGVYYCAETSHVPWTFGQGTKLEIKGLAVSTISSFFPPGYQIISFFLALTSTALLFLLFFLTLRFSVVKRGRKKLLYIFKQPFMRPVQTTQEEDGCSCRFPEEEEGGCELRVKFSRSADAPAYQQGQNQLYNELNLGRREEYDVLDKRRGRDPEMGGKPRRKNPQEGLYNELQKDKMAEAYSEIGMKGERRRGKGHDGLYQGLSTATKDTYDALHMQALPPR

SEQ ID NO: 5187 - protein, 466 aa, Artificial Sequence
  Description of Artificial Sequence: Synthetic Chimeric Antigen Receptor sequence
EVQLLESGGGLVQPGGSLRLSCAASGFTFSSYAMNWVRQAPGKGLEWVSAILSSGGSTYYADSVKGRFTISRDNSKNTLYLQMNSLRAEDTAVYYCARYWPMDIWGQGTLVTVSSGGSCPYSNPSLCSGGSEIVLTQSPGTLSLSPGERATLSCRGGQSVSSSYLAWYQQKPGQAPRLLMYDASIRATGIPDRFSGSGSGTDFTLTISRLEPEDFAVYYCQQYQSWPLTFGQGTKVEIKSDPTTTPAPRPPTPAPTIASQPLSLRPEACRPAAGGAVHTRGLDFACDIYIWAPLAGTCGVLLLSLVITLYCRRGRKKLLYIFKQPFMRPVQTTQEEDGCSCRFPEEEEGGCELRVKFSRSADAPAYQQGQNQLYNELNLGRREEYDVLDKRRGRDPEMGGKPRRKNPQEGLYNELQKDKMAEAYSEIGMKGERRRGKGHDGLYQGLSTATKDTYDALHMQALPPRE

SEQ ID NO: 5188 - protein, 466 aa, Artificial Sequence
  Description of Artificial Sequence: Synthetic Chimeric Antigen Receptor sequence
QIQLVQSGPELKKPGETVKISCKASGYTFRHYSMNWVKQAPGKGLKWMGRINTESGVPIYADDFKGRFAFSVETSASTAYLVINNLKDEDTASYFCSNDYLYSLDFWGQGTALTVSSGGGGSGGGGSGGGGSDIVLTQSPPSLAMSLGKRATISCRASESVTILGSHLIYWYQQKPGQPPTLLIQLASNVQTGVPARFSGSGSRTDFTLTIDPVEEDDVAVYYCLQSRTIPRTFGGGTKLEIKTTTPAPRPPTPAPTIASQPLSLRPEACRPAAGGAVHTRGLDFACDIYIWAPLAGTCGVLLLSLVITLYCKRGRKKLLYIFKQPFMRPVQTTQEEDGCSCRFPEEEEGGCELRVKFSRSADAPAYKQGQNQLYNELNLGRREEYDVLDKRRGRDPEMGGKPRRKNPQEGLYNELQKDKMAEAYSEIGMKGERRRGKGHDGLYQGLSTATKDTYDALHMQALPPR

SEQ ID NO: 5189 - protein, 466 aa, Artificial Sequence
  Description of Artificial Sequence: Synthetic Chimeric Antigen Receptor sequence
QIQLVQSGPELKKPGETVKISCKASGYTFTHYSMNWVKQAPGKGLKWMGRINTETGEPLYADDFKGRFAFSLETSASTAYLVINNLKNEDTATFFCSNDYLYSCDYWGQGTTLTVSSGGGGSGGGGSGGGGSDIVLTQSPPSLAMSLGKRATISCRASESVTILGSHLIYWYQQKPGQPPTLLIQLASNVQTGVPARFSGSGSRTDFTLTIDPVEEDDVAVYYCLQSRTIPRTFGGGTKLEIKTTTPAPRPPTPAPTIASQPLSLRPEACRPAAGGAVHTRGLDFACDIYIWAPLAGTCGVLLLSLVITLYCKRGRKKLLYIFKQPFMRPVQTTQEEDGCSCRFPEEEEGGCELRVKFSRSADAPAYKQGQNQLYNELNLGRREEYDVLDKRRGRDPEMGGKPRRKNPQEGLYNELQKDKMAEAYSEIGMKGERRRGKGHDGLYQGLSTATKDTYDALHMQALPPR

SEQ ID NO: 5190 - protein, 467 aa, Artificial Sequence
  Description of Artificial Sequence: Synthetic Chimeric Antigen Receptor sequence
QIQLVQSGPDLKKPGETVKLSCKASGYTFTNFGMNWVKQAPGKGFKWMAWINTYTGESYFADDFKGRFAFSVETSATTAYLQINNLKTEDTATYFCARGEIYYGYDGGFAYWGQGTLVTVSAGGGGSGGGGSGGGGSDVVMTQSHRFMSTSVGDRVSITCRASQDVNTAVSWYQQKPGQSPKLLIFSASYRYTGVPDRFTGSGSGADFTLTISSVQAEDLAVYYCQQHYSTPWTFGGGTKLDIKTTTPAPRPPTPAPTIASQPLSLRPEACRPAAGGAVHTRGLDFACDIYIWAPLAGTCGVLLLSLVITLYCKRGRKKLLYIFKQPFMRPVQTTQEEDGCSCRFPEEEEGGCELRVKFSRSADAPAYKQGQNQLYNELNLGRREEYDVLDKRRGRDPEMGGKPRRKNPQEGLYNELQKDKMAEAYSEIGMKGERRRGKGHDGLYQGLSTATKDTYDALHMQALPPR

SEQ ID NO: 5191 - protein, 469 aa, Artificial Sequence
  Description of Artificial Sequence: Synthetic Chimeric Antigen Receptor sequence
QVQLVQSGAEVKKPGASVKVSCKASGYSFPDYYINWVRQAPGQGLEWMGWIYFASGNSEYNQKFTGRVTMTRDTSSSTAYMELSSLRSEDTAVYFCASLYDYDWYFDVWGQGTMVTVSSGGGGSGGGGSGGGGSDIVMTQTPLSLSVTPGEPASISCKSSQSLVHSNGNTYLHWYLQKPGQSPQLLIYKVSNRFSGVPDRFSGSGSGADFTLKISRVEAEDVGVYYCAETSHVPWTFGQGTKLEIKTTTPAPRPPTPAPTIASQPLSLRPEACRPAAGGAVHTRGLDFACDIYIWAPLAGTCGVLLLSLVITLYCKRGRKKLLYIFKQPFMRPVQTTQEEDGCSCRFPEEEEGGCELRVKFSRSADAPAYQQGQNQLYNELNLGRREEYDVLDKRRGRDPEMGGKPRRKNPQEGLYNELQKDKMAEAYSEIGMKGERRRGKGHDGLYQGLSTATKDTYDALHMQALPPR

SEQ ID NO: 5192 - protein, 472 aa, Artificial Sequence
  Description of Artificial Sequence: Synthetic Chimeric Antigen Receptor sequence
EVQLLESGGGLVQPGGSLRLSCAASGFTFSSYAMNWVRQAPGKGLEWVSAILSSGGSTYYADSVKGRFTISRDNSKNTLYLQMNSLRAEDTAVYYCARYWPMDIWGQGTLVTVSSGGGGGSCPYSNPSLCSGGGGGSEIVLTQSPGTLSLSPGERATLSCRGGQSVSSSYLAWYQQKPGQAPRLLMYDASIRATGIPDRFSGSGSGTDFTLTISRLEPEDFAVYYCQQYQSWPLTFGQGTKVEIKSDPTTTPAPRPPTPAPTIASQPLSLRPEACRPAAGGAVHTRGLDFACDIYIWAPLAGTCGVLLLSLVITLYCRRGRKKLLYIFKQPFMRPVQTTQEEDGCSCRFPEEEEGGCELRVKFSRSADAPAYQQGQNQLYNELNLGRREEYDVLDKRRGRDPEMGGKPRRKNPQEGLYNELQKDKMAEAYSEIGMKGERRRGKGHDGLYQGLSTATKDTYDALHMQALPPRE

SEQ ID NO: 5193 - protein, 472 aa, Artificial Sequence
  Description of Artificial Sequence: Synthetic Chimeric Antigen Receptor sequence
QIQLVQSGPELKKPGETVKISCKASGYTFTDYSINWVKRAPGKGLKWMGWINTETREPAYAYDFRGRFAFSLETSASTAYLQINNLKYEDTATYFCALDYSYAMDYWGQGTSVTVSSGGGGSGGGGSGGGGSQIQLVQSGPELKKPGETVKISCKASGYTFTDYSINWVKRAPGKGLKWMGWINTETREPAYAYDFRGRFAFSLETSASTAYLQINNLKYEDTATYFCALDYSYAMDYWGQGTSVTVSSTTTPAPRPPTPAPTIASQPLSLRPEACRPAAGGAVHTRGLDFACDIYIWAPLAGTCGVLLLSLVITLYCKRGRKKLLYIFKQPFMRPVQTTQEEDGCSCRFPEEEEGGCELRVKFSRSADAPAYKQGQNQLYNELNLGRREEYDVLDKRRGRDPEMGGKPRRKNPQEGLYNELQKDKMAEAYSEIGMKGERRRGKGHDGLYQGLSTATKDTYDALHMQALPPR

SEQ ID NO: 5194 - protein, 483 aa, Artificial Sequence
  Description of Artificial Sequence: Synthetic Chimeric Antigen Receptor sequence
MALPVTALLLPLALLLHAARPEVQLVESGGGLVQPGGSLRLSCAVSGFALSNHGMSWVRRAPGKGLEWVSGIVYSGSTYYAASVKGRFTISRDNSRNTLYLQMNSLRPEDTAIYYCSAHGGESDVWGQGTTVTVSSASGGGGSGGRASGGGGSDIQLTQSPSSLSASVGDRVTITCRASQSISSYLNWYQQKPGKAPKLLIYAASSLQSGVPSRFSGSGSGTDFTLTISSLQPEDFATYYCQQSYSTPYTFGQGTKVEIKTTTPAPRPPTPAPTIASQPLSLRPEACRPAAGGAVHTRGLDFACDIYIWAPLAGTCGVLLLSLVITLYCKRGRKKLLYIFKQPFMRPVQTTQEEDGCSCRFPEEEEGGCELRVKFSRSADAPAYKQGQNQLYNELNLGRREEYDVLDKRRGRDPEMGGKPRRKNPQEGLYNELQKDKMAEAYSEIGMKGERRRGKGHDGLYQGLSTATKDTYDALHMQALPPR

SEQ ID NO: 5195 - protein, 483 aa, Artificial Sequence
  Description of Artificial Sequence: Synthetic Chimeric Antigen Receptor sequence
MALPVTALLLPLALLLHAARPEVQLVETGGGLVQPGGSLRLSCAVSGFALSNHGMSWVRRAPGKGLEWVSGIVYSGSTYYAASVKGRFTISRDNSRNTLYLQMNSLRPEDTAIYYCSAHGGESDVWGQGTTVTVSSASGGGGSGGRASGGGGSEIVMTQSPATLSVSPGERATLSCRASQSVSSKLAWYQQKPGQAPRLLMYGASIRATGIPDRFSGSGSGTEFTLTISSLEPEDFAVYYCQQYGSSSWTFGQGTKVEIKTTTPAPRPPTPAPTIASQPLSLRPEACRPAAGGAVHTRGLDFACDIYIWAPLAGTCGVLLLSLVITLYCKRGRKKLLYIFKQPFMRPVQTTQEEDGCSCRFPEEEEGGCELRVKFSRSADAPAYKQGQNQLYNELNLGRREEYDVLDKRRGRDPEMGGKPRRKNPQEGLYNELQKDKMAEAYSEIGMKGERRRGKGHDGLYQGLSTATKDTYDALHMQALPPR

SEQ ID NO: 5196 - protein, 485 aa, Artificial Sequence
  Description of Artificial Sequence: Synthetic Chimeric Antigen Receptor sequence
MALPVTALLLPLALLLHAARPDIVLTQSPASLAVSLGERATINCRASESVSVIGAHLIHWYQQKPGQPPKLLIYLASNLETGVPARFSGSGSGTDFTLTISSLQAEDAAIYYCLQSRIFPRTFGQGTKLEIKGSTSGSGKPGSGEGSTKGQVQLVQSGSELKKPGASVKVSCKASGYTFTDYSINWVRQAPGQGLEWMGWINTETREPAYAYDFRGRFVFSLDTSVSTAYLQISSLKAEDTAVYYCARDYSYAMDYWGQGTLVTVSSAAAQIKESLRAELRVTERRAEVPTAHPSPSPRPAGQFQTLVVGVVGGLLGSLVLLVWVLAVICSKRGRKKLLYIFKQPFMRPVQTTQEEDGCSCRFPEEEEGGCELRVKFSRSADAPAYQQGQNQLYNELNLGRREEYDVLDKRRGRDPEMGGKPRRKNPQEGLYNELQKDKMAEAYSEIGMKGERRRGKGHDGLYQGLSTATKDTYDALHMQALPPR

SEQ ID NO: 5197 - protein, 485 aa, Artificial Sequence
  Description of Artificial Sequence: Synthetic Chimeric Antigen Receptor sequence
MALPVTALLLPLALLLHAARPEVQLVESGGGLVQPGGSLRLSCAASGFTFSSYAMSWVRQAPGKGLEWVSAISGSGGSTYYADSVKGRFTISRDNSKNTLYLQMNSLRAEDTAVYYCAKVVRDGMDVWGQGTTVTVSSGGGGSGGGGSGGGGSEIVLTQSPATLSLSPGERATLSCRASQSVSSSYLAWYQQKPGQAPRLLIYGASSRATGIPDRFSGNGSGTDFTLTISRLEPEDFAVYYCQQYGSPPRFTFGPGTKVDIKTTTPAPRPPTPAPTIASQPLSLRPEACRPAAGGAVHTRGLDFACDIYIWAPLAGTCGVLLLSLVITLYCKRGRKKLLYIFKQPFMRPVQTTQEEDGCSCRFPEEEEGGCELRVKFSRSADAPAYKQGQNQLYNELNLGRREEYDVLDKRRGRDPEMGGKPRRKNPQEGLYNELQKDKMAEAYSEIGMKGERRRGKGHDGLYQGLSTATKDTYDALHMQALPPR

SEQ ID NO: 5198 - protein, 485 aa, Artificial Sequence
  Description of Artificial Sequence: Synthetic Chimeric Antigen Receptor sequence
MALPVTALLLPLALLLHAARPEVQLVETGGGLVQPGGSLRLSCAASGITFSRYPMSWVRQAPGKGLEWVSGISDSGVSTYYADSAKGRFTISRDNSKNTLFLQMSSLRDEDTAVYYCVTRAGSEASDIWGQGTMVTVSSGGGGSGGGGSGGGGSEIVLTQSPATLSLSPGERATLSCRASQSVSNSLAWYQQKPGQAPRLLIYDASSRATGIPDRFSGSGSGTDFTLTISRLEPEDFAIYYCQQFGTSSGLTFGGGTKLEIKTTTPAPRPPTPAPTIASQPLSLRPEACRPAAGGAVHTRGLDFACDIYIWAPLAGTCGVLLLSLVITLYCKRGRKKLLYIFKQPFMRPVQTTQEEDGCSCRFPEEEEGGCELRVKFSRSADAPAYKQGQNQLYNELNLGRREEYDVLDKRRGRDPEMGGKPRRKNPQEGLYNELQKDKMAEAYSEIGMKGERRRGKGHDGLYQGLSTATKDTYDALHMQALPPR

SEQ ID NO: 5199 - protein, 485 aa, Artificial Sequence
  Description of Artificial Sequence: Synthetic Chimeric Antigen Receptor sequence
MALPVTALLLPLALLLHAARPEVQLVETGGGVVQPGGSLRLSCAVSGFALSNHGMSWVRRAPGKGLEWVSGIVYSGSTYYAASVKGRFTISRDNSRNTLYLQMNSLRPEDTAIYYCSAHGGESDVWGQGTTVTVSSASGGGGSGGRASGGGGSEIVLTQSPGTLSLSPGERATLSCRASQSVGSTNLAWYQQKPGQAPRLLIYDASNRATGIPDRFSGGGSGTDFTLTISRLEPEDFAVYYCQQYGSSPPWTFGQGTKVEIKTTTPAPRPPTPAPTIASQPLSLRPEACRPAAGGAVHTRGLDFACDIYIWAPLAGTCGVLLLSLVITLYCKRGRKKLLYIFKQPFMRPVQTTQEEDGCSCRFPEEEEGGCELRVKFSRSADAPAYKQGQNQLYNELNLGRREEYDVLDKRRGRDPEMGGKPRRKNPQEGLYNELQKDKMAEAYSEIGMKGERRRGKGHDGLYQGLSTATKDTYDALHMQALPPR

SEQ ID NO: 5200 - protein, 485 aa, Artificial Sequence
  Description of Artificial Sequence: Synthetic Chimeric Antigen Receptor sequence
MALPVTALLLPLALLLHAARPQVQLVQSGAEVKKPGASVKVSCKPSGYTVTSHYIHWVRRAPGQGLEWMGMINPSGGVTAYSQTLQGRVTMTSDTSSSTVYMELSSLRSEDTAMYYCAREGSGSGWYFDFWGRGTLVTVSSGGGGSGGGGSGGGGSSYVLTQPPSVSVSPGQTASITCSGDGLSKKYVSWYQQKAGQSPVVLISRDKERPSGIPDRFSGSNSADTATLTISGTQAMDEADYYCQAWDDTTVVFGGGTKLTVLTTTPAPRPPTPAPTIASQPLSLRPEACRPAAGGAVHTRGLDFACDIYIWAPLAGTCGVLLLSLVITLYCKRGRKKLLYIFKQPFMRPVQTTQEEDGCSCRFPEEEEGGCELRVKFSRSADAPAYKQGQNQLYNELNLGRREEYDVLDKRRGRDPEMGGKPRRKNPQEGLYNELQKDKMAEAYSEIGMKGERRRGKGHDGLYQGLSTATKDTYDALHMQALPPR

SEQ ID NO: 5201 - protein, 485 aa, Artificial Sequence
  Description of Artificial Sequence: Synthetic Chimeric Antigen Receptor sequence
QVQLVQSGAEVKKPGASVKVSCKASGYSFPDYYINWVRQAPGQGLEWMGWIYFASGNSEYNQKFTGRVTMTRDTSSSTAYMELSSLRSEDTAVYFCASLYDYDWYFDVWGQGTMVTVSSGGGGSGGGGSGGGGSDIVMTQTPLSLSVTPGEPASISCKSSQSLVHSNGNTYLHWYLQKPGQSPQLLIYKVSNRFSGVPDRFSGSGSGADFTLKISRVEAEDVGVYYCAETSHVPWTFGQGTKLEIKGSGGGGSCPYSNPSLCTTTPAPRPPTPAPTIASQPLSLRPEACRPAAGGAVHTRGLDFACDIYIWAPLAGTCGVLLLSLVITLYCKRGRKKLLYIFKQPFMRPVQTTQEEDGCSCRFPEEEEGGCELRVKFSRSADAPAYQQGQNQLYNELNLGRREEYDVLDKRRGRDPEMGGKPRRKNPQEGLYNELQKDKMAEAYSEIGMKGERRRGKGHDGLYQGLSTATKDTYDALHMQALPPR

SEQ ID NO: 5202 - protein, 487 aa, Artificial Sequence
  Description of Artificial Sequence: Synthetic Chimeric Antigen Receptor sequence
MALPVTALLLPLALLLHAARPDIVLTQSPASLAVSLGERATINCRASESVSVIGAHLIHWYQQKPGQPPKLLIYLASNLETGVPARFSGSGSGTDFTLTISSLQAEDAAIYYCLQSRIFPRTFGQGTKLEIKGSTSGSGKPGSGEGSTKGQVQLVQSGSELKKPGASVKVSCKASGYTFTDYSINWVRQAPGQGLEWMGWINTETREPAYAYDFRGRFVFSLDTSVSTAYLQISSLKAEDTAVYYCARDYSYAMDYWGQGTLVTVSSAAADTGLYICKVELMYPPPYYLGIGNGTQIYVIDPEPCPDSDFLLWILAAVSSGLFFYSFLLTAVSKRGRKKLLYIFKQPFMRPVQTTQEEDGCSCRFPEEEEGGCELRVKFSRSADAPAYQQGQNQLYNELNLGRREEYDVLDKRRGRDPEMGGKPRRKNPQEGLYNELQKDKMAEAYSEIGMKGERRRGKGHDGLYQGLSTATKDTYDALHMQALPPR

SEQ ID NO: 5203 - protein, 488 aa, Artificial Sequence
  Description of Artificial Sequence: Synthetic Chimeric Antigen Receptor sequence
MALPVTALLLPLALLLHAARPQVNLRESGPALVKPTQTLTLTCTFSGFSLRTSGMCVSWIRQPPGKALEWLARIDWDEDKFYSTSLKTRLTISKDTSDNQVVLRMTNMDPADTATYYCARSGAGGTSATAFDIWGPGTMVTVSSGGGGSGGGGSGGGGSDIQMTQSPSSLSASVGDRVTITCRASQDIYNNLWFQLKPGSAPRSLMYAANKSQSGVPSRFSGSASGTDFTLTISSLQPEDFATYYCQHYYRFPYSFGQGTKLEIKTTTPAPRPPTPAPTIASQPLSLRPEACRPAAGGAVHTRGLDFACDIYIWAPLAGTCGVLLLSLVITLYCKRGRKKLLYIFKQPFMRPVQTTQEEDGCSCRFPEEEEGGCELRVKFSRSADAPAYKQGQNQLYNELNLGRREEYDVLDKRRGRDPEMGGKPRRKNPQEGLYNELQKDKMAEAYSEIGMKGERRRGKGHDGLYQGLSTATKDTYDALHMQALPPR

SEQ ID NO: 5204 - protein, 488 aa, Artificial Sequence
  Description of Artificial Sequence: Synthetic Chimeric Antigen Receptor sequence
MALPVTALLLPLALLLHAARPQVQLQESGPGLVKPSQTLSLTCTVSGGSISSGGYYWSWIRQHPGKGLEWIGYIYYSGSTYYNPSLKSRVTISVDTSKNQFSLKLSSVTAADTAVYYCARAGIAARLRGAFDIWGQGTMVTVSSGGGGSGGGGSGGGGSDIVMTQSPSSVSASVGDRVIITCRASQGIRNWLWYQQKPGKAPNLLIYAASNLQSGVPSRFSGSGSGADFTLTISSLQPEDVATYYCQKYNSAPFTFGPGTKVDIKTTTPAPRPPTPAPTIASQPLSLRPEACRPAAGGAVHTRGLDFACDIYIWAPLAGTCGVLLLSLVITLYCKRGRKKLLYIFKQPFMRPVQTTQEEDGCSCRFPEEEEGGCELRVKFSRSADAPAYKQGQNQLYNELNLGRREEYDVLDKRRGRDPEMGGKPRRKNPQEGLYNELQKDKMAEAYSEIGMKGERRRGKGHDGLYQGLSTATKDTYDALHMQALPPR

SEQ ID NO: 5205 - protein, 489 aa, Artificial Sequence
  Description of Artificial Sequence: Synthetic Chimeric Antigen Receptor sequence
MALPVTALLLPLALLLHAARPEVQLVESGGGLVQPGGSLRLSCAASGFTFSSYAMSWVRQAPGKGLEWVSAISGSGGSTYYADSVKGRFTISRDNSKNTLYLQMNSLRAEDTAVYYCAKMGWSSGYLGAFDIWGQGTTVTVSSGGGGSGGGGSGGGGSEIVLTQSPGTLSLSPGERATLSCRASQSVASSFLWYQQKPGQAPRLLIYGASGRATGIPDRFSGSGSGTDFTLTISRLEPEDFAVYYCQHYGGSPRLIFGGGTKVDIKTTTPAPRPPTPAPTIASQPLSLRPEACRPAAGGAVHTRGLDFACDIYIWAPLAGTCGVLLLSLVITLYCKRGRKKLLYIFKQPFMRPVQTTQEEDGCSCRFPEEEEGGCELRVKFSRSADAPAYKQGQNQLYNELNLGRREEYDVLDKRRGRDPEMGGKPRRKNPQEGLYNELQKDKMAEAYSEIGMKGERRRGKGHDGLYQGLSTATKDTYDALHMQALPPR

SEQ ID NO: 5206 - protein, 489 aa, Artificial Sequence
  Description of Artificial Sequence: Synthetic Chimeric Antigen Receptor sequence
MALPVTALLLPLALLLHAARPEVQLVESGGGLVQPGRSLRLSCTASGFTFDDYAMHWVRQRPGKGLEWVASINWKGNSLAYGDSVKGRFAISRDNAKNTVFLQMNSLRTEDTAVYYCASHQGVAYYNYAMDVWGRGTLVTVSSGGGGSGGGGSGGGGSEIVLTQSPGTLSLSPGERATLSCRATQSIGSSFLWYQQRPGQAPRLLIYGASQRATGIPDRFSGRGSGTDFTLTISRVEPEDSAVYYCQHYESSPSWIFGQGTKVEIKTTTPAPRPPTPAPTIASQPLSLRPEACRPAAGGAVHTRGLDFACDIYIWAPLAGTCGVLLLSLVITLYCKRGRKKLLYIFKQPFMRPVQTTQEEDGCSCRFPEEEEGGCELRVKFSRSADAPAYKQGQNQLYNELNLGRREEYDVLDKRRGRDPEMGGKPRRKNPQEGLYNELQKDKMAEAYSEIGMKGERRRGKGHDGLYQGLSTATKDTYDALHMQALPPR

SEQ ID NO: 5207 - protein, 489 aa, Artificial Sequence
  Description of Artificial Sequence: Synthetic Chimeric Antigen Receptor sequence
MALPVTALLLPLALLLHAARPQVQLQESGGGLVQPGGSLRLSCAASGFTFSSDAMTWVRQAPGKGLEWVSVISGSGGTTYYADSVKGRFTISRDNSKNTLYLQMNSLRAEDTAVYYCAKLDSSGYYYARGPRYWGQGTLVTVSSASGGGGSGGRASGGGGSDIQLTQSPSSLSASVGDRVTITCRASQSISSYLNWYQQKPGKAPKLLIYGASTLASGVPARFSGSGSGTHFTLTINSLQSEDSATYYCQQSYKRAFGQGTKVEIKTTTPAPRPPTPAPTIASQPLSLRPEACRPAAGGAVHTRGLDFACDIYIWAPLAGTCGVLLLSLVITLYCKRGRKKLLYIFKQPFMRPVQTTQEEDGCSCRFPEEEEGGCELRVKFSRSADAPAYKQGQNQLYNELNLGRREEYDVLDKRRGRDPEMGGKPRRKNPQEGLYNELQKDKMAEAYSEIGMKGERRRGKGHDGLYQGLSTATKDTYDALHMQALPPR

SEQ ID NO: 5208 - protein, 489 aa, Artificial Sequence
  Description of Artificial Sequence: Synthetic Chimeric Antigen Receptor sequence
MALPVTALLLPLALLLHAARPQVQLVESGGGLVQPGRSLRLSCAASGFTFSNYAMSWVRQAPGKGLGWVSGISRSGENTYYADSVKGRFTISRDNSKNTLYLQMNSLRDEDTAVYYCARSPAHYYGGMDVWGQGTTVTVSSASGGGGSGGRASGGGGSDIVLTQSPGTLSLSPGERATLSCRASQSISSSFLWYQQKPGQAPRLLIYGASRRATGIPDRFSGSGSGTDFTLTISRLEPEDSAVYYCQQYHSSPSWIFGQGTKLEIKTTTPAPRPPTPAPTIASQPLSLRPEACRPAAGGAVHTRGLDFACDIYIWAPLAGTCGVLLLSLVITLYCKRGRKKLLYIFKQPFMRPVQTTQEEDGCSCRFPEEEEGGCELRVKFSRSADAPAYKQGQNQLYNELNLGRREEYDVLDKRRGRDPEMGGKPRRKNPQEGLYNELQKDKMAEAYSEIGMKGERRRGKGHDGLYQGLSTATKDTYDALHMQALPPR

SEQ ID NO: 5209 - protein, 490 aa, Artificial Sequence
  Description of Artificial Sequence: Synthetic Chimeric Antigen Receptor sequence
EVQLLESGGGLVQPGGSLRLSCAASGFTFSSYAMNWVRQAPGKGLEWVSAILSSGGSTYYADSVKGRFTISRDNSKNTLYLQMNSLRAEDTAVYYCARYWPMDIWGQGTLVTVSSGGSCPYSNPSLCSGGSEIVLTQSPGTLSLSPGERATLSCRGGQSVSSSYLAWYQQKPGQAPRLLMYDASIRATGIPDRFSGSGSGTDFTLTISRLEPEDFAVYYCQQYQSWPLTFGQGTKVEIKSDPGSGGGGSCPYSNPSLCSGGGGSAPTTTPAPRPPTPAPTIASQPLSLRPEACRPAAGGAVHTRGLDFACDIYIWAPLAGTCGVLLLSLVITLYCRRGRKKLLYIFKQPFMRPVQTTQEEDGCSCRFPEEEEGGCELRVKFSRSADAPAYQQGQNQLYNELNLGRREEYDVLDKRRGRDPEMGGKPRRKNPQEGLYNELQKDKMAEAYSEIGMKGERRRGKGHDGLYQGLSTATKDTYDALHMQALPPRE

SEQ ID NO: 5210 - protein, 490 aa, Artificial Sequence
  Description of Artificial Sequence: Synthetic Chimeric Antigen Receptor sequence
MALPVTALLLPLALLLHAARPEVQLVESGGGLVKPGGSLRLSCAASGFTFSSYSMNWVRQAPGKGLEWVSSISSSSSYIYYADSVKGRFTISRDNAKNSLYLQMNSLRAEDTAVYYCAKTIAAVYAFDIWGQGTTVTVSSGGGGSGGGGSGGGGSEIVLTQSPLSLPVTPEEPASISCRSSQSLLHSNGYNYLDWYLQKPGQSPQLLIYLGSNRASGVPDRFSGSGSGTDFTLKISRVEAEDVGVYYCMQALQTPYIFGQGTKLEIKTTTPAPRPPTPAPTIASQPLSLRPEACRPAAGGAVHTRGLDFACDIYIWAPLAGTCGVLLLSLVITLYCKRGRKKLLYIFKQPFMRPVQTTQEEDGCSCRFPEEEEGGCELRVKFSRSADAPAYKQGQNQLYNELNLGRREEYDVLDKRRGRDPEMGGKPRRKNPQEGLYNELQKDKMAEAYSEIGMKGERRRGKGHDGLYQGLSTATKDTYDALHMQALPPR

SEQ ID NO: 5211 - protein, 490 aa, Artificial Sequence
  Description of Artificial Sequence: Synthetic Chimeric Antigen Receptor sequence
MALPVTALLLPLALLLHAARPEVQLVESGGGLVQPGGSLRLSCAASGFTFSSYAMSWVRQAPGKGLEWVSAISGSGGSTYYADSVKGRFTISRDNSKNTLYLQMNSLRAEDTAVYYCAKVEGSGSLDYWGQGTLVTVSSGGGGSGGGGSGGGGSEIVMTQSPGTLSLSPGERATLSCRASQSVSSAYLAWYQQKPGQPPRLLISGASTRATGIPDRFGGSGSGTDFTLTISRLEPEDFAVYYCQHYGSSFNGSSLFIFGQGTRLEIKTTTPAPRPPTPAPTIASQPLSLRPEACRPAAGGAVHTRGLDFACDIYIWAPLAGTCGVLLLSLVITLYCKRGRKKLLYIFKQPFMRPVQTTQEEDGCSCRFPEEEEGGCELRVKFSRSADAPAYKQGQNQLYNELNLGRREEYDVLDKRRGRDPEMGGKPRRKNPQEGLYNELQKDKMAEAYSEIGMKGERRRGKGHDGLYQGLSTATKDTYDALHMQALPPR

SEQ ID NO: 5212 - protein, 490 aa, Artificial Sequence
  Description of Artificial Sequence: Synthetic Chimeric Antigen Receptor sequence
MALPVTALLLPLALLLHAARPQVQLVQSGAEVKKPGASVKVSCKASGYSFPDYYINWVRQAPGQGLEWMGWIYFASGNSEYNQKFTGRVTMTRDTSINTAYMELSSLTSEDTAVYFCASLYDYDWYFDVWGQGTMVTVSSGGGGSGGGGSGGGGSDIVMTQTPLSLSVTPGQPASISCKSSQSLVHSNGNTYLHWYLQKPGQSPQLLIYKVSNRFSGVPDRFSGSGSGTDFTLKISRVEAEDVGIYYCSQSSIYPWTFGQGTKLEIKTTTPAPRPPTPAPTIASQPLSLRPEACRPAAGGAVHTRGLDFACDIYIWAPLAGTCGVLLLSLVITLYCKRGRKKLLYIFKQPFMRPVQTTQEEDGCSCRFPEEEEGGCELRVKFSRSADAPAYQQGQNQLYNELNLGRREEYDVLDKRRGRDPEMGGKPRRKNPQEGLYNELQKDKMAEAYSEIGMKGERRRGKGHDGLYQGLSTATKDTYDALHMQALPPR

SEQ ID NO: 5213 - protein, 490 aa, Artificial Sequence
  Description of Artificial Sequence: Synthetic Chimeric Antigen Receptor sequence
MALPVTALLLPLALLLHAARPQVQLVQSGAEVKKPGASVKVSCKASGYSFPDYYINWVRQAPGQGLEWMGWIYFASGNSEYNQKFTGRVTMTRDTSSSTAYMELSSLRSEDTAVYFCASLYDYDWYFDVWGQGTMVTVSSGGGGSGGGGSGGGGSDIVMTQTPLSLSVTPGEPASISCKSSQSLVHSNGNTYLHWYLQKPGQSPQLLIYKVSNRFSGVPDRFSGSGSGADFTLKISRVEAEDVGVYYCAETSHVPWTFGQGTKLEIKTTTPAPRPPTPAPTIASQPLSLRPEACRPAAGGAVHTRGLDFACDIYIWAPLAGTCGVLLLSLVITLYCKRGRKKLLYIFKQPFMRPVQTTQEEDGCSCRFPEEEEGGCELRVKFSRSADAPAYQQGQNQLYNELNLGRREEYDVLDKRRGRDPEMGGKPRRKNPQEGLYNELQKDKMAEAYSEIGMKGERRRGKGHDGLYQGLSTATKDTYDALHMQALPPR

SEQ ID NO: 5214 - protein, 490 aa, Artificial Sequence
  Description of Artificial Sequence: Synthetic Chimeric Antigen Receptor sequence
MALPVTALLLPLALLLHAARPQVQLVQSGGGLVKPGGSLRLSCAASGFTFSDYYMSWIRQAPGKGLEWVSYISSSGNTIYYADSVKGRFTISRDNAKNSLYLQMNSLRAEDTAVYYCARSTMVREDYWGQGTLVTVSSASGGGGSGGRASGGGGSDIVLTQSPLSLPVTLGQPASISCKSSESLVHNSGKTYLNWFHQRPGQSPRRLIYEVSNRDSGVPDRFTGSGSGTDFTLKISRVEAEDVGVYYCMQGTHWPGIFGQGTKLEIKTTTPAPRPPTPAPTIASQPLSLRPEACRPAAGGAVHTRGLDFACDIYIWAPLAGTCGVLLLSLVITLYCKRGRKKLLYIFKQPFMRPVQTTQEEDGCSCRFPEEEEGGCELRVKFSRSADAPAYKQGQNQLYNELNLGRREEYDVLDKRRGRDPEMGGKPRRKNPQEGLYNELQKDKMAEAYSEIGMKGERRRGKGHDGLYQGLSTATKDTYDALHMQALPPR

SEQ ID NO: 5215 - protein, 491 aa, Artificial Sequence
  Description of Artificial Sequence: Synthetic Chimeric Antigen Receptor sequence
GGGGSCPYSNPSLCSGGGGSGGGGSEVQLLESGGGLVQPGGSLRLSCAASGFTFSSYAMNWVRQAPGKGLEWVSAILSSGGSTYYADSVKGRFTISRDNSKNTLYLQMNSLRAEDTAVYYCARYWPMDIWGQGTLVTVSSGGSCPYSNPSLCSGGSEIVLTQSPGTLSLSPGERATLSCRGGQSVSSSYLAWYQQKPGQAPRLLMYDASIRATGIPDRFSGSGSGTDFTLTISRLEPEDFAVYYCQQYQSWPLTFGQGTKVEIKSDPTTTPAPRPPTPAPTIASQPLSLRPEACRPAAGGAVHTRGLDFACDIYIWAPLAGTCGVLLLSLVITLYCRRGRKKLLYIFKQPFMRPVQTTQEEDGCSCRFPEEEEGGCELRVKFSRSADAPAYQQGQNQLYNELNLGRREEYDVLDKRRGRDPEMGGKPRRKNPQEGLYNELQKDKMAEAYSEIGMKGERRRGKGHDGLYQGLSTATKDTYDALHMQALPPRE

SEQ ID NO: 5216 - protein, 491 aa, Artificial Sequence
  Description of Artificial Sequence: Synthetic Chimeric Antigen Receptor sequence
QVQLVQSGAEVKKPGASVKVSCKASGYSFPDYYINWVRQAPGQGLEWMGWIYFASGNSEYNQKFTGRVTMTRDTSSSTAYMELSSLRSEDTAVYFCASLYDYDWYFDVWGQGTMVTVSSGGGGSGGGGSGGGGSDIVMTQTPLSLSVTPGEPASISCKSSQSLVHSNGNTYLHWYLQKPGQSPQLLIYKVSNRFSGVPDRFSGSGSGADFTLKISRVEAEDVGVYYCAETSHVPWTFGQGTKLEIKGSGGGGSCPYSNPSLCSGGGGSTTTPAPRPPTPAPTIASQPLSLRPEACRPAAGGAVHTRGLDFACDIYIWAPLAGTCGVLLLSLVITLYCKRGRKKLLYIFKQPFMRPVQTTQEEDGCSCRFPEEEEGGCELRVKFSRSADAPAYQQGQNQLYNELNLGRREEYDVLDKRRGRDPEMGGKPRRKNPQEGLYNELQKDKMAEAYSEIGMKGERRRGKGHDGLYQGLSTATKDTYDALHMQALPPR

SEQ ID NO: 5217 - protein, 492 aa, Artificial Sequence
  Description of Artificial Sequence: Synthetic Chimeric Antigen Receptor sequence
MALPVTALLLPLALLLHAARPEVQLVETGGGLVQPGGSLRLSCAASGFTFSSYAMSWVRQAPGKGLEWVSAISGSGGSTYYADSVKGRFTISRDNSKNTLYLQMNTLKAEDTAVYYCARATYKRELRYYYGMDVWGQGTTVTVSSGGGGSGGGGSGGGGSEIVLTQSPSTLSLSPGESATLSCRASQSVSTTFLAWYQQKPGQAPRLLIYGSSNRATGIPDRFSGSGSGTDFTLTIRRLEPEDFAVYYCQQYHSSPSWTFGQGTKVEIKTTTPAPRPPTPAPTIASQPLSLRPEACRPAAGGAVHTRGLDFACDIYIWAPLAGTCGVLLLSLVITLYCKRGRKKLLYIFKQPFMRPVQTTQEEDGCSCRFPEEEEGGCELRVKFSRSADAPAYKQGQNQLYNELNLGRREEYDVLDKRRGRDPEMGGKPRRKNPQEGLYNELQKDKMAEAYSEIGMKGERRRGKGHDGLYQGLSTATKDTYDALHMQALPPR

SEQ ID NO: 5218 - protein, 492 aa, Artificial Sequence
  Description of Artificial Sequence: Synthetic Chimeric Antigen Receptor sequence
MALPVTALLLPLALLLHAARPEVQLVETGGGLVQPGGSLRLSCAASGFTFSSYAMSWVRQAPGKGLEWVSAISGSGGSTYYADSVKGRFTMSRENDKNSVFLQMNSLRVEDTGVYYCARANYKRELRYYYGMDVWGQGTMVTVSSGGGGSGGGGSGGGGSEIVMTQSPGTLSLSPGESATLSCRASQRVASNYLAWYQHKPGQAPSLLISGASSRATGVPDRFSGSGSGTDFTLAISRLEPEDSAVYYCQHYDSSPSWTFGQGTKVEIKTTTPAPRPPTPAPTIASQPLSLRPEACRPAAGGAVHTRGLDFACDIYIWAPLAGTCGVLLLSLVITLYCKRGRKKLLYIFKQPFMRPVQTTQEEDGCSCRFPEEEEGGCELRVKFSRSADAPAYKQGQNQLYNELNLGRREEYDVLDKRRGRDPEMGGKPRRKNPQEGLYNELQKDKMAEAYSEIGMKGERRRGKGHDGLYQGLSTATKDTYDALHMQALPPR

SEQ ID NO: 5219 - protein, 493 aa, Artificial Sequence
  Description of Artificial Sequence: Synthetic Chimeric Antigen Receptor sequence
MALPVTALLLPLALLLHAARPDIVLTQSPASLAMSLGERATISCRASESVSVIGAHLIHWYQQKPGQPPKLLIYLASNLETGVPARFSGSGSGTDFTLTISRVQAEDAAIYSCLQSRIFPRTFGQGTKLEIKGSTSGSGKPGSGEGSTKGQIQLVQSGSELKKPGESVKISCKASGYTFTDYSINWVKQAPGQGLKWMGWINTETREPAYAYDFRGRFVFSLDTSASTAYLQISSLKAEDTAVYFCALDYSYAMDYWGQGTLVTVSSAAATTTPAPRPPTPAPTIASQPLSLRPEACRPAAGGAVHTRGLDFACDIYIWAPLAGTCGVLLLSLVITLYCKRGRKKLLYIFKQPFMRPVQTTQEEDGCSCRFPEEEEGGCELRVKFSRSADAPAYQQGQNQLYNELNLGRREEYDVLDKRRGRDPEMGGKPRRKNPQEGLYNELQKDKMAEAYSEIGMKGERRRGKGHDGLYQGLSTATKDTYDALHMQALPPR

SEQ ID NO: 5220 - protein, 493 aa, Artificial Sequence
  Description of Artificial Sequence: Synthetic Chimeric Antigen Receptor sequence
MALPVTALLLPLALLLHAARPDIVLTQSPASLAMSLGERATISCRASESVSVIGAHLIHWYQQKPGQPPKLLIYLASNLETGVPARFSGSGSGTDFTLTISRVQAEDAAIYSCLQSRIFPRTFGQGTKLEIKGSTSGSGKPGSGEGSTKGQVQLVQSGSELKKPGASVKVSCKASGYTFTDYSINWVRQAPGQGLEWMGWINTETREPAYAYDFRGRFVFSLDTSVSTAYLQISSLKAEDTAVYYCARDYSYAMDYWGQGTLVTVSSAAATTTPAPRPPTPAPTIASQPLSLRPEACRPAAGGAVHTRGLDFACDIYIWAPLAGTCGVLLLSLVITLYCKRGRKKLLYIFKQPFMRPVQTTQEEDGCSCRFPEEEEGGCELRVKFSRSADAPAYQQGQNQLYNELNLGRREEYDVLDKRRGRDPEMGGKPRRKNPQEGLYNELQKDKMAEAYSEIGMKGERRRGKGHDGLYQGLSTATKDTYDALHMQALPPR

SEQ ID NO: 5221 - protein, 493 aa, Artificial Sequence
  Description of Artificial Sequence: Synthetic Chimeric Antigen Receptor sequence
MALPVTALLLPLALLLHAARPDIVLTQSPASLAMSLGERATISCRASESVSVIGAHLIHWYQQKPGQPPKLLIYLASNLETGVPARFSGSGSGTDFTLTISRVQAEDAAIYSCLQSRIFPRTFGQGTKLEIKGSTSGSGKPGSGEGSTKGQVQLVQSGSELKKPGESVKISCKASGYTFTDYSINWVKQAPGQGLKWMGWINTETREPAYAYDFRGRFVFSLDTSASTAYLQISSLKAEDTAVYFCALDYSYAMDYWGQGTLVTVSSAAATTTPAPRPPTPAPTIASQPLSLRPEACRPAAGGAVHTRGLDFACDIYIWAPLAGTCGVLLLSLVITLYCKRGRKKLLYIFKQPFMRPVQTTQEEDGCSCRFPEEEEGGCELRVKFSRSADAPAYQQGQNQLYNELNLGRREEYDVLDKRRGRDPEMGGKPRRKNPQEGLYNELQKDKMAEAYSEIGMKGERRRGKGHDGLYQGLSTATKDTYDALHMQALPPR

SEQ ID NO: 5222 - protein, 493 aa, Artificial Sequence
  Description of Artificial Sequence: Synthetic Chimeric Antigen Receptor sequence
MALPVTALLLPLALLLHAARPDIVLTQSPASLAMSLGERATISCRASESVSVIGAHLIHWYQQKPGQPPKLLIYLASNLETGVPARFSGSGSGTDFTLTISRVQAEDAAIYSCLQSRIFPRTFGQGTKLEIKGSTSGSGKPGSGEGSTKGQVQLVQSGSELKKPGESVKISCKASGYTFTDYSINWVRQAPGQGLEWMGWINTETREPAYAYDFRGRFVFSLDTSASTAYLQISSLKAEDTAVYFCALDYSYAMDYWGQGTLVTVSSAAATTTPAPRPPTPAPTIASQPLSLRPEACRPAAGGAVHTRGLDFACDIYIWAPLAGTCGVLLLSLVITLYCKRGRKKLLYIFKQPFMRPVQTTQEEDGCSCRFPEEEEGGCELRVKFSRSADAPAYQQGQNQLYNELNLGRREEYDVLDKRRGRDPEMGGKPRRKNPQEGLYNELQKDKMAEAYSEIGMKGERRRGKGHDGLYQGLSTATKDTYDALHMQALPPR

SEQ ID NO: 5223 - protein, 493 aa, Artificial Sequence
  Description of Artificial Sequence: Synthetic Chimeric Antigen Receptor sequence
MALPVTALLLPLALLLHAARPDIVLTQSPASLAMSLGERATISCRASESVSVIGAHLIHWYQQKPGQPPKLLIYLASNLETGVPARFSGSGSGTDFTLTISRVQAEDAAIYSCLQSRIFPRTFGQGTKLEIKGSTSGSGKPGSGEGSTKGQVQLVQSGSELKKPGESVKVSCKASGYTFTDYSINWVRQAPGQGLEWMGWINTETREPAYAYDFRGRFVFSLDTSVSTAYLQISSLKAEDTAVYYCALDYSYAMDYWGQGTLVTVSSAAATTTPAPRPPTPAPTIASQPLSLRPEACRPAAGGAVHTRGLDFACDIYIWAPLAGTCGVLLLSLVITLYCKRGRKKLLYIFKQPFMRPVQTTQEEDGCSCRFPEEEEGGCELRVKFSRSADAPAYQQGQNQLYNELNLGRREEYDVLDKRRGRDPEMGGKPRRKNPQEGLYNELQKDKMAEAYSEIGMKGERRRGKGHDGLYQGLSTATKDTYDALHMQALPPR

SEQ ID NO: 5224 - protein, 493 aa, Artificial Sequence
  Description of Artificial Sequence: Synthetic Chimeric Antigen Receptor sequence
MALPVTALLLPLALLLHAARPDIVLTQSPASLAVSLGERATINCRASESVSVIGAHLIHWYQQKPGQPPKLLIYLASNLETGVPARFSGSGSGTDFTLTISSLQAEDAAIYSCLQSRIFPRTFGQGTKLEIKGSTSGSGKPGSGEGSTKGQIQLVQSGSELKKPGESVKISCKASGYTFTDYSINWVKQAPGQGLKWMGWINTETREPAYAYDFRGRFVFSLDTSASTAYLQISSLKAEDTAVYFCALDYSYAMDYWGQGTLVTVSSAAATTTPAPRPPTPAPTIASQPLSLRPEACRPAAGGAVHTRGLDFACDIYIWAPLAGTCGVLLLSLVITLYCKRGRKKLLYIFKQPFMRPVQTTQEEDGCSCRFPEEEEGGCELRVKFSRSADAPAYQQGQNQLYNELNLGRREEYDVLDKRRGRDPEMGGKPRRKNPQEGLYNELQKDKMAEAYSEIGMKGERRRGKGHDGLYQGLSTATKDTYDALHMQALPPR

SEQ ID NO: 5225 - protein, 493 aa, Artificial Sequence
  Description of Artificial Sequence: Synthetic Chimeric Antigen Receptor sequence
MALPVTALLLPLALLLHAARPDIVLTQSPASLAVSLGERATINCRASESVSVIGAHLIHWYQQKPGQPPKLLIYLASNLETGVPARFSGSGSGTDFTLTISSLQAEDAAIYSCLQSRIFPRTFGQGTKLEIKGSTSGSGKPGSGEGSTKGQVQLVQSGSELKKPGASVKVSCKASGYTFTDYSINWVRQAPGQGLEWMGWINTETREPAYAYDFRGRFVFSLDTSVSTAYLQISSLKAEDTAVYYCARDYSYAMDYWGQGTLVTVSSAAATTTPAPRPPTPAPTIASQPLSLRPEACRPAAGGAVHTRGLDFACDIYIWAPLAGTCGVLLLSLVITLYCKRGRKKLLYIFKQPFMRPVQTTQEEDGCSCRFPEEEEGGCELRVKFSRSADAPAYQQGQNQLYNELNLGRREEYDVLDKRRGRDPEMGGKPRRKNPQEGLYNELQKDKMAEAYSEIGMKGERRRGKGHDGLYQGLSTATKDTYDALHMQALPPR

SEQ ID NO: 5226 - protein, 493 aa, Artificial Sequence
  Description of Artificial Sequence: Synthetic Chimeric Antigen Receptor sequence
MALPVTALLLPLALLLHAARPDIVLTQSPASLAVSLGERATINCRASESVSVIGAHLIHWYQQKPGQPPKLLIYLASNLETGVPARFSGSGSGTDFTLTISSLQAEDAAIYSCLQSRIFPRTFGQGTKLEIKGSTSGSGKPGSGEGSTKGQVQLVQSGSELKKPGESVKISCKASGYTFTDYSINWVKQAPGQGLKWMGWINTETREPAYAYDFRGRFVFSLDTSASTAYLQISSLKAEDTAVYFCALDYSYAMDYWGQGTLVTVSSAAATTTPAPRPPTPAPTIASQPLSLRPEACRPAAGGAVHTRGLDFACDIYIWAPLAGTCGVLLLSLVITLYCKRGRKKLLYIFKQPFMRPVQTTQEEDGCSCRFPEEEEGGCELRVKFSRSADAPAYQQGQNQLYNELNLGRREEYDVLDKRRGRDPEMGGKPRRKNPQEGLYNELQKDKMAEAYSEIGMKGERRRGKGHDGLYQGLSTATKDTYDALHMQALPPR

SEQ ID NO: 5227 - protein, 493 aa, Artificial Sequence
  Description of Artificial Sequence: Synthetic Chimeric Antigen Receptor sequence
MALPVTALLLPLALLLHAARPDIVLTQSPASLAVSLGERATINCRASESVSVIGAHLIHWYQQKPGQPPKLLIYLASNLETGVPARFSGSGSGTDFTLTISSLQAEDAAIYSCLQSRIFPRTFGQGTKLEIKGSTSGSGKPGSGEGSTKGQVQLVQSGSELKKPGESVKISCKASGYTFTDYSINWVRQAPGQGLEWMGWINTETREPAYAYDFRGRFVFSLDTSASTAYLQISSLKAEDTAVYFCALDYSYAMDYWGQGTLVTVSSAAATTTPAPRPPTPAPTIASQPLSLRPEACRPAAGGAVHTRGLDFACDIYIWAPLAGTCGVLLLSLVITLYCKRGRKKLLYIFKQPFMRPVQTTQEEDGCSCRFPEEEEGGCELRVKFSRSADAPAYQQGQNQLYNELNLGRREEYDVLDKRRGRDPEMGGKPRRKNPQEGLYNELQKDKMAEAYSEIGMKGERRRGKGHDGLYQGLSTATKDTYDALHMQALPPR

SEQ ID NO: 5228 - protein, 493 aa, Artificial Sequence
  Description of Artificial Sequence: Synthetic Chimeric Antigen Receptor sequence
MALPVTALLLPLALLLHAARPDIVLTQSPASLAVSLGERATINCRASESVSVIGAHLIHWYQQKPGQPPKLLIYLASNLETGVPARFSGSGSGTDFTLTISSLQAEDAAIYSCLQSRIFPRTFGQGTKLEIKGSTSGSGKPGSGEGSTKGQVQLVQSGSELKKPGESVKVSCKASGYTFTDYSINWVRQAPGQGLEWMGWINTETREPAYAYDFRGRFVFSLDTSVSTAYLQISSLKAEDTAVYYCALDYSYAMDYWGQGTLVTVSSAAATTTPAPRPPTPAPTIASQPLSLRPEACRPAAGGAVHTRGLDFACDIYIWAPLAGTCGVLLLSLVITLYCKRGRKKLLYIFKQPFMRPVQTTQEEDGCSCRFPEEEEGGCELRVKFSRSADAPAYQQGQNQLYNELNLGRREEYDVLDKRRGRDPEMGGKPRRKNPQEGLYNELQKDKMAEAYSEIGMKGERRRGKGHDGLYQGLSTATKDTYDALHMQALPPR

SEQ ID NO: 5229 - protein, 493 aa, Artificial Sequence
  Description of Artificial Sequence: Synthetic Chimeric Antigen Receptor sequence
MALPVTALLLPLALLLHAARPDIVLTQSPASLAVSLGERATINCRASESVSVIGAHLIHWYQQKPGQPPKLLIYLASNLETGVPARFSGSGSGTDFTLTISSLQAEDAAIYYCLQSRIFPRTFGQGTKLEIKGSTSGSGKPGSGEGSTKGQIQLVQSGSELKKPGESVKISCKASGYTFTDYSINWVKQAPGQGLKWMGWINTETREPAYAYDFRGRFVFSLDTSASTAYLQISSLKAEDTAVYFCALDYSYAMDYWGQGTLVTVSSAAATTTPAPRPPTPAPTIASQPLSLRPEACRPAAGGAVHTRGLDFACDIYIWAPLAGTCGVLLLSLVITLYCKRGRKKLLYIFKQPFMRPVQTTQEEDGCSCRFPEEEEGGCELRVKFSRSADAPAYQQGQNQLYNELNLGRREEYDVLDKRRGRDPEMGGKPRRKNPQEGLYNELQKDKMAEAYSEIGMKGERRRGKGHDGLYQGLSTATKDTYDALHMQALPPR

SEQ ID NO: 5230 - protein, 493 aa, Artificial Sequence
  Description of Artificial Sequence: Synthetic Chimeric Antigen Receptor sequence
MALPVTALLLPLALLLHAARPDIVLTQSPASLAVSLGERATINCRASESVSVIGAHLIHWYQQKPGQPPKLLIYLASNLETGVPARFSGSGSGTDFTLTISSLQAEDAAIYYCLQSRIFPRTFGQGTKLEIKGSTSGSGKPGSGEGSTKGQVQLVQSGSELKKPGASVKVSCKASGYTFTDYSINWVRQAPGQGLEWMGWINTETREPAYAYDFRGRFVFSLDTSVSTAYLQISSLKAEDTAVYYCARDYSYAMDYWGQGTLVTVSSAAATTTPAPRPPTPAPTIASQPLSLRPEACRPAAGGAVHTRGLDFACDIYIWAPLAGTCGVLLLSLVITLYCKRGRKKLLYIFKQPFMRPVQTTQEEDGCSCRFPEEEEGGCELRVKFSRSADAPAYQQGQNQLYNELNLGRREEYDVLDKRRGRDPEMGGKPRRKNPQEGLYNELQKDKMAEAYSEIGMKGERRRGKGHDGLYQGLSTATKDTYDALHMQALPPR

SEQ ID NO: 5231 - protein, 493 aa, Artificial Sequence
  Description of Artificial Sequence: Synthetic Chimeric Antigen Receptor sequence
MALPVTALLLPLALLLHAARPDIVLTQSPASLAVSLGERATINCRASESVSVIGAHLIHWYQQKPGQPPKLLIYLASNLETGVPARFSGSGSGTDFTLTISSLQAEDAAIYYCLQSRIFPRTFGQGTKLEIKGSTSGSGKPGSGEGSTKGQVQLVQSGSELKKPGESVKISCKASGYTFTDYSINWVKQAPGQGLKWMGWINTETREPAYAYDFRGRFVFSLDTSASTAYLQISSLKAEDTAVYFCALDYSYAMDYWGQGTLVTVSSAAATTTPAPRPPTPAPTIASQPLSLRPEACRPAAGGAVHTRGLDFACDIYIWAPLAGTCGVLLLSLVITLYCKRGRKKLLYIFKQPFMRPVQTTQEEDGCSCRFPEEEEGGCELRVKFSRSADAPAYQQGQNQLYNELNLGRREEYDVLDKRRGRDPEMGGKPRRKNPQEGLYNELQKDKMAEAYSEIGMKGERRRGKGHDGLYQGLSTATKDTYDALHMQALPPR

SEQ ID NO: 5232 - protein, 493 aa, Artificial Sequence
  Description of Artificial Sequence: Synthetic Chimeric Antigen Receptor sequence
MALPVTALLLPLALLLHAARPDIVLTQSPASLAVSLGERATINCRASESVSVIGAHLIHWYQQKPGQPPKLLIYLASNLETGVPARFSGSGSGTDFTLTISSLQAEDAAIYYCLQSRIFPRTFGQGTKLEIKGSTSGSGKPGSGEGSTKGQVQLVQSGSELKKPGESVKISCKASGYTFTDYSINWVRQAPGQGLEWMGWINTETREPAYAYDFRGRFVFSLDTSASTAYLQISSLKAEDTAVYFCALDYSYAMDYWGQGTLVTVSSAAATTTPAPRPPTPAPTIASQPLSLRPEACRPAAGGAVHTRGLDFACDIYIWAPLAGTCGVLLLSLVITLYCKRGRKKLLYIFKQPFMRPVQTTQEEDGCSCRFPEEEEGGCELRVKFSRSADAPAYQQGQNQLYNELNLGRREEYDVLDKRRGRDPEMGGKPRRKNPQEGLYNELQKDKMAEAYSEIGMKGERRRGKGHDGLYQGLSTATKDTYDALHMQALPPR

SEQ ID NO: 5233 - protein, 493 aa, Artificial Sequence
  Description of Artificial Sequence: Synthetic Chimeric Antigen Receptor sequence
MALPVTALLLPLALLLHAARPDIVLTQSPASLAVSLGERATINCRASESVSVIGAHLIHWYQQKPGQPPKLLIYLASNLETGVPARFSGSGSGTDFTLTISSLQAEDAAIYYCLQSRIFPRTFGQGTKLEIKGSTSGSGKPGSGEGSTKGQVQLVQSGSELKKPGESVKVSCKASGYTFTDYSINWVRQAPGQGLEWMGWINTETREPAYAYDFRGRFVFSLDTSVSTAYLQISSLKAEDTAVYYCALDYSYAMDYWGQGTLVTVSSAAATTTPAPRPPTPAPTIASQPLSLRPEACRPAAGGAVHTRGLDFACDIYIWAPLAGTCGVLLLSLVITLYCKRGRKKLLYIFKQPFMRPVQTTQEEDGCSCRFPEEEEGGCELRVKFSRSADAPAYQQGQNQLYNELNLGRREEYDVLDKRRGRDPEMGGKPRRKNPQEGLYNELQKDKMAEAYSEIGMKGERRRGKGHDGLYQGLSTATKDTYDALHMQALPPR

SEQ ID NO: 5234 - protein, 493 aa, Artificial Sequence
  Description of Artificial Sequence: Synthetic Chimeric Antigen Receptor sequence
MALPVTALLLPLALLLHAARPQVQLVQSGAEVKKPGASVKVSCKASGYSFPDYYINWVRQAPGQGLEWMGWIYFASGNSEYNQKFTGRVTMTRDTSINTAYMELSSLTSEDTAVYFCASLYDYDWYFDVWGQGTMVTVSSGGGGSGGGGSGGGGSDIVMTQTPLSLSVTPGQPASISCKSSQSLVHSNGNTYLHWYLQKPGQSPQLLIYKVSNRFSGVPDRFSGSGSGTDFTLKISRVEAEDVGIYYCSQSSIYPWTFGQGTKLEIKTTTPAPRPPTPAPTIASQPLSLRPEACRPAAGGAVHTRGLDFACDIISFFLALTSTALLFLLFFLTLRFSVVKRGRKKLLYIFKQPFMRPVQTTQEEDGCSCRFPEEEEGGCELRVKFSRSADAPAYQQGQNQLYNELNLGRREEYDVLDKRRGRDPEMGGKPRRKNPQEGLYNELQKDKMAEAYSEIGMKGERRRGKGHDGLYQGLSTATKDTYDALHMQALPPR

SEQ ID NO: 5235 - protein, 493 aa, Artificial Sequence
  Description of Artificial Sequence: Synthetic Chimeric Antigen Receptor sequence
MALPVTALLLPLALLLHAARPQVQLVQSGAEVKKPGASVKVSCKASGYSFPDYYINWVRQAPGQGLEWMGWIYFASGNSEYNQKFTGRVTMTRDTSSSTAYMELSSLRSEDTAVYFCASLYDYDWYFDVWGQGTMVTVSSGGGGSGGGGSGGGGSDIVMTQTPLSLSVTPGEPASISCKSSQSLVHSNGNTYLHWYLQKPGQSPQLLIYKVSNRFSGVPDRFSGSGSGADFTLKISRVEAEDVGVYYCAETSHVPWTFGQGTKLEIKTTTPAPRPPTPAPTIASQPLSLRPEACRPAAGGAVHTRGLDFACDIISFFLALTSTALLFLLFFLTLRFSVVKRGRKKLLYIFKQPFMRPVQTTQEEDGCSCRFPEEEEGGCELRVKFSRSADAPAYQQGQNQLYNELNLGRREEYDVLDKRRGRDPEMGGKPRRKNPQEGLYNELQKDKMAEAYSEIGMKGERRRGKGHDGLYQGLSTATKDTYDALHMQALPPR

SEQ ID NO: 5236 - protein, 496 aa, Artificial Sequence
  Description of Artificial Sequence: Synthetic Chimeric Antigen Receptor sequence
EVQLLESGGGLVQPGGSLRLSCAASGFTFSSYAMNWVRQAPGKGLEWVSAILSSGGSTYYADSVKGRFTISRDNSKNTLYLQMNSLRAEDTAVYYCARYWPMDIWGQGTLVTVSSGGGGGSCPYSNPSLCSGGGGGSEIVLTQSPGTLSLSPGERATLSCRGGQSVSSSYLAWYQQKPGQAPRLLMYDASIRATGIPDRFSGSGSGTDFTLTISRLEPEDFAVYYCQQYQSWPLTFGQGTKVEIKSDPGSGGGGSCPYSNPSLCSGGGGSAPTTTPAPRPPTPAPTIASQPLSLRPEACRPAAGGAVHTRGLDFACDIYIWAPLAGTCGVLLLSLVITLYCRRGRKKLLYIFKQPFMRPVQTTQEEDGCSCRFPEEEEGGCELRVKFSRSADAPAYQQGQNQLYNELNLGRREEYDVLDKRRGRDPEMGGKPRRKNPQEGLYNELQKDKMAEAYSEIGMKGERRRGKGHDGLYQGLSTATKDTYDALHMQALPPRE

SEQ ID NO: 5237 - protein, 497 aa, Artificial Sequence
  Description of Artificial Sequence: Synthetic Chimeric Antigen Receptor sequence
GGGGSCPYSNPSLCSGGGGSGGGGSEVQLLESGGGLVQPGGSLRLSCAASGFTFSSYAMNWVRQAPGKGLEWVSAILSSGGSTYYADSVKGRFTISRDNSKNTLYLQMNSLRAEDTAVYYCARYWPMDIWGQGTLVTVSSGGGGGSCPYSNPSLCSGGGGGSEIVLTQSPGTLSLSPGERATLSCRGGQSVSSSYLAWYQQKPGQAPRLLMYDASIRATGIPDRFSGSGSGTDFTLTISRLEPEDFAVYYCQQYQSWPLTFGQGTKVEIKSDPTTTPAPRPPTPAPTIASQPLSLRPEACRPAAGGAVHTRGLDFACDIYIWAPLAGTCGVLLLSLVITLYCRRGRKKLLYIFKQPFMRPVQTTQEEDGCSCRFPEEEEGGCELRVKFSRSADAPAYQQGQNQLYNELNLGRREEYDVLDKRRGRDPEMGGKPRRKNPQEGLYNELQKDKMAEAYSEIGMKGERRRGKGHDGLYQGLSTATKDTYDALHMQALPPRE

SEQ ID NO: 5238 - protein, 498 aa, Artificial Sequence
  Description of Artificial Sequence: Synthetic Chimeric Antigen Receptor sequence
EVQLLESGGGLVQPGGSLRLSCAASGFTFSSYAMNWVRQAPGKGLEWVSAILSSGGSTYYADSVKGRFTISRDNSKNTLYLQMNSLRAEDTAVYYCARYWPMDIWGQGTLVTVSSGGGGSGGGGSGGGGSEIVLTQSPGTLSLSPGERATLSCRGGQSVSSSYLAWYQQKPGQAPRLLMYDASIRATGIPDRFSGSGSGTDFTLTISRLEPEDFAVYYCQQYQSWPLTFGQGTKVEIKSDPGSGGGGSCPYSNPSLCSGGGGSCPYSNPSLCAPTTTPAPRPPTPAPTIASQPLSLRPEACRPAAGGAVHTRGLDFACDIYIWAPLAGTCGVLLLSLVITLYCRRGRKKLLYIFKQPFMRPVQTTQEEDGCSCRFPEEEEGGCELRVKFSRSADAPAYQQGQNQLYNELNLGRREEYDVLDKRRGRDPEMGGKPRRKNPQEGLYNELQKDKMAEAYSEIGMKGERRRGKGHDGLYQGLSTATKDTYDALHMQALPPRE

SEQ ID NO: 5239 - protein, 500 aa, Artificial Sequence
  Description of Artificial Sequence: Synthetic Chimeric Antigen Receptor sequence
GGGGSCPYSNPSLCSGGGGSCPYSNPSLCSGGGGSEVQLLESGGGLVQPGGSLRLSCAASGFTFSSYAMNWVRQAPGKGLEWVSAILSSGGSTYYADSVKGRFTISRDNSKNTLYLQMNSLRAEDTAVYYCARYWPMDIWGQGTLVTVSSGGGGSGGGGSGGGGSEIVLTQSPGTLSLSPGERATLSCRGGQSVSSSYLAWYQQKPGQAPRLLMYDASIRATGIPDRFSGSGSGTDFTLTISRLEPEDFAVYYCQQYQSWPLTFGQGTKVEIKSDPTTTPAPRPPTPAPTIASQPLSLRPEACRPAAGGAVHTRGLDFACDIYIWAPLAGTCGVLLLSLVITLYCRRGRKKLLYIFKQPFMRPVQTTQEEDGCSCRFPEEEEGGCELRVKFSRSADAPAYQQGQNQLYNELNLGRREEYDVLDKRRGRDPEMGGKPRRKNPQEGLYNELQKDKMAEAYSEIGMKGERRRGKGHDGLYQGLSTATKDTYDALHMQALPPRE

SEQ ID NO: 5240 - protein, 500 aa, Artificial Sequence
  Description of Artificial Sequence: Synthetic Chimeric Antigen Receptor sequence
QVQLVQSGAEVKKPGASVKVSCKASGYSFPDYYINWVRQAPGQGLEWMGWIYFASGNSEYNQKFTGRVTMTRDTSSSTAYMELSSLRSEDTAVYFCASLYDYDWYFDVWGQGTMVTVSSGGGGSGGGGSGGGGSDIVMTQTPLSLSVTPGEPASISCKSSQSLVHSNGNTYLHWYLQKPGQSPQLLIYKVSNRFSGVPDRFSGSGSGADFTLKISRVEAEDVGVYYCAETSHVPWTFGQGTKLEIKGSGGGGSCPYSNPSLCSGGGGSCPYSNPSLCTTTPAPRPPTPAPTIASQPLSLRPEACRPAAGGAVHTRGLDFACDIYIWAPLAGTCGVLLLSLVITLYCKRGRKKLLYIFKQPFMRPVQTTQEEDGCSCRFPEEEEGGCELRVKFSRSADAPAYQQGQNQLYNELNLGRREEYDVLDKRRGRDPEMGGKPRRKNPQEGLYNELQKDKMAEAYSEIGMKGERRRGKGHDGLYQGLSTATKDTYDALHMQALPPR

SEQ ID NO: 5241 - protein, 502 aa, Artificial Sequence
  Description of Artificial Sequence: Synthetic Chimeric Antigen Receptor sequence
MALPVTALLLPLALLLHAARPDIVLTQSPPSLAMSLGKRATISCRASESVTILGSHLIHWYQQKPGQPPTLLIQLASNVQTGVPARFSGSGSRTDFTLTIDPVEEDDVAVYYCLQSRTIPRTFGGGTKLEIKGSTSGSGKPGSGEGSTKGQIQLVQSGPELKKPGETVKISCKASGYTFTDYSINWVKRAPGKGLKWMGWINTETREPAYAYDFRGRFAFSLETSASTAYLQINNLKYEDTATYFCALDYSYAMDYWGQGTSVTVSSAAAFVPVFLPAKPTTTPAPRPPTPAPTIASQPLSLRPEACRPAAGGAVHTRGLDFACDIYIWAPLAGTCGVLLLSLVITLYCNHRNRRDQRLPPDAHKPPGGGSFRTPIQEEQADAHSTLAKIRVKFSRSADAPAYQQGQNQLYNELNLGRREEYDVLDKRRGRDPEMGGKPRRKNPQEGLYNELQKDKMAEAYSEIGMKGERRRGKGHDGLYQGLSTATKDTYDALHMQALPPR

SEQ ID NO: 5242 - protein, 503 aa, Artificial Sequence
  Description of Artificial Sequence: Synthetic Chimeric Antigen Receptor sequence
MALPVTALLLPLALLLHAARPDIVLTQSPPSLAMSLGKRATISCRASESVTILGSHLIHWYQQKPGQPPTLLIQLASNVQTGVPARFSGSGSRTDFTLTIDPVEEDDVAVYYCLQSRTIPRTFGGGTKLEIKGSTSGSGKPGSGEGSTKGQIQLVQSGPELKKPGETVKISCKASGYTFTDYSINWVKRAPGKGLKWMGWINTETREPAYAYDFRGRFAFSLETSASTAYLQINNLKYEDTATYFCALDYSYAMDYWGQGTSVTVSSFVPVFLPAKPTTTPAPRPPTPAPTIASQPLSLRPEACRPAAGGAVHTRGLDFACDIYIWAPLAGTCGVLLLSLVITLYCNHRNRSKRSRLLHSDYMNMTPRRPGPTRKHYQPYAPPRDFAAYRSRVKFSRSADAPAYQQGQNQLYNELNLGRREEYDVLDKRRGRDPEMGGKPRRKNPQEGLYNELQKDKMAEAYSEIGMKGERRRGKGHDGLYQGLSTATKDTYDALHMQALPPR

SEQ ID NO: 5243 - protein, 503 aa, Artificial Sequence
  Description of Artificial Sequence: Synthetic Chimeric Antigen Receptor sequence
MALPVTALLLPLALLLHAARPDIVLTQSPPSLAMSLGKRATISCRASESVTILGSHLIYWYQQKPGQPPTLLIQLASNVQTGVPARFSGSGSRTDFTLTIDPVEEDDVAVYYCLQSRTIPRTFGGGTKLEIKGSTSGSGKPGSGEGSTKGQIQLVQSGPELKKPGETVKISCKASGYTFRHYSMNWVKQAPGKGLKWMGRINTESGVPIYADDFKGRFAFSVETSASTAYLVINNLKDEDTASYFCSNDYLYSLDFWGQGTALTVSSFVPVFLPAKPTTTPAPRPPTPAPTIASQPLSLRPEACRPAAGGAVHTRGLDFACDIYIWAPLAGTCGVLLLSLVITLYCNHRNRSKRSRLLHSDYMNMTPRRPGPTRKHYQPYAPPRDFAAYRSRVKFSRSADAPAYQQGQNQLYNELNLGRREEYDVLDKRRGRDPEMGGKPRRKNPQEGLYNELQKDKMAEAYSEIGMKGERRRGKGHDGLYQGLSTATKDTYDALHMQALPPR

SEQ ID NO: 5244 - protein, 503 aa, Artificial Sequence
  Description of Artificial Sequence: Synthetic Chimeric Antigen Receptor sequence
MALPVTALLLPLALLLHAARPDIVLTQSPPSLAMSLGKRATISCRASESVTILGSHLIYWYQQKPGQPPTLLIQLASNVQTGVPARFSGSGSRTDFTLTIDPVEEDDVAVYYCLQSRTIPRTFGGGTKLEIKGSTSGSGKPGSGEGSTKGQIQLVQSGPELKKPGETVKISCKASGYTFTHYSMNWVKQAPGKGLKWMGRINTETGEPLYADDFKGRFAFSLETSASTAYLVINNLKNEDTATFFCSNDYLYSCDYWGQGTTLTVSSFVPVFLPAKPTTTPAPRPPTPAPTIASQPLSLRPEACRPAAGGAVHTRGLDFACDIYIWAPLAGTCGVLLLSLVITLYCNHRNRSKRSRLLHSDYMNMTPRRPGPTRKHYQPYAPPRDFAAYRSRVKFSRSADAPAYQQGQNQLYNELNLGRREEYDVLDKRRGRDPEMGGKPRRKNPQEGLYNELQKDKMAEAYSEIGMKGERRRGKGHDGLYQGLSTATKDTYDALHMQALPPR

SEQ ID NO: 5245 - protein, 504 aa, Artificial Sequence
  Description of Artificial Sequence: Synthetic Chimeric Antigen Receptor sequence
EVQLLESGGGLVQPGGSLRLSCAASGFTFSSYAMNWVRQAPGKGLEWVSAILSSGGSTYYADSVKGRFTISRDNSKNTLYLQMNSLRAEDTAVYYCARYWPMDIWGQGTLVTVSSGGGGSGGGGSGGGGSEIVLTQSPGTLSLSPGERATLSCRGGQSVSSSYLAWYQQKPGQAPRLLMYDASIRATGIPDRFSGSGSGTDFTLTISRLEPEDFAVYYCQQYQSWPLTFGQGTKVEIKSDPGSGGGGSCPYSNPSLCSGGGGSCPYSNPSLCSGGGGSAPTTTPAPRPPTPAPTIASQPLSLRPEACRPAAGGAVHTRGLDFACDIYIWAPLAGTCGVLLLSLVITLYCRRGRKKLLYIFKQPFMRPVQTTQEEDGCSCRFPEEEEGGCELRVKFSRSADAPAYQQGQNQLYNELNLGRREEYDVLDKRRGRDPEMGGKPRRKNPQEGLYNELQKDKMAEAYSEIGMKGERRRGKGHDGLYQGLSTATKDTYDALHMQALPPRE

SEQ ID NO: 5246 - protein, 506 aa, Artificial Sequence
  Description of Artificial Sequence: Synthetic Chimeric Antigen Receptor sequence
MALPVTALLLPLALLLHAARPDIVLTQSPPSLAMSLGKRATISCRASESVTILGSHLIHWYQQKPGQPPTLLIQLASNVQTGVPARFSGSGSRTDFTLTIDPVEEDDVAVYYCLQSRTIPRTFGGGTKLEIKGSTSGSGKPGSGEGSTKGQIQLVQSGPELKKPGETVKISCKASGYTFTDYSINWVKRAPGKGLKWMGWINTETREPAYAYDFRGRFAFSLETSASTAYLQINNLKYEDTATYFCALDYSYAMDYWGQGTSVTVSSAAAFVPVFLPAKPTTTPAPRPPTPAPTIASQPLSLRPEACRPAAGGAVHTRGLDFACDIYIWAPLAGTCGVLLLSLVITLYCNHRNRSKRSRLLHSDYMNMTPRRPGPTRKHYQPYAPPRDFAAYRSRVKFSRSADAPAYQQGQNQLYNELNLGRREEYDVLDKRRGRDPEMGGKPRRKNPQEGLYNELQKDKMAEAYSEIGMKGERRRGKGHDGLYQGLSTATKDTYDALHMQALPPR

SEQ ID NO: 5247 - protein, 506 aa, Artificial Sequence
  Description of Artificial Sequence: Synthetic Chimeric Antigen Receptor sequence
QVQLVQSGAEVKKPGASVKVSCKASGYSFPDYYINWVRQAPGQGLEWMGWIYFASGNSEYNQKFTGRVTMTRDTSSSTAYMELSSLRSEDTAVYFCASLYDYDWYFDVWGQGTMVTVSSGGGGSGGGGSGGGGSDIVMTQTPLSLSVTPGEPASISCKSSQSLVHSNGNTYLHWYLQKPGQSPQLLIYKVSNRFSGVPDRFSGSGSGADFTLKISRVEAEDVGVYYCAETSHVPWTFGQGTKLEIKGSGGGGSCPYSNPSLCSGGGGSCPYSNPSLCSGGGGSTTTPAPRPPTPAPTIASQPLSLRPEACRPAAGGAVHTRGLDFACDIYIWAPLAGTCGVLLLSLVITLYCKRGRKKLLYIFKQPFMRPVQTTQEEDGCSCRFPEEEEGGCELRVKFSRSADAPAYQQGQNQLYNELNLGRREEYDVLDKRRGRDPEMGGKPRRKNPQEGLYNELQKDKMAEAYSEIGMKGERRRGKGHDGLYQGLSTATKDTYDALHMQALPPR

SEQ ID NO: 5248 - protein, 507 aa, Artificial Sequence
  Description of Artificial Sequence: Synthetic Chimeric Antigen Receptor sequence
MLLLVTSLLLCELPHPAFLLIPDIVLTQSPPSLAMSLGKRATISCRASESVTILGSHLIHWYQQKPGQPPTLLIQLASNVQTGVPARFSGSGSRTDFTLTIDPVEEDDVAVYYCLQSRTIPRTFGGGTKLEIKGSTSGSGKPGSGEGSTKGQIQLVQSGPELKKPGETVKISCKASGYTFTDYSINWVKRAPGKGLKWMGWINTETREPAYAYDFRGRFAFSLETSASTAYLQINNLKYEDTATYFCALDYSYAMDYWGQGTSVTVSSAAAFVPVFLPAKPTTTPAPRPPTPAPTIASQPLSLRPEACRPAAGGAVHTRGLDFACDIYIWAPLAGTCGVLLLSLVITLYCNHRNRSKRSRLLHSDYMNMTPRRPGPTRKHYQPYAPPRDFAAYRSRVKFSRSADAPAYQQGQNQLYNELNLGRREEYDVLDKRRGRDPEMGGKPRRKNPQEGLYNELQKDKMAEAYSEIGMKGERRRGKGHDGLYQGLSTATKDTYDALHMQALPPR

SEQ ID NO: 5249 - protein, 512 aa, Artificial Sequence
  Description of Artificial Sequence: Synthetic Chimeric Antigen Receptor sequence
MALPVTALLLPLALLLHAARPDIVLTQSPPSLAMSLGKRATISCRASESVTILGSHLIHWYQQKPGQPPTLLIQLASNVQTGVPARFSGSGSRTDFTLTIDPVEEDDVAVYYCLQSRTIPRTFGGGTKLEIKGSTSGSGKPGSGEGSTKGQIQLVQSGPELKKPGETVKISCKASGYTFTDYSINWVKRAPGKGLKWMGWINTETREPAYAYDFRGRFAFSLETSASTAYLQINNLKYEDTATYFCALDYSYAMDYWGQGTSVTVSSAAAFVPVFLPAKPTTTPAPRPPTPAPTIASQPLSLRPEACRPAAGGAVHTRGLDFACDIYIWAPLAGTCGVLLLSLVITLYCNHRNRFSVVKRGRKKLLYIFKQPFMRPVQTTQEEDGCSCRFPEEEEGGCELRVKFSRSADAPAYQQGQNQLYNELNLGRREEYDVLDKRRGRDPEMGGKPRRKNPQEGLYNELQKDKMAEAYSEIGMKGERRRGKGHDGLYQGLSTATKDTYDALHMQALPPR

SEQ ID NO: 5250 - protein, 513 aa, Artificial Sequence
  Description of Artificial Sequence: Synthetic Chimeric Antigen Receptor sequence
EVQLLESGGGLVQPGGSLRLSCAASGFTFSSYAMNWVRQAPGKGLEWVSAILSSGGSTYYADSVKGRFTISRDNSKNTLYLQMNSLRAEDTAVYYCARYWPMDIWGQGTLVTVSSGGGGSGGGGSGGGGSEIVLTQSPGTLSLSPGERATLSCRGGQSVSSSYLAWYQQKPGQAPRLLMYDASIRATGIPDRFSGSGSGTDFTLTISRLEPEDFAVYYCQQYQSWPLTFGQGTKVEIKSDPGSGGGGSCPYSNPSLCSGGGGSCPYSNPSLCSGGGGSCPYSNPSLCAPTTTPAPRPPTPAPTIASQPLSLRPEACRPAAGGAVHTRGLDFACDIYIWAPLAGTCGVLLLSLVITLYCRRGRKKLLYIFKQPFMRPVQTTQEEDGCSCRFPEEEEGGCELRVKFSRSADAPAYQQGQNQLYNELNLGRREEYDVLDKRRGRDPEMGGKPRRKNPQEGLYNELQKDKMAEAYSEIGMKGERRRGKGHDGLYQGLSTATKDTYDALHMQALPPRE

SEQ ID NO: 5251 - protein, 514 aa, Artificial Sequence
  Description of Artificial Sequence: Synthetic Chimeric Antigen Receptor sequence
GGGGSCPYSNPSLCSGGGGSGGGGSEVQLLESGGGLVQPGGSLRLSCAASGFTFSSYAMNWVRQAPGKGLEWVSAILSSGGSTYYADSVKGRFTISRDNSKNTLYLQMNSLRAEDTAVYYCARYWPMDIWGQGTLVTVSSGGGGSGGGGSGGGGSEIVLTQSPGTLSLSPGERATLSCRGGQSVSSSYLAWYQQKPGQAPRLLMYDASIRATGIPDRFSGSGSGTDFTLTISRLEPEDFAVYYCQQYQSWPLTFGQGTKVEIKSDPGSGGGGSCPYSNPSLCSGGGGSAPTTTPAPRPPTPAPTIASQPLSLRPEACRPAAGGAVHTRGLDFACDIYIWAPLAGTCGVLLLSLVITLYCRRGRKKLLYIFKQPFMRPVQTTQEEDGCSCRFPEEEEGGCELRVKFSRSADAPAYQQGQNQLYNELNLGRREEYDVLDKRRGRDPEMGGKPRRKNPQEGLYNELQKDKMAEAYSEIGMKGERRRGKGHDGLYQGLSTATKDTYDALHMQALPPRE

SEQ ID NO: 5252 - protein, 515 aa, Artificial Sequence
  Description of Artificial Sequence: Synthetic Chimeric Antigen Receptor sequence
GGGGSCPYSNPSLCSGGGGSGGGGSEVQLLESGGGLVQPGGSLRLSCAASGFTFSSYAMNWVRQAPGKGLEWVSAILSSGGSTYYADSVKGRFTISRDNSKNTLYLQMNSLRAEDTAVYYCARYWPMDIWGQGTLVTVSSGGSCPYSNPSLCSGGSEIVLTQSPGTLSLSPGERATLSCRGGQSVSSSYLAWYQQKPGQAPRLLMYDASIRATGIPDRFSGSGSGTDFTLTISRLEPEDFAVYYCQQYQSWPLTFGQGTKVEIKSDPGSGGGGSCPYSNPSLCSGGGGSAPTTTPAPRPPTPAPTIASQPLSLRPEACRPAAGGAVHTRGLDFACDIYIWAPLAGTCGVLLLSLVITLYCRRGRKKLLYIFKQPFMRPVQTTQEEDGCSCRFPEEEEGGCELRVKFSRSADAPAYQQGQNQLYNELNLGRREEYDVLDKRRGRDPEMGGKPRRKNPQEGLYNELQKDKMAEAYSEIGMKGERRRGKGHDGLYQGLSTATKDTYDALHMQALPPRE

SEQ ID NO: 5253 - protein, 521 aa, Artificial Sequence
  Description of Artificial Sequence: Synthetic Chimeric Antigen Receptor sequence
GGGGSCPYSNPSLCSGGGGSGGGGSEVQLLESGGGLVQPGGSLRLSCAASGFTFSSYAMNWVRQAPGKGLEWVSAILSSGGSTYYADSVKGRFTISRDNSKNTLYLQMNSLRAEDTAVYYCARYWPMDIWGQGTLVTVSSGGGGGSCPYSNPSLCSGGGGGSEIVLTQSPGTLSLSPGERATLSCRGGQSVSSSYLAWYQQKPGQAPRLLMYDASIRATGIPDRFSGSGSGTDFTLTISRLEPEDFAVYYCQQYQSWPLTFGQGTKVEIKSDPGSGGGGSCPYSNPSLCSGGGGSAPTTTPAPRPPTPAPTIASQPLSLRPEACRPAAGGAVHTRGLDFACDIYIWAPLAGTCGVLLLSLVITLYCRRGRKKLLYIFKQPFMRPVQTTQEEDGCSCRFPEEEEGGCELRVKFSRSADAPAYQQGQNQLYNELNLGRREEYDVLDKRRGRDPEMGGKPRRKNPQEGLYNELQKDKMAEAYSEIGMKGERRRGKGHDGLYQGLSTATKDTYDALHMQALPPRE

SEQ ID NO: 5254 - protein, 522 aa, Artificial Sequence
  Description of Artificial Sequence: Synthetic Chimeric Antigen Receptor sequence
EVQLLESGGGLVQPGGSLRLSCAASGFTFSSYAMNWVRQAPGKGLEWVSAILSSGGSTYYADSVKGRFTISRDNSKNTLYLQMNSLRAEDTAVYYCARYWPMDIWGQGTLVTVSSGGGGSGGGGSGGGGSEIVLTQSPGTLSLSPGERATLSCRGGQSVSSSYLAWYQQKPGQAPRLLMYDASIRATGIPDRFSGSGSGTDFTLTISRLEPEDFAVYYCQQYQSWPLTFGQGTKVEIKSDPGSGGGGSCPYSNPSLCSGGGGSELPTQGTFSNVSTNVSPAKPTTTACPYSNPSLCAPTTTPAPRPPTPAPTIASQPLSLRPEACRPAAGGAVHTRGLDFACDIYIWAPLAGTCGVLLLSLVITLYCRRGRKKLLYIFKQPFMRPVQTTQEEDGCSCRFPEEEEGGCELRVKFSRSADAPAYQQGQNQLYNELNLGRREEYDVLDKRRGRDPEMGGKPRRKNPQEGLYNELQKDKMAEAYSEIGMKGERRRGKGHDGLYQGLSTATKDTYDALHMQALPPRE

SEQ ID NO: 5255 - protein, 523 aa, Artificial Sequence
  Description of Artificial Sequence: Synthetic Chimeric Antigen Receptor sequence
EVQLLESGGGLVQPGGSLRLSCAASGFTFSSYAMNWVRQAPGKGLEWVSAILSSGGSTYYADSVKGRFTISRDNSKNTLYLQMNSLRAEDTAVYYCARYWPMDIWGQGTLVTVSSGGSCPYSNPSLCSGGSEIVLTQSPGTLSLSPGERATLSCRGGQSVSSSYLAWYQQKPGQAPRLLMYDASIRATGIPDRFSGSGSGTDFTLTISRLEPEDFAVYYCQQYQSWPLTFGQGTKVEIKSDPGSGGGGSCPYSNPSLCSGGGGSELPTQGTFSNVSTNVSPAKPTTTACPYSNPSLCAPTTTPAPRPPTPAPTIASQPLSLRPEACRPAAGGAVHTRGLDFACDIYIWAPLAGTCGVLLLSLVITLYCRRGRKKLLYIFKQPFMRPVQTTQEEDGCSCRFPEEEEGGCELRVKFSRSADAPAYQQGQNQLYNELNLGRREEYDVLDKRRGRDPEMGGKPRRKNPQEGLYNELQKDKMAEAYSEIGMKGERRRGKGHDGLYQGLSTATKDTYDALHMQALPPRE

SEQ ID NO: 5256 - protein, 547 aa, Artificial Sequence
  Description of Artificial Sequence: Synthetic Chimeric Antigen Receptor sequence
GGGGSCPYSNPSLCSGGGGSGGGGSEVQLLESGGGLVQPGGSLRLSCAASGFTFSSYAMNWVRQAPGKGLEWVSAILSSGGSTYYADSVKGRFTISRDNSKNTLYLQMNSLRAEDTAVYYCARYWPMDIWGQGTLVTVSSGGGGSGGGGSGGGGSEIVLTQSPGTLSLSPGERATLSCRGGQSVSSSYLAWYQQKPGQAPRLLMYDASIRATGIPDRFSGSGSGTDFTLTISRLEPEDFAVYYCQQYQSWPLTFGQGTKVEIKSDPGSGGGGSCPYSNPSLCSGGGGSELPTQGTFSNVSTNVSPAKPTTTACPYSNPSLCAPTTTPAPRPPTPAPTIASQPLSLRPEACRPAAGGAVHTRGLDFACDIYIWAPLAGTCGVLLLSLVITLYCRRGRKKLLYIFKQPFMRPVQTTQEEDGCSCRFPEEEEGGCELRVKFSRSADAPAYQQGQNQLYNELNLGRREEYDVLDKRRGRDPEMGGKPRRKNPQEGLYNELQKDKMAEAYSEIGMKGERRRGKGHDGLYQGLSTATKDTYDALHMQALPPRE

SEQ ID NO: 5257 - protein, 549 aa, Artificial Sequence
  Description of Artificial Sequence: Synthetic Chimeric Antigen Receptor sequence
MALPVTALLLPLALLLHAARPDIVLTQSPPSLAMSLGKRATISCRASESVTILGSHLIHWYQQKPGQPPTLLIQLASNVQTGVPARFSGSGSRTDFTLTIDPVEEDDVAVYYCLQSRTIPRTFGGGTKLEIKGSTSGSGKPGSGEGSTKGQIQLVQSGPELKKPGETVKISCKASGYTFTDYSINWVKRAPGKGLKWMGWINTETREPAYAYDFRGRFAFSLETSASTAYLQINNLKYEDTATYFCALDYSYAMDYWGQGTSVTVSSAAAFVPVFLPAKPTTTPAPRPPTPAPTIASQPLSLRPEACRPAAGGAVHTRGLDFACDIYIWAPLAGTCGVLLLSLVITLYCNHRNRFSVVKRGRKKLLYIFKQPFMRPVQTTQEEDGCSCRFPEEEEGGCELRRDQRLPPDAHKPPGGGSFRTPIQEEQADAHSTLAKIRVKFSRSADAPAYQQGQNQLYNELNLGRREEYDVLDKRRGRDPEMGGKPRRKNPQEGLYNELQKDKMAEAYSEIGMKGERRRGKGHDGLYQGLSTATKDTYDALHMQALPPR

SEQ ID NO: 5258 - protein, 610 aa, Artificial Sequence
  Description of Artificial Sequence: Synthetic Chimeric Antigen Receptor sequence
METDTLLLWVLLLWVPGSTGSVLHLVPINATSKDDSDVTEVMWQPALRRGRGLQAQGYGVRIQDAGVYLLYSQVLFQDVTFTMGQWSREGQGRQETLFRCIRSMPSHPDRAYNSCYSAGVFHLHQGDILSVIIPRARAKLNLSPHGTFLGFVKLSGGGSDPAEPKSPDKTHTCPPCPAPPVAGPSVFLFPPKPKDTLMIARTPEVTCVWDVSHEDPEVKFNWYVDGVEVHNAKTKPREEQYNSTYRWSVLTVLHQDWLNGKEYKCKVSNKALPAPIEKTISKAKGQPREPQVYTLPPSRDELTKNQVSLTCLVKGFYPSDIAVEWESNGQPENNYKTTPPVLDSDGSFFLYSKLTVDKSRWQQGNVFSCSVMHEALHNHYTQKSLSLSPGKKDPKFWVLVVVGGVLACYSLLVTVAFIIFVRSKRSRLLHSDYMNMTPRRPGPTRKHYQPYAPPRDFAAYRSRDQRLPPDAHKPPGGGSFRTPIQEEQADAHSTLAKIRVKFSRSADAPAYQQGQNQLYNELNLGRREEYDVLDKRRGRDPEMGGKPRRKNPQEGLYNELQKDKMAEAYSEIGMKGERRRGKGHDGLYQGLSTATKDTYDALHMQALPPR

SEQ ID NO: 5259 - protein, 630 aa, Artificial Sequence
  Description of Artificial Sequence: Synthetic Chimeric Antigen Receptor sequence
MGTSLLCWMALCLLGADHADGKPIPNPLLGLDSTSGGGGSVLHLVPINATSKDDSDVTEVMWQPALRRGRGLQAQGYGVRIQDAGVYLLYSQVLFQDVTFTMGQVVSREGQGRQETLFRCIRSMPSHPDRAYNSCYSAGVFHLHQGDILSVIIPRARAKLNLSPHGTFLGFVKLSGGGSDPAEPKSPDKTHTCPPCPAPPVAGPSVFLFPPKPKDTLMIARTPEVTCVVVDVSHEDPEVKFNWYVDGVEVHNAKTKPREEQYNSTYRVVSVLTVLHQDWLNGKEYKCKVSNKALPAPIEKTISKAKGQPREPQVYTLPPSRDELTKNQVSLTCLVKGFYPSDIAVEWESNGQPENNYKTTPPVLDSDGSFFLYSKLTVDKSRWQQGNVFSCSVHEALHNHYTQKSLSLSPGKKDPKFWVLWVGGVLACYSLLVTVAFIIFWVRSKRSRLLHSDYMNMTPRRPGPTRKHYQPYAPPRDFAAYRSRDQRLPPDAHKPPGGGSFRTPIQEEQADAHSTLAKIRVKFSRSADAPAYQQGQNQLYNELNLGRREEYDVLDKRRGRDPEGGKPRRKNPQEGLYNELQKDKMAEAYSEIGMKGERRRGKGHDGLYQGLSTATKDTYDALHMQALPPR

SEQ ID NO: 5260 - protein, 633 aa, Artificial Sequence
  Description of Artificial Sequence: Synthetic Chimeric Antigen Receptor sequence
MGTSLLCWMALCLLGADHADGKPIPNPLLGLDSTSGGGGSVLHLVPINATSKDDSDVTEVMWQPALRRGRGLQAQGYGVRIQDAGVYLLYSQVLFQDVTFTMGQVVSREGQGRQETLFRCIRSMPSHPDRAYNSCYSAGVEHLHQGDILSVIIPRARAKLNLSPHGTFLGFVKLSGGGSDPAEPKSPDKTHTCPPCPAPPVAGPSVFLFPPKPKDTLMIARTPEVTCVVVDVSHEDPEVKFNWYVDGVEVHNAKTKPREEQYNSTYRVVSVLTVLHQDWLNGKEYKCKVSNKALPAPIEKTISKAKGQPREPQVYTLPPSRDELTKNQVSLTCLVKGFYPSDIAVEWESNGQPENNYKTTPPVLDSDGSFFLYSKLTVDKSRWQQGNVFSCSVMHEALHNHYTQKSLSLSPGKKDPKFWVLVVVGGVLACYSLLVTVAFIIFWVRSKRSRLLHSDYMNMTPRRPGPTRKHYQPYAPPRDFAAYRSRDQRLPPDAHKPPGGGSFRTPIQEEQADAHSTLAKIRVKFSRSADAPAYQQGQNQLYNELNLGRREEYDVLDKRRGRDPEMGGKPRRKNPQEGLYNELQKDKMAEAYSEIGMKGERRRGKGHDGLYQGLSTATKDTYDALHMQALPPR

SEQ ID NO: 5261 - protein, 650 aa, Artificial Sequence
  Description of Artificial Sequence: Synthetic Chimeric Antigen Receptor sequence
QVQLQQSGPELVRPGTFVKISCKASGYTFTNYDINWVNQRPGQGLEWIGWIYPGDGSTKYNEKFKAKATLTADKSSSTAYLQLNNLTSENSAVYFCASGYEDAMDYWGQGTSVTVSSGGGGSGGGGSGGGGSDIKMTQSPSSMYASLGERVIINCKASQDINSYLSWFQQKPGKSPKTLIYRANRLVDGVPSRFSGSGSGQDYSLTISSLEYEDMGIYYCLQYDEFPLTFGAGTKLELKREPKSPDKTHTCPPCPAPPVAGPSVFLFPPKPKDTLMIARTPEVTCVVVDVSHEDPEVKFNWYVDGVEVHNAKTKPREEQYNSTYRVVSVLTVLHQDWLNGKEYKCKVSNKALPAPIEKTISKAKGQPREPQVYTLPPSRDELTKNQVSLTCLVKGFYPSDIAVEWESNGQPENNYKTTPPVLDSDGSFFLYSKLTVDKSRWQQGNVFSCSVMHEALHNHYTQKSLSLSPGKIISFFLALTSTALLFLLFFLTLRFSVVKRGRKKLLYIFKQPFMRPVQTTQEEDGCSCRFPEEEEGGCELRVKFSRSADAPAYQQGQNQLYNELNLGRREEYDVLDKRRGRDPEMGGKPRRKNPQEGLYNELQKDKMAEAYSEIGMKGERRRGKGHDGLYQGLSTATKDTYDALHMQALP

SEQ ID NO: 5262 - protein, 676 aa, Artificial Sequence
  Description of Artificial Sequence: Synthetic Chimeric Antigen Receptor sequence
MALPVTALLLPLALLLHAARPQVQLVQSGAEVKKPGASVKVSCKASGYSFPDYYINWVRQAPGQGLEWMGWIYFASGNSEYNQKFTGRVTMTRDTSINTAYMELSSLTSEDTAVYFCASLYDYDWYFDVWGQGTMVTVSSGGGGSGGGGSGGGGSDIVMTQTPLSLSVTPGQPASISCKSSQSLVHSNGNTYLHWYLQKPGQSPQLLIYKVSNRFSGVPDRFSGSGSGTDFTLKISRVEAEDVGIYYCSQSSIYPWTFGQGTKLEIKEPKSPDKTHTCPPCPAPPVAGPSVFLFPPKPKDTLMIARTPEVTCVVVDVSHEDPEVKFNWYVDGVEVHNAKTKPREEQYNSTYRVVSVLTVLHQDWLNGKEYKCKVSNKALPAPIEKTISKAKGQPREPQVYTLPPSRDELTKNQVSLTCLVKGFYPSDIAVEWESNGQPENNYKTTPPVLDSDGSFFLYSKLTVDKSRWQQGNVFSCSVMHEALHNHYTQKSLSLSPGKIYIWAPLAGTCGVLLLSLVITLYCKRGRKKLLYIFKQPFMRPVQTTQEEDGCSCRFPEEEEGGCELRVKFSRSADAPAYQQGQNQLYNELNLGRREEYDVLDKRRGRDPEMGGKPRRKNPQEGLYNELQKDKMAEAYSEIGMKGERRRGKGHDGLYQGLSTATKDTYDALHMQALPPR

SEQ ID NO: 5263 - protein, 676 aa, Artificial Sequence
  Description of Artificial Sequence: Synthetic Chimeric Antigen Receptor sequence
MALPVTALLLPLALLLHAARPQVQLVQSGAEVKKPGASVKVSCKASGYSFPDYYINWVRQAPGQGLEWMGWIYFASGNSEYNQKFTGRVTMTRDTSSSTAYMELSSLRSEDTAVYFCASLYDYDWYFDVWGQGTMVTVSSGGGGSGGGGSGGGGSDIVMTQTPLSLSVTPGEPASISCKSSQSLVHSNGNTYLHWYLQKPGQSPQLLIYKVSNRFSGVPDRFSGSGSGADFTLKISRVEAEDVGVYYCAETSHVPWTFGQGTKLEIKEPKSPDKTHTCPPCPAPPVAGPSVFLFPPKPKDTLMIARTPEVTCVVVDVSHEDPEVKFNWYVDGVEVHNAKTKPREEQYNSTYRVVSVLTVLHQDWLNGKEYKCKVSNKALPAPIEKTISKAKGQPREPQVYTLPPSRDELTKNQVSLTCLVKGFYPSDIAVEWESNGQPENNYKTTPPVLDSDGSFFLYSKLTVDKSRWQQGNVFSCSVMHEALHNHYTQKSLSLSPGKIYIWAPLAGTCGVLLLSLVITLYCKRGRKKLLYIFKQPFMRPVQTTQEEDGCSCRFPEEEEGGCELRVKFSRSADAPAYQQGQNQLYNELNLGRREEYDVLDKRRGRDPEMGGKPRRKNPQEGLYNELQKDKMAEAYSEIGMKGERRRGKGHDGLYQGLSTATKDTYDALHMQALPPR

SEQ ID NO: 5264 - protein, 679 aa, Artificial Sequence
  Description of Artificial Sequence: Synthetic Chimeric Antigen Receptor sequence
MALPVTALLLPLALLLHAARPQVQLVQSGAEVKKPGASVKVSCKASGYSFPDYYINWVRQAPGQGLEWMGWIYFASGNSEYNQKFTGRVTMTRDTSINTAYMELSSLTSEDTAVYFCASLYDYDWYFDVWGQGTMVTVSSGGGGSGGGGSGGGGSDIVMTQTPLSLSVTPGQPASISCKSSQSLVHSNGNTYLHWYLQKPGQSPQLLIYKVSNRFSGVPDRFSGSGSGTDFTLKISRVEAEDVGIYYCSQSSIYPWTFGQGTKLEIKEPKSPDKTHTCPPCPAPPVAGPSVFLFPPKPKDTLMIARTPEVTCVVVDVSHEDPEVKFNWYVDGVEVHNAKTKPREEQYNSTYRVVSVLTVLHQDWLNGKEYKCKVSNKALPAPIEKTISKAKGQPREPQVYTLPPSRDELTKNQVSLTCLVKGFYPSDIAVEWESNGQPENNYKTTPPVLDSDGSFFLYSKLTVDKSRWQQGNVFSCSVMHEALHNHYTQKSLSLSPGKIISFFLALTSTALLFLLFFLTLRFSVVKRGRKKLLYIFKQPFMRPVQTTQEEDGCSCRFPEEEEGGCELRVKFSRSADAPAYQQGQNQLYNELNLGRREEYDVLDKRRGRDPEMGGKPRRKNPQEGLYNELQKDKMAEAYSEIGMKGERRRGKGHDGLYQGLSTATKDTYDALHMQALPPR

SEQ ID NO: 5265 - protein, 679 aa, Artificial Sequence
  Description of Artificial Sequence: Synthetic Chimeric Antigen Receptor sequence
MALPVTALLLPLALLLHAARPQVQLVQSGAEVKKPGASVKVSCKASGYSFPDYYINWVRQAPGQGLEWMGWIYFASGNSEYNQKFTGRVTMTRDTSSSTAYMELSSLRSEDTAVYFCASLYDYDWYFDVWGQGTMVTVSSGGGGSGGGGSGGGGSDIVMTQTPLSLSVTPGEPASISCKSSQSLVHSNGNTYLHWYLQKPGQSPQLLIYKVSNRFSGVPDRFSGSGSGADFTLKISRVEAEDVGVYYCAETSHVPWTFGQGTKLEIKEPKSPDKTHTCPPCPAPPVAGPSVFLFPPKPKDTLMIARTPEVTCVVVDVSHEDPEVKFNWYVDGVEVHNAKTKPREEQYNSTYRVVSVLTVLHQDWLNGKEYKCKVSNKALPAPIEKTISKAKGQPREPQVYTLPPSRDELTKNQVSLTCLVKGFYPSDIAVEWESNGQPENNYKTTPPVLDSDGSFFLYSKLTVDKSRWQQGNVFSCSVMHEALHNHYTQKSLSLSPGKIISFFLALTSTALLFLLFFLTLRFSVVKRGRKKLLYIFKQPFMRPVQTTQEEDGCSCRFPEEEEGGCELRVKFSRSADAPAYQQGQNQLYNELNLGRREEYDVLDKRRGRDPEMGGKPRRKNPQEGLYNELQKDKMAEAYSEIGMKGERRRGKGHDGLYQGLSTATKDTYDALHMQALPPR

SEQ ID NO: 5266 - protein, 493 aa, Artificial Sequence
  Description of Artificial Sequence: Synthetic Chimeric Antigen Receptor sequence
MALPVTALLLPLALLLHAARPQVQLVQSGAEVRKTGASVKVSCKASGYIFDNFGINWVRQAPGQGLEWMGWINPKNNNTNYAQKFQGRVTITADESTNTAYMEVSSLRSEDTAVYYCARGPYYYQSYMDVWGQGTMVTVSSASGGGGSGGRASGGGGSDIVMTQTPLSLPVTPGEPASISCRSSQSLLHSNGYNYLNWYLQKPGQSPQLLIYLGSKRASGVPDRFSGSGSGTDFTLHITRVGAEDVGVYYCMQALQTPYTFGQGTKLEIKTTTPAPRPPTPAPTIASQPLSLRPEACRPAAGGAVHTRGLDFACDIYIWAPLAGTCGVLLLSLVITLYCKRGRKKLLYIFKQPFMRPVQTTQEEDGCSCRFPEEEEGGCELRVKFSRSADAPAYKQGQNQLYNELNLGRREEYDVLDKRRGRDPEMGGKPRRKNPQEGLYNELQKDKMAEAYSEIGMKGERRRGKGHDGLYQGLSTATKDTYDALHMQALPPR

SEQ ID NO: 5267 - protein, 490 aa, Artificial Sequence
  Description of Artificial Sequence: Synthetic Chimeric Antigen Receptor sequence
MALPVTALLLPLALLLHAARPQVQLQESGGGLVQPGGSLRLSCAASGFTFSSDAMTWVRQAPGKGLEWVSVISGSGGTTYYADSVKGRFTISRDNSKNTLYLQMNSLRAEDTAVYYCAKLDSSGYYYARGPRYWGQGTLVTVSSASGGGGSGGRASGGGGSDIQLTQSPSSLSASVGDRVTITCRASQSISSYLNWYQQKPGKAPKLLIYGASTLASGVPARFSGSGSGTHFTLTINSLQSEDSATYYCQQSYKRASFGQGTKVEIKTTTPAPRPPTPAPTIASQPLSLRPEACRPAAGGAVHTRGLDFACDIYIWAPLAGTCGVLLLSLVITLYCKRGRKKLLYIFKQPFMRPVQTTQEEDGCSCRFPEEEEGGCELRVKFSRSADAPAYKQGQNQLYNELNLGRREEYDVLDKRRGRDPEMGGKPRRKNPQEGLYNELQKDKMAEAYSEIGMKGERRRGKGHDGLYQGLSTATKDTYDALHMQALPPR

SEQ ID NO: 5268 - protein, 491 aa, Artificial Sequence
  Description of Artificial Sequence: Synthetic Chimeric Antigen Receptor sequence
MALPVTALLLPLALLLHAARPQVQLVQSGAEVKKPGASVKVSCKASGYTFSNYGITWVRQAPGQGLEWMGWISAYNGNTNYAQKFQGRVTMTRNTSISTAYMELSSLRSEDTAVYYCARGPYYYYMDVWGKGTMVTVSSASGGGGSGGRASGGGGSEIVMTQSPLSLPVTPGEPASISCRSSQSLLYSNGYNYVDWYLQKPGQSPQLLIYLGSNRASGVPDRFSGSGSGTDFKLQISRVEAEDVGIYYCMQGRQFPYSFGQGTKVEIKTTTPAPRPPTPAPTIASQPLSLRPEACRPAAGGAVHTRGLDFACDIYIWAPLAGTCGVLLLSLVITLYCKRGRKKLLYIFKQPFMRPVQTTQEEDGCSCRFPEEEEGGCELRVKFSRSADAPAYKQGQNQLYNELNLGRREEYDVLDKRRGRDPEMGGKPRRKNPQEGLYNELQKDKMAEAYSEIGMKGERRRGKGHDGLYQGLSTATKDTYDALHMQALPPR

SEQ ID NO: 5269 - protein, 490 aa, Artificial Sequence
  Description of Artificial Sequence: Synthetic Chimeric Antigen Receptor sequence
MALPVTALLLPLALLLHAARPQVQLVESGGGLVQPGRSLRLSCAASGFTFSNYAMSWVRQAPGKGLGWVSGISRSGENTYYADSVKGRFTISRDNSKNTLYLQMNSLRDEDTAVYYCARSPAHYYGGMDVWGQGTTVTVSSASGGGGSGGRASGGGGSDIVLTQSPGTLSLSPGERATLSCRASQSISSSFLAWYQQKPGQAPRLLIYGASRRATGIPDRFSGSGSGTDFTLTISRLEPEDSAVYYCQQYHSSPSWTFGQGTKLEIKTTTPAPRPPTPAPTIASQPLSLRPEACRPAAGGAVHTRGLDFACDIYIWAPLAGTCGVLLLSLVITLYCKRGRKKLLYIFKQPFMRPVQTTQEEDGCSCRFPEEEEGGCELRVKFSRSADAPAYKQGQNQLYNELNLGRREEYDVLDKRRGRDPEMGGKPRRKNPQEGLYNELQKDKMAEAYSEIGMKGERRRGKGHDGLYQGLSTATKDTYDALHMQALPPR

SEQ ID NO: 5270 - protein, 488 aa, Artificial Sequence
  Description of Artificial Sequence: Synthetic Chimeric Antigen Receptor sequence
MALPVTALLLPLALLLHAARPQVQLVESGGGLVQPGRSLRLSCAASGFTFDDYAMHWVRQAPGKGLEWVSGISWNSGSIGYADSVKGRFTISRDNAKNSLYLQMNSLRAEDTALYYCSVHSFLAYWGQGTLVTVSSASGGGGSGGRASGGGGSDIVMTQTPLSLPVTPGEPASISCRSSQSLLHSNGYNYLDWYLQKPGQSPQLLIYLGSNRASGVPDRFSGSGSGTDFTLKISRVEAEDVGVYYCMQALQTPYTFGQGTKVEIKTTTPAPRPPTPAPTIASQPLSLRPEACRPAAGGAVHTRGLDFACDIYIWAPLAGTCGVLLLSLVITLYCKRGRKKLLYIFKQPFMRPVQTTQEEDGCSCRFPEEEEGGCELRVKFSRSADAPAYKQGQNQLYNELNLGRREEYDVLDKRRGRDPEMGGKPRRKNPQEGLYNELQKDKMAEAYSEIGMKGERRRGKGHDGLYQGLSTATKDTYDALHMQALPPR

SEQ ID NO: 5271 - protein, 483 aa, Artificial Sequence; identical to SEQ ID NO: 5195
  Description of Artificial Sequence: Synthetic Chimeric Antigen Receptor sequence

SEQ ID NO: 5272 - protein, 485 aa, Artificial Sequence; identical to SEQ ID NO: 5199
  Description of Artificial Sequence: Synthetic Chimeric Antigen Receptor sequence

SEQ ID NO: 5273 - protein, 483 aa, Artificial Sequence
  Description of Artificial Sequence: Synthetic Chimeric Antigen Receptor sequence
MALPVTALLLPLALLLHAARPQVQLVESGGGLVKPGGSLRLSCAASGFTFSDYYMSWIRQAPGKGLEWVSYISSSGSTIYYADSVKGRFTISRDNAKNSLYLQMNSLRAEDTAVYYCARESGDGMDVWGQGTTVTVSSASGGGGSGGRASGGGGSDIQMTQSPSSLSASVGDRVTITCRASQSISSYLNWYQQKPGKAPKLLIYAASSLQSGVPSRFSGSGSGTDFTLTISSLQPEDFATYYCQQSYTLAFGQGTKVDIKTTTPAPRPPTPAPTIASQPLSLRPEACRPAAGGAVHTRGLDFACDIYIWAPLAGTCGVLLLSLVITLYCKRGRKKLLYIFKQPFMRPVQTTQEEDGCSCRFPEEEEGGCELRVKFSRSADAPAYKQGQNQLYNELNLGRREEYDVLDKRRGRDPEMGGKPRRKNPQEGLYNELQKDKMAEAYSEIGMKGERRRGKGHDGLYQGLSTATKDTYDALHMQALPPR

SEQ ID NO: 5274 - protein, 490 aa, Artificial Sequence
  Description of Artificial Sequence: Synthetic Chimeric Antigen Receptor sequence
MALPVTALLLPLALLLHAARPQVQLVQSGGGLVKPGGSLRLSCAASGFTFSDYYMSWIRQAPGKGLEWVSYISSSGNTIYYADSVKGRFTISRDNAKNSLYLQMNSLRAEDTAVYYCARSTMVREDYWGQGTLVTVSSASGGGGSGGRASGGGGSDIVLTQSPLSLPVTLGQPASISCKSSESLVHNSGKTYLNWFHQRPGQSPRRLIYEVSNRDSGVPDRFTGSGSGTDFTLKISRVEAEDVGVYYCMQGTHWPGTFGQGTKLEIKTTTPAPRPPTPAPTIASQPLSLRPEACRPAAGGAVHTRGLDFACDIYIWAPLAGTCGVLLLSLVITLYCKRGRKKLLYIFKQPFMRPVQTTQEEDGCSCRFPEEEEGGCELRVKFSRSADAPAYKQGQNQLYNELNLGRREEYDVLDKRRGRDPEMGGKPRRKNPQEGLYNELQKDKMAEAYSEIGMKGERRRGKGHDGLYQGLSTATKDTYDALHMQALPPR

SEQ ID NO: 5275 - protein, 487 aa, Artificial Sequence
  Description of Artificial Sequence: Synthetic Chimeric Antigen Receptor sequence
MALPVTALLLPLALLLHAARPEVQLLESGGGLVQPGGSLRLSCAVSGFALSNHGMSWVRRAPGKGLEWVSGIVYSGSTYYAASVKGRFTISRDNSRNTLYLQMNSLRPEDTAIYYCSAHGGESDVWGQGTTVTVSSASGGGGSGGRASGGGGSDIVMTQTPLSLSVTPGQPASISCKSSQSLLRNDGKTPLYWYLQKAGQPPQLLIYEVSNRFSGVPDRFSGSGSGTDFTLKISRVEAEDVGAYYCMQNIQFPSFGGGTKLEIKTTTPAPRPPTPAPTIASQPLSLRPEACRPAAGGAVHTRGLDFACDIYIWAPLAGTCGVLLLSLVITLYCKRGRKKLLYIFKQPFMRPVQTTQEEDGCSCRFPEEEEGGCELRVKFSRSADAPAYKQGQNQLYNELNLGRREEYDVLDKRRGRDPEMGGKPRRKNPQEGLYNELQKDKMAEAYSEIGMKGERRRGKGHDGLYQGLSTATKDTYDALHMQALPPR

SEQ ID NO: 5276 - protein, 483 aa, Artificial Sequence
  Description of Artificial Sequence: Synthetic Chimeric Antigen Receptor sequence
MALPVTALLLPLALLLHAARPQVQLVESGGGLVQPGGSLRLSCAVSGFALSNHGMSWVRRAPGKGLEWVSGIVYSGSTYYAASVKGRFTISRDNSRNTLYLQMNSLRPEDTAIYYCSAHGGESDVWGQGTTVTVSSASGGGGSGGRASGGGGSDIRLTQSPSPLSASVGDRVTITCQASEDINKFLNWYHQTPGKAPKLLIYDASTLQTGVPSRFSGSGSGTDFTLTINSLQPEDIGTYYCQQYESLPLTFGGGTKVEIKTTTPAPRPPTPAPTIASQPLSLRPEACRPAAGGAVHTRGLDFACDIYIWAPLAGTCGVLLLSLVITLYCKRGRKKLLYIFKQPFMRPVQTTQEEDGCSCRFPEEEEGGCELRVKFSRSADAPAYKQGQNQLYNELNLGRREEYDVLDKRRGRDPEMGGKPRRKNPQEGLYNELQKDKMAEAYSEIGMKGERRRGKGHDGLYQGLSTATKDTYDALHMQALPPR

SEQ ID NO: 5277 - protein, 484 aa, Artificial Sequence
  Description of Artificial Sequence: Synthetic Chimeric Antigen Receptor sequence
MALPVTALLLPLALLLHAARPEVQLVETGGGLVQPGGSLRLSCAVSGFALSNHGMSWVRRAPGKGLEWVSGIVYSGSTYYAASVKGRFTISRDNSRNTLYLQMNSLRPEDTAIYYCSAHGGESDVWGQGTTVTVSSASGGGGSGGRASGGGGSETTLTQSPATLSVSPGERATLSCRASQSVGSNLAWYQQKPGQGPRLLIYGASTRATGIPARFSGSGSGTEFTLTISSLQPEDFAVYYCQQYNDWLPVTFGQGTKVEIKTTTPAPRPPTPAPTIASQPLSLRPEACRPAAGGAVHTRGLDFACDIYIWAPLAGTCGVLLLSLVITLYCKRGRKKLLYIFKQPFMRPVQTTQEEDGCSCRFPEEEEGGCELRVKFSRSADAPAYKQGQNQLYNELNLGRREEYDVLDKRRGRDPEMGGKPRRKNPQEGLYNELQKDKMAEAYSEIGMKGERRRGKGHDGLYQGLSTATKDTYDALHMQALPPR

SEQ ID NO: 5278 - protein, 485 aa, Artificial Sequence
  Description of Artificial Sequence: Synthetic Chimeric Antigen Receptor sequence
MALPVTALLLPLALLLHAARPEVQLVESGGGLVQPGGSLRLSCAVSGFALSNHGMSWVRRAPGKGLEWVSGIVYSGSTYYAASVKGRFTISRDNSRNTLYLQMNSLRPEDTAIYYCSAHGGESDVWGQGTTVTVSSASGGGGSGGRASGGGGSEIVLTQSPGTLSLSPGERATLSCRASQSIGSSSLAWYQQKPGQAPRLLMYGASSRASGIPDRFSGSGSGTDFTLTISRLEPEDFAVYYCQQYAGSPPFTFGQGTKVEIKTTTPAPRPPTPAPTIASQPLSLRPEACRPAAGGAVHTRGLDFACDIYIWAPLAGTCGVLLLSLVITLYCKRGRKKLLYIFKQPFMRPVQTTQEEDGCSCRFPEEEEGGCELRVKFSRSADAPAYKQGQNQLYNELNLGRREEYDVLDKRRGRDPEMGGKPRRKNPQEGLYNELQKDKMAEAYSEIGMKGERRRGKGHDGLYQGLSTATKDTYDALHMQALPPR

SEQ ID NO: 5279 - protein, 487 aa, Artificial Sequence
  Description of Artificial Sequence: Synthetic Chimeric Antigen Receptor sequence
MALPVTALLLPLALLLHAARPQVQLQESGPGLVKPSETLSLTCTVSGGSISSSYYYWGWIRQPPGKGLEWIGSIYYSGSAYYNPSLKSRVTISVDTSKNQFSLRLSSVTAADTAVYYCARHWQEWPDAFDIWGQGTMVTVSSGGGGSGGGGSGGGGSETTLTQSPAFMSATPGDKVIISCKASQDIDDAMNWYQQKPGEAPLFIIQSATSPVPGIPPRFSGSGFGTDFSLTINNIESEDAAYYFCLQHDNFPLTFGQGTKLEIKTTTPAPRPPTPAPTIASQPLSLRPEACRPAAGGAVHTRGLDFACDIYIWAPLAGTCGVLLLSLVITLYCKRGRKKLLYIFKQPFMRPVQTTQEEDGCSCRFPEEEEGGCELRVKFSRSADAPAYKQGQNQLYNELNLGRREEYDVLDKRRGRDPEMGGKPRRKNPQEGLYNELQKDKMAEAYSEIGMKGERRRGKGHDGLYQGLSTATKDTYDALHMQALPPR

SEQ ID NO: 5280 - protein, 489 aa, Artificial Sequence
  Description of Artificial Sequence: Synthetic Chimeric Antigen Receptor sequence
MALPVTALLLPLALLLHAARPQVNLRESGPALVKPTQTLTLTCTFSGFSLRTSGMCVSWIRQPPGKALEWLARIDWDEDKFYSTSLKTRLTISKDTSDNQVVLRMTNMDPADTATYYCARSGAGGTSATAFDIWGPGTMVTVSSGGGGSGGGGSGGGGSDIQMTQSPSSLSASVGDRVTITCRASQDIYNNLAWFQLKPGSAPRSLMYAANKSQSGVPSRFSGSASGTDFTLTISSLQPEDFATYYCQHYYRFPYSFGQGTKLEIKTTTPAPRPPTPAPTIASQPLSLRPEACRPAAGGAVHTRGLDFACDIYIWAPLAGTCGVLLLSLVITLYCKRGRKKLLYIFKQPFMRPVQTTQEEDGCSCRFPEEEEGGCELRVKFSRSADAPAYKQGQNQLYNELNLGRREEYDVLDKRRGRDPEMGGKPRRKNPQEGLYNELQKDKMAEAYSEIGMKGERRRGKGHDGLYQGLSTATKDTYDALHMQALPPR

SEQ ID NO: 5281 - protein, 490 aa, Artificial Sequence
  Description of Artificial Sequence: Synthetic Chimeric Antigen Receptor sequence
MALPVTALLLPLALLLHAARPEVQLVESGGGLVKPGGSLRLSCAASGFTFSSYSMNWVRQAPGKGLEWVSSISSSSSYIYYADSVKGRFTISRDNAKNSLYLQMNSLRAEDTAVYYCAKTIAAVYAFDIWGQGTTVTVSSGGGGSGGGGSGGGGSEIVLTQSPLSLPVTPEEPASISCRSSQSLLHSNGYNYLDWYLQKPGQSPQLLIYLGSNRASGVPDRFSGSGSGTDFTLKISRVEAEDVGVYYCMQALQTPYTFGQGTKLEIKTTTPAPRPPTPAPTIASQPLSLRPEACRPAAGGAVHTRGLDFACDIYIWAPLAGTCGVLLLSLVITLYCKRGRKKLLYIFKQPFMRPVQTTQEEDGCSCRFPEEEEGGCELRVKFSRSADAPAYKQGQNQLYNELNLGRREEYDVLDKRRGRDPEMGGKPRRKNPQEGLYNELQKDKMAEAYSEIGMKGERRRGKGHDGLYQGLSTATKDTYDALHMQALPPR

SEQ ID NO: 5282 - protein, 484 aa, Artificial Sequence
  Description of Artificial Sequence: Synthetic Chimeric Antigen Receptor sequence
MALPVTALLLPLALLLHAARPEVQLVESGGGLVKPGGSLRLSCAASGFTFSDYYMSWIRQAPGKGLEWVSYISSSGSTIYYADSVKGRFTISRDNAKNSLYLQMNSLRAEDTAVYYCARDLRGAFDIWGQGTMVTVSSGGGGSGGGGSGGGGSSYVLTQSPSVSAAPGYTATISCGGNNIGTKSVHWYQQKPGQAPLLVIRDDSVRPSKIPGRFSGSNSGNMATLTISGVQAGDEADFYCQVWDSDSEHVVFGGGTKLTVLTTTPAPRPPTPAPTIASQPLSLRPEACRPAAGGAVHTRGLDFACDIYIWAPLAGTCGVLLLSLVITLYCKRGRKKLLYIFKQPFMRPVQTTQEEDGCSCRFPEEEEGGCELRVKFSRSADAPAYKQGQNQLYNELNLGRREEYDVLDKRRGRDPEMGGKPRRKNPQEGLYNELQKDKMAEAYSEIGMKGERRRGKGHDGLYQGLSTATKDTYDALHMQALPPR

SEQ ID NO: 5283 - protein, 485 aa, Artificial Sequence; identical to SEQ ID NO: 5200
  Description of Artificial Sequence: Synthetic Chimeric Antigen Receptor sequence

SEQ ID NO: 5284 - protein, 489 aa, Artificial Sequence
  Description of Artificial Sequence: Synthetic Chimeric Antigen Receptor sequence
MALPVTALLLPLALLLHAARPQVQLQESGPGLVKPSQTLSLTCTVSGGSISSGGYYWSWIRQHPGKGLEWIGYIYYSGSTYYNPSLKSRVTISVDTSKNQFSLKLSSVTAADTAVYYCARAGIAARLRGAFDIWGQGTMVTVSSGGGGSGGGGSGGGGSDIVMTQSPSSVSASVGDRVIITCRASQGIRNWLAWYQQKPGKAPNLLIYAASNLQSGVPSRFSGSGSGADFTLTISSLQPEDVATYYCQKYNSAPFTFGPGTKVDIKTTTPAPRPPTPAPTIASQPLSLRPEACRPAAGGAVHTRGLDFACDIYIWAPLAGTCGVLLLSLVITLYCKRGRKKLLYIFKQPFMRPVQTTQEEDGCSCRFPEEEEGGCELRVKFSRSADAPAYKQGQNQLYNELNLGRREEYDVLDKRRGRDPEMGGKPRRKNPQEGLYNELQKDKMAEAYSEIGMKGERRRGKGHDGLYQGLSTATKDTYDALHMQALPPR

SEQ ID NO: 5285 - protein, 497 aa, Artificial Sequence
  Description of Artificial Sequence: Synthetic Chimeric Antigen Receptor sequence
MALPVTALLLPLALLLHAARPQVQLVQSGAEVKKPGSSVKVSCKASGGTFSSYAISWVRQAPGQGLEWMGGIIPIFGTANYAQKFQGRVTITADESTSTAYMELSSLRSEDTAVYYCARRGGYQLLRWDVGLLRSAFDIWGQGTMVTVSSGGGGSGGGGSGGGGSSYVLTQPPSVSVAPGQTARITCGGNNIGSKSVHWYQQKPGQAPVLVLYGKNNRPSGVPDRFSGSRSGTTASLTITGAQAEDEADYYCSSRDSSGDHLRVFGTGTKVTVLTTTPAPRPPTPAPTIASQPLSLRPEACRPAAGGAVHTRGLDFACDIYIWAPLAGTCGVLLLSLVITLYCKRGRKKLLYIFKQPFMRPVQTTQEEDGCSCRFPEEEEGGCELRVKFSRSADAPAYKQGQNQLYNELNLGRREEYDVLDKRRGRDPEMGGKPRRKNPQEGLYNELQKDKMAEAYSEIGMKGERRRGKGHDGLYQGLSTATKDTYDALHMQALPPR

SEQ ID NO: 5286 - protein, 492 aa, Artificial Sequence
  Description of Artificial Sequence: Synthetic Chimeric Antigen Receptor sequence
MALPVTALLLPLALLLHAARPEVQLQQSGPGLVKPSQTLSLTCAISGDSVSSNSAAWNWIRQSPSRGLEWLGRTYYRSKWYSFYAISLKSRIIINPDTSKNQFSLQLKSVTPEDTAVYYCARSSPEGLFLYWFDPWGQGTLVTVSSGGDGSGGGGSGGGGSSSELTQDPAVSVALGQTIRITCQGDSLGNYYATWYQQKPGQAPVLVIYGTNNRPSGIPDRFSASSSGNTASLTITGAQAEDEADYYCNSRDSSGHHLLFGTGTKVTVLTTTPAPRPPTPAPTIASQPLSLRPEACRPAAGGAVHTRGLDFACDIYIWAPLAGTCGVLLLSLVITLYCKRGRKKLLYIFKQPFMRPVQTTQEEDGCSCRFPEEEEGGCELRVKFSRSADAPAYKQGQNQLYNELNLGRREEYDVLDKRRGRDPEMGGKPRRKNPQEGLYNELQKDKMAEAYSEIGMKGERRRGKGHDGLYQGLSTATKDTYDALHMQALPPR

SEQ ID NO: 5287 - protein, 483 aa, Artificial Sequence
  Description of Artificial Sequence: Synthetic Chimeric Antigen Receptor sequence
MALPVTALLLPLALLLHAARPEVQLVETGGGLVQPGRSLRLSCAASGFTFDDYAMHWVRQAPGKGLEWVSGISWNSGSIGYADSVKGRFTISRDNAKNSLYLQMNSLRDEDTAVYYCARVGKAVPDVWGQGTTVTVSSGGGGSGGGGSGGGGSDIVMTQTPSSLSASVGDRVTITCRASQSISSYLNWYQQKPGKAPKLLIYAASSLQSGVPSRFSGSGSGTDFTLTISSLQPEDFATYYCQQSYSTPYSFGQGTRLEIKTTTPAPRPPTPAPTIASQPLSLRPEACRPAAGGAVHTRGLDFACDIYIWAPLAGTCGVLLLSLVITLYCKRGRKKLLYIFKQPFMRPVQTTQEEDGCSCRFPEEEEGGCELRVKFSRSADAPAYKQGQNQLYNELNLGRREEYDVLDKRRGRDPEMGGKPRRKNPQEGLYNELQKDKMAEAYSEIGMKGERRRGKGHDGLYQGLSTATKDTYDALHMQALPPR

SEQ ID NO: 5288 - protein, 488 aa, Artificial Sequence
  Description of Artificial Sequence: Synthetic Chimeric Antigen Receptor sequence
MALPVTALLLPLALLLHAARPEVQLLETGGGLVQPGGSLRLSCAASGFSFSSYAMSWVRQAPGKGLEWVSAISGSGGSTYYADSVKGRFTISRDNSKNTLYLQMNSLRAEDTAVYYCAKALVGATGAFDIWGQGTLVTVSSGGGGSGGGGSGGGGSEIVLTQSPGTLSLSPGERATLSCRASQSLSSNFLAWYQQKPGQAPGLLIYGASNWATGTPDRFSGSGSGTDFTLTITRLEPEDFAVYYCQYYGTSPMYTFGQGTKVEIKTTTPAPRPPTPAPTIASQPLSLRPEACRPAAGGAVHTRGLDFACDIYIWAPLAGTCGVLLLSLVITLYCKRGRKKLLYIFKQPFMRPVQTTQEEDGCSCRFPEEEEGGCELRVKFSRSADAPAYKQGQNQLYNELNLGRREEYDVLDKRRGRDPEMGGKPRRKNPQEGLYNELQKDKMAEAYSEIGMKGERRRGKGHDGLYQGLSTATKDTYDALHMQALPPR

SEQ ID NO: 5289 - protein, 492 aa, Artificial Sequence; identical to SEQ ID NO: 5218
  Description of Artificial Sequence: Synthetic Chimeric Antigen Receptor sequence

SEQ ID NO: 5290 - protein, 490 aa, Artificial Sequence
  Description of Artificial Sequence: Synthetic Chimeric Antigen Receptor sequence
MALPVTALLLPLALLLHAARPEVQLVESGGGLVQPGGSLRLSCAASGFTFSSYAMSWVRQAPGKGLEWVSAISGSGGSTYYADSVKGRFTISRDNSKNTLYLQMNSLRAEDTAVYYCAKVEGSGSLDYWGQGTLVTVSSGGGGSGGGGSGGGGSEIVMTQSPGTLSLSPGERATLSCRASQSVSSAYLAWYQQKPGQPPRLLISGASTRATGIPDRFGGSGSGTDFTLTISRLEPEDFAVYYCQHYGSSFNGSSLFTFGQGTRLEIKTTTPAPRPPTPAPTIASQPLSLRPEACRPAAGGAVHTRGLDFACDIYIWAPLAGTCGVLLLSLVITLYCKRGRKKLLYIFKQPFMRPVQTTQEEDGCSCRFPEEEEGGCELRVKFSRSADAPAYKQGQNQLYNELNLGRREEYDVLDKRRGRDPEMGGKPRRKNPQEGLYNELQKDKMAEAYSEIGMKGERRRGKGHDGLYQGLSTATKDTYDALHMQALPPR

SEQ ID NO: 5291 - protein, 485 aa, Artificial Sequence; identical to SEQ ID NO: 5198
  Description of Artificial Sequence: Synthetic Chimeric Antigen Receptor sequence

SEQ ID NO: 5292 - protein, 490 aa, Artificial Sequence
  Description of Artificial Sequence: Synthetic Chimeric Antigen Receptor sequence
MALPVTALLLPLALLLHAARPEVQLVESGGGLVQPGGSLRLSCAASGFTFSSYAMSWVRQAPGKGLEWVSAISGSGGSTYYADSVKGRFTISRDNSKNTLYLQMNSLRAEDTAVYYCAKMGWSSGYLGAFDIWGQGTTVTVSSGGGGSGGGGSGGGGSEIVLTQSPGTLSLSPGERATLSCRASQSVASSFLAWYQQKPGQAPRLLIYGASGRATGIPDRFSGSGSGTDFTLTISRLEPEDFAVYYCQHYGGSPRLTFGGGTKVDIKTTTPAPRPPTPAPTIASQPLSLRPEACRPAAGGAVHTRGLDFACDIYIWAPLAGTCGVLLLSLVITLYCKRGRKKLLYIFKQPFMRPVQTTQEEDGCSCRFPEEEEGGCELRVKFSRSADAPAYKQGQNQLYNELNLGRREEYDVLDKRRGRDPEMGGKPRRKNPQEGLYNELQKDKMAEAYSEIGMKGERRRGKGHDGLYQGLSTATKDTYDALHMQALPPR

SEQ ID NO: 5293 - protein, 492 aa, Artificial Sequence
  Description of Artificial Sequence: Synthetic Chimeric Antigen Receptor sequence
MALPVTALLLPLALLLHAARPQVQLVESGGGLVQPGGSLRLSCAASGFTFSSYAMSWVRQAPGKGLEWVSAISGSGGSTYYADSVKGRFTISRDNAKNSLYLQMNSLRAEDTAIYYCARATYKRELRYYYGMDVWGQGTMVTVSSGGGGSGGGGSGGGGSEIVMTQSPGTVSLSPGERATLSCRASQSVSSSFLAWYQQKPGQAPRLLIYGASSRATGIPDRFSGSGSGTDFTLTISRLEPEDSAVYYCQQYHSSPSWTFGQGTRLEIKTTTPAPRPPTPAPTIASQPLSLRPEACRPAAGGAVHTRGLDFACDIYIWAPLAGTCGVLLLSLVITLYCKRGRKKLLYIFKQPFMRPVQTTQEEDGCSCRFPEEEEGGCELRVKFSRSADAPAYKQGQNQLYNELNLGRREEYDVLDKRRGRDPEMGGKPRRKNPQEGLYNELQKDKMAEAYSEIGMKGERRRGKGHDGLYQGLSTATKDTYDALHMQALPPR

SEQ ID NO: 5294 - protein, 490 aa, Artificial Sequence
  Description of Artificial Sequence: Synthetic Chimeric Antigen Receptor sequence
MALPVTALLLPLALLLHAARPEVQLVESGGGLVQPGRSLRLSCTASGFTFDDYAMHWVRQRPGKGLEWVASINWKGNSLAYGDSVKGRFAISRDNAKNTVFLQMNSLRTEDTAVYYCASHQGVAYYNYAMDVWGRGTLVTVSSGGGGSGGGGSGGGGSEIVLTQSPGTLSLSPGERATLSCRATQSIGSSFLAWYQQRPGQAPRLLIYGASQRATGIPDRFSGRGSGTDFTLTISRVEPEDSAVYYCQHYESSPSWTFGQGTKVEIKTTTPAPRPPTPAPTIASQPLSLRPEACRPAAGGAVHTRGLDFACDIYIWAPLAGTCGVLLLSLVITLYCKRGRKKLLYIFKQPFMRPVQTTQEEDGCSCRFPEEEEGGCELRVKFSRSADAPAYKQGQNQLYNELNLGRREEYDVLDKRRGRDPEMGGKPRRKNPQEGLYNELQKDKMAEAYSEIGMKGERRRGKGHDGLYQGLSTATKDTYDALHMQALPPR

SEQ ID NO: 5295 - protein, 486 aa, Artificial Sequence
  Description of Artificial Sequence: Synthetic Chimeric Antigen Receptor sequence
MALPVTALLLPLALLLHAARPEVQLLESGGGLVQPGGSLRLSCAASGFTFSSYAMSWVRQAPGKGLEWVSAISGSGGSTYYADSVKGRFTISRDNSKNTLYLQMNSLRAEDTAVYYCAKIPQTGTFDYWGQGTLVTVSSGGGGSGGGGSGGGGSEIVLTQSPGTLSLSPGERATLSCRASQSVSSSYLAWYQQRPGQAPRLLIYGASSRATGIPDRFSGSGSGTDFTLTISRLEPEDFAVYYCQHYGSSPSWTFGQGTRLEIKTTTPAPRPPTPAPTIASQPLSLRPEACRPAAGGAVHTRGLDFACDIYIWAPLAGTCGVLLLSLVITLYCKRGRKKLLYIFKQPFMRPVQTTQEEDGCSCRFPEEEEGGCELRVKFSRSADAPAYKQGQNQLYNELNLGRREEYDVLDKRRGRDPEMGGKPRRKNPQEGLYNELQKDKMAEAYSEIGMKGERRRGKGHDGLYQGLSTATKDTYDALHMQALPPR

SEQ ID NO: 5296 - protein, 488 aa, Artificial Sequence
  Description of Artificial Sequence: Synthetic Chimeric Antigen Receptor sequence
MALPVTALLLPLALLLHAARPEVQLLESGGGLVQPGGSLRLSCAASGFTFSSYAMSWVRQAPGKGLEWVSAISGSGGSTYYADSVKGRFTISRDNSKNTLYLQMNSLRAEDTAVYYCVLWFGEGFDPWGQGTLVTVSSGGGGSGGGGSGGGGSDIVLTQSPLSLPVTPGEPASISCRSSQSLLHSNGYNYLDWYLQKPGQSPQLLIYLGSNRASGVPDRFSGSGSGTDFTLKISRVEAEDVGVYYCMQALQTPLTFGGGTKVDIKTTTPAPRPPTPAPTIASQPLSLRPEACRPAAGGAVHTRGLDFACDIYIWAPLAGTCGVLLLSLVITLYCKRGRKKLLYIFKQPFMRPVQTTQEEDGCSCRFPEEEEGGCELRVKFSRSADAPAYKQGQNQLYNELNLGRREEYDVLDKRRGRDPEMGGKPRRKNPQEGLYNELQKDKMAEAYSEIGMKGERRRGKGHDGLYQGLSTATKDTYDALHMQALPPR

SEQ ID NO: 5297 - protein, 485 aa, Artificial Sequence; identical to SEQ ID NO: 5197
  Description of Artificial Sequence: Synthetic Chimeric Antigen Receptor sequence

SEQ ID NO: 5298 - protein, 495 aa, Artificial Sequence
  Description of Artificial Sequence: Synthetic Chimeric Antigen Receptor sequence
MALPVTALLLPLALLLHAARPQVQLVESGGGLVQPGGSLRLSCAASGFTFSSYAMSWVRQAPGKGLEWVSAISGSGGSTYYADSVKGRFTISRDNSKNTLYLQMNSLRAEDTAVYYCAKVGYDSSGYYRDYYGMDVWGQGTTVTVSSGGGGSGGGGSGGGGSEIVLTQSPGTLSLSPGERATLSCRASQSVSSSYLAWYQQKPGQAPRLLIYGTSSRATGISDRFSGSGSGTDFTLTISRLEPEDFAVYYCQHYGNSPPKFTFGPGTKLEIKTTTPAPRPPTPAPTIASQPLSLRPEACRPAAGGAVHTRGLDFACDIYIWAPLAGTCGVLLLSLVITLYCKRGRKKLLYIFKQPFMRPVQTTQEEDGCSCRFPEEEEGGCELRVKFSRSADAPAYKQGQNQLYNELNLGRREEYDVLDKRRGRDPEMGGKPRRKNPQEGLYNELQKDKMAEAYSEIGMKGERRRGKGHDGLYQGLSTATKDTYDALHMQALPPR

SEQ ID NO: 5299 - protein, 449 aa, Artificial Sequence
  Description of Artificial Sequence: Synthetic Chimeric Antigen Receptor sequence
EVKLVESGGGLVQPGGSLSLSCAASGFTFTDYYMSWVRQPPGKALEWLALIRSKADGYTTEYSASVKGRFTLSRDDSQSILYLQMNALRPEDSATYYCARDAAYYSYYSPEGAMDYWGQGTSVTVSSGGGGSGGGGSGGGGSMADYKDIVMTQSHKFMSTSVGDRVNITCKASQNVDSAVAWYQQKPGQSPKALIYSASYRYSGVPDRFTGRGSGTDFTLTISSVQAEDLAVYYCQQYYSTPWTFGGGTKLEIKRGLAVSTISSFFPPGYQIYIWAPLAGTCGVLLLSLVITLYCKRGRKKLLYIFKQPFMRPVQTTQEEDGCSCRFPEEEEGGCELRVKFSRSADAPAYQQGQNQLYNELNLGRREEYDVLDKRRGRDPEMGGKPRRKNPQEGLYNELQKDKMAEAYSEIGMKGERRRGKGHDGLYQGLSTATKDTYDALHMQALPPR

SEQ ID NO: 5300 - protein, 424 aa, Artificial Sequence
  Description of Artificial Sequence: Synthetic Chimeric Antigen Receptor sequence
METDTLLLWVLLLWVPGSTGSVLHLVPINATSKDDSDVTEVMWQPALRRGRGLQAQGYGVRIQDAGVYLLYSQVLFQDVTFTMGQVVSREGQGRQETLFRCIRSMPSHPDRAYNSCYSAGVFHLHQGDILSVIIPRARAKLNLSPHGTFLGFVKLSGGGSDPTTTPAPRPPTPAPTIASQPLSLRPEACRPAAGGAVHTRGLDFACDIFWVLVVVGGVLACYSLLVTVAFIIFWVRSKRSRLLHSDYMNMTPRRPGPTRKHYQPYAPPRDFAAYRSRDQRLPPDAHKPPGGGSFRTPIQEEQADAHSTLAKIRVKFSRSADAPAYQQGQNQLYNELNLGRREEYDVLDKRRGRDPEMGGKPRRKNPQEGLYNELQKDKMAEAYSEIGMKGERRRGKGHDGLYQGLSTATKDTYDALHMQALPPR

SEQ ID NO: 5301 - protein, 436 aa, Artificial Sequence
  Description of Artificial Sequence: Synthetic Chimeric Antigen Receptor sequence
EVQLQQSGPELVKPGASVKISCKASGYTFTDYNMHWVKQSHGKSLEWIGYIYPYNGGTGYNQKFKSKATLTVDNSSSTAYMDVRSLTSEDSAVYYCARGRPAMDYWGQGTSVTVSSGGGGSGGGGSGGGGSDIVLTQSPASLAVSLGQRATISCRASESVDNYGISFMNWFQQKPGQPPKLLIYAASNQGSGVPARFSGSGSGTDFSLNIHPMEEDDTAMYFCQQSKEVPWTFGGGTKLEIKGLAVSTISSFFPPGYQIYIWAPLAGTCGVLLLSLVITLYCKRGRKKLLYIFKQPFMRPVQTTQEEDGCSCRFPEEEEGGCELRVKFSRSADAPAYQQGQNQLYNELNLGRREEYDVLDKRRGRDPEMGGKPRRKNPQEGLYNELQKDKMAEAYSEIGMKGERRRGKGHDGLYQGLSTATKDTYDALHMQALPPR

SEQ ID NO: 5302 - protein, 434 aa, Artificial Sequence
  Description of Artificial Sequence: Synthetic Chimeric Antigen Receptor sequence
QVQLQQSGPELVRPGTFVKISCKASGYTFTNYDINWVNQRPGQGLEWIGWIYPGDGSTKYNEKFKAKATLTADKSSSTAYLQLNNLTSENSAVYFCASGYEDAMDYWGQGTSVTVSSGGGGSGGGGSGGGGSDIKMTQSPSSMYASLGERVIINCKASQDINSYLSWFQQKPGKSPKTLIYRANRLVDGVPSRFSGSGSGQDYSLTISSLEYEDMGIYYCLQYDEFPLTFGAGTKLELKRGLAVSTISSFFPPGYQIYIWAPLAGTCGVLLLSLVITLYCKRGRKKLLYIFKQPFMRPVQTTQEEDGCSCRFPEEEEGGCELRVKFSRSADAPAYQQGQNQLYNELNLGRREEYDVLDKRRGRDPEMGGKPRRKNPQEGLYNELQKDKMAEAYSEIGMKGERRRGKGHDGLYQGLSTATKDTYDALHMQALPPR

SEQ ID NO: 5303 - protein, 437 aa, Artificial Sequence
  Description of Artificial Sequence: Synthetic Chimeric Antigen Receptor sequence
QVQLQQSGPELVRPGTFVKISCKASGYTFTNYDINWVNQRPGQGLEWIGWIYPGDGSTKYNEKFKAKATLTADKSSSTAYLQLNNLTSENSAVYFCASGYEDAMDYWGQGTSVTVSSGGGGSGGGGSGGGGSDIKMTQSPSSMYASLGERVIINCKASQDINSYLSWFQQKPGKSPKTLIYRANRLVDGVPSRFSGSGSGQDYSLTISSLEYEDMGIYYCLQYDEFPLTFGAGTKLELKRGLAVSTISSFFPPGYQIISFFLALTSTALLFLLFFLTLRFSVVKRGRKKLLYIFKQPFMRPVQTTQEEDGCSCRFPEEEEGGCELRVKFSRSADAPAYQQGQNQLYNELNLGRREEYDVLDKRRGRDPEMGGKPRRKNPQEGLYNELQKDKMAEAYSEIGMKGERRRGKGHDGLYQGLSTATKDTYDALHMQALPPR

SEQ ID NO: 5304 - protein, 439 aa, Artificial Sequence
  Description of Artificial Sequence: Synthetic Chimeric Antigen Receptor sequence
EVQLQQSGPELVKPGASVKISCKASGYTFTDYNMHWVKQSHGKSLEWIGYIYPYNGGTGYNQKFKSKATLTVDNSSSTAYMDVRSLTSEDSAVYYCARGRPAMDYWGQGTSVTVSSGGGGSGGGGSGGGGSDIVLTQSPASLAVSLGQRATISCRASESVDNYGISFMNWFQQKPGQPPKLLIYAASNQGSGVPARFSGSGSGTDFSLNIHPMEEDDTAMYFCQQSKEVPWTFGGGTKLEIKGLAVSTISSFFPPGYQIISFFLALTSTALLFLLFFLTLRFSVVKRGRKKLLYIFKQPFMRPVQTTQEEDGCSCRFPEEEEGGCELRVKFSRSADAPAYQQGQNQLYNELNLGRREEYDVLDKRRGRDPEMGGKPRRKNPQEGLYNELQKDKMAEAYSEIGMKGERRRGKGHDGLYQGLSTATKDTYDALHMQALPPR

SEQ ID NO: 5305 - protein, 440 aa, Artificial Sequence
  Description of Artificial Sequence: Synthetic Chimeric Antigen Receptor sequence
QVQLQQPGAEVVKPGASVKMSCKASGYTFTSYYIHWIKQTPGQGLEWVGVIYPGNDDISYNQKFKGKATLTADKSSTTAYMQLSSLTSEDSAVYYCAREVRLRYFDVWGAGTTVTVSSGGGGSGGGGSGGGGSNIMLTQSPSSLAVSAGEKVTMSCKSSQSVFFSSSQKNYLAWYQQIPGQSPKLLIYWASTRESGVPDRFTGSGSGTDFTLTISSVQSEDLAIYYCHQYLSSRTFGGGTKLEIKRGLAVSTISSFFPPGYQIYIWAPLAGTCGVLLLSLVITLYCKRGRKKLLYIFKQPFMRPVQTTQEEDGCSCRFPEEEEGGCELRVKFSRSADAPAYQQGQNQLYNELNLGRREEYDVLDKRRGRDPEMGGKPRRKNPQEGLYNELQKDKMAEAYSEIGMKGERRRGKGHDGLYQGLSTATKDTYDALHMQALPPR

SEQ ID NO: 5306 - protein, 443 aa, Artificial Sequence
  Description of Artificial Sequence: Synthetic Chimeric Antigen Receptor sequence
QVQLQQPGAEVVKPGASVKMSCKASGYTFTSYYIHWIKQTPGQGLEWVGVIYPGNDDISYNQKFKGKATLTADKSSTTAYMQLSSLTSEDSAVYYCAREVRLRYFDVWGAGTTVTVSSGGGGSGGGGSGGGGSNIMLTQSPSSLAVSAGEKVTMSCKSSQSVFFSSSQKNYLAWYQQIPGQSPKLLIYWASTRESGVPDRFTGSGSGTDFTLTISSVQSEDLAIYYCHQYLSSRTFGGGTKLEIKRGLAVSTISSFFPPGYQIISFFLALTSTALLFLLFFLTLRFSVVKRGRKKLLYIFKQPFMRPVQTTQEEDGCSCRFPEEEEGGCELRVKFSRSADAPAYQQGQNQLYNELNLGRREEYDVLDKRRGRDPEMGGKPRRKNPQEGLYNELQKDKMAEAYSEIGMKGERRRGKGHDGLYQGLSTATKDTYDALHMQALPPR

SEQ ID NO: 5307 - protein, 444 aa, Artificial Sequence
  Description of Artificial Sequence: Synthetic Chimeric Antigen Receptor sequence
EVKLQESGPELVKPGASVKMSCKASGYKFTDYVVHWLKQKPGQGLEWIGYINPYNDGTKYNEKFKGKATLTSDKSSSTAYMEVSSLTSEDSAVYYCARDYRYEVYGMDYWGQGTSVTVSSGGGGSGGGGSGGGGSDIVLTQSPTIMSASPGERVTMTCTASSSVNYIHWYQQKSGDSPLRWIFDTSKVASGVPARFSGSGSGTSYSLTISTMEAEDAATYYCQQWRSYPLTFGDGTRLELKRADAAPTVSGLAVSTISSFFPPGYQIYIWAPLAGTCGVLLLSLVITLYCKRGRKKLLYIFKQPFMRPVQTTQEEDGCSCRFPEEEEGGCELRVKFSRSADAPAYQQGQNQLYNELNLGRREEYDVLDKRRGRDPEMGGKPRRKNPQEGLYNELQKDKMAEAYSEIGMKGERRRGKGHDGLYQGLSTATKDTYDALHMQALPPR

SEQ ID NO: 5308 - protein, 447 aa, Artificial Sequence
  Description of Artificial Sequence: Synthetic Chimeric Antigen Receptor sequence
EVKLQESGPELVKPGASVKMSCKASGYKFTDYVVHWLKQKPGQGLEWIGYINPYNDGTKYNEKFKGKATLTSDKSSSTAYMEVSSLTSEDSAVYYCARDYRYEVYGMDYWGQGTSVTVSSGGGGSGGGGSGGGGSDIVLTQSPTIMSASPGERVTMTCTASSSVNYIHWYQQKSGDSPLRWIFDTSKVASGVPARFSGSGSGTSYSLTISTMEAEDAATYYCQQWRSYPLTFGDGTRLELKRADAAPTVSGLAVSTISSFFPPGYQIISFFLALTSTALLFLLFFLTLRFSVVKRGRKKLLYIFKQPFMRPVQTTQEEDGCSCRFPEEEEGGCELRVKFSRSADAPAYQQGQNQLYNELNLGRREEYDVLDKRRGRDPEMGGKPRRKNPQEGLYNELQKDKMAEAYSEIGMKGERRRGKGHDGLYQGLSTATKDTYDALHMQALPPR

SEQ ID NO: 5309 - protein, 463 aa, Artificial Sequence
  Description of Artificial Sequence: Synthetic Chimeric Antigen Receptor sequence
QVQLQQSGPELVRPGTFVKISCKASGYTFTNYDINWVNQRPGQGLEWIGWIYPGDGSTKYNEKFKAKATLTADKSSSTAYLQLNNLTSENSAVYFCASGYEDAMDYWGQGTSVTVSSGGGGSGGGGSGGGGSDIKMTQSPSSMYASLGERVIINCKASQDINSYLSWFQQKPGKSPKTLIYRANRLVDGVPSRFSGSGSGQDYSLTISSLEYEDMGIYYCLQYDEFPLTFGAGTKLELKRTTTPAPRPPTPAPTIASQPLSLRPEACRPAAGGAVHTRGLDFACDIYIWAPLAGTCGVLLLSLVITLYCKRGRKKLLYIFKQPFMRPVQTTQEEDGCSCRFPEEEEGGCELRVKFSRSADAPAYQQGQNQLYNELNLGRREEYDVLDKRRGRDPEMGGKPRRKNPQEGLYNELQKDKMAEAYSEIGMKGERRRGKGHDGLYQGLSTATKDTYDALHMQALPPR

SEQ ID NO: 5310 - protein, 465 aa, Artificial Sequence
  Description of Artificial Sequence: Synthetic Chimeric Antigen Receptor sequence
EVQLQQSGPELVKPGASVKISCKASGYTFTDYNMHWVKQSHGKSLEWIGYIYPYNGGTGYNQKFKSKATLTVDNSSSTAYMDVRSLTSEDSAVYYCARGRPAMDYWGQGTSVTVSSGGGGSGGGGSGGGGSDIVLTQSPASLAVSLGQRATISCRASESVDNYGISFMNWFQQKPGQPPKLLIYAASNQGSGVPARFSGSGSGTDFSLNIHPMEEDDTAMYFCQQSKEVPWTFGGGTKLEIKTTTPAPRPPTPAPTIASQPLSLRPEACRPAAGGAVHTRGLDFACDIYIWAPLAGTCGVLLLSLVITLYCKRGRKKLLYIFKQPFMRPVQTTQEEDGCSCRFPEEEEGGCELRVKFSRSADAPAYQQGQNQLYNELNLGRREEYDVLDKRRGRDPEMGGKPRRKNPQEGLYNELQKDKMAEAYSEIGMKGERRRGKGHDGLYQGLSTATKDTYDALHMQALPPR

SEQ ID NO: 5311 - protein, 466 aa, Artificial Sequence
  Description of Artificial Sequence: Synthetic Chimeric Antigen Receptor sequence
QVQLQQSGPELVRPGTFVKISCKASGYTFTNYDINWVNQRPGQGLEWIGWIYPGDGSTKYNEKFKAKATLTADKSSSTAYLQLNNLTSENSAVYFCASGYEDAMDYWGQGTSVTVSSGGGGSGGGGSGGGGSDIKMTQSPSSMYASLGERVIINCKASQDINSYLSWFQQKPGKSPKTLIYRANRLVDGVPSRFSGSGSGQDYSLTISSLEYEDMGIYYCLQYDEFPLTFGAGTKLELKRTTTPAPRPPTPAPTIASQPLSLRPEACRPAAGGAVHTRGLDFACDIISFFLALTSTALLFLLFFLTLRFSVVKRGRKKLLYIFKQPFMRPVQTTQEEDGCSCRFPEEEEGGCELRVKFSRSADAPAYQQGQNQLYNELNLGRREEYDVLDKRRGRDPEMGGKPRRKNPQEGLYNELQKDKMAEAYSEIGMKGERRRGKGHDGLYQGLSTATKDTYDALHMQALPPR

SEQ ID NO: 5312 - protein, 468 aa, Artificial Sequence
  Description of Artificial Sequence: Synthetic Chimeric Antigen Receptor sequence
EVQLQQSGPELVKPGASVKISCKASGYTFTDYNMHWVKQSHGKSLEWIGYIYPYNGGTGYNQKFKSKATLTVDNSSSTAYMDVRSLTSEDSAVYYCARGRPAMDYWGQGTSVTVSSGGGGSGGGGSGGGGSDIVLTQSPASLAVSLGQRATISCRASESVDNYGISFMNWFQQKPGQPPKLLIYAASNQGSGVPARFSGSGSGTDFSLNIHPMEEDDTAMYFCQQSKEVPWTFGGGTKLEIKTTTPAPRPPTPAPTIASQPLSLRPEACRPAAGGAVHTRGLDFACDIISFFLALTSTALLFLLFFLTLRFSVVKRGRKKLLYIFKQPFMRPVQTTQEEDGCSCRFPEEEEGGCELRVKFSRSADAPAYQQGQNQLYNELNLGRREEYDVLDKRRGRDPEMGGKPRRKNPQEGLYNELQKDKMAEAYSEIGMKGERRRGKGHDGLYQGLSTATKDTYDALHMQALPPR

SEQ ID NO: 5313 - protein, 469 aa, Artificial Sequence
  Description of Artificial Sequence: Synthetic Chimeric Antigen Receptor sequence
QVQLQQPGAEVVKPGASVKMSCKASGYTFTSYYIHWIKQTPGQGLEWVGVIYPGNDDISYNQKFKGKATLTADKSSTTAYMQLSSLTSEDSAVYYCAREVRLRYFDVWGAGTTVTVSSGGGGSGGGGSGGGGSNIMLTQSPSSLAVSAGEKVTMSCKSSQSVFFSSSQKNYLAWYQQIPGQSPKLLIYWASTRESGVPDRFTGSGSGTDFTLTISSVQSEDLAIYYCHQYLSSRTFGGGTKLEIKRTTTPAPRPPTPAPTIASQPLSLRPEACRPAAGGAVHTRGLDFACDIYIWAPLAGTCGVLLLSLVITLYCKRGRKKLLYIFKQPFMRPVQTTQEEDGCSCRFPEEEEGGCELRVKFSRSADAPAYQQGQNQLYNELNLGRREEYDVLDKRRGRDPEMGGKPRRKNPQEGLYNELQKDKMAEAYSEIGMKGERRRGKGHDGLYQGLSTATKDTYDALHMQALPPR

SEQ ID NO: 5314 - protein, 472 aa, Artificial Sequence
  Description of Artificial Sequence: Synthetic Chimeric Antigen Receptor sequence
QVQLQQPGAEVVKPGASVKMSCKASGYTFTSYYIHWIKQTPGQGLEWVGVIYPGNDDISYNQKFKGKATLTADKSSTTAYMQLSSLTSEDSAVYYCAREVRLRYFDVWGAGTTVTVSSGGGGSGGGGSGGGGSNIMLTQSPSSLAVSAGEKVTMSCKSSQSVFFSSSQKNYLAWYQQIPGQSPKLLIYWASTRESGVPDRFTGSGSGTDFTLTISSVQSEDLAIYYCHQYLSSRTFGGGTKLEIKRTTTPAPRPPTPAPTIASQPLSLRPEACRPAAGGAVHTRGLDFACDIISFFLALTSTALLFLLFFLTLRFSVVKRGRKKLLYIFKQPFMRPVQTTQEEDGCSCRFPEEEEGGCELRVKFSRSADAPAYQQGQNQLYNELNLGRREEYDVLDKRRGRDPEMGGKPRRKNPQEGLYNELQKDKMAEAYSEIGMKGERRRGKGHDGLYQGLSTATKDTYDALHMQALPPR

SEQ ID NO: 5315 - protein, 473 aa, Artificial Sequence
  Description of Artificial Sequence: Synthetic Chimeric Antigen Receptor sequence
EVKLQESGPELVKPGASVKMSCKASGYKFTDYVVHWLKQKPGQGLEWIGYINPYNDGTKYNEKFKGKATLTSDKSSSTAYMEVSSLTSEDSAVYYCARDYRYEVYGMDYWGQGTSVTVSSGGGGSGGGGSGGGGSDIVLTQSPTIMSASPGERVTMTCTASSSVNYIHWYQQKSGDSPLRWIFDTSKVASGVPARFSGSGSGTSYSLTISTMEAEDAATYYCQQWRSYPLTFGDGTRLELKRADAAPTVSTTTPAPRPPTPAPTIASQPLSLRPEACRPAAGGAVHTRGLDFACDIYIWAPLAGTCGVLLLSLVITLYCKRGRKKLLYIFKQPFMRPVQTTQEEDGCSCRFPEEEEGGCELRVKFSRSADAPAYQQGQNQLYNELNLGRREEYDVLDKRRGRDPEMGGKPRRKNPQEGLYNELQKDKMAEAYSEIGMKGERRRGKGHDGLYQGLSTATKDTYDALHMQALPPR

SEQ ID NO: 5316 - protein, 476 aa, Artificial Sequence
  Description of Artificial Sequence: Synthetic Chimeric Antigen Receptor sequence
EVKLQESGPELVKPGASVKMSCKASGYKFTDYVVHWLKQKPGQGLEWIGYINPYNDGTKYNEKFKGKATLTSDKSSSTAYMEVSSLTSEDSAVYYCARDYRYEVYGMDYWGQGTSVTVSSGGGGSGGGGSGGGGSDIVLTQSPTIMSASPGERVTMTCTASSSVNYIHWYQQKSGDSPLRWIFDTSKVASGVPARFSGSGSGTSYSLTISTMEAEDAATYYCQQWRSYPLTFGDGTRLELKRADAAPTVSTTTPAPRPPTPAPTIASQPLSLRPEACRPAAGGAVHTRGLDFACDIISFFLALTSTALLFLLFFLTLRFSVVKRGRKKLLYIFKQPFMRPVQTTQEEDGCSCRFPEEEEGGCELRVKFSRSADAPAYQQGQNQLYNELNLGRREEYDVLDKRRGRDPEMGGKPRRKNPQEGLYNELQKDKMAEAYSEIGMKGERRRGKGHDGLYQGLSTATKDTYDALHMQALPPR

SEQ ID NO: 5317 - protein, 649 aa, Artificial Sequence
  Description of Artificial Sequence: Synthetic Chimeric Antigen Receptor sequence
QVQLQQSGPELVRPGTFVKISCKASGYTFTNYDINWVNQRPGQGLEWIGWIYPGDGSTKYNEKFKAKATLTADKSSSTAYLQLNNLTSENSAVYFCASGYEDAMDYWGQGTSVTVSSGGGGSGGGGSGGGGSDIKMTQSPSSMYASLGERVIINCKASQDINSYLSWFQQKPGKSPKTLIYRANRLVDGVPSRFSGSGSGQDYSLTISSLEYEDMGIYYCLQYDEFPLTFGAGTKLELKREPKSPDKTHTCPPCPAPPVAGPSVFLFPPKPKDTLMIARTPEVTCVVVDVSHEDPEVKFNWYVDGVEVHNAKTKPREEQYNSTYRVVSVLTVLHQDWLNGKEYKCKVSNKALPAPIEKTISKAKGQPREPQVYTLPPSRDELTKNQVSLTCLVKGFYPSDIAVEWESNGQPENNYKTTPPVLDSDGSFFLYSKLTVDKSRWQQGNVFSCSVMHEALHNHYTQKSLSLSPGKIYIWAPLAGTCGVLLLSLVITLYCKRGRKKLLYIFKQPFMRPVQTTQEEDGCSCRFPEEEEGGCELRVKFSRSADAPAYQQGQNQLYNELNLGRREEYDVLDKRRGRDPEMGGKPRRKNPQEGLYNELQKDKMAEAYSEIGMKGERRRGKGHDGLYQGLSTATKDTYDALHMQALPPR

SEQ ID NO: 5318 - protein, 651 aa, Artificial Sequence
  Description of Artificial Sequence: Synthetic Chimeric Antigen Receptor sequence
EVQLQQSGPELVKPGASVKISCKASGYTFTDYNMHWVKQSHGKSLEWIGYIYPYNGGTGYNQKFKSKATLTVDNSSSTAYMDVRSLTSEDSAVYYCARGRPAMDYWGQGTSVTVSSGGGGSGGGGSGGGGSDIVLTQSPASLAVSLGQRATISCRASESVDNYGISFMNWFQQKPGQPPKLLIYAASNQGSGVPARFSGSGSGTDFSLNIHPMEEDDTAMYFCQQSKEVPWTFGGGTKLEIKEPKSPDKTHTCPPCPAPPVAGPSVFLFPPKPKDTLMIARTPEVTCVVVDVSHEDPEVKFNWYVDGVEVHNAKTKPREEQYNSTYRVVSVLTVLHQDWLNGKEYKCKVSNKALPAPIEKTISKAKGQPREPQVYTLPPSRDELTKNQVSLTCLVKGFYPSDIAVEWESNGQPENNYKTTPPVLDSDGSFFLYSKLTVDKSRWQQGNVFSCSVMHEALHNHYTQKSLSLSPGKIYIWAPLAGTCGVLLLSLVITLYCKRGRKKLLYIFKQPFMRPVQTTQEEDGCSCRFPEEEEGGCELRVKFSRSADAPAYQQGQNQLYNELNLGRREEYDVLDKRRGRDPEMGGKPRRKNPQEGLYNELQKDKMAEAYSEIGMKGERRRGKGHDGLYQGLSTATKDTYDALHMQALPPR

SEQ ID NO: 5319 - protein, 654 aa, Artificial Sequence
  Description of Artificial Sequence: Synthetic Chimeric Antigen Receptor sequence
EVQLQQSGPELVKPGASVKISCKASGYTFTDYNMHWVKQSHGKSLEWIGYIYPYNGGTGYNQKFKSKATLTVDNSSSTAYMDVRSLTSEDSAVYYCARGRPAMDYWGQGTSVTVSSGGGGSGGGGSGGGGSDIVLTQSPASLAVSLGQRATISCRASESVDNYGISFMNWFQQKPGQPPKLLIYAASNQGSGVPARFSGSGSGTDFSLNIHPMEEDDTAMYFCQQSKEVPWTFGGGTKLEIKEPKSPDKTHTCPPCPAPPVAGPSVFLFPPKPKDTLMIARTPEVTCVVVDVSHEDPEVKFNWYVDGVEVHNAKTKPREEQYNSTYRVVSVLTVLHQDWLNGKEYKCKVSNKALPAPIEKTISKAKGQPREPQVYTLPPSRDELTKNQVSLTCLVKGFYPSDIAVEWESNGQPENNYKTTPPVLDSDGSFFLYSKLTVDKSRWQQGNVFSCSVMHEALHNHYTQKSLSLSPGKIISFFLALTSTALLFLLFFLTLRFSVVKRGRKKLLYIFKQPFMRPVQTTQEEDGCSCRFPEEEEGGCELRVKFSRSADAPAYQQGQNQLYNELNLGRREEYDVLDKRRGRDPEMGGKPRRKNPQEGLYNELQKDKMAEAYSEIGMKGERRRGKGHDGLYQGLSTATKDTYDALHMQALPPR

SEQ ID NO: 5320 - protein, 655 aa, Artificial Sequence
  Description of Artificial Sequence: Synthetic Chimeric Antigen Receptor sequence
QVQLQQPGAEVVKPGASVKMSCKASGYTFTSYYIHWIKQTPGQGLEWVGVIYPGNDDISYNQKFKGKATLTADKSSTTAYMQLSSLTSEDSAVYYCAREVRLRYFDVWGAGTTVTVSSGGGGSGGGGSGGGGSNIMLTQSPSSLAVSAGEKVTMSCKSSQSVFFSSSQKNYLAWYQQIPGQSPKLLIYWASTRESGVPDRFTGSGSGTDFTLTISSVQSEDLAIYYCHQYLSSRTFGGGTKLEIKREPKSPDKTHTCPPCPAPPVAGPSVFLFPPKPKDTLMIARTPEVTCVVVDVSHEDPEVKFNWYVDGVEVHNAKTKPREEQYNSTYRVVSVLTVLHQDWLNGKEYKCKVSNKALPAPIEKTISKAKGQPREPQVYTLPPSRDELTKNQVSLTCLVKGFYPSDIAVEWESNGQPENNYKTTPPVLDSDGSFFLYSKLTVDKSRWQQGNVFSCSVMHEALHNHYTQKSLSLSPGKIYIWAPLAGTCGVLLLSLVITLYCKRGRKKLLYIFKQPFMRPVQTTQEEDGCSCRFPEEEEGGCELRVKFSRSADAPAYQQGQNQLYNELNLGRREEYDVLDKRRGRDPEMGGKPRRKNPQEGLYNELQKDKMAEAYSEIGMKGERRRGKGHDGLYQGLSTATKDTYDALHMQALPPR

SEQ ID NO: 5321 - protein, 658 aa, Artificial Sequence
  Description of Artificial Sequence: Synthetic Chimeric Antigen Receptor sequence
QVQLQQPGAEVVKPGASVKMSCKASGYTFTSYYIHWIKQTPGQGLEWVGVIYPGNDDISYNQKFKGKATLTADKSSTTAYMQLSSLTSEDSAVYYCAREVRLRYFDVWGAGTTVTVSSGGGGSGGGGSGGGGSNIMLTQSPSSLAVSAGEKVTMSCKSSQSVFFSSSQKNYLAWYQQIPGQSPKLLIYWASTRESGVPDRFTGSGSGTDFTLTISSVQSEDLAIYYCHQYLSSRTFGGGTKLEIKREPKSPDKTHTCPPCPAPPVAGPSVFLFPPKPKDTLMIARTPEVTCVVVDVSHEDPEVKFNWYVDGVEVHNAKTKPREEQYNSTYRVVSVLTVLHQDWLNGKEYKCKVSNKALPAPIEKTISKAKGQPREPQVYTLPPSRDELTKNQVSLTCLVKGFYPSDIAVEWESNGQPENNYKTTPPVLDSDGSFFLYSKLTVDKSRWQQGNVFSCSVMHEALHNHYTQKSLSLSPGKIISFFLALTSTALLFLLFFLTLRFSVVKRGRKKLLYIFKQPFMRPVQTTQEEDGCSCRFPEEEEGGCELRVKFSRSADAPAYQQGQNQLYNELNLGRREEYDVLDKRRGRDPEMGGKPRRKNPQEGLYNELQKDKMAEAYSEIGMKGERRRGKGHDGLYQGLSTATKDTYDALHMQALPPR

SEQ ID NO: 5322 - protein, 659 aa, Artificial Sequence
  Description of Artificial Sequence: Synthetic Chimeric Antigen Receptor sequence
EVKLQESGPELVKPGASVKMSCKASGYKFTDYVVHWLKQKPGQGLEWIGYINPYNDGTKYNEKFKGKATLTSDKSSSTAYMEVSSLTSEDSAVYYCARDYRYEVYGMDYWGQGTSVTVSSGGGGSGGGGSGGGGSDIVLTQSPTIMSASPGERVTMTCTASSSVNYIHWYQQKSGDSPLRWIFDTSKVASGVPARFSGSGSGTSYSLTISTMEAEDAATYYCQQWRSYPLTFGDGTRLELKRADAAPTVSEPKSPDKTHTCPPCPAPPVAGPSVFLFPPKPKDTLMIARTPEVTCVVVDVSHEDPEVKFNWYVDGVEVHNAKTKPREEQYNSTYRVVSVLTVLHQDWLNGKEYKCKVSNKALPAPIEKTISKAKGQPREPQVYTLPPSRDELTKNQVSLTCLVKGFYPSDIAVEWESNGQPENNYKTTPPVLDSDGSFFLYSKLTVDKSRWQQGNVFSCSVMHEALHNHYTQKSLSLSPGKIYIWAPLAGTCGVLLLSLVITLYCKRGRKKLLYIFKQPFMRPVQTTQEEDGCSCRFPEEEEGGCELRVKFSRSADAPAYQQGQNQLYNELNLGRREEYDVLDKRRGRDPEMGGKPRRKNPQEGLYNELQKDKMAEAYSEIGMKGERRRGKGHDGLYQGLSTATKDTYDALHMQALPPR

SEQ ID NO: 5323 - protein, 662 aa, Artificial Sequence
  Description of Artificial Sequence: Synthetic Chimeric Antigen Receptor sequence
EVKLQESGPELVKPGASVKMSCKASGYKFTDYVVHWLKQKPGQGLEWIGYINPYNDGTKYNEKFKGKATLTSDKSSSTAYMEVSSLTSEDSAVYYCARDYRYEVYGMDYWGQGTSVTVSSGGGGSGGGGSGGGGSDIVLTQSPTIMSASPGERVTMTCTASSSVNYIHWYQQKSGDSPLRWIFDTSKVASGVPARFSGSGSGTSYSLTISTMEAEDAATYYCQQWRSYPLTFGDGTRLELKRADAAPTVSEPKSPDKTHTCPPCPAPPVAGPSVFLFPPKPKDTLMIARTPEVTCVVVDVSHEDPEVKFNWYVDGVEVHNAKTKPREEQYNSTYRVVSVLTVLHQDWLNGKEYKCKVSNKALPAPIEKTISKAKGQPREPQVYTLPPSRDELTKNQVSLTCLVKGFYPSDIAVEWESNGQPENNYKTTPPVLDSDGSFFLYSKLTVDKSRWQQGNVFSCSVMHEALHNHYTQKSLSLSPGKIISFFLALTSTALLFLLFFLTLRFSVVKRGRKKLLYIFKQPFMRPVQTTQEEDGCSCRFPEEEEGGCELRVKFSRSADAPAYQQGQNQLYNELNLGRREEYDVLDKRRGRDPEMGGKPRRKNPQEGLYNELQKDKMAEAYSEIGMKGERRRGKGHDGLYQGLSTATKDTYDALHMQALPPR

SEQ ID NO: 5324 - protein, 378 aa, Artificial Sequence
  Description of Artificial Sequence: Synthetic Chimeric Antigen Receptor sequence
MVLLWLTLLLIALPCLLQTKEDPNPPITNLRMKAKAQQLTWDLNRNVTDIECVKDADYSMPAVNNSYCQFGAISLCEVTNYTVRVANPPFSTWILFPENSGKPWAGAENLTCWIHDVDFLSCSWAVGPGAPADVQYDLYLNVANRRQQYECLHYKTDAQGTRIGCRFDDISRLSSGSQSSHILVRGRSAAFGIPCTDKFVVFSQIEILTPPNMTAKCNKTHSFMHWKMRSHFNRKFRYELQIQKRMQPVITEQVRDRTSFQLLNPGTYTVQIRARERVYEFLSAWSTPQRFECDQEEGANTRAWRTSLLIALGTLLALVCVFVICRRYLVMQRLFPRIPHMKDPIGDSFQNDKLVVWEAGKAGLEECLVTEVQVVQKT

SEQ ID NO: 5325 - protein, 383 aa, Artificial Sequence
  Description of Artificial Sequence: Synthetic Chimeric Antigen Receptor sequence
MALPVTALLLPLALLLHAARPGSGSGAQAAQVQLVQSGAEVKKPGASVKVSCKASGYSFPDYYINWVRQAPGQGLEWMGWIYFASGNSEYNQKFTGRVTMTRDTSSSTAYMELSSLRSEDTAVYFCASLYDYDWYFDVWGQGTMVTVSSGGGGSGGGGSGGGGSDIVMTQTPLSLSVTPGEPASISCKSSQSLVHSNGNTYLHWYLQKPGQSPQLLIYKVSNRFSGVPDRFSGSGSGADFTLKISRVEAEDVGVYYCAETSHVPWTFGQGTKLEIKRSDPASGAGSGSGSAVKEGPPSEHSGISRNAIIFLVLGILVFLILLGIGIYFYWSKCSREVLWHCHLCPSSTEHASASANGHVSYSAVSRENSSSQDPQTEGTRSHG

SEQ ID NO: 5326 - protein, 391 aa, Artificial Sequence
  Description of Artificial Sequence: Synthetic Chimeric Antigen Receptor sequence
MALPVTALLLPLALLLHAARPGSGSGAQAAQVQLVQSGAEVKKPGASVKVSCKASGYSFPDYYINWVRQAPGQGLEWMGWIYFASGNSEYNQKFTGRVTMTRDTSSSTAYMELSSLRSEDTAVYFCASLYDYDWYFDVWGQGTMVTVSSGGGGSGGGGSGGGGSDIVMTQTPLSLSVTPGEPASISCKSSQSLVHSNGNTYLHWYLQKPGQSPQLLIYKVSNRFSGVPDRFSGSGSGADFTLKISRVEAEDVGVYYCAETSHVPWTFGQGTKLEIKRSDPASGAGSGSGSAVQAPSSSPMGIIVAVVTGIAVAAIVAAVVALIYCRKKRISALPGYPECREMGETLPEKPANPTNPDEADKVGAENTITYSLLMHPDALEEPDDQNRISHG

SEQ ID NO: 5327 - protein, 409 aa, Artificial Sequence
  Description of Artificial Sequence: Synthetic Chimeric Antigen Receptor sequence
MALPVTALLLPLALLLHAARPGSGSGAQAAQVQLVQSGAEVKKPGASVKVSCKASGYSFPDYYINWVRQAPGQGLEWMGWIYFASGNSEYNQKFTGRVTMTRDTSSSTAYMELSSLRSEDTAVYFCASLYDYDWYFDVWGQGTMVTVSSGGGGSGGGGSGGGGSDIVMTQTPLSLSVTPGEPASISCKSSQSLVHSNGNTYLHWYLQKPGQSPQLLIYKVSNRFSGVPDRFSGSGSGADFTLKISRVEAEDVGVYYCAETSHVPWTFGQGTKLEIKRSDPASGAGSGSGSASFRALPHAWSDPSDPLPVSVTGNSRYLHALIGTSVVIIPFAILLFFLLHRWCANKKNAVVMDQEPAGNRTVNREDSDEQDPQEVTYAQLNHCVFTQRKITRPSQRPKTPPTDTSVSHG

SEQ ID NO: 5328 - protein, 414 aa, Artificial Sequence
  Description of Artificial Sequence: Synthetic Chimeric Antigen Receptor sequence
MALPVTALLLPLALLLHAARPGSGSGAQAAQVQLVQSGAEVKKPGASVKVSCKASGYSFPDYYINWVRQAPGQGLEWMGWIYFASGNSEYNQKFTGRVTMTRDTSSSTAYMELSSLRSEDTAVYFCASLYDYDWYFDVWGQGTMVTVSSGGGGSGGGGSGGGGSDIVMTQTPLSLSVTPGEPASISCKSSQSLVHSNGNTYLHWYLQKPGQSPQLLIYKVSNRFSGVPDRFSGSGSGADFTLKISRVEAEDVGVYYCAETSHVPWTFGQGTKLEIKRSDPASGAGSGSGSALFVHWKPEGRAGGVLGAVWGASITTLVFLCVCFIFRVKTRRKKAAQPVQNTDDVNPVMVSGSRGHQHQFQTGIVSDHPAEAGPISEDEQELHYAVLHFHKVQPQEPKVTDTEYSEIKIHKSHG

SEQ ID NO: 5329 - protein, 415 aa, Artificial Sequence
  Description of Artificial Sequence: Synthetic Chimeric Antigen Receptor sequence
MALPVTALLLPLALLLHAARPGSGSGAQAAQVQLVQSGAEVKKPGASVKVSCKASGYSFPDYYINWVRQAPGQGLEWMGWIYFASGNSEYNQKFTGRVTMTRDTSSSTAYMELSSLRSEDTAVYFCASLYDYDWYFDVWGQGTMVTVSSGGGGSGGGGSGGGGSDIVMTQTPLSLSVTPGEPASISCKSSQSLVHSNGNTYLHWYLQKPGQSPQLLIYKVSNRFSGVPDRFSGSGSGADFTLKISRVEAEDVGVYYCAETSHVPWTFGQGTKLEIKRSDPASGAGSGSGSAGPDGYRRDLMTAGVLWGLFGVLGFTGVALLLYALFHKISGESSATNEPRGASRPNPQEFTYSSPTPDMEELQPVYVNVGSVDVDVVYSQVWSMQQPESSANIRTLLENKDSQVIYSSVKKSSHG

SEQ ID NO: 5330 - protein, 417 aa, Artificial Sequence
  Description of Artificial Sequence: Synthetic Chimeric Antigen Receptor sequence
MALPVTALLLPLALLLHAARPGSGSGAQAAQVQLVQSGAEVKKPGASVKVSCKASGYSFPDYYINWVRQAPGQGLEWMGWIYFASGNSEYNQKFTGRVTMTRDTSSSTAYMELSSLRSEDTAVYFCASLYDYDWYFDVWGQGTMVTVSSGGGGSGGGGSGGGGSDIVMTQTPLSLSVTPGEPASISCKSSQSLVHSNGNTYLHWYLQKPGQSPQLLIYKVSNRFSGVPDRFSGSGSGADFTLKISRVEAEDVGVYYCAETSHVPWTFGQGTKLEIKRSDPASGAGSGSGSAPGHIRLYVVEKENLPVFPVWVVVGIVTAVVLGLTLLISMILAVLYRRKNSKRDYTGCSTSESLSPVKQAPRKSPSDTEGLVKSLPSGSHQGPVIYAQLDHSGGHHSDKINKSESVVYADIRKNSHG

SEQ ID NO: 5331 - protein, 421 aa, Artificial Sequence
  Description of Artificial Sequence: Synthetic Chimeric Antigen Receptor sequence
MALPVTALLLPLALLLHAARPGSGSGAQAAQVQLVQSGAEVKKPGASVKVSCKASGYSFPDYYINWVRQAPGQGLEWMGWIYFASGNSEYNQKFTGRVTMTRDTSSSTAYMELSSLRSEDTAVYFCASLYDYDWYFDVWGQGTMVTVSSGGGGSGGGGSGGGGSDIVMTQTPLSLSVTPGEPASISCKSSQSLVHSNGNTYLHWYLQKPGQSPQLLIYKVSNRFSGVPDRFSGSGSGADFTLKISRVEAEDVGVYYCAETSHVPWTFGQGTKLEIKRSDPASGAGSGSGSALQSKATSGVTQGVVGGAGATALVFLSFCVIFVVVRSCRKKSARPAAGVGDTGIEDANAVRGSASQGPLTEPWAEDSPPDQPPPASARSSVGEGELQYASLSFQMVKPWDSRGQEATDTEYSEIKIHRSHG

SEQ ID NO: 5332 - protein, 424 aa, Artificial Sequence
  Description of Artificial Sequence: Synthetic Chimeric Antigen Receptor sequence
MALPVTALLLPLALLLHAARPGSGSGAQAAQVQLVQSGAEVKKPGASVKVSCKASGYSFPDYYINWVRQAPGQGLEWMGWIYFASGNSEYNQKFTGRVTMTRDTSSSTAYMELSSLRSEDTAVYFCASLYDYDWYFDVWGQGTMVTVSSGGGGSGGGGSGGGGSDIVMTQTPLSLSVTPGEPASISCKSSQSLVHSNGNTYLHWYLQKPGQSPQLLIYKVSNRFSGVPDRFSGSGSGADFTLKISRVEAEDVGVYYCAETSHVPWTFGQGTKLEIKRSDPASGAGSGSGSAMPSTGGDSCPFCLKLLLPGLLLLLVVIILILAFWVLPKYKTRKAMRNNVPRDRGDTAMEVGIYANILEKQAKEESVPEVGSRPCVSTAQDEAKHSQELQYATPVFQEVAPREQEACDSYKSGYVYSELNFSHG

SEQ ID NO: 5333 - protein, 425 aa, Artificial Sequence
  Description of Artificial Sequence: Synthetic Chimeric Antigen Receptor sequence
MALPVTALLLPLALLLHAARPGSGSGAQAAQVQLVQSGAEVKKPGASVKVSCKASGYSFPDYYINWVRQAPGQGLEWMGWIYFASGNSEYNQKFTGRVTMTRDTSSSTAYMELSSLRSEDTAVYFCASLYDYDWYFDVWGQGTMVTVSSGGGGSGGGGSGGGGSDIVMTQTPLSLSVTPGEPASISCKSSQSLVHSNGNTYLHWYLQKPGQSPQLLIYKVSNRFSGVPDRFSGSGSGADFTLKISRVEAEDVGVYYCAETSHVPWTFGQGTKLEIKRSDPASGAGSGSGSALQQEYTGKMRPVSGVLLGAVGGAGATALVFLSFCVIFIVVRSCRKKSARPAADVGDIGMKDANTIRGSASQGNLTESWADDNPRHHGLAAHSSGEEREIQYAPLSFHKGEPQDLSGQEATNNEYSEIKIPKSHG

SEQ ID NO: 5334 - protein, 427 aa, Artificial Sequence
  Description of Artificial Sequence: Synthetic Chimeric Antigen Receptor sequence
MALPVTALLLPLALLLHAARPGSGSGAQAAQVQLVQSGAEVKKPGASVKVSCKASGYSFPDYYINWVRQAPGQGLEWMGWIYFASGNSEYNQKFTGRVTMTRDTSSSTAYMELSSLRSEDTAVYFCASLYDYDWYFDVWGQGTMVTVSSGGGGSGGGGSGGGGSDIVMTQTPLSLSVTPGEPASISCKSSQSLVHSNGNTYLHWYLQKPGQSPQLLIYKVSNRFSGVPDRFSGSGSGADFTLKISRVEAEDVGVYYCAETSHVPWTFGQGTKLEIKRSDPASGAGSGSGSALQNEYTGKMRPISGVTLGAFGGAGATALVFLYFCIIFVVVRSCRKKSARPAVGVGDTGMEDANAVRGSASQGPLIESPADDSPPHHAPPALATPSPEEGEIQYASLSFHKARPQYPQEQEAIGYEYSEINIPKSHG

SEQ ID NO: 5335 - protein, 430 aa, Artificial Sequence
  Description of Artificial Sequence: Synthetic Chimeric Antigen Receptor sequence
MALPVTALLLPLALLLHAARPGSGSGAQAAQVQLVQSGAEVKKPGASVKVSCKASGYSFPDYYINWVRQAPGQGLEWMGWIYFASGNSEYNQKFTGRVTMTRDTSSSTAYMELSSLRSEDTAVYFCASLYDYDWYFDVWGQGTMVTVSSGGGGSGGGGSGGGGSDIVMTQTPLSLSVTPGEPASISCKSSQSLVHSNGNTYLHWYLQKPGQSPQLLIYKVSNRFSGVPDRFSGSGSGADFTLKISRVEAEDVGVYYCAETSHVPWTFGQGTKLEIKRSDPASGAGSGSGSALNVTYVPQNPTTGIFPGDGSGKQETRAGVVHGAIGGAGVTALLALCLCLIFFIVKTHRRKAARTAVGRNDTHPTTGSASPKHQKKSKLHGPTETSSCSGAAPTVEMDEELHYASLNFHGMNPSKDTSTEYSEVRTQSHG

SEQ ID NO: 5336 - protein, 430 aa, Artificial Sequence
  Description of Artificial Sequence: Synthetic Chimeric Antigen Receptor sequence
MALPVTALLLPLALLLHAARPGSGSGAQAAQVQLVQSGAEVKKPGASVKVSCKASGYSFPDYYINWVRQAPGQGLEWMGWIYFASGNSEYNQKFTGRVTMTRDTSSSTAYMELSSLRSEDTAVYFCASLYDYDWYFDVWGQGTMVTVSSGGGGSGGGGSGGGGSDIVMTQTPLSLSVTPGEPASISCKSSQSLVHSNGNTYLHWYLQKPGQSPQLLIYKVSNRFSGVPDRFSGSGSGADFTLKISRVEAEDVGVYYCAETSHVPWTFGQGTKLEIKRSDPASGAGSGSGSAPYEWSNSSDPLLVSVTGNPSNSWPSPTEPSSETGNPRHLHVLIGTSVVIILFILLLFFLLHRWCCNKKNAVVMDQEPAGNRTVNREDSDEQDPQEVTYAQLNHCVFTQRKITRPSQRPKTPPTDIIVYTELPNAEPSHG

SEQ ID NO: 5337 - protein, 431 aa, Artificial Sequence
  Description of Artificial Sequence: Synthetic Chimeric Antigen Receptor sequence
MALPVTALLLPLALLLHAARPQVQLVQSGAEVKKPGASVKVSCKASGYSFPDYYINWVRQAPGQGLEWMGWIYFASGNSEYNQKFTGRVTMTRDTSSSTAYMELSSLRSEDTAVYFCASLYDYDWYFDVWGQGTMVTVSSGGGGSGGGGSGGGGSDIVMTQTPLSLSVTPGEPASISCKSSQSLVHSNGNTYLHWYLQKPGQSPQLLIYKVSNRFSGVPDRFSGSGSGADFTLKISRVEAEDVGVYYCAETSHVPWTFGQGTKLEIKYPLTFGAGTMLDLKRAAATERRAEVPTAHPSPSPRPAGQFQTLVVGVVGGLLGSLVLLVWVLAVICSRAARGTIGARRTGQPLKEDPSAVPVFSVDYGELDFQWREKTPEPPVPCVPEQTEYATIVFPSGMGTSSPARRGSADGPRSAQPLRPEDGHCSWPLSH

SEQ ID NO: 5338 - protein, 432 aa, Artificial Sequence
  Description of Artificial Sequence: Synthetic Chimeric Antigen Receptor sequence
MALPVTALLLPLALLLHAARPGSGSGAQAAQVQLVQSGAEVKKPGASVKVSCKASGYSFPDYYINWVRQAPGQGLEWMGWIYFASGNSEYNQKFTGRVTMTRDTSSSTAYMELSSLRSEDTAVYFCASLYDYDWYFDVWGQGTMVTVSSGGGGSGGGGSGGGGSDIVMTQTPLSLSVTPGEPASISCKSSQSLVHSNGNTYLHWYLQKPGQSPQLLIYKVSNRFSGVPDRFSGSGSGADFTLKISRVEAEDVGVYYCAETSHVPWTFGQGTKLEIKRSDPASGAGSGSGSALNFTVPTGARSNHLTSGVIEGLLSTLGPATVALLFCYGLKRKIGRRSARDPLRSLPSPLPQEFTYLNSPTPGQLQPIYENVNVVSGDEVYSLAYYNQPEQESVAAETLGTHMEDKVSLDIYSRLRKANITDVDYEDAMSHG

SEQ ID NO: 5339 - protein, 435 aa, Artificial Sequence
  Description of Artificial Sequence: Synthetic Chimeric Antigen Receptor sequence
MALPVTALLLPLALLLHAARPGSGSGAQAAQVQLVQSGAEVKKPGASVKVSCKASGYSFPDYYINWVRQAPGQGLEWMGWIYFASGNSEYNQKFTGRVTMTRDTSSSTAYMELSSLRSEDTAVYFCASLYDYDWYFDVWGQGTMVTVSSGGGGSGGGGSGGGGSDIVMTQTPLSLSVTPGEPASISCKSSQSLVHSNGNTYLHWYLQKPGQSPQLLIYKVSNRFSGVPDRFSGSGSGADFTLKISRVEAEDVGVYYCAETSHVPWTFGQGTKLEIKRSDPASGAGSGSGSAVTVRETPGNRDGLVAAGATGGLLSALLLAVALLFHCWRRRKSGVGFLGDETRLPPAPGPGESSHSICPAQVELQSLYVDVHPKKGDLVYSEIQTTQLGEEEEANTSRTLLEDKDVSVVYSEVKTQHPDNSAGKISSKDEESSHG

SEQ ID NO: 5340 - protein, 437 aa, Artificial Sequence
  Description of Artificial Sequence: Synthetic Chimeric Antigen Receptor sequence
MALPVTALLLPLALLLHAARPGSGSGAQAAQVQLVQSGAEVKKPGASVKVSCKASGYSFPDYYINWVRQAPGQGLEWMGWIYFASGNSEYNQKFTGRVTMTRDTSSSTAYMELSSLRSEDTAVYFCASLYDYDWYFDVWGQGTMVTVSSGGGGSGGGGSGGGGSDIVMTQTPLSLSVTPGEPASISCKSSQSLVHSNGNTYLHWYLQKPGQSPQLLIYKVSNRFSGVPDRFSGSGSGADFTLKISRVEAEDVGVYYCAETSHVPWTFGQGTKLEIKRSDPASGAGSGSGSALYITGLTANRSGPFATGVAGGLLSIAGLAAGALLLYCWLSRKAGRKPASDPARSPPDSDSQEPTYHNVPAWEELQPVYTNANPRGENVVYSEVRIIQEKKKHAVASDPRHLRNKGSPIIYSEVKVASTPVSGSLFLASSAPHRSHG

SEQ ID NO: 5341 - protein, 437 aa, Artificial Sequence
  Description of Artificial Sequence: Synthetic Chimeric Antigen Receptor sequence
MALPVTALLLPLALLLHAARPGSGSGAQAAQVQLVQSGAEVKKPGASVKVSCKASGYSFPDYYINWVRQAPGQGLEWMGWIYFASGNSEYNQKFTGRVTMTRDTSSSTAYMELSSLRSEDTAVYFCASLYDYDWYFDVWGQGTMVTVSSGGGGSGGGGSGGGGSDIVMTQTPLSLSVTPGEPASISCKSSQSLVHSNGNTYLHWYLQKPGQSPQLLIYKVSNRFSGVPDRFSGSGSGADFTLKISRVEAEDVGVYYCAETSHVPWTFGQGTKLEIKRSDPASGAGSGSGSAPYEWSKSSDPLLVSVTGNPSNSWPSPTEPSSKTGNPRHLHILIGTSVVIILFILLFFLLHRWCSNKKNAAVMDQESAGNRTANSEDSDEQDPQEVTYTQLNHCVFTQRKITRPSQRPKTPPTDIIVYTELPNAESRSKVVSCPSHG

SEQ ID NO: 5342 - protein, 437 aa, Artificial Sequence
  Description of Artificial Sequence: Synthetic Chimeric Antigen Receptor sequence
MALPVTALLLPLALLLHAARPGSGSGAQAAQVQLVQSGAEVKKPGASVKVSCKASGYSFPDYYINWVRQAPGQGLEWMGWIYFASGNSEYNQKFTGRVTMTRDTSSSTAYMELSSLRSEDTAVYFCASLYDYDWYFDVWGQGTMVTVSSGGGGSGGGGSGGGGSDIVMTQTPLSLSVTPGEPASISCKSSQSLVHSNGNTYLHWYLQKPGQSPQLLIYKVSNRFSGVPDRFSGSGSGADFTLKISRVEAEDVGVYYCAETSHVPWTFGQGTKLEIKRSDPASGAGSGSGSAPYEWSNSSDPLLVSVIGNPSNSWPSPTEPSSKTGNPRHLHILIGTSVVIILFILLFFLLHRWCSNKKNAAVMDQESAGNRTANSEDSDEQDPQEVTYTQLNHCVFTQRKITRPSQRPKTPPTDIIVYAELPNAESRSKVVSCPSHG

SEQ ID NO: 5343 - protein, 437 aa, Artificial Sequence
  Description of Artificial Sequence: Synthetic Chimeric Antigen Receptor sequence
MALPVTALLLPLALLLHAARPGSGSGAQAAQVQLVQSGAEVKKPGASVKVSCKASGYSFPDYYINWVRQAPGQGLEWMGWIYFASGNSEYNQKFTGRVTMTRDTSSSTAYMELSSLRSEDTAVYFCASLYDYDWYFDVWGQGTMVTVSSGGGGSGGGGSGGGGSDIVMTQTPLSLSVTPGEPASISCKSSQSLVHSNGNTYLHWYLQKPGQSPQLLIYKVSNRFSGVPDRFSGSGSGADFTLKISRVEAEDVGVYYCAETSHVPWTFGQGTKLEIKRSDPASGAGSGSGSAERRAEVPTAHPSPSPRPAGQFQTLVVGVVGGLLGSLVLLVWVLAVICSRAARGTIGARRTGQPLKEDPSAVPVFSVDYGELDFQWREKTPEPPVPCVPEQTEYATIVFPSGMGTSSPARRGSADGPRSAQPLRPEDGHCSWPLSHG

SEQ ID NO: 5344 - protein, 438 aa, Artificial Sequence
  Description of Artificial Sequence: Synthetic Chimeric Antigen Receptor sequence
MALPVTALLLPLALLLHAARPGSGSGAQAAQVQLVQSGAEVKKPGASVKVSCKASGYSFPDYYINWVRQAPGQGLEWMGWIYFASGNSEYNQKFTGRVTMTRDTSSSTAYMELSSLRSEDTAVYFCASLYDYDWYFDVWGQGTMVTVSSGGGGSGGGGSGGGGSDIVMTQTPLSLSVTPGEPASISCKSSQSLVHSNGNTYLHWYLQKPGQSPQLLIYKVSNRFSGVPDRFSGSGSGADFTLKISRVEAEDVGVYYCAETSHVPWTFGQGTKLEIKRSDPASGAGSGSGSAPYEWSDPSDPLLVSVTGNPSSSWPSPTEPSSKSGNPRHLHILIGTSVVIILFILLLFFLLHLWCSNKKNAAVMDQEPAGNRTANSEDSDEQDPEEVTYAQLDHCVFTQRKITRPSQRPKTPPTDTILYTELPNAKPRSKVVSCPSHG

SEQ ID NO: 5345 - protein, 441 aa, Artificial Sequence
  Description of Artificial Sequence: Synthetic Chimeric Antigen Receptor sequence
MALPVTALLLPLALLLHAARPGSGSGAQAAQVQLVQSGAEVKKPGASVKVSCKASGYSFPDYYINWVRQAPGQGLEWMGWIYFASGNSEYNQKFTGRVTMTRDTSSSTAYMELSSLRSEDTAVYFCASLYDYDWYFDVWGQGTMVTVSSGGGGSGGGGSGGGGSDIVMTQTPLSLSVTPGEPASISCKSSQSLVHSNGNTYLHWYLQKPGQSPQLLIYKVSNRFSGVPDRFSGSGSGADFTLKISRVEAEDVGVYYCAETSHVPWTFGQGTKLEIKRSDPASGAGSGSGSAVRVILAPWKKGLIAVVIIGVIIALLIIAAKCYFLRKAKAKQMPVEMSRPAVPLLNSNNEKMSDPNMEANSHYGHNDDVGNHAMKPINDNKEPLNSDVQYTEVQVSSAESHKDLGKKDTETVYSEVRKAVPDAVESRYSRTEGSLDGTSHG

SEQ ID NO: 5346 - protein, 447 aa, Artificial Sequence
  Description of Artificial Sequence: Synthetic Chimeric Antigen Receptor sequence
MALPVTALLLPLALLLHAARPGSGSGAQAAQVQLVQSGAEVKKPGASVKVSCKASGYSFPDYYINWVRQAPGQGLEWMGWIYFASGNSEYNQKFTGRVTMTRDTSSSTAYMELSSLRSEDTAVYFCASLYDYDWYFDVWGQGTMVTVSSGGGGSGGGGSGGGGSDIVMTQTPLSLSVTPGEPASISCKSSQSLVHSNGNTYLHWYLQKPGQSPQLLIYKVSNRFSGVPDRFSGSGSGADFTLKISRVEAEDVGVYYCAETSHVPWTFGQGTKLEIKRSDPASGAGSGSGSAQAVTTTTQRPSSMTTTWRLSSTTTTTGLRVTQGKRRSDSWHISLETAVGVAVAVTVLGIMILGLICLLRWRRRKGQQRTKATTPAREPFQNTEEPYENIRNEGQNTDPKLNPKDDGIVYASLALSSSTSPKAPPSHRPLKSPQNETLYSVLKASHG

SEQ ID NO: 5347 - protein, 449 aa, Artificial Sequence
  Description of Artificial Sequence: Synthetic Chimeric Antigen Receptor sequence
MALPVTALLLPLALLLHAARPGSGSGAQAAQVQLVQSGAEVKKPGASVKVSCKASGYSFPDYYINWVRQAPGQGLEWMGWIYFASGNSEYNQKFTGRVTMTRDTSSSTAYMELSSLRSEDTAVYFCASLYDYDWYFDVWGQGTMVTVSSGGGGSGGGGSGGGGSDIVMTQTPLSLSVTPGEPASISCKSSQSLVHSNGNTYLHWYLQKPGQSPQLLIYKVSNRFSGVPDRFSGSGSGADFTLKISRVEAEDVGVYYCAETSHVPWTFGQGTKLEIKRSDPASGAGSGSGSAPCVWSNSSDPLLVSVTGNPSSSWPSPTEPSSKSGICRHLHVLIGTSVVIFLFILLLFFLLYRWCSNKKNAAVMDQEPAGDRTVNRQDSDEQDPQEVTYAQLDHCVFIQRKISRPSQRPKTPLTDTSVYTELPNAEPRSKVVSCPRAPQSGLEGVFSHG

SEQ ID NO: 5348 - protein, 449 aa, Artificial Sequence
  Description of Artificial Sequence: Synthetic Chimeric Antigen Receptor sequence
MALPVTALLLPLALLLHAARPGSGSGAQAAQVQLVQSGAEVKKPGASVKVSCKASGYSFPDYYINWVRQAPGQGLEWMGWIYFASGNSEYNQKFTGRVTMTRDTSSSTAYMELSSLRSEDTAVYFCASLYDYDWYFDVWGQGTMVTVSSGGGGSGGGGSGGGGSDIVMTQTPLSLSVTPGEPASISCKSSQSLVHSNGNTYLHWYLQKPGQSPQLLIYKVSNRFSGVPDRFSGSGSGADFTLKISRVEAEDVGVYYCAETSHVPWTFGQGTKLEIKRSDPASGAGSGSGSALQNEGTGTSRPVSQVTLAAVGGAGATALAFLSFCIIFIIVRSCRKKSARPAAGVGDTGMEDAKAIRGSASQGPLTESWKDGNPLKKPPPAVAPSSGEEGELHYATLSFHKVKPQDPQGQEATDSEYSEIKIHKRETAETQACLRNHNPSSKEVRGSHG

SEQ ID NO: 5349 - protein, 465 aa, Artificial Sequence
  Description of Artificial Sequence: Synthetic Chimeric Antigen Receptor sequence
MALPVTALLLPLALLLHAARPGSGSGAQAAQVQLVQSGAEVKKPGASVKVSCKASGYSFPDYYINWVRQAPGQGLEWMGWIYFASGNSEYNQKFTGRVTMTRDTSSSTAYMELSSLRSEDTAVYFCASLYDYDWYFDVWGQGTMVTVSSGGGGSGGGGSGGGGSDIVMTQTPLSLSVTPGEPASISCKSSQSLVHSNGNTYLHWYLQKPGQSPQLLIYKVSNRFSGVPDRFSGSGSGADFTLKISRVEAEDVGVYYCAETSHVPWTFGQGTKLEIKRSDPASGAGSGSGSAGTSRNRTGLTAAGITGLVLSILVLAAAAALLHYARARRKPGGLSATGTSSHSPSECQEPSSSRPSRIDPQEPTHSKPLAPMELEPMYSNANPGDSNPIYSQIWSIQHTKENSANCPMMHQEHEELTVLYSELKKTHPDDSAGEASSRGRAHEEDDEENYENVPRVLLASDHSHG

SEQ ID NO: 5350 - protein, 466 aa, Artificial Sequence
  Description of Artificial Sequence: Synthetic Chimeric Antigen Receptor sequence
MALPVTALLLPLALLLHAARPGSGSGAQAAQVQLVQSGAEVKKPGASVKVSCKASGYSFPDYYINWVRQAPGQGLEWMGWIYFASGNSEYNQKFTGRVTMTRDTSSSTAYMELSSLRSEDTAVYFCASLYDYDWYFDVWGQGTMVTVSSGGGGSGGGGSGGGGSDIVMTQTPLSLSVTPGEPASISCKSSQSLVHSNGNTYLHWYLQKPGQSPQLLIYKVSNRFSGVPDRFSGSGSGADFTLKISRVEAEDVGVYYCAETSHVPWTFGQGTKLEIKRSDPASGAGSGSGSAGPSGDPSLSPTGSTPTPGPEDQPLTPTGLDPQSGLGRHLGVVTGVSVAFVLLLFLLLFLLLRHRHQSKHRTSAHFYRPAGAAGPEPKDQGLQKRASPVADIQEEILNAAVKDTQPKDGVEMDARAAASEAPQDVTYAQLHSLTLRREATEPPPSQEREPPAEPSIYAPLAIHSHG

SEQ ID NO: 5351 - protein, 469 aa, Artificial Sequence
  Description of Artificial Sequence: Synthetic Chimeric Antigen Receptor sequence
MALPVTALLLPLALLLHAARPGSGSGAQAAQVQLVQSGAEVKKPGASVKVSCKASGYSFPDYYINWVRQAPGQGLEWMGWIYFASGNSEYNQKFTGRVTMTRDTSSSTAYMELSSLRSEDTAVYFCASLYDYDWYFDVWGQGTMVTVSSGGGGSGGGGSGGGGSDIVMTQTPLSLSVTPGEPASISCKSSQSLVHSNGNTYLHWYLQKPGQSPQLLIYKVSNRFSGVPDRFSGSGSGADFTLKISRVEAEDVGVYYCAETSHVPWTFGQGTKLEIKRSDPASGAGSGSGSAPYEWSDASDPLPVSVTGNPSSSWPSPTEPSFKTGIARHLHAVIRYSVAIILFTILPFFLLHRWCSKKKDAAVMNQEPAGHRTVNREDSDEQDPQEVTYAQLDHCIFTQRKITGPSQRSKRPSTDTSVCIELPNAEPRALSPAHEHHSQALMGSSRETTALSQTQLASSHVPAAGISHG

SEQ ID NO: 5352 - protein, 469 aa, Artificial Sequence
  Description of Artificial Sequence: Synthetic Chimeric Antigen Receptor sequence
MALPVTALLLPLALLLHAARPGSGSGAQAAQVQLVQSGAEVKKPGASVKVSCKASGYSFPDYYINWVRQAPGQGLEWMGWIYFASGNSEYNQKFTGRVTMTRDTSSSTAYMELSSLRSEDTAVYFCASLYDYDWYFDVWGQGTMVTVSSGGGGSGGGGSGGGGSDIVMTQTPLSLSVTPGEPASISCKSSQSLVHSNGNTYLHWYLQKPGQSPQLLIYKVSNRFSGVPDRFSGSGSGADFTLKISRVEAEDVGVYYCAETSHVPWTFGQGTKLEIKRSDPASGAGSGSGSAPYEWSDPSDPLLVSVTGNSSSSSSSPTEPSSKTGIRRHLHILIGTSVAIILFIILFFFLLHCCCSNKKNAAVMDQEPAGDRTVNREDSDDQDPQEVTYAQLDHCVFTQTKITSPSQRPKTPPTDTTMYMELPNAKPRSLSPAHKHHSQALRGSSRETTALSQNRVASSHVPAAGISHG

SEQ ID NO: 5353 - protein, 473 aa, Artificial Sequence
  Description of Artificial Sequence: Synthetic Chimeric Antigen Receptor sequence
MALPVTALLLPLALLLHAARPGSGSGAQAAQVQLVQSGAEVKKPGASVKVSCKASGYSFPDYYINWVRQAPGQGLEWMGWIYFASGNSEYNQKFTGRVTMTRDTSSSTAYMELSSLRSEDTAVYFCASLYDYDWYFDVWGQGTMVTVSSGGGGSGGGGSGGGGSDIVMTQTPLSLSVTPGEPASISCKSSQSLVHSNGNTYLHWYLQKPGQSPQLLIYKVSNRFSGVPDRFSGSGSGADFTLKISRVEAEDVGVYYCAETSHVPWTFGQGTKLEIKRSDPASGAGSGSGSAGPSMGSSPPPTGPISTPAGPEDQPLTPTGSDPQSGLGRHLGVVIGILVAVVLLLLLLLLLFLILRHRRQGKHWTSTQRKADFQHPAGAVGPEPTDRGLQWRSSPAADAQEENLYAAVKDTQPEDGVEMDTRAAASEAPQDVTYAQLHSLTLRRKATEPPPSQEREPPAEPSIYATLAIHSHG

SEQ ID NO: 5354 - protein, 500 aa, Artificial Sequence
  Description of Artificial Sequence: Synthetic Chimeric Antigen Receptor sequence
MALPVTALLLPLALLLHAARPGSGSGAQAAQVQLVQSGAEVKKPGASVKVSCKASGYSFPDYYINWVRQAPGQGLEWMGWIYFASGNSEYNQKFTGRVTMTRDTSSSTAYMELSSLRSEDTAVYFCASLYDYDWYFDVWGQGTMVTVSSGGGGSGGGGSGGGGSDIVMTQTPLSLSVTPGEPASISCKSSQSLVHSNGNTYLHWYLQKPGQSPQLLIYKVSNRFSGVPDRFSGSGSGADFTLKISRVEAEDVGVYYCAETSHVPWTFGQGTKLEIKRSDPASGAGSGSGSAKNESAASSTGKTPAAEETVTTILGMLASPYHYLIIIVVLVIILAVVVVGFSCRKKFISYLKGICSGGGGGPERVHRVLFRRRSCPSRVPGAEDNARNETLSNRYLQPTQVSEQEIQGQELAELTGVTVELPEEPQRLLEQAEAEGCQRRRLLVPVNDADSADISTLLDASATLEEGHAKETIQDQLVGSEKLFYEEDEAGSATSCLSHG

SEQ ID NO: 5355 - protein, 506 aa, Artificial Sequence
  Description of Artificial Sequence: Synthetic Chimeric Antigen Receptor sequence
MALPVTALLLPLALLLHAARPGSGSGAQAAQVQLVQSGAEVKKPGASVKVSCKASGYSFPDYYINWVRQAPGQGLEWMGWIYFASGNSEYNQKFTGRVTMTRDTSSSTAYMELSSLRSEDTAVYFCASLYDYDWYFDVWGQGTMVTVSSGGGGSGGGGSGGGGSDIVMTQTPLSLSVTPGEPASISCKSSQSLVHSNGNTYLHWYLQKPGQSPQLLIYKVSNRFSGVPDRFSGSGSGADFTLKISRVEAEDVGVYYCAETSHVPWTFGQGTKLEIKRSDPASGAGSGSGSAGHSGGSSLPPTGPPSTPGLGRYLEVLIGVSVAFVLLLFLLLFLLLRRQRHSKHRTSDQRKTDFQRPAGAAETEPKDRGLLRRSSPAADVQEENLYAAVKDTQSEDRVELDSQSPHDEDPQAVTYAPVKHSSPRREMASPPSSLSGEFLDTKDRQVEEDRQMDTEAAASEASQDVTYAQLHSLTLRRKATEPPPSQEGEPPAEPSIYATLAIHSHG

SEQ ID NO: 5356 - protein, 515 aa, Artificial Sequence
  Description of Artificial Sequence: Synthetic Chimeric Antigen Receptor sequence
MALPVTALLLPLALLLHAARPGSGSGAQAAQVQLVQSGAEVKKPGASVKVSCKASGYSFPDYYINWVRQAPGQGLEWMGWIYFASGNSEYNQKFTGRVTMTRDTSSSTAYMELSSLRSEDTAVYFCASLYDYDWYFDVWGQGTMVTVSSGGGGSGGGGSGGGGSDIVMTQTPLSLSVTPGEPASISCKSSQSLVHSNGNTYLHWYLQKPGQSPQLLIYKVSNRFSGVPDRFSGSGSGADFTLKISRVEAEDVGVYYCAETSHVPWTFGQGTKLEIKRSDPASGAGSGSGSAVYSLPQLLGPSCSWEAEGLHCRCSFRAWPAPSLCWRLEEKPLEGNSSQGSFKVNSSSPGPWANSSLILHGGLNSDLKVSCKAWNIYGSQSGSVLLLQGRSNLGTGVVPAALGGAGVMALLCICLCLIFFLIVKARRKQAAGRPEKMDDEDPIMGTITSGSRKKPWPDSPGDQASPPGDAPPLEEQKELHYASLSFSEMKSREPKDQEAPSTTEYSEIKTSKSHG

SEQ ID NO: 5357 - protein, 524 aa, Artificial Sequence
  Description of Artificial Sequence: Synthetic Chimeric Antigen Receptor sequence
MALPVTALLLPLALLLHAARPGSGSGAQAAQVQLVQSGAEVKKPGASVKVSCKASGYSFPDYYINWVRQAPGQGLEWMGWIYFASGNSEYNQKFTGRVTMTRDTSSSTAYMELSSLRSEDTAVYFCASLYDYDWYFDVWGQGTMVTVSSGGGGSGGGGSGGGGSDIVMTQTPLSLSVTPGEPASISCKSSQSLVHSNGNTYLHWYLQKPGQSPQLLIYKVSNRFSGVPDRFSGSGSGADFTLKISRVEAEDVGVYYCAETSHVPWTFGQGTKLEIKRSDPASGAGSGSGSAGSLEGPRPSPTRSVSTAAGPEDQPLMPTGSVPHSGLRRHWEVLIGVLVVSILLLSLLLFLLLQHWRQGKHRTLAQRQADFQRPPGAAEPEPKDGGLQRRSSPAADVQGENFCAAVKNTQPEDGVEMDTRQSPHDEDPQAVTYAKVKHSRPRREMASPPSPLSGEFLDTKDRQAEEDRQMDTEAAASEAPQDVTYAQLHSFTLRQKATEPPPSQEGASPAEPSVYATLAIHSHG

SEQ ID NO: 5358 - protein, 533 aa, Artificial Sequence
  Description of Artificial Sequence: Synthetic Chimeric Antigen Receptor sequence
MALPVTALLLPLALLLHAARPGSGSGAQAAQVQLVQSGAEVKKPGASVKVSCKASGYSFPDYYINWVRQAPGQGLEWMGWIYFASGNSEYNQKFTGRVTMTRDTSSSTAYMELSSLRSEDTAVYFCASLYDYDWYFDVWGQGTMVTVSSGGGGSGGGGSGGGGSDIVMTQTPLSLSVTPGEPASISCKSSQSLVHSNGNTYLHWYLQKPGQSPQLLIYKVSNRFSGVPDRFSGSGSGADFTLKISRVEAEDVGVYYCAETSHVPWTFGQGTKLEIKRSDPASGAGSGSGSAVHKESGNGHNIWVILVVTLVVPLLLVAVLIVCCCIGSGCGGDPKCMDRVCFWRLGLLRGPGAEDNAHNEILSNADSLSTFVSEQQMESQEPADLTGVTVQSPGEAQCLLGPAEAEGSQRRRLLVPANGADPTETLMLFFDKFANIVPFDSWDQLMRQLDLTKNEIDVVRAGTAGPGDALYAMLMKWVNKTGRNASIHTLLDALERMEERHAKEKIQDLLVDSGKFIYLEDGTGSAVSLESHG

SEQ ID NO: 5359 - protein, 540 aa, Artificial Sequence
  Description of Artificial Sequence: Synthetic Chimeric Antigen Receptor sequence
MALPVTALLLPLALLLHAARPGSGSGAQAAQVQLVQSGAEVKKPGASVKVSCKASGYSFPDYYINWVRQAPGQGLEWMGWIYFASGNSEYNQKFTGRVTMTRDTSSSTAYMELSSLRSEDTAVYFCASLYDYDWYFDVWGQGTMVTVSSGGGGSGGGGSGGGGSDIVMTQTPLSLSVTPGEPASISCKSSQSLVHSNGNTYLHWYLQKPGQSPQLLIYKVSNRFSGVPDRFSGSGSGADFTLKISRVEAEDVGVYYCAETSHVPWTFGQGTKLEIKRSDPASGAGSGSGSAVHYPPQLLGPSCSWEAEGLHCSCSSQASPAPSLRWWLGEELLEGNSSQGSFEVTPSSAGPWANSSLSLHGGLSSGLRLRCKAWNVHGAQSGSVFQLLPGKLEHGGGLGLGAALGAGVAALLAFCSCLVVFRVKICRKEARKRAAAEQDVPSTLGPISQGHQHECSAGSSQDHPPPGAATYTPGKGEEQELHYASLSFQGLRLWEPADQEAPSTTEYSEIKIHTGQPLRGPGFGLQLEREMSGMVPKSHG

SEQ ID NO: 5360 - protein, 550 aa, Artificial Sequence
  Description of Artificial Sequence: Synthetic Chimeric Antigen Receptor sequence
MALPVTALLLPLALLLHAARPGSGSGAQAAQVQLVQSGAEVKKPGASVKVSCKASGYSFPDYYINWVRQAPGQGLEWMGWIYFASGNSEYNQKFTGRVTMTRDTSSSTAYMELSSLRSEDTAVYFCASLYDYDWYFDVWGQGTMVTVSSGGGGSGGGGSGGGGSDIVMTQTPLSLSVTPGEPASISCKSSQSLVHSNGNTYLHWYLQKPGQSPQLLIYKVSNRFSGVPDRFSGSGSGADFTLKISRVEAEDVGVYYCAETSHVPWTFGQGTKLEIKRSDPASGAGSGSGSAVHYSPKLLGPSCSWEAEGLHCSCSSQASPAPSLRWWLGEELLEGNSSQDSFEVTPSSAGPWANSSLSLHGGLSSGLRLRCEAWNVHGAQSGSILQLPDKKGLISTAFSNGAFLGIGITALLFLCLALIIMKILPKRRTQTETPRPRFSRHSTILDYINVVPTAGPLAQKRNQKATPNSPRTPLPPGAPSPESKKNQKKQYQLPSFPEPKSSTQAPESQESQEELHYATLNFPGVRPRPEARMPKGTQADYAEVKFQSHG

SEQ ID NO: 5361 - protein, 556 aa, Artificial Sequence
  Description of Artificial Sequence: Synthetic Chimeric Antigen Receptor sequence
MALPVTALLLPLALLLHAARPGSGSGAQAAQVQLVQSGAEVKKPGASVKVSCKASGYSFPDYYINWVRQAPGQGLEWMGWIYFASGNSEYNQKFTGRVTMTRDTSSSTAYMELSSLRSEDTAVYFCASLYDYDWYFDVWGQGTMVTVSSGGGGSGGGGSGGGGSDIVMTQTPLSLSVTPGEPASISCKSSQSLVHSNGNTYLHWYLQKPGQSPQLLIYKVSNRFSGVPDRFSGSGSGADFTLKISRVEAEDVGVYYCAETSHVPWTFGQGTKLEIKRSDPASGAGSGSGSAVHKESGTKHSGEAPAVEETVTSSPGTPASPCSLSGIIIGVTVAAVVLIVAVFVCKSLLWKKVLPYLKGICSGGGGDPERVDRSSQRPGAEDNVLNEIVSILQPTQVPEQEMEVQEPAEPTGVNMLSPGESEHLLEPAEAERSQRRRLLVPANEGDPTETLRQCFDDFADLVPFDSWEPLMRKLGLMDNEIKVAKAEAAGHRDTLYTMLIKWVNKTGRDASVHTLLDALETLGERLAKQKIEDHLLSSGKFMYLEGNADSAMSSHG

SEQ ID NO: 5362 - protein, 741 aa, Artificial Sequence
  Description of Artificial Sequence: Synthetic Chimeric Antigen Receptor sequence
MSELIKENMHMKLYMEGTVDNHHFKCTSEGEGKPYEGTQTMRIKVVEGGPLPFAFDILATSFLYGSKTFINHTQGIPDFFKQSFPEGFTWERVTTYEDGGVLTATQDTSLQDGCLIYNVKIRGVNFTSNGPVMQKKTLGWEAFTETLYPADGGLEGRNDMALKLVGGSHLIANIKTTYRSKKPAKNLKMPGVYYVDYRLERIKEANNETYVEQHEVAVARYCDLPSKLGHKLNRAEGRGSLLTCGDVEENPGPMALPVTALLLPLALLLHAARPEVQLVESGGGLVQPGRSLRLSCAASGFTFNDYAMHWVRQAPGKGLEWVSTISWNSGSIGYADSVKGRFTISRDNAKKSLYLQMNSLRAEDTALYYCAKDIQYGNYYYGMDVWGQGTTVTVSSGGGGSGGGGSGGGGSEIVLTQSPATLSLSPGERATLSCRASQSVSSYLAWYQQKPGQAPRLLIYDASNRATGIPARFSGSGSGTDFTLTISSLEPEDFAVYYCQQRSNWPITFGQGTRLEIKTTTPAPRPPTPAPTIASQPLSLRPEACRPAAGGAVHTRGLDFACDIYIWAPLAGTCGVLLLSLVITLYCKRGRKKLLYIFKQPFMRPVQTTQEEDGCSCRFPEEEEGGCELRVKFSRSADAPAYQQGQNQLYNELNLGRREEYDVLDKRRGRDPEMGGKPRRKNPQEGLYNELQKDKMAEAYSEIGMKGERRRGKGHDGLYQGLSTATKDTYDALHMQALPPR

SEQ ID NO: 5363 - protein, 1352 aa, Artificial Sequence
  Description of Artificial Sequence: Synthetic Chimeric Antigen Receptor sequence
MSLPVTALLLPLALLLHAARPDIQMTQTTSSLSASLGDRVTISCRASQDISKYLNWYQQKPDGTVKLLIYHTSRLHSGVPSRFSGSGSGTDYSLTISNLEQEDIATYFCQQGNTLPYTFGGGTKLEITKAGGGGSGGGGSGGGGSGGGGSEVKLQESGPGLVAPSQSLSVTCTVSGVSLPDYGVSWIRQPPRKGLEWLGVIWGSETTYYNSALKSRLTIIKDNSKSQVFLKIVINSLQTDDTAIYYCAKHYYYGGSYAMDYWGQGTSVTVSSDPTTTPAPRPPTPAPTIASQPLSLRPEACRPAAGGAVHTRGLDFACDIFWVLVVVGGVLACYSLLVTVAFIIFWVRRVKFSRSADAPAYQQGQNQLYNELNLGRREEYDVLDKRRGRDPEMGGKPRRKNPQEGLYNELQKDKMAEAYSEIGMKGERRRGKGHDGLYQGLSTATKDTYDALHMQALPPRRAEGRGSLLTCGDVEENPGPMAVPTQVLGLLLLWLTDARCDIQMTQSPSSLSASVGDRVTITCRASEDIYFNLVWYQQKPGKAPKLLIYDTNRLADGVPSRFSGSGSGTQYTLTISSLQPEDFATYYCQHYKNYPLTFGQGTKLEIKRSGGGGSGGGGSGGGGSGGGGSRSEVQLVESGGGLVQPGGSLRLSCAASGFTLSNYGMHWIRQAPGKGLEWVSSISLNGGSTYYRDSVKGRFTISRDNAKSTLYLQMNSLRAEDTAVYYCAAQDAYTGGYFDYWGQGTLVTVSSMDPAEPKSPDKTHTCPPCPAPPVAGPSVFLFPPKPKDTLMIARTPEVTCVVVDVSHEDPEVKFNWYVDGVEVHNAKTKPREEQYNSTYRVVSVLTVLHQDWLNGKEYKCKVSNKALPAPIEKTISKAKGQPREPQVYTLPPSRDELTKNQVSLTCLVKGFYPSDIAVEWESNGQPENNYKTTPPVLDSDGSFFLYSKLTVDKSRWQQGNVFSCSVMHEALHNHYTQKSLSLSPGKKDPKAVFGCIFGALVIVTVGGFIFWRKKRKDAKNNEVSFSQIKPKKSKLIRVENFEAYFKKQQADSNCGFAEEYEDLKLVGISQPKYAAELAENRGKNRYNNVLPYDISRVKLSVQTHSTDDYINANYMPGYHSKKDFIATQGPLPNTLKDFWRMVWEKNVYAIIMLTKCVEQGRTKCEEYWPSKQAQDYGDITVAMTSEIVLPEWTIRDFTVKNIQTSESHPLRQFHFTSWPDHGVPDTTDLLINFRYLVRDYMKQSPPESPILVHCSAGVGRTGTFIAIDRLIYQIENENTVDVYGIVYDLRMHRPLMVQTEDQYVFLNQCVLDIVRSQKDSKVDLIYQNTTAMTIYENLAPVTTFGKTNGYIA

SEQ ID NO: 5364 - protein, 1341 aa, Artificial Sequence
  Description of Artificial Sequence: Synthetic Chimeric Antigen Receptor sequence
MSLPVTALLLPLALLLHAARPDIQMTQTTSSLSASLGDRVTISCRASQDISKYLNWYQQKPDGTVKLLIYHTSRLHSGVPSRFSGSGSGTDYSLTISNLEQEDIATYFCQQGNTLPYTEGGGTKLEITKAGGGGSGGGGSGGGGSGGGGSEVKLQESGPGLVAPSQSLSVTCTVSGVSLPDYGVSWIRQPPRKGLEWLGVIWGSETTYYNSALKSRLTIIKDNSKSQVFLKMNSLQTDDTAIYYCAKHYYYGGSYAMDYWGQGTSVTVSSDPTTTPAPRPPTPAPTIASQPLSLRPEACRPAAGGAVHTRGLDFACDIFWVLVVVGGVLACYSLLVTVAFIIEWVRRVKFSRSADAPAYQQGQNQLYNELNLGRREEYDVLDKRRGRDPEMGGKPRRKNPQEGLYNELQKDKMAEAYSEIGMKGERRRGKGHDGLYQGLSTATKDTYDALHMQALPPRRAEGRGSLLTCGDVEENPGPMETDTLLLWVLLLWVPGSTGQVTLKESGPGILKPSQTLSLTCSFSGESLSTSGMGVGWIRQPSGKGLEWLAHIWWDDDVYYNPSLKNQLTISKDASRDQVFLKITNLDTADTATYYCVRRRATGTGEDYWGQGTTLTVSSGGGGSGGGGSGGGGSNIVMTQSHKFMSTSVGDRVSIACKASQDVGTAVAWYQQKPGQSPKLLIYWTSTRHTGVPDRFTGSGSGTDFTLTITNVQSEDLADYFCHQYNSYNTFGSGTRLELKRSDPAEPKSPDKTHTCPPCPAPPVAGPSVFLEPPKPKDTLMIARTPEVTCVVVDVSHEDPEVKFNWYVDGVEVHNAKTKPREEQYNSTYRVVSVLTVLHQDWLNGKEYKCKVSNKALPAPIEKTISKAKGQPREPQVYTLPPSRDELTKNQVSLTCLVKGFYPSDIAVEWESNGQPENNYKTTPPVLDSDGSFFLYSKLTVDKSRWQQGNVESCSVMHEALHNHYTQKSLSLSPGKKDPKAVFGCIFGALVIVTVGGFIFWRKKRKDAKNNEVSFSQIKPKKSKLIRVENFEAYFKKQQADSNCGFAEEYEDLKLVGISQPKYAAELAENRGKNRYNNVLPYDISRVKLSVQTHSTDDYINANYMPGYHSKKDFIATQGPLPNTLKDFWRMVWEKNVYAIIMLTKCVEQGRTKCEEYWPSKQAQDYGDITVAMTSEIVLPEWTIRDFTVKNIQTSESHPLRQFHFTSWPDHGVPDTTDLLINFRYLVRDYMKQSPPESPILVHCSAGVGRTGTFIAIDRLIYQIENENTVDVYGIVYDLRMHRPLMVQTEDQYVFLNQCVLDIVRSQKDSKVDLIYQNTTAMTIYENLAPVTTFGKTNGYIA

SEQ ID NO: 5365 - protein, 1342 aa, Artificial Sequence [sequence omitted]

SEQ ID NO: 5366 - protein, 1341 aa, Artificial Sequence
  Description of Artificial Sequence: Synthetic Chimeric Antigen Receptor sequence
MSLPVTALLLPLALLLHAARPDIQMTQTTSSLSASLGDRVTISCRASQDISKYLNWYQQKPDGTVKLLIYHTSRLHSGVPSRFSGSGSGTDYSLTISNLEQEDIATYFCQQGNTLPYTEGGGTKLEITKAGGGGSGGGGSGGGGSGGGGSEVKLQESGPGLVAPSQSLSVTCTVSGVSLPDYGVSWIRQPPRKGLEWLGVIWGSETTYYNSALKSRLTIIKDNSKSQVFLKMNSLQTDDTAIYYCAKHYYYGGSYAMDYWGQGTSVTVSSDPTTTPAPRPPTPAPTIASQPLSLRPEACRPAAGGAVHTRGLDFACDIFWVLVVVGGVLACYSLLVTVAFIIFWVRRVKFSRSADAPAYQQGQNQLYNELNLGRREEYDVLDKRRGRDPEMGGKPRRKNPQEGLYNELQKDKMAEAYSEIGMKGERRRGKGHDGLYQGLSTATKDTYDALHMQALPPRRAEGRGSLLTCGDVEENPGPMETDTLLLWVLLLWVPGSTGQVQLQESGPGLVKPSQTLSITCTVSGFSLASYNIHWVRQPPGKGLEWLGVIWAGGSTNYNSALMSRLTISKDNSKNQVFLKMSSLTAADTAVYYCAKRSDDYSWFAYWGQGTLVTVSSGGGGSGGGGSGGGGSENQMTQSPSSLSASVGDRVTMTCRASSSVSSSYLHWYQQKSGKAPKVWIYSTSNLASGVPSRFSGSGSGTDYTLTISSLQPEDFATYYCQQYSGYPITEGQGTKVEIKRSDPAEPKSPDKTHTCPPCPAPPVAGPSVFLFPPKPKDTLMIARTPEVTCVVVDVSHEDPEVKFNWYVDGVEVHNAKTKPREEQYNSTYRVVSVLTVLHQDWLNGKEYKCKVSNKALPAPIEKTISKAKGQPREPQVYTLPPSRDELTKNQVSLTCLVKGFYPSDIAVEWESNGQPENNYKTTPPVLDSDGSFFLYSKLTVDKSRWQQGNVFSCSVMHEALHNHYTQKSLSLSPGKKDPKAVFGCIFGALVIVTVGGFIFWRKKRKDAKNNEVSFSQIKPKKSKLIRVENFEAYFKKQQADSNCGFAEEYEDLKLVGISQPKYAAELAENRGKNRYNNVLPYDISRVKLSVQTHSTDDYINANYMPGYHSKKDFIATQGPLPNTLKDFWRMVWEKNVYAIIMLTKCVEQGRTKCEEYWPSKQAQDYGDITVAMTSEIVLPEWTIRDFTVKNIQTSESHPLRQFHFTSWPDHGVPDTTDLLINFRYLVRDYMKQSPPESPILVHCSAGVGRTGTFIAIDRLIYQIENENTVDVYGIVYDLRMHRPLMVQTEDQYVFLNQCVLDIVRSQKDSKVDLIYQNTTAMTIYENLAPVTTEGKTNGYIA

SEQ ID NO: 5367 - protein, 1341 aa, Artificial Sequence [sequence omitted]

SEQ ID NO: 5368 - protein, 1113 aa, Artificial Sequence
  Description of Artificial Sequence: Synthetic Chimeric Antigen Receptor sequence
MSLPVTALLLPLALLLHAARPDIQMTQTTSSLSASLGDRVTISCRASQDISKYLNWYQQKPDGTVKLLIYHTSRLHSGVPSRFSGSGSGTDYSLTISNLEQEDIATYFCQQGNTLPYTFGGGTKLEITKAGGGGSGGGGSGGGGSGGGGSEVKLQESGPGLVAPSQSLSVTCTVSGVSLPDYGVSWIRQPPRKGLEWLGVIWGSETTYYNSALKSRLTIIKDNSKSQVFLKMNSLQTDDTAIYYCAKHYYYGGSYAMDYWGQGTSVTVSSDPTTTPAPRPPTPAPTIASQPLSLRPEACRPAAGGAVHTRGLDFACDIFWVLVVVGGVLACYLLVTVAFIIFWVRRVKFSRSADAPAYQQGQNQLYNELNLGRREEYDVLDKRRGRDPEMGGKPRRKNPQEGLYNELQKDKMAEAYSEIGMKGERRRGKGHDGLYQGLSTATKDTYDALHMQALPPRRAEGRGSLLTCGDVEENPGPMAVPTQVLGLLLLWLTDARCDIQMTQSPSSLSASVGDRVTITCRASEDIYFNLVWYQQKPGKAPKLLIYDTNRLADGVPSRFSGSGSGTQYTLTISSLQPEDFATYYCQHYKNYPLTFGQGTKLEIKRSGGGGSGGGGSGGGGSGGGGSRSEVQLVESGGGLVQPGGSLRLSCAASGFTLSNYGMHWIRQAPGKGLEWVSSISLNGGSTYYRDSVKGRFTISRDNAKSTLYLQMNSLRAEDTAVYYCAAQDAYTGGYFDYWGQGTLVTVSSMDPATTTKPVLRTPSPVHPTGTSQPQRPEDCRPRGSVKGTGLDFACDIYWAPLAGICVALLLSLIITLICYHRSRKRVCKSGGGSFWEEFESLQKQEVKNLHQRLEGQRPENKGKNRYKNILPFDHSRVILQGRDSNIPGSDYINANYIKNQLLGPDENAKTYIASQGCLEATVNDFWQMAWQENSRVIVMTTREVEKGRNKCVPYWPEVGMQRAYGPYSVTNCGEHDTTEYKLRTLQVSPLDNGDLIREIWHYQYLSWPDHGVPSEPGGVLSFLDQINQRQESLPHAGPIIVHCSAGIGRIGTIIVIDMLMENISTKGLDCDIDIQKTIQMVRAQRSGMVQTEAQYKFIYVAIAQFIETTKKKL

SEQ ID NO: 5369 - protein, 918 aa, Artificial Sequence
  Description of Artificial Sequence: Synthetic Chimeric Antigen Receptor sequence
MSLPVTALLLPLALLLHAARPDIQMTQTTSSLSASLGDRVTISCRASQDISKYLNWYQQKPDGTVKLLIYHTSRLHSGVPSRFSGSGSGTDYSLTISNLEQEDIATYFCQQGNTLPYTFGGGTKLEITKAGGGGSGGGGSGGGGSGGGGSEVKLQESGPGLVAPSQSLSVTCTVSGVSLPDYGVSWIRQPPRKGLEWLGVIWGSETTYYNSALKSRLTIIKDNSKSQVFLKMNSLQTDDTAIYYCAKHYYYGGSYAMDYWGQGTSVTVSSDPITTPAPRPPTPAPTIASQPLSLRPEACRPAAGGAVHTRGLDFACDIFWVLVVVGGVLACYSLLVTVAFIIFWVRRVKFSRSADAPAYQQGQNQLYNELNLGRREEYDVLDKRRGRDPEMGGKPRRKNPQEGLYNELQKDKMAEAYSEIGMKGERRRGKGHDGLYQGLSTATKDTYDALHMQALPPRRAEGRGSLLTCGDVEENPGPMAVPTQVLGLLLLWLTDARCDIQMTQSPSSLSASVGDRVTITCRASEDIYFNLVWYQQKPGKAPKLLIYDTNRLADGVPSRFSGSGSGTQYTLTISSLQPEDFATYYCQHYKNYPLTFGQGTKLEIKRSGGGGSGGGGSGGGGSGGGGSRSEVQLVESGGGLVQPGGSLRLSCAASGFTLSNYGMHWIRQAPGKGLEWVSSISLNGGSTYYRDSVKGRFTISRDNAKSTLYLQMNSLRAEDTAVYYCAAQDAYTGGYFDYWGQGTLVTVSSMDPATTTKPVLRTPSPVHPTGTSQPQRPEDCRPRGSVKGTGLDFACDILIGVSVVFLFCLLLLVLFCLHRQNQIKQGPPRSKDEEQKPQQRPDLAVDVLERTADKATVNGLPEKDRETDTSALAAGSSQEVTYAQLDHWALTQRTARAVSPQSTKPMAESITYAAVARH

SEQ ID NO: 5370 - protein, 1114 aa, Artificial Sequence
  Description of Artificial Sequence: Synthetic Chimeric Antigen Receptor sequence
MSLPVTALLLPLALLLHAARPDIQMTQTTSSLSASLGDRVTISCRASQDISKYLNWYQQKPDGTVKLLIYHTSRLHSGVPSRFSGSGSGTDYSLTISNLEQEDIATYFCQQGNTLPYTFGGGTKLEITKAGGGGSGGGGSGGGGSGGGGSEVKLQESGPGLVAPSQSLSVTCTVSGVSLPDYGVSWIRQPPRKGLEWLGVIWGSETTYYNSALKSRLTIIKDNSKSQVFLKMNSLQTDDTAIYYCAKHYYYGGSYAMDYWGQGTSVTVSSDPTTTPAPRPPTPAPTIASQPLSLRPEACRPAAGGAVHTRGLDFACDIFWVLVVVGGVLACYSLLVTVAFIIFWVRRVKFSRSADAPAYQQGQNQLYNELNLGRREEYDVLDKRRGRDPEMGGKPRRKNPQEGLYNELQKDKMAEAYSEIGMKGERRRGKGHDGLYQGLSTATKDTYDALHMQALPPRRAEGRGSLLTCGDVEENPGPMAVPTQVLGLLLLWLTDARCDIQMTQSPSSLSASVGDRVTITCRASEDIYFNLVWYQQKPGKAPKLLIYDTNRLADGVPSRFSGSGSGTQYTLTISSLQPEDFATYYCQHYKNYPLTFGQGTKLEIKRSGGGGSGGGGSGGGGSGGGGSRSEVQLVESGGGLVQPGGSLRLSCAASGFTLSNYGMHWIRQAPGKGLEWVSSISLNGGSTYYRDSVKGRFTISRDNAKSTLYLQMNSLRAEDTAVYYCAAQDAYTGGYFDYWGQGTLVTVSSMDPATTTKPVLRTPSPVHPTGTSQPQRPEDCRPRGSVKGTGLDFACDIYWAPLAGICVALLLSLIITLICYHRSRKRVCKSGGGSFWEEFESLQKQEVKNLHQRLEGQRPENKGKNRYKNILPFDHSRVILQGRDSNIPGSDYINANYIKNQLLGPDENAKTYIASQGCLEATVNDFWQMAWQENSRVIVMTTREVEKGRNKCVPYWPEVGMQRAYGPYSVTNCGEHDTTEYKLRTLQVSPLDNGDLIREIWHYQYLSWPDHGVPSEPGGVLSFLDQINQRQESLPHAGPIIVHCSAGIGRTGTIIVIDMLMENISTKGLDCDIDIQKTIQMVRAQRSGMVQTEAQYKFIYVAIAQFIETTKKKL

SEQ ID NO: 5371 - protein, 918 aa, Artificial Sequence
  Description of Artificial Sequence: Synthetic Chimeric Antigen Receptor sequence
MSLPVTALLLPLALLLHAARPDIQMTQTTSSLSASLGDRVTISCRASQDISKYLNWYQQKPDGTVKLLIYHTSRLHSGVPSRFSGSGSGTDYSLTISNLEQEDIATYFCQQGNTLPYTFGGGTKLEITKAGGGGSGGGGSGGGGSGGGGSEVKLQESGPGLVAPSQSLSVTCTVSGVSLPDYGVSWIRQPPRKGLEWLGVIWGSETTYYNSALKSRLTIIKDNSKSQVFLKMNSLQTDDTAIYYCAKHYYYGGSYAMDYWGQGTSVTVSSDPTTTPAPRPPTPAPTIASQPLSLRPEACRPAAGGAVHTRGLDFACDIFWVLVVVGGVLACYSLLVTVAFIIFWVRRVKFSRSADAPAYQQGQNQLYNELNLGRREEYDVLDKRRGRDPEMGGKPRRKNPQEGLYNELQKDKMAEAYSEIGMKGERRRGKGHDGLYQGLSTATKDTYDALHMQALPPRRAEGRGSLLTCGDVEENPGPMAVPTQVLGLLLLWLTDARCDIQMTQSPSSLSASVGDRVTITCRASEDIYFNLVWYQQKPGKAPKLLIYDTNRLADGVPSRFSGSGSGTQYTLTISSLQPEDFATYYCQHYKNYPLTFGQGTKLEIKRSGGGGSGGGGSGGGGSGGGGSRSEVQLVESGGGLVQPGGSLRLSCAASGFTLSNYGMHWIRQAPGKGLEWVSSISLNGGSTYYRDSVKGRFTISRDNAKSTLYLQMNSLRAEDTAVYYCAAQDAYTGGYFDYWGQGTLVTVSSMDPATTTKPVLRTPSPVHPTGTSQPQRPEDCRPRGSVKGTGLDFACDILIGVSVVFLFCLLLLVLFCLHRQNQIKQGPPRSKDEEQKPQQRPDLAVDVLERTADKATVNGLPEKDRETDTSALAAGSSQEVTYAQLDHWALTQRTARAVSPQSTKPMAESITYAAVARH

SEQ ID NO: 5372 - protein, 1362 aa, Artificial Sequence
  Description of Artificial Sequence: Synthetic Chimeric Antigen Receptor sequence
MSLPVTALLLPLALLLHAARPDIQMTQTTSSLSASLGDRVTISCRASQDISKYLNWYQQKPDGTVKLLIYHTSRLHSGVPSRFSGSGSGTDYSLTISNLEQEDIATYFCQQGNTLPYTFGGGTKLEITKAGGGGSGGGGSGGGGSGGGGSEVKLQESGPGLVAPSQSLSVTCTVSGVSLPDYGVSWIRQPPRKGLEWLGVIWGSETTYYNSALKSRLTIIKDNSKSQVFLKMNSLQTDDTAIYYCAKHYYYGGSYAMDYWGQGTSVTVSSDPTTTPAPRPPTPAPTIASQPLSLRPEACRPAAGGAVHTRGLDFACDIFWVLVVVGGVLACYSLLVTVAFIIFWVRRVKFSRSADAPAYQQGQNQLYNELNLGRREEYDVLDKRRGRDPEMGGKPRRKNPQEGLYNELQKDKMAEAYSEIGMKGERRRGKGHDGLYQGLSTATKDTYDALHMQALPPRRAEGRGSLLTCGDVEENPGPMAVPTQVLGLLLLWLTDARCDIQMTQSPSSLSASVGDRVTITCRASEDIYFNLVWYQQKPGKAPKLLIYDTNRLADGVPSRFSGSGSGTQYTLTISSLQPEDFATYYCQHYKNYPLTFGQGTKLEIKRSGGGGSGGGGSGGGGSGGGGSRSEVQLVESGGGLVQPGGSLRLSCAASGFTLSNYGMHWIRQAPGKGLEWVSSISLNGGSTYYRDSVKGRFTISRDNAKSTLYLQMNSLRAEDTAVYYCAAQDAYTGGYFDYWGQGTLVTVSSMDPTTTKPVLRTPSPVHPTGTSQPQRPEDCRPRGSVKGTGLDFACDILIGVSVVFLFCLLLLVLFCLHRQNQIKQGPPRSKDEEQKPQQRPDLAVDVLERTADKATVNGLPEKDRETDTSALAAGSSQEVTYAQLDHWALTQRTARAVSPQSTKPMAESITYAAVARHRAEGRGSLLTCGDVEENPGPWYHGHMSGGQAETLLQAKGEPWTFLVRESLSQPGDFVLSVLSDQPKAGPGSPLRVTHIKVMCEGGRYTVGGLETFDSLTDLVEHFKKTGIEEASGAFVYLRQPYSGGGGSFEAYFKKQQADSNCGFAEEYEDLKLVGISQPKYAAELAENRGKNRYNNVLPYDISRVKLSVQTHSTDDYINANYMPGYHSKKDFIATQGPLPNTLKDFWRMVWEKNVYAIIMLTKCVEQGRTKCEEYWPSKQAQDYGDITVAMTSEIVLPEWTIRDFTVKNIQTSESHPLRQFHFTSWPDHGVPDTTDLLINFRYLVRDYMKQSPPESPILVHCSAGVGRTGTFIAIDRLIYQIENENTVDVYGIVYDLRMHRPLMVQTEDQYVFLNQCVLDIVRSQKDSKVDLIYQNTTAMTIYENLAPVTTFGKTNGYIASGS

SEQ ID NO: 5373 - protein, 1129 aa, Artificial Sequence [sequence omitted]

SEQ ID NO: 5374 - protein, 487 aa, Artificial Sequence
  Description of Artificial Sequence: Synthetic Chimeric Antigen Receptor sequence
MGTSLLCWMALCLLGADHADAQVQLQQSGPELVKPGASVKISCKASGYAFSSSWMNWVKQRPGKGLEWIGRIYPGDEDTNYSGKFKDKATLTADKSSTTAYMQLSSLTSEDSAVYFCARSLLYGDYLDYWGQGTTLTVSSGGGGSGGGGSGGGGSQIVLTQSPAIMSASPGEKVTMTCSASSSVSYMHWYQQKSGTSPKRWIYDTSKLASGVPDRFSGSGSGTSYFLTINNMEAEDAATYYCQQWNINPLTFGAGTKLELKRSDPTTTPAPRPPTPAPTIASQPLSLRPEACRPAAGGAVHTRGLDFACDIYIWAPLAGTCGVLLLSLVITLYCRSKRSRLLHSDYMNMTPRRPGPTRKHYQPYAPPRDFAAYRSRVKFSRSADAPAYQQGQNQLYNELNLGRREEYDVLDKRRGRDPEMGGKPRRKNPQEGLYNELQKDKMAEAYSEIGMKGERRRGKGHDGLYQGLSTATKDTYDALHMQALPPR

SEQ ID NO: 5375 - protein, 483 aa, Artificial Sequence
  Description of Artificial Sequence: Synthetic Chimeric Antigen Receptor sequence
MGTSLLCWMALCLLGADHADAQVQLQQSGPELVKPGASVKISCKASGYAFSSSWMNWVKQRPGKGLEWIGRIYPGDEDTNYSGKFKDKATLTADKSSTTAYMQLSSLTSEDSAVYFCARSLLYGDYLDYWGQGTTLTVSSGGGGSGGGGSGGGGSQIVLTQSPAIMSASPGEKVTMTCSASSSVSYMHWYQQKSGTSPKRWIYDTSKLASGVPDRFSGSGSGTSYFLTINNMEAEDAATYYCQQWNINPLTFGAGTKLELKRSDPTTTPAPRPPTPAPTIASQPLSLRPEACRPAAGGAVHTRGLDFACDIYIWAPLAGTCGVLLLSLVITLYCRRDQRLPPDAHKPPGGGSFRTPIQEEQADAHSTLAKIRVKFSRSADAPAYQQGQNQLYNELNLGRREEYDVLDKRRGRDPEMGGKPRRKNPQEGLYNELQKDKMAEAYSEIGMKGERRRGKGHDGLYQGLSTATKDTYDALHMQALPPR

SEQ ID NO: 5376 - protein, 488 aa, Artificial Sequence
  Description of Artificial Sequence: Synthetic Chimeric Antigen Receptor sequence
MGTSLLCWMALCLLGADHADAQVQLQQSGPELVKPGASVKISCKASGYAFSSSWMNWVKQRPGKGLEWIGRIYPGDEDTNYSGKFKDKATLTADKSSTTAYMQLSSLTSEDSAVYFCARSLLYGDYLDYWGQGTTLTVSSGGGGSGGGGSGGGGSQIVLTQSPAIMSASPGEKVTMTCSASSSVSYMHWYQQKSGTSPKRWIYDTSKLASGVPDRFSGSGSGTSYFLTINNMEAEDAATYYCQQWNINPLTFGAGTKLELKRSDPTTTPAPRPPTPAPTIASQPLSLRPEACRPAAGGAVHTRGLDFACDIYIWAPLAGTCGVLLLSLVITLYCKRGRKKLLYIFKQPFMRPVQTTQEEDGCSCRFPEEEEGGCELRVKFSRSADAPAYQQGQNQLYNELNLGRREEYDVLDKRRGRDPEMGGKPRRKNPQEGLYNELQKDKMAEAYSEIGMKGERRRGKGHDGLYQGLSTATKDTYDALHMQALPPR

SEQ ID NO: 5377 - protein, 527 aa, Artificial Sequence
  Description of Artificial Sequence: Synthetic Chimeric Antigen Receptor sequence
MGTSLLCWMALCLLGADHADAQVQLQQSGPELVKPGASVKISCKASGYAFSSSWMNWVKQRPGKGLEWIGRIYPGDEDTNYSGKFKDKATLTADKSSTTAYMQLSSLTSEDSAVYFCARSLLYGDYLDYWGQGTTLTVSSGGGGSGGGGSGGGGSQIVLTQSPAIMSASPGEKVTMTCSASSSVSYMHWYQQKSGTSPKRWIYDTSKLASGVPDRFSGSGSGTSYFLTINNMEAEDAATYYCQQWNINPLTFGAGTKLELKRSDPTTTPAPRPPTPAPTIASQPLSLRPEACRPAAGGAVHTRGLDFACDIFWVLVVVGGVLACYSLLVTVAFIIFWVRSKRSRLLHSDYMNMTPRRPGPTRKHYQPYAPPRDFAAYRSRDQRLPPDAHKPPGGGSFRTPIQEEQADAHSTLAKIRVKFSRSADAPAYQQGQNQLYNELNLGRREEYDVLDKRRGRDPEMGGKPRRKNPQEGLYNELQKDKMAEAYSEIGMKGERRRGKGHDGLYQGLSTATKDTYDALHMQALPPR

SEQ ID NO: 5378 - protein, 431 aa, Artificial Sequence
  Description of Artificial Sequence: Synthetic Chimeric Antigen Receptor sequence
QVQLQQPGAELVRPGASVKLSCKASGYTFTSYWMNWVKQRPDQGLEWIGRIDPYDSETHYNQKFKDKAILTVDKSSSTAYMQLSSLTSEDSAVYYCARGNWDDYWGQGTTLTVSSGGGGSGGGGSGGGGSDVQITQSPSYLAASPGETITINCRASKSISKDLAWYQEKPGKTNKLLIYSGSTLQSGIPSRFSGSGSGTDFTLTISSLEPEDFAMYYCQQHNKYPYTFGGGTKLEIKGLAVSTISSFFPPGYQIYIWAPLAGTCGVLLLSLVITLYCKRGRKKLLYIFKQPFMRPVQTTQEEDGCSCRFPEEEEGGCELRVKFSRSADAPAYQQGQNQLYNELNLGRREEYDVLDKRRGRDPEMGGKPRRKNPQEGLYNELQKDKMAEAYSEIGMKGERRRGKGHDGLYQGLSTATKDTYDALHMQALPPR

SEQ ID NO: 5379 - protein, 434 aa, Artificial Sequence
  Description of Artificial Sequence: Synthetic Chimeric Antigen Receptor sequence
QVQLQQPGAELVRPGASVKLSCKASGYTFTSYWMNWVKQRPDQGLEWIGRIDPYDSETHYNQKFKDKAILTVDKSSSTAYMQLSSLTSEDSAVYYCARGNWDDYWGQGTTLTVSSGGGGSGGGGSGGGGSDVQITQSPSYLAASPGETITINCRASKSISKDLAWYQEKPGKTNKLLIYSGSTLQSGIPSRFSGSGSGTDFTLTISSLEPEDFAMYYCQQHNKYPYTFGGGTKLEIKGLAVSTISSFFPPGYQIISFFLALTSTALLFLLFFLTLRFSVVKRGRKKLLYIFKQPFMRPVQTTQEEDGCSCRFPEEEEGGCELRVKFSRSADAPAYQQGQNQLYNELNLGRREEYDVLDKRRGRDPEMGGKPRRKNPQEGLYNELQKDKMAEAYSEIGMKGERRRGKGHDGLYQGLSTATKDTYDALHMQALPPR

SEQ ID NO: 5380 - protein, 438 aa, Artificial Sequence
  Description of Artificial Sequence: Synthetic Chimeric Antigen Receptor sequence
QIQLVQSGPELKKPGETVKISCKASGYIFTNYGMNWVKQAPGKSFKWMGWINTYTGESTYSADFKGRFAFSLETSASTAYLHINDLKNEDTATYFCARSGGYDPMDYWGQGTSVTVSSGGGGSGGGGSGGGGSDIVLTQSPASLAVSLGQRATISCRASESVDNYGNTFMHWYQQKPGQPPKLLIYRASNLESGIPARFSGSGSRTDFTLTINPVEADDVATYYCQQSNEDPPTFGAGTKLELKGLAVSTISSFFPPGYQIYIWAPLAGTCGVLLLSLVITLYCKRGRKKLLYIFKQPFMRPVQTTQEEDGCSCRFPEEEEGGCELRVKFSRSADAPAYQQGQNQLYNELNLGRREEYDVLDKRRGRDPEMGGKPRRKNPQEGLYNELQKDKMAEAYSEIGMKGERRRGKGHDGLYQGLSTATKDTYDALHMQALPPR

SEQ ID NO: 5381 - protein, 441 aa, Artificial Sequence
  Description of Artificial Sequence: Synthetic Chimeric Antigen Receptor sequence
QIQLVQSGPELKKPGETVKISCKASGYIFTNYGMNWVKQAPGKSFKWMGWINTYTGESTYSADFKGRFAFSLETSASTAYLHINDLKNEDTATYFCARSGGYDPMDYWGQGTSVTVSSGGGGSGGGGSGGGGSDIVLTQSPASLAVSLGQRATISCRASESVDNYGNTFMHWYQQKPGQPPKLLIYRASNLESGIPARFSGSGSRTDFTLTINPVEADDVATYYCQQSNEDPPTFGAGTKLELKGLAVSTISSFFPPGYQIISFFLALTSTALLFLLFFLTLRFSVVKRGRKKLLYIFKQPFMRPVQTTQEEDGCSCRFPEEEEGGCELRVKFSRSADAPAYQQGQNQLYNELNLGRREEYDVLDKRRGRDPEMGGKPRRKNPQEGLYNELQKDKMAEAYSEIGMKGERRRGKGHDGLYQGLSTATKDTYDALHMQALPPR

SEQ ID NO: 5382 - protein, 452 aa, Artificial Sequence
  Description of Artificial Sequence: Synthetic Chimeric Antigen Receptor sequence
EVKLVESGGGLVQPGGSLSLSCAASGFTFTDYYMSWVRQPPGKALEWLALIRSKADGYTTEYSASVKGRFTLSRDDSQSILYLQMNALRPEDSATYYCARDAAYYSYYSPEGAMDYWGQGTSVTVSSGGGGSGGGGSGGGGSMADYKDIVMTQSHKFMSTSVGDRVNITCKASQNVDSAVAWYQQKPGQSPKALIYSASYRYSGVPDRFTGRGSGTDFTLTISSVQAEDLAVYYCQQYYSTPWTFGGGTKLEIKRGLAVSTISSFFPPGYQIISFFLALTSTALLFLLFFLTLRFSVVKRGRKKLLYIFKQPFMRPVQTTQEEDGCSCRFPEEEEGGCELRVKFSRSADAPAYQQGQNQLYNELNLGRREEYDVLDKRRGRDPEMGGKPRRKNPQEGLYNELQKDKMAEAYSEIGMKGERRRGKGHDGLYQGLSTATKDTYDALHMQALPPR

SEQ ID NO: 5383 - protein, 460 aa, Artificial Sequence
  Description of Artificial Sequence: Synthetic Chimeric Antigen Receptor sequence
QVQLQQPGAELVRPGASVKLSCKASGYTFTSYWMNWVKQRPDQGLEWIGRIDPYDSETHYNQKFKDKAILTVDKSSSTAYMQLSSLTSEDSAVYYCARGNWDDYWGQGTTLTVSSGGGGSGGGGSGGGGSDVQITQSPSYLAASPGETITINCRASKSISKDLAWYQEKPGKTNKLLIYSGSTLQSGIPSRFSGSGSGTDFTLTISSLEPEDFAMYYCQQHNKYPYTFGGGTKLEIKTTTPAPRPPTPAPTIASQPLSLRPEACRPAAGGAVHTRGLDFACDIYIWAPLAGTCGVLLLSLVITLYCKRGRKKLLYIFKQPFMRPVQTTQEEDGCSCRFPEEEEGGCELRVKFSRSADAPAYQQGQNQLYNELNLGRREEYDVLDKRRGRDPEMGGKPRRKNPQEGLYNELQKDKMAEAYSEIGMKGERRRGKGHDGLYQGLSTATKDTYDALHMQALPPR

SEQ ID NO: 5384 - protein, 463 aa, Artificial Sequence
  Description of Artificial Sequence: Synthetic Chimeric Antigen Receptor sequence
QVQLQQPGAELVRPGASVKLSCKASGYTFTSYWMNWVKQRPDQGLEWIGRIDPYDSETHYNQKFKDKAILTVDKSSSTAYMQLSSLTSEDSAVYYCARGNWDDYWGQGTTLTVSSGGGGSGGGGSGGGGSDVQITQSPSYLAASPGETITINCRASKSISKDLAWYQEKPGKTNKLLIYSGSTLQSGIPSRFSGSGSGTDFTLTISSLEPEDFAMYYCQQHNKYPYTFGGGTKLEIKTTTPAPRPPTPAPTIASQPLSLRPEACRPAAGGAVHTRGLDFACDIISFFLALTSTALLFLLFFLTLRFSVVKRGRKKLLYIFKQPFMRPVQTTQEEDGCSCRFPEEEEGGCELRVKFSRSADAPAYQQGQNQLYNELNLGRREEYDVLDKRRGRDPEMGGKPRRKNPQEGLYNELQKDKMAEAYSEIGMKGERRRGKGHDGLYQGLSTATKDTYDALHMQALPPR

SEQ ID NO: 5385 - protein, 467 aa, Artificial Sequence
  Description of Artificial Sequence: Synthetic Chimeric Antigen Receptor sequence
QIQLVQSGPELKKPGETVKISCKASGYIFTNYGMNWVKQAPGKSFKWMGWINTYTGESTYSADFKGRFAFSLETSASTAYLHINDLKNEDTATYFCARSGGYDPMDYWGQGTSVTVSSGGGGSGGGGSGGGGSDIVLTQSPASLAVSLGQRATISCRASESVDNYGNTFMHWYQQKPGQPPKLLIYRASNLESGIPARFSGSGSRTDFTLTINPVEADDVATYYCQQSNEDPPTFGAGTKLELKTTTPAPRPPTPAPTIASQPLSLRPEACRPAAGGAVHTRGLDFACDIYIWAPLAGTCGVLLLSLVITLYCKRGRKKLLYIFKQPFMRPVQTTQEEDGCSCRFPEEEEGGCELRVKFSRSADAPAYQQGQNQLYNELNLGRREEYDVLDKRRGRDPEMGGKPRRKNPQEGLYNELQKDKMAEAYSEIGMKGERRRGKGHDGLYQGLSTATKDTYDALHMQALPPR

SEQ ID NO: 5386 - protein, 470 aa, Artificial Sequence
  Description of Artificial Sequence: Synthetic Chimeric Antigen Receptor sequence
EVQLVESGGGLVQPGRSLRLSCTASGFTFTDYYMSVRQAPGKGLEWVGLIRSKADGYTTEYAASVKGRFTISRDDSQSIAYLQMNSLKTEDTAVYYCARDAAYYSYYSPEGAMDYGQGTLVTVSSGGGGSGGGGSGGGGSDIQMTQSPSSVSASVGDRVTITCKASQNVDSAVAYQQKPGKAPKALIYSASYRYSGVPDRFSGSGSGTDFTLTISSLQPEDLATYYCQQYYSTPWTFGQGTKVEIKRTTTPAPRPPTPAPTIASQPLSLRPEACRPAAGGAVHTRGLDFACDIYIWAPLAGTCGVLLLSLVITLYCKRGRKKLLYIFKQPFMRPVQTTQEEDGCSCRFPEEEEGGCELRVKFSRSADAPAYQQGQNQLYNELNLGRREEYDVLDKRRGRDPEMGGKPRRKNPQEGLYNELQKDKMAEAYSEIGMKGERRRGKGHDGLYQGLSTATKDTYDALHMQALPPR

SEQ ID NO: 5387 - protein, 470 aa, Artificial Sequence
  Description of Artificial Sequence: Synthetic Chimeric Antigen Receptor sequence
EVQLVESGGGLVQPGRSLRLSCTASGFTFTDYYMSVRQAPGKGLEWVGLIRSKADGYTTEYSASVKGRFTISRDDSKSILYLQMNSLKTEDTAVYYCARDAAYYSYYSPEGAMDYGQGTLVTVSSGGGGSGGGGSGGGGSDIQMTQSPSSVSASVGDRVTITCRASQNVDSAVAYQQKPGKAPKALIYSASYRYSGVPSRFSGSGSGTDFTLTISSLQPEDFATYYCQQYYSTPWTFGQGTKVEIKRTTTPAPRPPTPAPTIASQPLSLRPEACRPAAGGAVHTRGLDFACDIYIWAPLAGTCGVLLLSLVITLYCKRGRKKLLYIFKQPFMRPVQTTQEEDGCSCRFPEEEEGGCELRVKFSRSADAPAYQQGQNQLYNELNLGRREEYDVLDKRRGRDPEMGGKPRRKNPQEGLYNELQKDKMAEAYSEIGMKGERRRGKGHDGLYQGLSTATKDTYDALHMQALPPR

SEQ ID NO: 5388 - protein, 470 aa, Artificial Sequence
  Description of Artificial Sequence: Synthetic Chimeric Antigen Receptor sequence
EVQLVESGGGLVQPGRSLRLSCTASGFTFTDYYMSWVRQAPGKGLEWVGLIRSKADGYTTEYSASVKGRFTISRDDSQSIAYLQMNSLKTEDTAVYYCARDAAYYSYYSPEGAMDYGQGTLVTVSSGGGGSGGGGSGGGGSDIQMTQSPSSVSASVGDRVTITCRASQVDSAVAWYQQKPGKAPKALIYSASYRYSGVPSRFSGSGSGTDFTLTISSLQPEDLATYYCQQYYSTPTFGQGTKVEIKRTTTPAPRPPTPAPTIASQPLSLRPEACRPAAGGAVHTRGLDFACDIYIWAPLAGTCGVLLLSLVITLYCKRGRKKLLYIFKQPFMRPVQTTQEEDGCSCRFPEEEEGGCELRVKFSRSADAPAYQQGQNQLYNELNLGRREEYDVLDKRRGRDPEMGGKPRRKNPQEGLYNELQKDKMAEAYSEIGMKGERRRGKGHDGLYQGLSTATKDTYDALHMQALPPR

SEQ ID NO: 5389 - protein, 470 aa, Artificial Sequence
  Description of Artificial Sequence: Synthetic Chimeric Antigen Receptor sequence
MALPVTALLLPLALLLHAARPEVKLVESGGGLVQPGGSLSLSCAASGFTFTDYYMSWVRQPPGKALEWLALIRSKADGYTTEYSASVKGRFTLSRDDSQSILYLQMNALRPEDSATYYCARDAAYYSYYSPEGAMDYWGQGTSVTVSSGGGGSGGGGSGGGGSMADYKDIVMTQSHKFMSTSVGDRVNITCKASQNVDSAVAWYQQKPGQSPKALIYSASYRYSGVPDRFTGRGSGTDFTLTISSVQAEDLAVYYCQQYYSTPWTFGGGTKLEIKRGLAVSTISSFFPPGYQIYIWAPLAGTCGVLLLSLVITLYCKRGRKKLLYIFKQPFMRPVQTTQEEDGCSCRFPEEEEGGCELRVKFSRSADAPAYQQGQNQLYNELNLGRREEYDVLDKRRGRDPEMGGKPRRKNPQEGLYNELQKDKMAEAYSEIGMKGERRRGKGHDGLYQGLSTATKDTYDALHMQALPPR

SEQ ID NO: 5390 - protein, 470 aa, Artificial Sequence
  Description of Artificial Sequence: Synthetic Chimeric Antigen Receptor sequence
MALPVTALLLPLALLLHAARPEVKLVESGGGLVQPGRSLRLSCTASGFTFTDYYMSWVRQAPGKGLEWVGLIRSKADGYTTEYSASVKGRFTISRDDSKSILYLQMNSLKTEDTAVYYCARDAAYYSYYSPEGAMDYWGQGTLVTVSSGGGGSGGGGSGGGGSMADYKDIQMTQSPSSVSASVGDRVTITCRASQNVDSAVAWYQQKPGKAPKALIYSASYRYSGVPSRFSGRGSGTDFTLTISSLQPEDFATYYCQQYYSTPWTFGQGTKVEIKRGLAVSTISSFFPPGYQIYIWAPLAGTCGVLLLSLVITLYCKRGRKKLLYIFKQPFMRPVQTTQEEDGCSCRFPEEEEGGCELRVKFSRSADAPAYQQGQNQLYNELNLGRREEYDVLDKRRGRDPEMGGKPRRKNPQEGLYNELQKDKMAEAYSEIGMKGERRRGKGHDGLYQGLSTATKDTYDALHMQALPPR

SEQ ID NO: 5391 - protein, 470 aa, Artificial Sequence
  Description of Artificial Sequence: Synthetic Chimeric Antigen Receptor sequence
MALPVTALLLPLALLLHAARPEVKLVESGGGLVQPGRSLRLSCTASGFTFTDYYMSWVRQAPGKGLEWVGLIRSKADGYTTEYSASVKGRFTISRDDSKSILYLQMNSLKTEDTAVYYCARDAAYYSYYSPEGAMDYWGQGTLVTVSSGGGGSGGGGSGGGGSMADYKDIQMTQSPSSVSASVGDRVTITCRASQNVDSAVAWYQQKPGKAPKALIYSASYRYSGVPSRFSGSGSGTDFTLTISSLQPEDFATYYCQQYYSTPWTFGQGTKVEIKRGLAVSTISSFFPPGYQIYIWAPLAGTCGVLLLSLVITLYCKRGRKKLLYIFKQPFMRPVQTTQEEDGCSCRFPEEEEGGCELRVKFSRSADAPAYQQGQNQLYNELNLGRREEYDVLDKRRGRDPEMGGKPRRKNPQEGLYNELQKDKMAEAYSEIGMKGERRRGKGHDGLYQGLSTATKDTYDALHMQALPPR

SEQ ID NO: 5392 - protein, 470 aa, Artificial Sequence
  Description of Artificial Sequence: Synthetic Chimeric Antigen Receptor sequence
MALPVTALLLPLALLLHAARPEVKLVESGGGLVQPGRSLRLSCTASGFTFTDYYMSWVRQAPGKGLEWVGLIRSKADGYTTEYSASVKGRFTISRDDSKSILYLQMNSLKTEDTAVYYCARDAAYYSYYSPEGAMDYWGQGTLVTVSSGGGGSGGGGSGGGGSMADYKDIQMTQSPSSVSASVGDRVTITCRASQNVDSAVAWYQQKPGKAPKLLIYSASYGQSGVPSRFSGSGSGTDFTLTISSLQPEDFATYYCQQYYSTPWTFGQGTKVEIKRGLAVSTISSFFPPGYQIYIWAPLAGTCGVLLLSLVITLYCKRGRKKLLYIFKQPFMRPVQTTQEEDGCSCRFPEEEEGGCELRVKFSRSADAPAYQQGQNQLYNELNLGRREEYDVLDKRRGRDPEMGGKPRRKNPQEGLYNELQKDKMAEAYSEIGMKGERRRGKGHDGLYQGLSTATKDTYDALHMQALPPR

SEQ ID NO: 5393 - protein, 470 aa, Artificial Sequence
  Description of Artificial Sequence: Synthetic Chimeric Antigen Receptor sequence
MALPVTALLLPLALLLHAARPEVKLVESGGGLVQPGRSLRLSCTASGFTFTDYYMSWVRQAPGKGLEWVGLIRSKADGYTTEYSASVKGRFTISRDDSKSILYLQMNSLKTEDTAVYYCARDAAYYSYYSPEGAMDYWGQGTLVTVSSGGGGSGGGGSGGGGSMADYKDIQMTQSPSSVSASVGDRVTITCRASQNVDSAVAWYQQKPGKAPKLLIYSASYRQSGVPSRFSGSGSGTDFTLTISSLQPEDFATYYCQQYYSTPWTFGQGTKVEIKRGLAVSTISSFFPPGYQIYIWAPLAGTCGVLLLSLVITLYCKRGRKKLLYIFKQPFMRPVQTTQEEDGCSCRFPEEEEGGCELRVKFSRSADAPAYQQGQNQLYNELNLGRREEYDVLDKRRGRDPEMGGKPRRKNPQEGLYNELQKDKMAEAYSEIGMKGERRRGKGHDGLYQGLSTATKDTYDALHMQALPPR

SEQ ID NO: 5394 - protein, 470 aa, Artificial Sequence
  Description of Artificial Sequence: Synthetic Chimeric Antigen Receptor sequence
MALPVTALLLPLALLLHAARPEVKLVESGGGLVQPGRSLRLSCTASGFTFTDYYMSWVRQAPGKGLEWVGLIRSKADGYTTEYSASVKGRFTISRDDSKSILYLQMNSLKTEDTAVYYCARDAAYYSYYSPEGAMDYWGQGTLVTVSSGGGGSGGGGSGGGGSMADYKDIQMTQSPSSVSASVGDRVTITCRASQNVDSAVAWYQQKPGKAPKLLIYSASYRYSGVPSRFSGSGSGTDFTLTISSLQPEDFATYYCQQYYSTPWTFGQGTKVEIKRGLAVSTISSFFPPGYQIYIWAPLAGTCGVLLLSLVITLYCKRGRKKLLYIFKQPFMRPVQTTQEEDGCSCRFPEEEEGGCELRVKFSRSADAPAYQQGQNQLYNELNLGRREEYDVLDKRRGRDPEMGGKPRRKNPQEGLYNELQKDKMAEAYSEIGMKGERRRGKGHDGLYQGLSTATKDTYDALHMQALPPR

SEQ ID NO: 5395 - protein, 470 aa, Artificial Sequence
  Description of Artificial Sequence: Synthetic Chimeric Antigen Receptor sequence
MALPVTALLLPLALLLHAARPEVKLVESGGGLVQPGRSLRLSCTASGFTFTDYYMSWVRQAPGKGLEWVGLIRSKADGYTTEYSASVKGRFTISRDDSKSILYLQMNSLKTEDTAVYYCARDAAYYSYYSPEGAMDYWGQGTLVTVSSGGGGSGGGGSGGGGSMADYKDIVMTQSPSSVSASVGDRVTITCRASQNVDSAVAWYQQKPGKAPKALIYSASYRYSGVPSRFSGRGSGTDFTLTISSLQPEDFATYYCQQYYSTPWTFGQGTKVEIKRGLAVSTISSFFPPGYQIYIWAPLAGTCGVLLLSLVITLYCKRGRKKLLYIFKQPFMRPVQTTQEEDGCSCRFPEEEEGGCELRVKFSRSADAPAYQQGQNQLYNELNLGRREEYDVLDKRRGRDPEMGGKPRRKNPQEGLYNELQKDKMAEAYSEIGMKGERRRGKGHDGLYQGLSTATKDTYDALHMQALPPR

SEQ ID NO: 5396 - protein, 470 aa, Artificial Sequence
  Description of Artificial Sequence: Synthetic Chimeric Antigen Receptor sequence
MALPVTALLLPLALLLHAARPEVQLVESGGGLVQPGRSLRLSCTASGFTFTDYYMSWVRQAPGKGLEWVGFIRSKADGYTTEYAASVKGRFTISRDDSKSIAYLQMNSLKTEDTAVYYCARDAAYYSYYSPEGAMDYWGQGTLVTVSSGGGGSGGGGSGGGGSMADYKDIQMTQSPSSVSASVGDRVTITCRASQNVDSAVAWYQQKPGKAPKALIYSASYRYSGVPSRFSGRGSGTDFTLTISSLQPEDFATYYCQQYYSTPWTFGQGTKVEIKRGLAVSTISSFFPPGYQIYIWAPLAGTCGVLLLSLVITLYCKRGRKKLLYIFKQPFMRPVQTTQEEDGCSCRFPEEEEGGCELRVKFSRSADAPAYQQGQNQLYNELNLGRREEYDVLDKRRGRDPEMGGKPRRKNPQEGLYNELQKDKMAEAYSEIGMKGERRRGKGHDGLYQGLSTATKDTYDALHMQALPPR

SEQ ID NO: 5397 - protein, 470 aa, Artificial Sequence
  Description of Artificial Sequence: Synthetic Chimeric Antigen Receptor sequence
MALPVTALLLPLALLLHAARPEVQLVESGGGLVQPGRSLRLSCTASGFTFTDYYMSWVRQAPGKGLEWVGFIRSKADGYTTEYAASVKGRFTISRDDSKSIAYLQMNSLKTEDTAVYYCARDAAYYSYYSPEGAMDYWGQGTLVTVSSGGGGSGGGGSGGGGSMADYKDIQMTQSPSSVSASVGDRVTITCRASQNVDSAVAWYQQKPGKAPKALIYSASYRYSGVPSRFSGSGSGTDFTLTISSLQPEDFATYYCQQYYSTPWTFGQGTKVEIKRGLAVSTISSFFPPGYQIYIWAPLAGTCGVLLLSLVITLYCKRGRKKLLYIFKQPFMRPVQTTQEEDGCSCRFPEEEEGGCELRVKFSRSADAPAYQQGQNQLYNELNLGRREEYDVLDKRRGRDPEMGGKPRRKNPQEGLYNELQKDKMAEAYSEIGMKGERRRGKGHDGLYQGLSTATKDTYDALHMQALPPR

SEQ ID NO: 5398 - protein, 470 aa, Artificial Sequence
  Description of Artificial Sequence: Synthetic Chimeric Antigen Receptor sequence
MALPVTALLLPLALLLHAARPEVQLVESGGGLVQPGRSLRLSCTASGFTFTDYYMSWVRQAPGKGLEWVGFIRSKADGYTTEYAASVKGRFTISRDDSKSIAYLQMNSLKTEDTAVYYCARDAAYYSYYSPEGAMDYWGQGTLVTVSSGGGGSGGGGSGGGGSMADYKDIQMTQSPSSVSASVGDRVTITCRASQNVDSAVAWYQQKPGKAPKLLIYSASYGQSGVPSRFSGSGSGTDFTLTISSLQPEDFATYYCQQYYSTPWTFGQGTKVEIKRGLAVSTISSFFPPGYQIYIWAPLAGTCGVLLLSLVITLYCKRGRKKLLYIFKQPFMRPVQTTQEEDGCSCRFPEEEEGGCELRVKFSRSADAPAYQQGQNQLYNELNLGRREEYDVLDKRRGRDPEMGGKPRRKNPQEGLYNELQKDKMAEAYSEIGMKGERRRGKGHDGLYQGLSTATKDTYDALHMQALPPR

SEQ ID NO: 5399 - protein, 470 aa, Artificial Sequence
  Description of Artificial Sequence: Synthetic Chimeric Antigen Receptor sequence
MALPVTALLLPLALLLHAARPEVQLVESGGGLVQPGRSLRLSCTASGFTFTDYYMSWVRQAPGKGLEWVGFIRSKADGYTTEYAASVKGRFTISRDDSKSIAYLQMNSLKTEDTAVYYCARDAAYYSYYSPEGAMDYWGQGTLVTVSSGGGGSGGGGSGGGGSMADYKDIQMTQSPSSVSASVGDRVTITCRASQNVDSAVAWYQQKPGKAPKLLIYSASYRQSGVPSRFSGSGSGTDFTLTISSLQPEDFATYYCQQYYSTPWTFGQGTKVEIKRGLAVSTISSFFPPGYQIYIWAPLAGTCGVLLLSLVITLYCKRGRKKLLYIFKQPFMRPVQTTQEEDGCSCRFPEEEEGGCELRVKFSRSADAPAYQQGQNQLYNELNLGRREEYDVLDKRRGRDPEMGGKPRRKNPQEGLYNELQKDKMAEAYSEIGMKGERRRGKGHDGLYQGLSTATKDTYDALHMQALPPR

SEQ ID NO: 5400 - protein, 470 aa, Artificial Sequence
  Description of Artificial Sequence: Synthetic Chimeric Antigen Receptor sequence
MALPVTALLLPLALLLHAARPEVQLVESGGGLVQPGRSLRLSCTASGFTFTDYYMSWVRQAPGKGLEWVGFIRSKADGYTTEYAASVKGRFTISRDDSKSIAYLQMNSLKTEDTAVYYCARDAAYYSYYSPEGAMDYWGQGTLVTVSSGGGGSGGGGSGGGGSMADYKDIQMTQSPSSVSASVGDRVTITCRASQNVDSAVAWYQQKPGKAPKLLIYSASYRYSGVPSRFSGSGSGTDFTLTISSLQPEDFATYYCQQYYSTPWTFGQGTKVEIKRGLAVSTISSFFPPGYQIYIWAPLAGTCGVLLLSLVITLYCKRGRKKLLYIFKQPFMRPVQTTQEEDGCSCRFPEEEEGGCELRVKFSRSADAPAYQQGQNQLYNELNLGRREEYDVLDKRRGRDPEMGGKPRRKNPQEGLYNELQKDKMAEAYSEIGMKGERRRGKGHDGLYQGLSTATKDTYDALHMQALPPR

SEQ ID NO: 5401 - protein, 470 aa, Artificial Sequence
  Description of Artificial Sequence: Synthetic Chimeric Antigen Receptor sequence
MALPVTALLLPLALLLHAARPEVQLVESGGGLVQPGRSLRLSCTASGFTFTDYYMSWVRQAPGKGLEWVGFIRSKADGYTTEYAASVKGRFTISRDDSKSIAYLQMNSLKTEDTAVYYCARDAAYYSYYSPEGAMDYWGQGTLVTVSSGGGGSGGGGSGGGGSMADYKDIVMTQSPSSVSASVGDRVTITCRASQNVDSAVAWYQQKPGKAPKALIYSASYRYSGVPSRFSGRGSGTDFTLTISSLQPEDFATYYCQQYYSTPWTFGQGTKVEIKRGLAVSTISSFFPPGYQIYIWAPLAGTCGVLLLSLVITLYCKRGRKKLLYIFKQPFMRPVQTTQEEDGCSCRFPEEEEGGCELRVKFSRSADAPAYQQGQNQLYNELNLGRREEYDVLDKRRGRDPEMGGKPRRKNPQEGLYNELQKDKMAEAYSEIGMKGERRRGKGHDGLYQGLSTATKDTYDALHMQALPPR

SEQ ID NO: 5402 - protein, 470 aa, Artificial Sequence
  Description of Artificial Sequence: Synthetic Chimeric Antigen Receptor sequence
MALPVTALLLPLALLLHAARPEVQLVESGGGLVQPGRSLRLSCTASGFTFTDYYMSWVRQAPGKGLEWVGFIRSKADGYTTEYAASVKGRFTISRDDSKSIAYLQMNSLKTEDTAVYYCTRDAAYYSYYSPEGAMDYWGQGTLVTVSSGGGGSGGGGSGGGGSMADYKDIQMTQSPSSVSASVGDRVTITCRASQNVDSAVAWYQQKPGKAPKALIYSASYRYSGVPSRFSGRGSGTDFTLTISSLQPEDFATYYCQQYYSTPWTFGQGTKVEIKRGLAVSTISSFFPPGYQIYIWAPLAGTCGVLLLSLVITLYCKRGRKKLLYIFKQPFMRPVQTTQEEDGCSCRFPEEEEGGCELRVKFSRSADAPAYQQGQNQLYNELNLGRREEYDVLDKRRGRDPEMGGKPRRKNPQEGLYNELQKDKMAEAYSEIGMKGERRRGKGHDGLYQGLSTATKDTYDALHMQALPPR

SEQ ID NO: 5403 - protein, 470 aa, Artificial Sequence
  Description of Artificial Sequence: Synthetic Chimeric Antigen Receptor sequence
MALPVTALLLPLALLLHAARPEVQLVESGGGLVQPGRSLRLSCTASGFTFTDYYMSWVRQAPGKGLEWVGFIRSKADGYTTEYAASVKGRFTISRDDSKSIAYLQMNSLKTEDTAVYYCTRDAAYYSYYSPEGAMDYWGQGTLVTVSSGGGGSGGGGSGGGGSMADYKDIQMTQSPSSVSASVGDRVTITCRASQNVDSAVAWYQQKPGKAPKALIYSASYRYSGVPSRFSGSGSGTDFTLTISSLQPEDFATYYCQQYYSTPWTFGQGTKVEIKRGLAVSTISSFFPPGYQIYIWAPLAGTCGVLLLSLVITLYCKRGRKKLLYIFKQPFMRPVQTTQEEDGCSCRFPEEEEGGCELRVKFSRSADAPAYQQGQNQLYNELNLGRREEYDVLDKRRGRDPEMGGKPRRKNPQEGLYNELQKDKMAEAYSEIGMKGERRRGKGHDGLYQGLSTATKDTYDALHMQALPPR

SEQ ID NO: 5404 - protein, 470 aa, Artificial Sequence
  Description of Artificial Sequence: Synthetic Chimeric Antigen Receptor sequence
MALPVTALLLPLALLLHAARPEVQLVESGGGLVQPGRSLRLSCTASGFTFTDYYMSWVRQAPGKGLEWVGFIRSKADGYTTEYAASVKGRFTISRDDSKSIAYLQMNSLKTEDTAVYYCTRDAAYYSYYSPEGAMDYWGQGTLVTVSSGGGGSGGGGSGGGGSMADYKDIQMTQSPSSVSASVGDRVTITCRASQNVDSAVAWYQQKPGKAPKLLIYSASYGQSGVPSRFSGSGSGTDFTLTISSLQPEDFATYYCQQYYSTPWTFGQGTKVEIKRGLAVSTISSFFPPGYQIYIWAPLAGTCGVLLLSLVITLYCKRGRKKLLYIFKQPFMRPVQTTQEEDGCSCRFPEEEEGGCELRVKFSRSADAPAYQQGQNQLYNELNLGRREEYDVLDKRRGRDPEMGGKPRRKNPQEGLYNELQKDKMAEAYSEIGMKGERRRGKGHDGLYQGLSTATKDTYDALHMQALPPR

SEQ ID NO: 5405 - protein, 470 aa, Artificial Sequence
  Description of Artificial Sequence: Synthetic Chimeric Antigen Receptor sequence
MALPVTALLLPLALLLHAARPEVQLVESGGGLVQPGRSLRLSCTASGFTFTDYYMSWVRQAPGKGLEWVGFIRSKADGYTTEYAASVKGRFTISRDDSKSIAYLQMNSLKTEDTAVYYCTRDAAYYSYYSPEGAMDYWGQGTLVTVSSGGGGSGGGGSGGGGSMADYKDIQMTQSPSSVSASVGDRVTITCRASQNVDSAVAWYQQKPGKAPKLLIYSASYRQSGVPSRFSGSGSGTDFTLTISSLQPEDFATYYCQQYYSTPWTFGQGTKVEIKRGLAVSTISSFFPPGYQIYIWAPLAGTCGVLLLSLVITLYCKRGRKKLLYIFKQPFMRPVQTTQEEDGCSCRFPEEEEGGCELRVKFSRSADAPAYQQGQNQLYNELNLGRREEYDVLDKRRGRDPEMGGKPRRKNPQEGLYNELQKDKMAEAYSEIGMKGERRRGKGHDGLYQGLSTATKDTYDALHMQALPPR

SEQ ID NO: 5406 - protein, 470 aa, Artificial Sequence
  Description of Artificial Sequence: Synthetic Chimeric Antigen Receptor sequence
MALPVTALLLPLALLLHAARPEVQLVESGGGLVQPGRSLRLSCTASGFTFTDYYMSWVRQAPGKGLEWVGFIRSKADGYTTEYAASVKGRFTISRDDSKSIAYLQMNSLKTEDTAVYYCTRDAAYYSYYSPEGAMDYWGQGTLVTVSSGGGGSGGGGSGGGGSMADYKDIQMTQSPSSVSASVGDRVTITCRASQNVDSAVAWYQQKPGKAPKLLIYSASYRYSGVPSRFSGSGSGTDFTLTISSLQPEDFATYYCQQYYSTPWTFGQGTKVEIKRGLAVSTISSFFPPGYQIYIWAPLAGTCGVLLLSLVITLYCKRGRKKLLYIFKQPFMRPVQTTQEEDGCSCRFPEEEEGGCELRVKFSRSADAPAYQQGQNQLYNELNLGRREEYDVLDKRRGRDPEMGGKPRRKNPQEGLYNELQKDKMAEAYSEIGMKGERRRGKGHDGLYQGLSTATKDTYDALHMQALPPR

SEQ ID NO: 5407 - protein, 470 aa, Artificial Sequence
  Description of Artificial Sequence: Synthetic Chimeric Antigen Receptor sequence
MALPVTALLLPLALLLHAARPEVQLVESGGGLVQPGRSLRLSCTASGFTFTDYYMSWVRQAPGKGLEWVGFIRSKADGYTTEYAASVKGRFTISRDDSKSIAYLQMNSLKTEDTAVYYCTRDAAYYSYYSPEGAMDYWGQGTLVTVSSGGGGSGGGGSGGGGSMADYKDIVMTQSPSSVSASVGDRVTITCRASQNVDSAVAWYQQKPGKAPKALIYSASYRYSGVPSRFSGRGSGTDFTLTISSLQPEDFATYYCQQYYSTPWTFGQGTKVEIKRGLAVSTISSFFPPGYQIYIWAPLAGTCGVLLLSLVITLYCKRGRKKLLYIFKQPFMRPVQTTQEEDGCSCRFPEEEEGGCELRVKFSRSADAPAYQQGQNQLYNELNLGRREEYDVLDKRRGRDPEMGGKPRRKNPQEGLYNELQKDKMAEAYSEIGMKGERRRGKGHDGLYQGLSTATKDTYDALHMQALPPR

SEQ ID NO: 5408 - protein, 470 aa, Artificial Sequence
  Description of Artificial Sequence: Synthetic Chimeric Antigen Receptor sequence
MALPVTALLLPLALLLHAARPEVQLVESGGGLVQPGRSLRLSCTASGFTFTDYYMSWVRQAPGKGLEWVGFIRSKADGYTTEYSASVKGRFTISRDDSKSIAYLQMNSLKTEDTAVYYCARDAAYYSYYSPEGAMDYWGQGTLVTVSSGGGGSGGGGSGGGGSMADYKDIQMTQSPSSVSASVGDRVTITCRASQNVDSAVAWYQQKPGKAPKALIYSASYRYSGVPSRFSGRGSGTDFTLTISSLQPEDFATYYCQQYYSTPWTFGQGTKVEIKRGLAVSTISSFFPPGYQIYIWAPLAGTCGVLLLSLVITLYCKRGRKKLLYIFKQPFMRPVQTTQEEDGCSCRFPEEEEGGCELRVKFSRSADAPAYQQGQNQLYNELNLGRREEYDVLDKRRGRDPEMGGKPRRKNPQEGLYNELQKDKMAEAYSEIGMKGERRRGKGHDGLYQGLSTATKDTYDALHMQALPPR

SEQ ID NO: 5409 - protein, 470 aa, Artificial Sequence
  Description of Artificial Sequence: Synthetic Chimeric Antigen Receptor sequence
MALPVTALLLPLALLLHAARPEVQLVESGGGLVQPGRSLRLSCTASGFTFTDYYMSWVRQAPGKGLEWVGFIRSKADGYTTEYSASVKGRFTISRDDSKSIAYLQMNSLKTEDTAVYYCARDAAYYSYYSPEGAMDYWGQGTLVTVSSGGGGSGGGGSGGGGSMADYKDIQMTQSPSSVSASVGDRVTITCRASQNVDSAVAWYQQKPGKAPKALIYSASYRYSGVPSRFSGSGSGTDFTLTISSLQPEDFATYYCQQYYSTPWTFGQGTKVEIKRGLAVSTISSFFPPGYQIYIWAPLAGTCGVLLLSLVITLYCKRGRKKLLYIFKQPFMRPVQTTQEEDGCSCRFPEEEEGGCELRVKFSRSADAPAYQQGQNQLYNELNLGRREEYDVLDKRRGRDPEMGGKPRRKNPQEGLYNELQKDKMAEAYSEIGMKGERRRGKGHDGLYQGLSTATKDTYDALHMQALPPR

SEQ ID NO: 5410 - protein, 470 aa, Artificial Sequence
  Description of Artificial Sequence: Synthetic Chimeric Antigen Receptor sequence
MALPVTALLLPLALLLHAARPEVQLVESGGGLVQPGRSLRLSCTASGFTFTDYYMSWVRQAPGKGLEWVGFIRSKADGYTTEYSASVKGRFTISRDDSKSIAYLQMNSLKTEDTAVYYCARDAAYYSYYSPEGAMDYWGQGTLVTVSSGGGGSGGGGSGGGGSMADYKDIQMTQSPSSVSASVGDRVTITCRASQNVDSAVAWYQQKPGKAPKLLIYSASYGQSGVPSRFSGSGSGTDFTLTISSLQPEDFATYYCQQYYSTPWTFGQGTKVEIKRGLAVSTISSFFPPGYQIYIWAPLAGTCGVLLLSLVITLYCKRGRKKLLYIFKQPFMRPVQTTQEEDGCSCRFPEEEEGGCELRVKFSRSADAPAYQQGQNQLYNELNLGRREEYDVLDKRRGRDPEMGGKPRRKNPQEGLYNELQKDKMAEAYSEIGMKGERRRGKGHDGLYQGLSTATKDTYDALHMQALPPR

SEQ ID NO: 5411 - protein, 470 aa, Artificial Sequence
  Description of Artificial Sequence: Synthetic Chimeric Antigen Receptor sequence
MALPVTALLLPLALLLHAARPEVQLVESGGGLVQPGRSLRLSCTASGFTFTDYYMSWVRQAPGKGLEWVGFIRSKADGYTTEYSASVKGRFTISRDDSKSIAYLQMNSLKTEDTAVYYCARDAAYYSYYSPEGAMDYWGQGTLVTVSSGGGGSGGGGSGGGGSMADYKDIQMTQSPSSVSASVGDRVTITCRASQNVDSAVAWYQQKPGKAPKLLIYSASYRQSGVPSRFSGSGSGTDFTLTISSLQPEDFATYYCQQYYSTPWTFGQGTKVEIKRGLAVSTISSFFPPGYQIYIWAPLAGTCGVLLLSLVITLYCKRGRKKLLYIFKQPFMRPVQTTQEEDGCSCRFPEEEEGGCELRVKFSRSADAPAYQQGQNQLYNELNLGRREEYDVLDKRRGRDPEMGGKPRRKNPQEGLYNELQKDKMAEAYSEIGMKGERRRGKGHDGLYQGLSTATKDTYDALHMQALPPR

SEQ ID NO: 5412 - protein, 470 aa, Artificial Sequence
  Description of Artificial Sequence: Synthetic Chimeric Antigen Receptor sequence
MALPVTALLLPLALLLHAARPEVQLVESGGGLVQPGRSLRLSCTASGFTFTDYYMSWVRQAPGKGLEWVGFIRSKADGYTTEYSASVKGRFTISRDDSKSIAYLQMNSLKTEDTAVYYCARDAAYYSYYSPEGAMDYWGQGTLVTVSSGGGGSGGGGSGGGGSMADYKDIQMTQSPSSVSASVGDRVTITCRASQNVDSAVAWYQQKPGKAPKLLIYSASYRYSGVPSRFSGSGSGTDFTLTISSLQPEDFATYYCQQYYSTPWTFGQGTKVEIKRGLAVSTISSFFPPGYQIYIWAPLAGTCGVLLLSLVITLYCKRGRKKLLYIFKQPFMRPVQTTQEEDGCSCRFPEEEEGGCELRVKFSRSADAPAYQQGQNQLYNELNLGRREEYDVLDKRRGRDPEMGGKPRRKNPQEGLYNELQKDKMAEAYSEIGMKGERRRGKGHDGLYQGLSTATKDTYDALHMQALPPR

SEQ ID NO: 5413 - protein, 470 aa, Artificial Sequence
  Description of Artificial Sequence: Synthetic Chimeric Antigen Receptor sequence
MALPVTALLLPLALLLHAARPEVQLVESGGGLVQPGRSLRLSCTASGFTFTDYYMSWVRQAPGKGLEWVGFIRSKADGYTTEYSASVKGRFTISRDDSKSIAYLQMNSLKTEDTAVYYCARDAAYYSYYSPEGAMDYWGQGTLVTVSSGGGGSGGGGSGGGGSMADYKDIVMTQSPSSVSASVGDRVTITCRASQNVDSAVAWYQQKPGKAPKALIYSASYRYSGVPSRFSGRGSGTDFTLTISSLQPEDFATYYCQQYYSTPWTFGQGTKVEIKRGLAVSTISSFFPPGYQIYIWAPLAGTCGVLLLSLVITLYCKRGRKKLLYIFKQPFMRPVQTTQEEDGCSCRFPEEEEGGCELRVKFSRSADAPAYQQGQNQLYNELNLGRREEYDVLDKRRGRDPEMGGKPRRKNPQEGLYNELQKDKMAEAYSEIGMKGERRRGKGHDGLYQGLSTATKDTYDALHMQALPPR

SEQ ID NO: 5414 - protein, 470 aa, Artificial Sequence
  Description of Artificial Sequence: Synthetic Chimeric Antigen Receptor sequence
MALPVTALLLPLALLLHAARPEVQLVESGGGLVQPGRSLRLSCTASGFTFTDYYMSWVRQAPGKGLEWVGLIRSKADGYTTEYAASVKGRFTISRDDSKSIAYLQMNSLKTEDTAVYYCARDAAYYSYYSPEGAMDYWGQGTLVTVSSGGGGSGGGGSGGGGSMADYKDIQMTQSPSSVSASVGDRVTITCRASQNVDSAVAWYQQKPGKAPKALIYSASYRYSGVPSRFSGRGSGTDFTLTISSLQPEDFATYYCQQYYSTPWTFGQGTKVEIKRGLAVSTISSFFPPGYQIYIWAPLAGTCGVLLLSLVITLYCKRGRKKLLYIFKQPFMRPVQTTQEEDGCSCRFPEEEEGGCELRVKFSRSADAPAYQQGQNQLYNELNLGRREEYDVLDKRRGRDPEMGGKPRRKNPQEGLYNELQKDKMAEAYSEIGMKGERRRGKGHDGLYQGLSTATKDTYDALHMQALPPR

SEQ ID NO: 5415 - protein, 470 aa, Artificial Sequence
  Description of Artificial Sequence: Synthetic Chimeric Antigen Receptor sequence
MALPVTALLLPLALLLHAARPEVQLVESGGGLVQPGRSLRLSCTASGFTFTDYYMSWVRQAPGKGLEWVGLIRSKADGYTTEYAASVKGRFTISRDDSKSIAYLQMNSLKTEDTAVYYCARDAAYYSYYSPEGAMDYWGQGTLVTVSSGGGGSGGGGSGGGGSMADYKDIQMTQSPSSVSASVGDRVTITCRASQNVDSAVAWYQQKPGKAPKALIYSASYRYSGVPSRFSGSGSGTDFTLTISSLQPEDFATYYCQQYYSTPWTFGQGTKVEIKRGLAVSTISSFFPPGYQIYIWAPLAGTCGVLLLSLVITLYCKRGRKKLLYIFKQPFMRPVQTTQEEDGCSCRFPEEEEGGCELRVKFSRSADAPAYQQGQNQLYNELNLGRREEYDVLDKRRGRDPEMGGKPRRKNPQEGLYNELQKDKMAEAYSEIGMKGERRRGKGHDGLYQGLSTATKDTYDALHMQALPPR

SEQ ID NO: 5416 - protein, 470 aa, Artificial Sequence
  Description of Artificial Sequence: Synthetic Chimeric Antigen Receptor sequence
MALPVTALLLPLALLLHAARPEVQLVESGGGLVQPGRSLRLSCTASGFTFTDYYMSWVRQAPGKGLEWVGLIRSKADGYTTEYAASVKGRFTISRDDSKSIAYLQMNSLKTEDTAVYYCARDAAYYSYYSPEGAMDYWGQGTLVTVSSGGGGSGGGGSGGGGSMADYKDIQMTQSPSSVSASVGDRVTITCRASQNVDSAVAWYQQKPGKAPKLLIYSASYGQSGVPSRFSGSGSGTDFTLTISSLQPEDFATYYCQQYYSTPWTFGQGTKVEIKRGLAVSTISSFFPPGYQIYIWAPLAGTCGVLLLSLVITLYCKRGRKKLLYIFKQPFMRPVQTTQEEDGCSCRFPEEEEGGCELRVKFSRSADAPAYQQGQNQLYNELNLGRREEYDVLDKRRGRDPEMGGKPRRKNPQEGLYNELQKDKMAEAYSEIGMKGERRRGKGHDGLYQGLSTATKDTYDALHMQALPPR

SEQ ID NO: 5417 - protein, 470 aa, Artificial Sequence
  Description of Artificial Sequence: Synthetic Chimeric Antigen Receptor sequence
MALPVTALLLPLALLLHAARPEVQLVESGGGLVQPGRSLRLSCTASGFTFTDYYMSWVRQAPGKGLEWVGLIRSKADGYTTEYAASVKGRFTISRDDSKSIAYLQMNSLKTEDTAVYYCARDAAYYSYYSPEGAMDYWGQGTLVTVSSGGGGSGGGGSGGGGSMADYKDIQMTQSPSSVSASVGDRVTITCRASQNVDSAVAWYQQKPGKAPKLLIYSASYRQSGVPSRFSGSGSGTDFTLTISSLQPEDFATYYCQQYYSTPWTFGQGTKVEIKRGLAVSTISSFFPPGYQIYIWAPLAGTCGVLLLSLVITLYCKRGRKKLLYIFKQPFMRPVQTTQEEDGCSCRFPEEEEGGCELRVKFSRSADAPAYQQGQNQLYNELNLGRREEYDVLDKRRGRDPEMGGKPRRKNPQEGLYNELQKDKMAEAYSEIGMKGERRRGKGHDGLYQGLSTATKDTYDALHMQALPPR

SEQ ID NO: 5418 - protein, 470 aa, Artificial Sequence
  Description of Artificial Sequence: Synthetic Chimeric Antigen Receptor sequence
MALPVTALLLPLALLLHAARPEVQLVESGGGLVQPGRSLRLSCTASGFTFTDYYMSWVRQAPGKGLEWVGLIRSKADGYTTEYAASVKGRFTISRDDSKSIAYLQMNSLKTEDTAVYYCARDAAYYSYYSPEGAMDYWGQGTLVTVSSGGGGSGGGGSGGGGSMADYKDIQMTQSPSSVSASVGDRVTITCRASQNVDSAVAWYQQKPGKAPKLLIYSASYRYSGVPSRFSGSGSGTDFTLTISSLQPEDFATYYCQQYYSTPWTFGQGTKVEIKRGLAVSTISSFFPPGYQIYIWAPLAGTCGVLLLSLVITLYCKRGRKKLLYIFKQPFMRPVQTTQEEDGCSCRFPEEEEGGCELRVKFSRSADAPAYQQGQNQLYNELNLGRREEYDVLDKRRGRDPEMGGKPRRKNPQEGLYNELQKDKMAEAYSEIGMKGERRRGKGHDGLYQGLSTATKDTYDALHMQALPPR

SEQ ID NO: 5419 - protein, 470 aa, Artificial Sequence
  Description of Artificial Sequence: Synthetic Chimeric Antigen Receptor sequence
MALPVTALLLPLALLLHAARPEVQLVESGGGLVQPGRSLRLSCTASGFTFTDYYMSWVRQAPGKGLEWVGLIRSKADGYTTEYAASVKGRFTISRDDSKSIAYLQMNSLKTEDTAVYYCARDAAYYSYYSPEGAMDYWGQGTLVTVSSGGGGSGGGGSGGGGSMADYKDIVMTQSPSSVSASVGDRVTITCRASQNVDSAVAWYQQKPGKAPKALIYSASYRYSGVPSRFSGRGSGTDFTLTISSLQPEDFATYYCQQYYSTPWTFGQGTKVEIKRGLAVSTISSFFPPGYQIYIWAPLAGTCGVLLLSLVITLYCKRGRKKLLYIFKQPFMRPVQTTQEEDGCSCRFPEEEEGGCELRVKFSRSADAPAYQQGQNQLYNELNLGRREEYDVLDKRRGRDPEMGGKPRRKNPQEGLYNELQKDKMAEAYSEIGMKGERRRGKGHDGLYQGLSTATKDTYDALHMQALPPR

SEQ ID NO: 5420 - protein, 470 aa, Artificial Sequence
  Description of Artificial Sequence: Synthetic Chimeric Antigen Receptor sequence
MALPVTALLLPLALLLHAARPEVQLVESGGGLVQPGRSLRLSCTASGFTFTDYYMSWVRQAPGKGLEWVGLIRSKADGYTTEYSASVKGRFTISRDDSKSIAYLQMNSLKTEDTAVYYCARDAAYYSYYSPEGAMDYWGQGTLVTVSSGGGGSGGGGSGGGGSMADYKDIQMTQSPSSVSASVGDRVTITCRASQNVDSAVAWYQQKPGKAPKALIYSASYRYSGVPSRFSGRGSGTDFTLTISSLQPEDFATYYCQQYYSTPWTFGQGTKVEIKRGLAVSTISSFFPPGYQIYIWAPLAGTCGVLLLSLVITLYCKRGRKKLLYIFKQPFMRPVQTTQEEDGCSCRFPEEEEGGCELRVKFSRSADAPAYQQGQNQLYNELNLGRREEYDVLDKRRGRDPEMGGKPRRKNPQEGLYNELQKDKMAEAYSEIGMKGERRRGKGHDGLYQGLSTATKDTYDALHMQALPPR

SEQ ID NO: 5421 - protein, 470 aa, Artificial Sequence
  Description of Artificial Sequence: Synthetic Chimeric Antigen Receptor sequence
MALPVTALLLPLALLLHAARPEVQLVESGGGLVQPGRSLRLSCTASGFTFTDYYMSWVRQAPGKGLEWVGLIRSKADGYTTEYSASVKGRFTISRDDSKSIAYLQMNSLKTEDTAVYYCARDAAYYSYYSPEGAMDYWGQGTLVTVSSGGGGSGGGGSGGGGSMADYKDIQMTQSPSSVSASVGDRVTITCRASQNVDSAVAWYQQKPGKAPKALIYSASYRYSGVPSRFSGSGSGTDFTLTISSLQPEDFATYYCQQYYSTPWTFGQGTKVEIKRGLAVSTISSFFPPGYQIYIWAPLAGTCGVLLLSLVITLYCKRGRKKLLYIFKQPFMRPVQTTQEEDGCSCRFPEEEEGGCELRVKFSRSADAPAYQQGQNQLYNELNLGRREEYDVLDKRRGRDPEMGGKPRRKNPQEGLYNELQKDKMAEAYSEIGMKGERRRGKGHDGLYQGLSTATKDTYDALHMQALPPR

SEQ ID NO: 5422 - protein, 470 aa, Artificial Sequence
  Description of Artificial Sequence: Synthetic Chimeric Antigen Receptor sequence
MALPVTALLLPLALLLHAARPEVQLVESGGGLVQPGRSLRLSCTASGFTFTDYYMSWVRQAPGKGLEWVGLIRSKADGYTTEYSASVKGRFTISRDDSKSIAYLQMNSLKTEDTAVYYCARDAAYYSYYSPEGAMDYWGQGTLVTVSSGGGGSGGGGSGGGGSMADYKDIQMTQSPSSVSASVGDRVTITCRASQNVDSAVAWYQQKPGKAPKLLIYSASYGQSGVPSRFSGSGSGTDFTLTISSLQPEDFATYYCQQYYSTPWTFGQGTKVEIKRGLAVSTISSFFPPGYQIYIWAPLAGTCGVLLLSLVITLYCKRGRKKLLYIFKQPFMRPVQTTQEEDGCSCRFPEEEEGGCELRVKFSRSADAPAYQQGQNQLYNELNLGRREEYDVLDKRRGRDPEMGGKPRRKNPQEGLYNELQKDKMAEAYSEIGMKGERRRGKGHDGLYQGLSTATKDTYDALHMQALPPR

SEQ ID NO: 5423 - protein, 470 aa, Artificial Sequence
  Description of Artificial Sequence: Synthetic Chimeric Antigen Receptor sequence
MALPVTALLLPLALLLHAARPEVQLVESGGGLVQPGRSLRLSCTASGFTFTDYYMSWVRQAPGKGLEWVGLIRSKADGYTTEYSASVKGRFTISRDDSKSIAYLQMNSLKTEDTAVYYCARDAAYYSYYSPEGAMDYWGQGTLVTVSSGGGGSGGGGSGGGGSMADYKDIQMTQSPSSVSASVGDRVTITCRASQNVDSAVAWYQQKPGKAPKLLIYSASYRQSGVPSRFSGSGSGTDFTLTISSLQPEDFATYYCQQYYSTPWTFGQGTKVEIKRGLAVSTISSFFPPGYQIYIWAPLAGTCGVLLLSLVITLYCKRGRKKLLYIFKQPFMRPVQTTQEEDGCSCRFPEEEEGGCELRVKFSRSADAPAYQQGQNQLYNELNLGRREEYDVLDKRRGRDPEMGGKPRRKNPQEGLYNELQKDKMAEAYSEIGMKGERRRGKGHDGLYQGLSTATKDTYDALHMQALPPR

SEQ ID NO: 5424 - protein, 470 aa, Artificial Sequence
  Description of Artificial Sequence: Synthetic Chimeric Antigen Receptor sequence
MALPVTALLLPLALLLHAARPEVQLVESGGGLVQPGRSLRLSCTASGFTFTDYYMSWVRQAPGKGLEWVGLIRSKADGYTTEYSASVKGRFTISRDDSKSIAYLQMNSLKTEDTAVYYCARDAAYYSYYSPEGAMDYWGQGTLVTVSSGGGGSGGGGSGGGGSMADYKDIQMTQSPSSVSASVGDRVTITCRASQNVDSAVAWYQQKPGKAPKLLIYSASYRYSGVPSRFSGSGSGTDFTLTISSLQPEDFATYYCQQYYSTPWTFGQGTKVEIKRGLAVSTISSFFPPGYQIYIWAPLAGTCGVLLLSLVITLYCKRGRKKLLYIFKQPFMRPVQTTQEEDGCSCRFPEEEEGGCELRVKFSRSADAPAYQQGQNQLYNELNLGRREEYDVLDKRRGRDPEMGGKPRRKNPQEGLYNELQKDKMAEAYSEIGMKGERRRGKGHDGLYQGLSTATKDTYDALHMQALPPR

SEQ ID NO: 5425 - protein, 470 aa, Artificial Sequence
  Description of Artificial Sequence: Synthetic Chimeric Antigen Receptor sequence
MALPVTALLLPLALLLHAARPEVQLVESGGGLVQPGRSLRLSCTASGFTFTDYYMSWVRQAPGKGLEWVGLIRSKADGYTTEYSASVKGRFTISRDDSKSIAYLQMNSLKTEDTAVYYCARDAAYYSYYSPEGAMDYWGQGTLVTVSSGGGGSGGGGSGGGGSMADYKDIVMTQSPSSVSASVGDRVTITCRASQNVDSAVAWYQQKPGKAPKALIYSASYRYSGVPSRFSGRGSGTDFTLTISSLQPEDFATYYCQQYYSTPWTFGQGTKVEIKRGLAVSTISSFFPPGYQIYIWAPLAGTCGVLLLSLVITLYCKRGRKKLLYIFKQPFMRPVQTTQEEDGCSCRFPEEEEGGCELRVKFSRSADAPAYQQGQNQLYNELNLGRREEYDVLDKRRGRDPEMGGKPRRKNPQEGLYNELQKDKMAEAYSEIGMKGERRRGKGHDGLYQGLSTATKDTYDALHMQALPPR

SEQ ID NO: 5426 - protein, 470 aa, Artificial Sequence
  Description of Artificial Sequence: Synthetic Chimeric Antigen Receptor sequence
MALPVTALLLPLALLLHAARPEVQLVESGGGLVQPGRSLRLSCTASGFTFTDYYMSWVRQAPGKGLEWVGLIRSKADGYTTEYSASVKGRFTISRDDSKSILYLQMNSLKTEDTAVYYCARDAAYYSYYSPEGAMDYWGQGTLVTVSSGGGGSGGGGSGGGGSMADYKDIQMTQSPSSVSASVGDRVTITCRASQNVDSAVAWYQQKPGKAPKALIYSASYRYSGVPSRFSGRGSGTDFTLTISSLQPEDFATYYCQQYYSTPWTFGQGTKVEIKRGLAVSTISSFFPPGYQIYIWAPLAGTCGVLLLSLVITLYCKRGRKKLLYIFKQPFMRPVQTTQEEDGCSCRFPEEEEGGCELRVKFSRSADAPAYQQGQNQLYNELNLGRREEYDVLDKRRGRDPEMGGKPRRKNPQEGLYNELQKDKMAEAYSEIGMKGERRRGKGHDGLYQGLSTATKDTYDALHMQALPPR

SEQ ID NO: 5427 - protein, 470 aa, Artificial Sequence
  Description of Artificial Sequence: Synthetic Chimeric Antigen Receptor sequence
MALPVTALLLPLALLLHAARPEVQLVESGGGLVQPGRSLRLSCTASGFTFTDYYMSWVRQAPGKGLEWVGLIRSKADGYTTEYSASVKGRFTISRDDSKSILYLQMNSLKTEDTAVYYCARDAAYYSYYSPEGAMDYWGQGTLVTVSSGGGGSGGGGSGGGGSMADYKDIQMTQSPSSVSASVGDRVTITCRASQNVDSAVAWYQQKPGKAPKALIYSASYRYSGVPSRFSGSGSGTDFTLTISSLQPEDFATYYCQQYYSTPWTFGQGTKVEIKRGLAVSTISSFFPPGYQIYIWAPLAGTCGVLLLSLVITLYCKRGRKKLLYIFKQPFMRPVQTTQEEDGCSCRFPEEEEGGCELRVKFSRSADAPAYQQGQNQLYNELNLGRREEYDVLDKRRGRDPEMGGKPRRKNPQEGLYNELQKDKMAEAYSEIGMKGERRRGKGHDGLYQGLSTATKDTYDALHMQALPPR

SEQ ID NO: 5428 - protein, 470 aa, Artificial Sequence
  Description of Artificial Sequence: Synthetic Chimeric Antigen Receptor sequence
MALPVTALLLPLALLLHAARPEVQLVESGGGLVQPGRSLRLSCTASGFTFTDYYMSWVRQAPGKGLEWVGLIRSKADGYTTEYSASVKGRFTISRDDSKSILYLQMNSLKTEDTAVYYCARDAAYYSYYSPEGAMDYWGQGTLVTVSSGGGGSGGGGSGGGGSMADYKDIQMTQSPSSVSASVGDRVTITCRASQNVDSAVAWYQQKPGKAPKLLIYSASYGQSGVPSRFSGSGSGTDFTLTISSLQPEDFATYYCQQYYSTPWTFGQGTKVEIKRGLAVSTISSFFPPGYQIYIWAPLAGTCGVLLLSLVITLYCKRGRKKLLYIFKQPFMRPVQTTQEEDGCSCRFPEEEEGGCELRVKFSRSADAPAYQQGQNQLYNELNLGRREEYDVLDKRRGRDPEMGGKPRRKNPQEGLYNELQKDKMAEAYSEIGMKGERRRGKGHDGLYQGLSTATKDTYDALHMQALPPR

SEQ ID NO: 5429 - protein, 470 aa, Artificial Sequence
  Description of Artificial Sequence: Synthetic Chimeric Antigen Receptor sequence
MALPVTALLLPLALLLHAARPEVQLVESGGGLVQPGRSLRLSCTASGFTFTDYYMSWVRQAPGKGLEWVGLIRSKADGYTTEYSASVKGRFTISRDDSKSILYLQMNSLKTEDTAVYYCARDAAYYSYYSPEGAMDYWGQGTLVTVSSGGGGSGGGGSGGGGSMADYKDIQMTQSPSSVSASVGDRVTITCRASQNVDSAVAWYQQKPGKAPKLLIYSASYRQSGVPSRFSGSGSGTDFTLTISSLQPEDFATYYCQQYYSTPWTFGQGTKVEIKRGLAVSTISSFFPPGYQIYIWAPLAGTCGVLLLSLVITLYCKRGRKKLLYIFKQPFMRPVQTTQEEDGCSCRFPEEEEGGCELRVKFSRSADAPAYQQGQNQLYNELNLGRREEYDVLDKRRGRDPEMGGKPRRKNPQEGLYNELQKDKMAEAYSEIGMKGERRRGKGHDGLYQGLSTATKDTYDALHMQALPPR

SEQ ID NO: 5430 - protein, 470 aa, Artificial Sequence
  Description of Artificial Sequence: Synthetic Chimeric Antigen Receptor sequence
MALPVTALLLPLALLLHAARPEVQLVESGGGLVQPGRSLRLSCTASGFTFTDYYMSWVRQAPGKGLEWVGLIRSKADGYTTEYSASVKGRFTISRDDSKSILYLQMNSLKTEDTAVYYCARDAAYYSYYSPEGAMDYWGQGTLVTVSSGGGGSGGGGSGGGGSMADYKDIQMTQSPSSVSASVGDRVTITCRASQNVDSAVAWYQQKPGKAPKLLIYSASYRYSGVPSRFSGSGSGTDFTLTISSLQPEDFATYYCQQYYSTPWTFGQGTKVEIKRGLAVSTISSFFPPGYQIYIWAPLAGTCGVLLLSLVITLYCKRGRKKLLYIFKQPFMRPVQTTQEEDGCSCRFPEEEEGGCELRVKFSRSADAPAYQQGQNQLYNELNLGRREEYDVLDKRRGRDPEMGGKPRRKNPQEGLYNELQKDKMAEAYSEIGMKGERRRGKGHDGLYQGLSTATKDTYDALHMQALPPR

SEQ ID NO: 5431 - protein, 470 aa, Artificial Sequence
  Description of Artificial Sequence: Synthetic Chimeric Antigen Receptor sequence
MALPVTALLLPLALLLHAARPEVQLVESGGGLVQPGRSLRLSCTASGFTFTDYYMSWVRQAPGKGLEWVGLIRSKADGYTTEYSASVKGRFTISRDDSKSILYLQMNSLKTEDTAVYYCARDAAYYSYYSPEGAMDYWGQGTLVTVSSGGGGSGGGGSGGGGSMADYKDIVMTQSPSSVSASVGDRVTITCRASQNVDSAVAWYQQKPGKAPKALIYSASYRYSGVPSRFSGRGSGTDFTLTISSLQPEDFATYYCQQYYSTPWTFGQGTKVEIKRGLAVSTISSFFPPGYQIYIWAPLAGTCGVLLLSLVITLYCKRGRKKLLYIFKQPFMRPVQTTQEEDGCSCRFPEEEEGGCELRVKFSRSADAPAYQQGQNQLYNELNLGRREEYDVLDKRRGRDPEMGGKPRRKNPQEGLYNELQKDKMAEAYSEIGMKGERRRGKGHDGLYQGLSTATKDTYDALHMQALPPR

SEQ ID NO: 5432 - protein, 470 aa, Artificial Sequence
  Description of Artificial Sequence: Synthetic Chimeric Antigen Receptor sequence
QIQLVQSGPELKKPGETVKISCKASGYIFTNYGMNWVKQAPGKSFKWMGWINTYTGESTYSADFKGRFAFSLETSASTAYLHINDLKNEDTATYFCARSGGYDPMDYWGQGTSVTVSSGGGGSGGGGSGGGGSDIVLTQSPASLAVSLGQRATISCRASESVDNYGNTFMHWYQQKPGQPPKLLIYRASNLESGIPARFSGSGSRTDFTLTINPVEADDVATYYCQQSNEDPPTFGAGTKLELKTTTPAPRPPTPAPTIASQPLSLRPEACRPAAGGAVHTRGLDFACDIISFFLALTSTALLFLLFFLTLRFSVVKRGRKKLLYIFKQPFMRPVQTTQEEDGCSCRFPEEEEGGCELRVKFSRSADAPAYQQGQNQLYNELNLGRREEYDVLDKRRGRDPEMGGKPRRKNPQEGLYNELQKDKMAEAYSEIGMKGERRRGKGHDGLYQGLSTATKDTYDALHMQALPPR

SEQ ID NO: 5433 - protein, 470 aa, Artificial Sequence
  Description of Artificial Sequence: Synthetic Chimeric Antigen Receptor sequence
VQLQESGPGLVKPSQSLSLTCSVTDYSITSGYYWNWIRQFPGNKLEWMGYISYDGSNNYNPSLKNRISITRDTSKNQFFLKLSSVTTEDTATYYCSRGEGFYFDSWGQGTTLTVSSARSGGGGSGGGGSGGGGSDIMMSQSPSSLAVSVGEKFTMTCKSSQSLFFGSTQKNYLAWYQQKPGQSPKLLIYWASTRESGVPDRFTGSGSGTDFTLAISSVMPEDLAVYYCQQYYNYPWTFGGGTKLEIKTTTPAPRPPTPAPTIASQPLSLRPEACRPAAGGAVHTRGLDFACDIYIWAPLAGTCGVLLLSLVITLYCKRGRKKLLYIFKQPFMRPVQTTQEEDGCSCRFPEEEEGGCELRVKFSRSADAPAYQQGQNQLYNELNLGRREEYDVLDKRRGRDPEMGGKPRRKNPQEGLYNELQKDKMAEAYSEIGMKGERRRGKGHDGLYQGLSTATKDTYDALHMQALPPR

SEQ ID NO: 5434 - protein, 471 aa, Artificial Sequence
  Description of Artificial Sequence: Synthetic Chimeric Antigen Receptor sequence
EVQLVESGGGLVQPGRSLRLSCTASGFTFTDYYMSWVRQAPGKGLEWVGLIRSKADGYTTEYAASVKGRFTISRDDSQSIAYLQMNSLKTEDTAVYYCARDAAYYSYYSPEGAMDYGQGTLVTVSSGGGGSGGGGSGGGGSDIQMTQSPSSVSASVGDRVTITCRASQNVDSAVAYQQKPGKAPKALIYSASYRYSGVPSRFSGSGSGTDFTLTISSLQPEDFATYYCQQYYSTPWTFGQGTKVEIKRTTTPAPRPPTPAPTIASQPLSLRPEACRPAAGGAVHTRGLDFACDIYIWAPLAGTCGVLLLSLVITLYCKRGRKKLLYIFKQPFMRPVQTTQEEDGCSCRFPEEEEGGCELRVKFSRSADAPAYQQGQNQLYNELNLGRREEYDVLDKRRGRDPEMGGKPRRKNPQEGLYNELQKDKMAEAYSEIGMKGERRRGKGHDGLYQGLSTATKDTYDALHMQALPPR

SEQ ID NO: 5435 - protein, 471 aa, Artificial Sequence
  Description of Artificial Sequence: Synthetic Chimeric Antigen Receptor sequence
EVQLVESGGGLVQPGRSLRLSCTASGFTFTDYYMSWVRQAPGKGLEWVGLIRSKADGYTTEYAASVKGRFTISRDDSQSIAYLQMNSLKTEDTAVYYCARDAAYYSYYSPEGAMDYGQGTLVTVSSGGGGSGGGGSGGGGSDIVMTQSPSSVSASVGDRVTITCRASQNVDSAVAYQQKPGKAPKALIYSASYRYSGVPSRFSGRGSGTDFTLTISSLQPEDFATYYCQQYYSTPWTFGQGTKVEIKRTTTPAPRPPTPAPTIASQPLSLRPEACRPAAGGAVHTRGLDFACDIYIWAPLAGTCGVLLLSLVITLYCKRGRKKLLYIFKQPFMRPVQTTQEEDGCSCRFPEEEEGGCELRVKFSRSADAPAYQQGQNQLYNELNLGRREEYDVLDKRRGRDPEMGGKPRRKNPQEGLYNELQKDKMAEAYSEIGMKGERRRGKGHDGLYQGLSTATKDTYDALHMQALPPR

SEQ ID NO: 5436 - protein, 471 aa, Artificial Sequence
  Description of Artificial Sequence: Synthetic Chimeric Antigen Receptor sequence
EVQLVESGGGLVQPGRSLRLSCTASGFTFTDYYMSWVRQAPGKGLEWVGLIRSKADGYTTEYSASVKGRFTISRDDSQSIAYLQMNSLKTEDTAVYYCARDAAYYSYYSPEGAMDYGQGTLVTVSSGGGGSGGGGSGGGGSDIQMTQSPSSVSASVGDRVTITCKASQNVDSAVAYQQKPGKAPKLLIYSASYRYSGVPSRFSGSGSGTDFTLTISSLQPEDFATYYCQQYYSTPWTFGQGTKVEIKRTTTPAPRPPTPAPTIASQPLSLRPEACRPAAGGAVHTRGLDFACDIYIWAPLAGTCGVLLLSLVITLYCKRGRKKLLYIFKQPFMRPVQTTQEEDGCSCRFPEEEEGGCELRVKFSRSADAPAYQQGQNQLYNELNLGRREEYDVLDKRRGRDPEMGGKPRRKNPQEGLYNELQKDKMAEAYSEIGMKGERRRGKGHDGLYQGLSTATKDTYDALHMQALPPR

SEQ ID NO: 5437 - protein, 471 aa, Artificial Sequence
  Description of Artificial Sequence: Synthetic Chimeric Antigen Receptor sequence
EVQLVESGGGLVQPGRSLRLSCTASGFTFTDYYMSWVRQAPGKGLEWVGLIRSKADGYTTEYSASVKGRFTISRDDSQSIAYLQMNSLKTEDTAVYYCARDAAYYSYYSPEGAMDYGQGTLVTVSSGGGGSGGGGSGGGGSDIQMTQSPSSVSASVGDRVTITCRASQVDSAVAWYQQKPGKAPKALIYSASYRYSGVPSRFSGSGSGTDFTLTISSLQPEDFATYYCGQYYSTPWTFGQGTKVEIKRTTTPAPRPPTPAPTIASQPLSLRPEACRPAAGGAVHTRGLDFACDIYIWAPLAGTCGVLLLSLVITLYCKRGRKKLLYIFKQPFMRPVQTTQEEDGCSCRFPEEEEGGCELRVKFSRSADAPAYQQGQNQLYNELNLGRREEYDVLDKRRGRDPEMGGKPRRKNPQEGLYNELQKDKMAEAYSEIGMKGERRRGKGHDGLYQGLSTATKDTYDALHMQALPPR

SEQ ID NO: 5438 - protein, 473 aa, Artificial Sequence
  Description of Artificial Sequence: Synthetic Chimeric Antigen Receptor sequence
EVQLVESGGGLVQPGRSLRLSCTASGFTFTDYYMSWVRQAPGKGLEWVGLIRSKADGYTTEYSASVKGRFTISRDDSKSILYLQMNSLKTEDTAVYYCARDAAYYSYYSPEGAMDYWGQGTLVTVSSGGGGSGGGGSGGGGSDIVMTQSPSSVSASVGDRVTITCRASQNVDSAVAWYQQKPGKAPKALIYSASYRYSGVPSRFSGRGSGTDFTLTISSLQPEDFATYYCQQYYSTPWTFGQGTKVEIKRTTTPAPRPPTPAPTIASQPLSLRPEACRPAAGGAVHTRGLDFACDIYIWAPLAGTCGVLLLSLVITLYCKRGRKKLLYIFKQPFMRPVQTTQEEDGCSCRFPEEEEGGCELRVKFSRSADAPAYQQGQNQLYNELNLGRREEYDVLDKRRGRDPEMGGKPRRKNPQEGLYNELQKDKMAEAYSEIGMKGERRRGKGHDGLYQGLSTATKDTYDALHMQALPPR

SEQ ID NO: 5439 - protein, 478 aa, Artificial Sequence
  Description of Artificial Sequence: Synthetic Chimeric Antigen Receptor sequence
EVKLVESGGGLVQPGGSLSLSCAASGFTFTDYYMSWVRQPPGKALEWLALIRSKADGYTTEYSASVKGRFTLSRDDSQSILYLQMNALRPEDSATYYCARDAAYYSYYSPEGAMDYWGQGTSVTVSSGGGGSGGGGSGGGGSMADYKDIVMTQSHKFMSTSVGDRVNITCKASQNVDSAVAWYQQKPGQSPKALIYSASYRYSGVPDRFTGRGSGTDFTLTISSVQAEDLAVYYCQQYYSTPWTFGGGTKLEIKRTTTPAPRPPTPAPTIASQPLSLRPEACRPAAGGAVHTRGLDFACDIYIWAPLAGTCGVLLLSLVITLYCKRGRKKLLYIFKQPFMRPVQTTQEEDGCSCRFPEEEEGGCELRVKFSRSADAPAYQQGQNQLYNELNLGRREEYDVLDKRRGRDPEMGGKPRRKNPQEGLYNELQKDKMAEAYSEIGMKGERRRGKGHDGLYQGLSTATKDTYDALHMQALPPR

SEQ ID NO: 5440 - protein, 481 aa, Artificial Sequence
  Description of Artificial Sequence: Synthetic Chimeric Antigen Receptor sequence
EVKLVESGGGLVQPGGSLSLSCAASGFTFTDYYMSWVRQPPGKALEWLALIRSKADGYTTEYSASVKGRFTLSRDDSQSILYLQMNALRPEDSATYYCARDAAYYSYYSPEGAMDYWGQGTSVTVSSGGGGSGGGGSGGGGSMADYKDIVMTQSHKFMSTSVGDRVNITCKASQNVDSAVAWYQQKPGQSPKALIYSASYRYSGVPDRFTGRGSGTDFTLTISSVQAEDLAVYYCQQYYSTPWTFGGGTKLEIKRTTTPAPRPPTPAPTIASQPLSLRPEACRPAAGGAVHTRGLDFACDIISFFLALTSTALLFLLFFLTLRFSVVKRGRKKLLYIFKQPFMRPVQTTQEEDGCSCRFPEEEEGGCELRVKFSRSADAPAYQQGQNQLYNELNLGRREEYDVLDKRRGRDPEMGGKPRRKNPQEGLYNELQKDKMAEAYSEIGMKGERRRGKGHDGLYQGLSTATKDTYDALHMQALPPR

SEQ ID NO: 5441 - protein, 484 aa, Artificial Sequence
  Description of Artificial Sequence: Synthetic Chimeric Antigen Receptor sequence
MGWSWIFLFLVSGTGGVLSEVQLQQSGPELVKPGASVKMSCKASGYTFTDYYMKWVKQSHGKSLEWIGDIIPSNGATFYNQKFKGKATLTVDRSSSTAYMHLNSLTSEDSAVYYCTRSHLLRASWFAYWGQGTLVTVSAASGGGGSGGGGSGGGGSMESQTQVLMSLLFWVSGTCGDFVMTQSPSSLTVTAGEKVTMSCKSSQSLLNSGNQKNYLTWYLQKPGQPPKLLIYWASTRESGVPDRFTGSGSGTDFTLTISSVQAEDLAVYYCQNDYSYPYTFGGGTKLEIKRGLAVSTISSFFPPGYQIYIWAPLAGTCGVLLLSLVITLYCKRGRKKLLYIFKQPFMRPVQTTQEEDGCSCRFPEEEEGGCELRVKFSRSADAPAYQQGQNQLYNELNLGRREEYDVLDKRRGRDPEMGGKPRRKNPQEGLYNELQKDKMAEAYSEIGMKGERRRGKGHDGLYQGLSTATKDTYDALHMQALPPR

SEQ ID NO: 5442 - protein, 486 aa, Artificial Sequence
  Description of Artificial Sequence: Synthetic Chimeric Antigen Receptor sequence
MALPVTALLLPLALLLHAARPDVQLTQSPSFLSASVGDRVTITCRASKSISKDLAWYQQKPGKAPKLLIYSGSTLQSGVPSRFSGSGSGTEFTLTISSLQPEDFATYYCQQHNKYPYTFGGGTKVEIKGGGGSGGGGSGGGGSGGGGSEVQLVESGGGLVQPGGSLRLSCAASGYTFTSYWMNWVRQAPGKGLVWVSRIDPYDSETHYNQKFKDRFTISVDKAKSTAYLQMNSLRAEDTAVYYCARGNWDDYWGQGTTVTVSSTTTPAPRPPTPAPTIASQPLSLRPEACRPAAGGAVHTRGLDFACDIYIWAPLAGTCGVLLLSLVITLYCKRGRKKLLYIFKQPFMRPVQTTQEEDGCSCRFPEEEEGGCELRVKFSRSADAPAYKQGQNQLYNELNLGRREEYDVLDKRRGRDPEMGGKPRRKNPQEGLYNELQKDKMAEAYSEIGMKGERRRGKGHDGLYQGLSTATKDTYDALHMQALPPR

SEQ ID NO: 5443 - protein, 486 aa, Artificial Sequence
  Description of Artificial Sequence: Synthetic Chimeric Antigen Receptor sequence
MALPVTALLLPLALLLHAARPDVQLTQSPSFLSASVGDRVTITCRASKSISKDLAWYQQKPGKAPKLLIYSGSTLQSGVPSRFSGSGSGTEFTLTISSLQPEDFATYYCQQHNKYPYTFGGGTKVEIKGGGGSGGGGSGGGGSGGGGSEVQLVQSGAEVKKPGESLRISCKGSGYTFTSYWMNWVRQMPGKGLEWMGRIDPYDSETHYNQKFKDHVTISVDKSISTAYLQWSSLKASDTAMYYCARGNWDDYWGQGTTVTVSSTTTPAPRPPTPAPTIASQPLSLRPEACRPAAGGAVHTRGLDFACDIYIWAPLAGTCGVLLLSLVITLYCKRGRKKLLYIFKQPFMRPVQTTQEEDGCSCRFPEEEEGGCELRVKFSRSADAPAYKQGQNQLYNELNLGRREEYDVLDKRRGRDPEMGGKPRRKNPQEGLYNELQKDKMAEAYSEIGMKGERRRGKGHDGLYQGLSTATKDTYDALHMQALPPR

SEQ ID NO: 5444 - protein, 486 aa, Artificial Sequence
  Description of Artificial Sequence: Synthetic Chimeric Antigen Receptor sequence
MALPVTALLLPLALLLHAARPDVQLTQSPSFLSASVGDRVTITCRASKSISKDLAWYQQKPGKAPKLLIYSGSTLQSGVPSRFSGSGSGTEFTLTISSLQPEDFATYYCQQHNKYPYTFGGGTKVEIKGGGGSGGGGSGGGGSGGGGSQVQLVQSGAEVKKPGASVKVSCKASGYTFTSYWMNWVRQAPGQGLEWMGRIDPYDSETHYNQKFKDRVTMTVDKSTSTAYMELSSLRSEDTAVYYCARGNWDDYWGQGTTVTVSSTTTPAPRPPTPAPTIASQPLSLRPEACRPAAGGAVHTRGLDFACDIYIWAPLAGTCGVLLLSLVITLYCKRGRKKLLYIFKQPFMRPVQTTQEEDGCSCRFPEEEEGGCELRVKFSRSADAPAYKQGQNQLYNELNLGRREEYDVLDKRRGRDPEMGGKPRRKNPQEGLYNELQKDKMAEAYSEIGMKGERRRGKGHDGLYQGLSTATKDTYDALHMQALPPR

SEQ ID NO: 5445 - protein, 486 aa, Artificial Sequence
  Description of Artificial Sequence: Synthetic Chimeric Antigen Receptor sequence
MALPVTALLLPLALLLHAARPDVQLTQSPSFLSASVGDRVTITCRASKSISKDLAWYQQKPGKAPKLLIYSGSTLQSGVPSRFSGSGSGTEFTLTISSLQPEDFATYYCQQHNKYPYTFGGGTKVEIKGGGGSGGGGSGGGGSGGGGSQVQLVQSGSELKKPGASVKVSCKASGYTFTSYWMNWVRQAPGQGLEWMGRIDPYDSETHYNQKFKDRFVFSVDKSVSTAYLQISSLKAEDTAVYYCARGNWDDYWGQGTTVTVSSTTTPAPRPPTPAPTIASQPLSLRPEACRPAAGGAVHTRGLDFACDIYIWAPLAGTCGVLLLSLVITLYCKRGRKKLLYIFKQPFMRPVQTTQEEDGCSCRFPEEEEGGCELRVKFSRSADAPAYKQGQNQLYNELNLGRREEYDVLDKRRGRDPEMGGKPRRKNPQEGLYNELQKDKMAEAYSEIGMKGERRRGKGHDGLYQGLSTATKDTYDALHMQALPPR

SEQ ID NO: 5446 - protein, 486 aa, Artificial Sequence
  Description of Artificial Sequence: Synthetic Chimeric Antigen Receptor sequence
MALPVTALLLPLALLLHAARPDVVMTQSPAFLSVTPGEKVTITCRASKSISKDLAWYQQKPDQAPKLLIYSGSTLQSGVPSRFSGSGSGTDFTFTISSLEAEDAATYYCQQHNKYPYTFGGGTKVEIKGGGGSGGGGSGGGGSGGGGSEVQLVESGGGLVQPGGSLRLSCAASGYTFTSYWMNWVRQAPGKGLVWVSRIDPYDSETHYNQKFKDRFTISVDKAKSTAYLQMNSLRAEDTAVYYCARGNWDDYWGQGTTVTVSSTTTPAPRPPTPAPTIASQPLSLRPEACRPAAGGAVHTRGLDFACDIYIWAPLAGTCGVLLLSLVITLYCKRGRKKLLYIFKQPFMRPVQTTQEEDGCSCRFPEEEEGGCELRVKFSRSADAPAYKQGQNQLYNELNLGRREEYDVLDKRRGRDPEMGGKPRRKNPQEGLYNELQKDKMAEAYSEIGMKGERRRGKGHDGLYQGLSTATKDTYDALHMQALPPR

SEQ ID NO: 5447 - protein, 486 aa, Artificial Sequence
  Description of Artificial Sequence: Synthetic Chimeric Antigen Receptor sequence
MALPVTALLLPLALLLHAARPDVVMTQSPAFLSVTPGEKVTITCRASKSISKDLAWYQQKPDQAPKLLIYSGSTLQSGVPSRFSGSGSGTDFTFTISSLEAEDAATYYCQQHNKYPYTFGGGTKVEIKGGGGSGGGGSGGGGSGGGGSEVQLVQSGAEVKKPGESLRISCKGSGYTFTSYWMNWVRQMPGKGLEWMGRIDPYDSETHYNQKFKDHVTISVDKSISTAYLQWSSLKASDTAMYYCARGNWDDYWGQGTTVTVSSTTTPAPRPPTPAPTIASQPLSLRPEACRPAAGGAVHTRGLDFACDIYIWAPLAGTCGVLLLSLVITLYCKRGRKKLLYIFKQPFMRPVQTTQEEDGCSCRFPEEEEGGCELRVKFSRSADAPAYKQGQNQLYNELNLGRREEYDVLDKRRGRDPEMGGKPRRKNPQEGLYNELQKDKMAEAYSEIGMKGERRRGKGHDGLYQGLSTATKDTYDALHMQALPPR

SEQ ID NO: 5448 - protein, 486 aa, Artificial Sequence
  Description of Artificial Sequence: Synthetic Chimeric Antigen Receptor sequence
MALPVTALLLPLALLLHAARPDVVMTQSPAFLSVTPGEKVTITCRASKSISKDLAWYQQKPDQAPKLLIYSGSTLQSGVPSRFSGSGSGTDFTFTISSLEAEDAATYYCQQHNKYPYTFGGGTKVEIKGGGGSGGGGSGGGGSGGGGSQVQLVQSGAEVKKPGASVKVSCKASGYTFTSYWMNWVRQAPGQGLEWMGRIDPYDSETHYNQKFKDRVTMTVDKSTSTAYMELSSLRSEDTAVYYCARGNWDDYWGQGTTVTVSSTTTPAPRPPTPAPTIASQPLSLRPEACRPAAGGAVHTRGLDFACDIYIWAPLAGTCGVLLLSLVITLYCKRGRKKLLYIFKQPFMRPVQTTQEEDGCSCRFPEEEEGGCELRVKFSRSADAPAYKQGQNQLYNELNLGRREEYDVLDKRRGRDPEMGGKPRRKNPQEGLYNELQKDKMAEAYSEIGMKGERRRGKGHDGLYQGLSTATKDTYDALHMQALPPR

SEQ ID NO: 5449 - protein, 486 aa, Artificial Sequence
  Description of Artificial Sequence: Synthetic Chimeric Antigen Receptor sequence
MALPVTALLLPLALLLHAARPDVVMTQSPAFLSVTPGEKVTITCRASKSISKDLAWYQQKPDQAPKLLIYSGSTLQSGVPSRFSGSGSGTDFTFTISSLEAEDAATYYCQQHNKYPYTFGGGTKVEIKGGGGSGGGGSGGGGSGGGGSQVQLVQSGSELKKPGASVKVSCKASGYTFTSYWMNWVRQAPGQGLEWMGRIDPYDSETHYNQKFKDRFVFSVDKSVSTAYLQISSLKAEDTAVYYCARGNWDDYWGQGTTVTVSSTTTPAPRPPTPAPTIASQPLSLRPEACRPAAGGAVHTRGLDFACDIYIWAPLAGTCGVLLLSLVITLYCKRGRKKLLYIFKQPFMRPVQTTQEEDGCSCRFPEEEEGGCELRVKFSRSADAPAYKQGQNQLYNELNLGRREEYDVLDKRRGRDPEMGGKPRRKNPQEGLYNELQKDKMAEAYSEIGMKGERRRGKGHDGLYQGLSTATKDTYDALHMQALPPR

SEQ ID NO: 5450 - protein, 486 aa, Artificial Sequence
  Description of Artificial Sequence: Synthetic Chimeric Antigen Receptor sequence
MALPVTALLLPLALLLHAARPDVVMTQSPDSLAVSLGERATINCRASKSISKDLAWYQQKPGQPPKLLIYSGSTLQSGVPDRFSGSGSGTDFTLTISSLQAEDVAVYYCQQHNKYPYTFGGGTKVEIKGGGGSGGGGSGGGGSGGGGSEVQLVESGGGLVQPGGSLRLSCAASGYTFTSYWMNWVRQAPGKGLVWVSRIDPYDSETHYNQKFKDRFTISVDKAKSTAYLQMNSLRAEDTAVYYCARGNWDDYWGQGTTVTVSSTTTPAPRPPTPAPTIASQPLSLRPEACRPAAGGAVHTRGLDFACDIYIWAPLAGTCGVLLLSLVITLYCKRGRKKLLYIFKQPFMRPVQTTQEEDGCSCRFPEEEEGGCELRVKFSRSADAPAYKQGQNQLYNELNLGRREEYDVLDKRRGRDPEMGGKPRRKNPQEGLYNELQKDKMAEAYSEIGMKGERRRGKGHDGLYQGLSTATKDTYDALHMQALPPR

SEQ ID NO: 5451 - protein, 486 aa, Artificial Sequence
  Description of Artificial Sequence: Synthetic Chimeric Antigen Receptor sequence
MALPVTALLLPLALLLHAARPDVVMTQSPDSLAVSLGERATINCRASKSISKDLAWYQQKPGQPPKLLIYSGSTLQSGVPDRFSGSGSGTDFTLTISSLQAEDVAVYYCQQHNKYPYTFGGGTKVEIKGGGGSGGGGSGGGGSGGGGSEVQLVQSGAEVKKPGESLRISCKGSGYTFTSYWMNWVRQMPGKGLEWMGRIDPYDSETHYNQKFKDHVTISVDKSISTAYLQWSSLKASDTAMYYCARGNWDDYWGQGTTVTVSSTTTPAPRPPTPAPTIASQPLSLRPEACRPAAGGAVHTRGLDFACDIYIWAPLAGTCGVLLLSLVITLYCKRGRKKLLYIFKQPFMRPVQTTQEEDGCSCRFPEEEEGGCELRVKFSRSADAPAYKQGQNQLYNELNLGRREEYDVLDKRRGRDPEMGGKPRRKNPQEGLYNELQKDKMAEAYSEIGMKGERRRGKGHDGLYQGLSTATKDTYDALHMQALPPR

SEQ ID NO: 5452 - protein, 486 aa, Artificial Sequence
  Description of Artificial Sequence: Synthetic Chimeric Antigen Receptor sequence
MALPVTALLLPLALLLHAARPDVVMTQSPDSLAVSLGERATINCRASKSISKDLAWYQQKPGQPPKLLIYSGSTLQSGVPDRFSGSGSGTDFTLTISSLQAEDVAVYYCQQHNKYPYTFGGGTKVEIKGGGGSGGGGSGGGGSGGGGSQVQLVQSGAEVKKPGASVKVSCKASGYTFTSYWMNWVRQAPGQGLEWMGRIDPYDSETHYNQKFKDRVTMTVDKSTSTAYMELSSLRSEDTAVYYCARGNWDDYWGQGTTVTVSSTTTPAPRPPTPAPTIASQPLSLRPEACRPAAGGAVHTRGLDFACDIYIWAPLAGTCGVLLLSLVITLYCKRGRKKLLYIFKQPFMRPVQTTQEEDGCSCRFPEEEEGGCELRVKFSRSADAPAYKQGQNQLYNELNLGRREEYDVLDKRRGRDPEMGGKPRRKNPQEGLYNELQKDKMAEAYSEIGMKGERRRGKGHDGLYQGLSTATKDTYDALHMQALPPR

SEQ ID NO: 5453 - protein, 486 aa, Artificial Sequence
  Description of Artificial Sequence: Synthetic Chimeric Antigen Receptor sequence
MALPVTALLLPLALLLHAARPDVVMTQSPDSLAVSLGERATINCRASKSISKDLAWYQQKPGQPPKLLIYSGSTLQSGVPDRFSGSGSGTDFTLTISSLQAEDVAVYYCQQHNKYPYTFGGGTKVEIKGGGGSGGGGSGGGGSGGGGSQVQLVQSGSELKKPGASVKVSCKASGYTFTSYWMNWVRQAPGQGLEWMGRIDPYDSETHYNQKFKDRFVFSVDKSVSTAYLQISSLKAEDTAVYYCARGNWDDYWGQGTTVTVSSTTTPAPRPPTPAPTIASQPLSLRPEACRPAAGGAVHTRGLDFACDIYIWAPLAGTCGVLLLSLVITLYCKRGRKKLLYIFKQPFMRPVQTTQEEDGCSCRFPEEEEGGCELRVKFSRSADAPAYKQGQNQLYNELNLGRREEYDVLDKRRGRDPEMGGKPRRKNPQEGLYNELQKDKMAEAYSEIGMKGERRRGKGHDGLYQGLSTATKDTYDALHMQALPPR

SEQ ID NO: 5454 - protein, 486 aa, Artificial Sequence
  Description of Artificial Sequence: Synthetic Chimeric Antigen Receptor sequence
MALPVTALLLPLALLLHAARPEVQLVESGGGLVQPGGSLRLSCAASGYTFTSYWMNWVRQAPGKGLVWVSRIDPYDSETHYNQKFKDRFTISVDKAKSTAYLQMNSLRAEDTAVYYCARGNWDDYWGQGTTVTVSSGGGGSGGGGSGGGGSGGGGSDVQLTQSPSFLSASVGDRVTITCRASKSISKDLAWYQQKPGKAPKLLIYSGSTLQSGVPSRFSGSGSGTEFTLTISSLQPEDFATYYCQQHNKYPYTFGGGTKVEIKTTTPAPRPPTPAPTIASQPLSLRPEACRPAAGGAVHTRGLDFACDIYIWAPLAGTCGVLLLSLVITLYCKRGRKKLLYIFKQPFMRPVQTTQEEDGCSCRFPEEEEGGCELRVKFSRSADAPAYKQGQNQLYNELNLGRREEYDVLDKRRGRDPEMGGKPRRKNPQEGLYNELQKDKMAEAYSEIGMKGERRRGKGHDGLYQGLSTATKDTYDALHMQALPPR

SEQ ID NO: 5455 - protein, 486 aa, Artificial Sequence
  Description of Artificial Sequence: Synthetic Chimeric Antigen Receptor sequence
MALPVTALLLPLALLLHAARPEVQLVESGGGLVQPGGSLRLSCAASGYTFTSYWMNWVRQAPGKGLVWVSRIDPYDSETHYNQKFKDRFTISVDKAKSTAYLQMNSLRAEDTAVYYCARGNWDDYWGQGTTVTVSSGGGGSGGGGSGGGGSGGGGSDVVMTQSPAFLSVTPGEKVTITCRASKSISKDLAWYQQKPDQAPKLLIYSGSTLQSGVPSRFSGSGSGTDFTFTISSLEAEDAATYYCQQHNKYPYTFGGGTKVEIKTTTPAPRPPTPAPTIASQPLSLRPEACRPAAGGAVHTRGLDFACDIYIWAPLAGTCGVLLLSLVITLYCKRGRKKLLYIFKQPFMRPVQTTQEEDGCSCRFPEEEEGGCELRVKFSRSADAPAYKQGQNQLYNELNLGRREEYDVLDKRRGRDPEMGGKPRRKNPQEGLYNELQKDKMAEAYSEIGMKGERRRGKGHDGLYQGLSTATKDTYDALHMQALPPR

SEQ ID NO: 5456 - protein, 486 aa, Artificial Sequence
  Description of Artificial Sequence: Synthetic Chimeric Antigen Receptor sequence
MALPVTALLLPLALLLHAARPEVQLVESGGGLVQPGGSLRLSCAASGYTFTSYWMNWVRQAPGKGLVWVSRIDPYDSETHYNQKFKDRFTISVDKAKSTAYLQMNSLRAEDTAVYYCARGNWDDYWGQGTTVTVSSGGGGSGGGGSGGGGSGGGGSDVVMTQSPDSLAVSLGERATINCRASKSISKDLAWYQQKPGQPPKLLIYSGSTLQSGVPDRFSGSGSGTDFTLTISSLQAEDVAVYYCQQHNKYPYTFGGGTKVEIKTTTPAPRPPTPAPTIASQPLSLRPEACRPAAGGAVHTRGLDFACDIYIWAPLAGTCGVLLLSLVITLYCKRGRKKLLYIFKQPFMRPVQTTQEEDGCSCRFPEEEEGGCELRVKFSRSADAPAYKQGQNQLYNELNLGRREEYDVLDKRRGRDPEMGGKPRRKNPQEGLYNELQKDKMAEAYSEIGMKGERRRGKGHDGLYQGLSTATKDTYDALHMQALPPR

SEQ ID NO: 5457 - protein, 486 aa, Artificial Sequence
  Description of Artificial Sequence: Synthetic Chimeric Antigen Receptor sequence
MALPVTALLLPLALLLHAARPEVQLVESGGGLVQPGGSLRLSCAASGYTFTSYWMNWVRQAPGKGLVWVSRIDPYDSETHYNQKFKDRFTISVDKAKSTAYLQMNSLRAEDTAVYYCARGNWDDYWGQGTTVTVSSGGGGSGGGGSGGGGSGGGGSEVVLTQSPATLSLSPGERATLSCRASKSISKDLAWYQQKPGQAPRLLIYSGSTLQSGIPARFSGSGSGTDFTLTISSLEPEDFAVYYCQQHNKYPYTFGGGTKVEIKTTTPAPRPPTPAPTIASQPLSLRPEACRPAAGGAVHTRGLDFACDIYIWAPLAGTCGVLLLSLVITLYCKRGRKKLLYIFKQPFMRPVQTTQEEDGCSCRFPEEEEGGCELRVKFSRSADAPAYKQGQNQLYNELNLGRREEYDVLDKRRGRDPEMGGKPRRKNPQEGLYNELQKDKMAEAYSEIGMKGERRRGKGHDGLYQGLSTATKDTYDALHMQALPPR

SEQ ID NO: 5458 - protein, 486 aa, Artificial Sequence
  Description of Artificial Sequence: Synthetic Chimeric Antigen Receptor sequence
MALPVTALLLPLALLLHAARPEVQLVQSGAEVKKPGESLRISCKGSGYTFTSYWMNWVRQMPGKGLEWMGRIDPYDSETHYNQKFKDHVTISVDKSISTAYLQWSSLKASDTAMYYCARGNWDDYWGQGTTVTVSSGGGGSGGGGSGGGGSGGGGSDVQLTQSPSFLSASVGDRVTITCRASKSISKDLAWYQQKPGKAPKLLIYSGSTLQSGVPSRFSGSGSGTEFTLTISSLQPEDFATYYCQQHNKYPYTFGGGTKVEIKTTTPAPRPPTPAPTIASQPLSLRPEACRPAAGGAVHTRGLDFACDIYIWAPLAGTCGVLLLSLVITLYCKRGRKKLLYIFKQPFMRPVQTTQEEDGCSCRFPEEEEGGCELRVKFSRSADAPAYKQGQNQLYNELNLGRREEYDVLDKRRGRDPEMGGKPRRKNPQEGLYNELQKDKMAEAYSEIGMKGERRRGKGHDGLYQGLSTATKDTYDALHMQALPPR

SEQ ID NO: 5459 - protein, 486 aa, Artificial Sequence
  Description of Artificial Sequence: Synthetic Chimeric Antigen Receptor sequence
MALPVTALLLPLALLLHAARPEVQLVQSGAEVKKPGESLRISCKGSGYTFTSYWMNWVRQMPGKGLEWMGRIDPYDSETHYNQKFKDHVTISVDKSISTAYLQWSSLKASDTAMYYCARGNWDDYWGQGTTVTVSSGGGGSGGGGSGGGGSGGGGSDVVMTQSPAFLSVTPGEKVTITCRASKSISKDLAWYQQKPDQAPKLLIYSGSTLQSGVPSRFSGSGSGTDFTFTISSLEAEDAATYYCQQHNKYPYTFGGGTKVEIKTTTPAPRPPTPAPTIASQPLSLRPEACRPAAGGAVHTRGLDFACDIYIWAPLAGTCGVLLLSLVITLYCKRGRKKLLYIFKQPFMRPVQTTQEEDGCSCRFPEEEEGGCELRVKFSRSADAPAYKQGQNQLYNELNLGRREEYDVLDKRRGRDPEMGGKPRRKNPQEGLYNELQKDKMAEAYSEIGMKGERRRGKGHDGLYQGLSTATKDTYDALHMQALPPR

SEQ ID NO: 5460 - protein, 486 aa, Artificial Sequence
  Description of Artificial Sequence: Synthetic Chimeric Antigen Receptor sequence
MALPVTALLLPLALLLHAARPEVQLVQSGAEVKKPGESLRISCKGSGYTFTSYWMNWVRQMPGKGLEWMGRIDPYDSETHYNQKFKDHVTISVDKSISTAYLQWSSLKASDTAMYYCARGNWDDYWGQGTTVTVSSGGGGSGGGGSGGGGSGGGGSDVVMTQSPDSLAVSLGERATINCRASKSISKDLAWYQQKPGQPPKLLIYSGSTLQSGVPDRFSGSGSGTDFTLTISSLQAEDVAVYYCQQHNKYPYTFGGGTKVEIKTTTPAPRPPTPAPTIASQPLSLRPEACRPAAGGAVHTRGLDFACDIYIWAPLAGTCGVLLLSLVITLYCKRGRKKLLYIFKQPFMRPVQTTQEEDGCSCRFPEEEEGGCELRVKFSRSADAPAYKQGQNQLYNELNLGRREEYDVLDKRRGRDPEMGGKPRRKNPQEGLYNELQKDKMAEAYSEIGMKGERRRGKGHDGLYQGLSTATKDTYDALHMQALPPR

SEQ ID NO: 5461 - protein, 486 aa, Artificial Sequence
  Description of Artificial Sequence: Synthetic Chimeric Antigen Receptor sequence
MALPVTALLLPLALLLHAARPEVQLVQSGAEVKKPGESLRISCKGSGYTFTSYWMNWVRQMPGKGLEWMGRIDPYDSETHYNQKFKDHVTISVDKSISTAYLQWSSLKASDTAMYYCARGNWDDYWGQGTTVTVSSGGGGSGGGGSGGGGSGGGGSEVVLTQSPATLSLSPGERATLSCRASKSISKDLAWYQQKPGQAPRLLIYSGSTLQSGIPARFSGSGSGTDFTLTISSLEPEDFAVYYCQQHNKYPYTFGGGTKVEIKTTTPAPRPPTPAPTIASQPLSLRPEACRPAAGGAVHTRGLDFACDIYIWAPLAGTCGVLLLSLVITLYCKRGRKKLLYIFKQPFMRPVQTTQEEDGCSCRFPEEEEGGCELRVKFSRSADAPAYKQGQNQLYNELNLGRREEYDVLDKRRGRDPEMGGKPRRKNPQEGLYNELQKDKMAEAYSEIGMKGERRRGKGHDGLYQGLSTATKDTYDALHMQALPPR

SEQ ID NO: 5462 - protein, 486 aa, Artificial Sequence
  Description of Artificial Sequence: Synthetic Chimeric Antigen Receptor sequence
MALPVTALLLPLALLLHAARPEVVLTQSPATLSLSPGERATLSCRASKSISKDLAWYQQKPGQAPRLLIYSGSTLQSGIPARFSGSGSGTDFTLTISSLEPEDFAVYYCQQHNKYPYTFGGGTKVEIKGGGGSGGGGSGGGGSGGGGSEVQLVESGGGLVQPGGSLRLSCAASGYTFTSYWMNWVRQAPGKGLVWVSRIDPYDSETHYNQKFKDRFTISVDKAKSTAYLQMNSLRAEDTAVYYCARGNWDDYWGQGTTVTVSSTTTPAPRPPTPAPTIASQPLSLRPEACRPAAGGAVHTRGLDFACDIYIWAPLAGTCGVLLLSLVITLYCKRGRKKLLYIFKQPFMRPVQTTQEEDGCSCRFPEEEEGGCELRVKFSRSADAPAYKQGQNQLYNELNLGRREEYDVLDKRRGRDPEMGGKPRRKNPQEGLYNELQKDKMAEAYSEIGMKGERRRGKGHDGLYQGLSTATKDTYDALHMQALPPR

SEQ ID NO: 5463 - protein, 486 aa, Artificial Sequence
  Description of Artificial Sequence: Synthetic Chimeric Antigen Receptor sequence
MALPVTALLLPLALLLHAARPEVVLTQSPATLSLSPGERATLSCRASKSISKDLAWYQQKPGQAPRLLIYSGSTLQSGIPARFSGSGSGTDFTLTISSLEPEDFAVYYCQQHNKYPYTFGGGTKVEIKGGGGSGGGGSGGGGSGGGGSEVQLVQSGAEVKKPGESLRISCKGSGYTFTSYWMNWVRQMPGKGLEWMGRIDPYDSETHYNQKFKDHVTISVDKSISTAYLQWSSLKASDTAMYYCARGNWDDYWGQGTTVTVSSTTTPAPRPPTPAPTIASQPLSLRPEACRPAAGGAVHTRGLDFACDIYIWAPLAGTCGVLLLSLVITLYCKRGRKKLLYIFKQPFMRPVQTTQEEDGCSCRFPEEEEGGCELRVKFSRSADAPAYKQGQNQLYNELNLGRREEYDVLDKRRGRDPEMGGKPRRKNPQEGLYNELQKDKMAEAYSEIGMKGERRRGKGHDGLYQGLSTATKDTYDALHMQALPPR

SEQ ID NO: 5464 - protein, 486 aa, Artificial Sequence
  Description of Artificial Sequence: Synthetic Chimeric Antigen Receptor sequence
MALPVTALLLPLALLLHAARPEVVLTQSPATLSLSPGERATLSCRASKSISKDLAWYQQKPGQAPRLLIYSGSTLQSGIPARFSGSGSGTDFTLTISSLEPEDFAVYYCQQHNKYPYTFGGGTKVEIKGGGGSGGGGSGGGGSGGGGSQVQLVQSGAEVKKPGASVKVSCKASGYTFTSYWMNWVRQAPGQGLEWMGRIDPYDSETHYNQKFKDRVTMTVDKSTSTAYMELSSLRSEDTAVYYCARGNWDDYWGQGTTVTVSSTTTPAPRPPTPAPTIASQPLSLRPEACRPAAGGAVHTRGLDFACDIYIWAPLAGTCGVLLLSLVITLYCKRGRKKLLYIFKQPFMRPVQTTQEEDGCSCRFPEEEEGGCELRVKFSRSADAPAYKQGQNQLYNELNLGRREEYDVLDKRRGRDPEMGGKPRRKNPQEGLYNELQKDKMAEAYSEIGMKGERRRGKGHDGLYQGLSTATKDTYDALHMQALPPR

SEQ ID NO: 5465 - protein, 486 aa, Artificial Sequence
  Description of Artificial Sequence: Synthetic Chimeric Antigen Receptor sequence
MALPVTALLLPLALLLHAARPEVVLTQSPATLSLSPGERATLSCRASKSISKDLAWYQQKPGQAPRLLIYSGSTLQSGIPARFSGSGSGTDFTLTISSLEPEDFAVYYCQQHNKYPYTFGGGTKVEIKGGGGSGGGGSGGGGSGGGGSQVQLVQSGSELKKPGASVKVSCKASGYTFTSYWMNWVRQAPGQGLEWMGRIDPYDSETHYNQKFKDRFVFSVDKSVSTAYLQISSLKAEDTAVYYCARGNWDDYWGQGTTVTVSSTTTPAPRPPTPAPTIASQPLSLRPEACRPAAGGAVHTRGLDFACDIYIWAPLAGTCGVLLLSLVITLYCKRGRKKLLYIFKQPFMRPVQTTQEEDGCSCRFPEEEEGGCELRVKFSRSADAPAYKQGQNQLYNELNLGRREEYDVLDKRRGRDPEMGGKPRRKNPQEGLYNELQKDKMAEAYSEIGMKGERRRGKGHDGLYQGLSTATKDTYDALHMQALPPR

SEQ ID NO: 5466 - protein, 486 aa, Artificial Sequence
  Description of Artificial Sequence: Synthetic Chimeric Antigen Receptor sequence
MALPVTALLLPLALLLHAARPQVQLVQSGAEVKKPGASVKVSCKASGYTFTSYWMNWVRQAPGQGLEWMGRIDPYDSETHYNQKFKDRVTMTVDKSTSTAYMELSSLRSEDTAVYYCARGNWDDYWGQGTTVTVSSGGGGSGGGGSGGGGSGGGGSDVQLTQSPSFLSASVGDRVTITCRASKSISKDLAWYQQKPGKAPKLLIYSGSTLQSGVPSRFSGSGSGTEFTLTISSLQPEDFATYYCQQHNKYPYTFGGGTKVEIKTTTPAPRPPTPAPTIASQPLSLRPEACRPAAGGAVHTRGLDFACDIYIWAPLAGTCGVLLLSLVITLYCKRGRKKLLYIFKQPFMRPVQTTQEEDGCSCRFPEEEEGGCELRVKFSRSADAPAYKQGQNQLYNELNLGRREEYDVLDKRRGRDPEMGGKPRRKNPQEGLYNELQKDKMAEAYSEIGMKGERRRGKGHDGLYQGLSTATKDTYDALHMQALPPR

SEQ ID NO: 5467 - protein, 486 aa, Artificial Sequence
  Description of Artificial Sequence: Synthetic Chimeric Antigen Receptor sequence
MALPVTALLLPLALLLHAARPQVQLVQSGAEVKKPGASVKVSCKASGYTFTSYWMNWVRQAPGQGLEWMGRIDPYDSETHYNQKFKDRVTMTVDKSTSTAYMELSSLRSEDTAVYYCARGNWDDYWGQGTTVTVSSGGGGSGGGGSGGGGSGGGGSDVVMTQSPAFLSVTPGEKVTITCRASKSISKDLAWYQQKPDQAPKLLIYSGSTLQSGVPSRFSGSGSGTDFTFTISSLEAEDAATYYCQQHNKYPYTFGGGTKVEIKTTTPAPRPPTPAPTIASQPLSLRPEACRPAAGGAVHTRGLDFACDIYIWAPLAGTCGVLLLSLVITLYCKRGRKKLLYIFKQPFMRPVQTTQEEDGCSCRFPEEEEGGCELRVKFSRSADAPAYKQGQNQLYNELNLGRREEYDVLDKRRGRDPEMGGKPRRKNPQEGLYNELQKDKMAEAYSEIGMKGERRRGKGHDGLYQGLSTATKDTYDALHMQALPPR

SEQ ID NO: 5468 - protein, 486 aa, Artificial Sequence
  Description of Artificial Sequence: Synthetic Chimeric Antigen Receptor sequence
MALPVTALLLPLALLLHAARPQVQLVQSGAEVKKPGASVKVSCKASGYTFTSYWMNWVRQAPGQGLEWMGRIDPYDSETHYNQKFKDRVTMTVDKSTSTAYMELSSLRSEDTAVYYCARGNWDDYWGQGTTVTVSSGGGGSGGGGSGGGGSGGGGSDVVMTQSPDSLAVSLGERATINCRASKSISKDLAWYQQKPGQPPKLLIYSGSTLQSGVPDRFSGSGSGTDFTLTISSLQAEDVAVYYCQQHNKYPYTFGGGTKVEIKTTTPAPRPPTPAPTIASQPLSLRPEACRPAAGGAVHTRGLDFACDIYIWAPLAGTCGVLLLSLVITLYCKRGRKKLLYIFKQPFMRPVQTTQEEDGCSCRFPEEEEGGCELRVKFSRSADAPAYKQGQNQLYNELNLGRREEYDVLDKRRGRDPEMGGKPRRKNPQEGLYNELQKDKMAEAYSEIGMKGERRRGKGHDGLYQGLSTATKDTYDALHMQALPPR

SEQ ID NO: 5469 - protein, 486 aa, Artificial Sequence
  Description of Artificial Sequence: Synthetic Chimeric Antigen Receptor sequence
MALPVTALLLPLALLLHAARPQVQLVQSGAEVKKPGASVKVSCKASGYTFTSYWMNWVRQAPGQGLEWMGRIDPYDSETHYNQKFKDRVTMTVDKSTSTAYMELSSLRSEDTAVYYCARGNWDDYWGQGTTVTVSSGGGGSGGGGSGGGGSGGGGSEVVLTQSPATLSLSPGERATLSCRASKSISKDLAWYQQKPGQAPRLLIYSGSTLQSGIPARFSGSGSGTDFTLTISSLEPEDFAVYYCQQHNKYPYTFGGGTKVEIKTTTPAPRPPTPAPTIASQPLSLRPEACRPAAGGAVHTRGLDFACDIYIWAPLAGTCGVLLLSLVITLYCKRGRKKLLYIFKQPFMRPVQTTQEEDGCSCRFPEEEEGGCELRVKFSRSADAPAYKQGQNQLYNELNLGRREEYDVLDKRRGRDPEMGGKPRRKNPQEGLYNELQKDKMAEAYSEIGMKGERRRGKGHDGLYQGLSTATKDTYDALHMQALPPR

SEQ ID NO: 5470 - protein, 486 aa, Artificial Sequence
  Description of Artificial Sequence: Synthetic Chimeric Antigen Receptor sequence
MALPVTALLLPLALLLHAARPQVQLVQSGSELKKPGASVKVSCKASGYTFTSYWMNWVRQAPGQGLEWMGRIDPYDSETHYNQKFKDRFVFSVDKSVSTAYLQISSLKAEDTAVYYCARGNWDDYWGQGTTVTVSSGGGGSGGGGSGGGGSGGGGSDVQLTQSPSFLSASVGDRVTITCRASKSISKDLAWYQQKPGKAPKLLIYSGSTLQSGVPSRFSGSGSGTEFTLTISSLQPEDFATYYCQQHNKYPYTFGGGTKVEIKTTTPAPRPPTPAPTIASQPLSLRPEACRPAAGGAVHTRGLDFACDIYIWAPLAGTCGVLLLSLVITLYCKRGRKKLLYIFKQPFMRPVQTTQEEDGCSCRFPEEEEGGCELRVKFSRSADAPAYKQGQNQLYNELNLGRREEYDVLDKRRGRDPEMGGKPRRKNPQEGLYNELQKDKMAEAYSEIGMKGERRRGKGHDGLYQGLSTATKDTYDALHMQALPPR

SEQ ID NO: 5471 - protein, 486 aa, Artificial Sequence
  Description of Artificial Sequence: Synthetic Chimeric Antigen Receptor sequence
MALPVTALLLPLALLLHAARPQVQLVQSGSELKKPGASVKVSCKASGYTFTSYWMNWVRQAPGQGLEWMGRIDPYDSETHYNQKFKDRFVFSVDKSVSTAYLQISSLKAEDTAVYYCARGNWDDYWGQGTTVTVSSGGGGSGGGGSGGGGSGGGGSDVVMTQSPAFLSVTPGEKVTITCRASKSISKDLAWYQQKPDQAPKLLIYSGSTLQSGVPSRFSGSGSGTDFTFTISSLEAEDAATYYCQQHNKYPYTFGGGTKVEIKTTTPAPRPPTPAPTIASQPLSLRPEACRPAAGGAVHTRGLDFACDIYIWAPLAGTCGVLLLSLVITLYCKRGRKKLLYIFKQPFMRPVQTTQEEDGCSCRFPEEEEGGCELRVKFSRSADAPAYKQGQNQLYNELNLGRREEYDVLDKRRGRDPEMGGKPRRKNPQEGLYNELQKDKMAEAYSEIGMKGERRRGKGHDGLYQGLSTATKDTYDALHMQALPPR

SEQ ID NO: 5472 - protein, 486 aa, Artificial Sequence
  Description of Artificial Sequence: Synthetic Chimeric Antigen Receptor sequence
MALPVTALLLPLALLLHAARPQVQLVQSGSELKKPGASVKVSCKASGYTFTSYWMNWVRQAPGQGLEWMGRIDPYDSETHYNQKFKDRFVFSVDKSVSTAYLQISSLKAEDTAVYYCARGNWDDYWGQGTTVTVSSGGGGSGGGGSGGGGSGGGGSDVVMTQSPDSLAVSLGERATINCRASKSISKDLAWYQQKPGQPPKLLIYSGSTLQSGVPDRFSGSGSGTDFTLTISSLQAEDVAVYYCQQHNKYPYTFGGGTKVEIKTTTPAPRPPTPAPTIASQPLSLRPEACRPAAGGAVHTRGLDFACDIYIWAPLAGTCGVLLLSLVITLYCKRGRKKLLYIFKQPFMRPVQTTQEEDGCSCRFPEEEEGGCELRVKFSRSADAPAYKQGQNQLYNELNLGRREEYDVLDKRRGRDPEMGGKPRRKNPQEGLYNELQKDKMAEAYSEIGMKGERRRGKGHDGLYQGLSTATKDTYDALHMQALPPR

SEQ ID NO: 5473 - protein, 486 aa, Artificial Sequence
  Description of Artificial Sequence: Synthetic Chimeric Antigen Receptor sequence
MALPVTALLLPLALLLHAARPQVQLVQSGSELKKPGASVKVSCKASGYTFTSYWMNWVRQAPGQGLEWMGRIDPYDSETHYNQKFKDRFVFSVDKSVSTAYLQISSLKAEDTAVYYCARGNWDDYWGQGTTVTVSSGGGGSGGGGSGGGGSGGGGSEVVLTQSPATLSLSPGERATLSCRASKSISKDLAWYQQKPGQAPRLLIYSGSTLQSGIPARFSGSGSGTDFTLTISSLEPEDFAVYYCQQHNKYPYTFGGGTKVEIKTTTPAPRPPTPAPTIASQPLSLRPEACRPAAGGAVHTRGLDFACDIYIWAPLAGTCGVLLLSLVITLYCKRGRKKLLYIFKQPFMRPVQTTQEEDGCSCRFPEEEEGGCELRVKFSRSADAPAYKQGQNQLYNELNLGRREEYDVLDKRRGRDPEMGGKPRRKNPQEGLYNELQKDKMAEAYSEIGMKGERRRGKGHDGLYQGLSTATKDTYDALHMQALPPR

SEQ ID NO: 5474 - protein, 487 aa, Artificial Sequence
  Description of Artificial Sequence: Synthetic Chimeric Antigen Receptor sequence
MGWSWIFLFLVSGTGGVLSEVQLQQSGPELVKPGASVKMSCKASGYTFTDYYMKWVKQSHGKSLEWIGDIIPSNGATFYNQKFKGKATLTVDRSSSTAYMHLNSLTSEDSAVYYCTRSHLLRASWFAYWGQGTLVTVSAASGGGGSGGGGSGGGGSMESQTQVLMSLLFWVSGTCGDFVMTQSPSSLTVTAGEKVTMSCKSSQSLLNSGNQKNYLTWYLQKPGQPPKLLIYWASTRESGVPDRFTGSGSGTDFTLTISSVQAEDLAVYYCQNDYSYPYTFGGGTKLEIKRGLAVSTISSFFPPGYQIISFFLALTSTALLFLLFFLTLRFSVVKRGRKKLLYIFKQPFMRPVQTTQEEDGCSCRFPEEEEGGCELRVKFSRSADAPAYQQGQNQLYNELNLGRREEYDVLDKRRGRDPEMGGKPRRKNPQEGLYNELQKDKMAEAYSEIGMKGERRRGKGHDGLYQGLSTATKDTYDALHMQALPPR

SEQ ID NO: 5475 - protein, 495 aa, Artificial Sequence
  Description of Artificial Sequence: Synthetic Chimeric Antigen Receptor sequence
MALPVTALLLPLALLLHAARPQIQLVQSGPELKKPGETVKISCKASGYIFTNYGMNWVKQAPGKSFKWMGWINTYTGESTYSADFKGRFAFSLETSASTAYLHINDLKNEDTATYFCARSGGYDPMDYWGQGTSVTVSSGGGCPYSNPSLCGGGGSDIVLTQSPASLAVSLGQRATISCRASESVDNYGNTFMHWYQQKPGQPPKLLIYRASNLESGIPARFSGSGSRTDFTLTINPVEADDVATYYCQQSNEDPPTFGAGTKLELKRSDPTTTPAPRPPTPAPTIASQPLSLRPEACRPAAGGAVHTRGLDFACDIYIWAPLAGTCGVLLLSLVITLYCRRGRKKLLYIFKQPFMRPVQTTQEEDGCSCRFPEEEEGGCELRVKFSRSADAPAYQQGQNQLYNELNLGRREEYDVLDKRRGRDPEMGGKPRRKNPQEGLYNELQKDKMAEAYSEIGMKGERRRGKGHDGLYQGLSTATKDTYDALHMQALPPRE

SEQ ID NO: 5476 - protein, 499 aa, Artificial Sequence
  Description of Artificial Sequence: Synthetic Chimeric Antigen Receptor sequence
MALPVTALLLPLALLLHAARPEVKLVESGGGLVQPGGSLSLSCAASGFTFTDYYMSWVRQPPGKALEWLALIRSKADGYTTEYSASVKGRFTLSRDDSQSILYLQMNALRPEDSATYYCARDAAYYSYYSPEGAMDYWGQGTSVTVSSGGGGSGGGGSGGGGSMADYKDIVMTQSHKFMSTSVGDRVNITCKASQNVDSAVAWYQQKPGQSPKALIYSASYRYSGVPDRFTGRGSGTDFTLTISSVQAEDLAVYYCQQYYSTPWTFGGGTKLEIKRTTTPAPRPPTPAPTIASQPLSLRPEACRPAAGGAVHTRGLDFACDIYIWAPLAGTCGVLLLSLVITLYCKRGRKKLLYIFKQPFMRPVQTTQEEDGCSCRFPEEEEGGCELRVKFSRSADAPAYQQGQNQLYNELNLGRREEYDVLDKRRGRDPEMGGKPRRKNPQEGLYNELQKDKMAEAYSEIGMKGERRRGKGHDGLYQGLSTATKDTYDALHMQALPPR

SEQ ID NO: 5477 - protein, 499 aa, Artificial Sequence
  Description of Artificial Sequence: Synthetic Chimeric Antigen Receptor sequence
MALPVTALLLPLALLLHAARPEVKLVESGGGLVQPGRSLRLSCTASGFTFTDYYMSWVRQAPGKGLEWVGLIRSKADGYTTEYSASVKGRFTISRDDSKSILYLQMNSLKTEDTAVYYCARDAAYYSYYSPEGAMDYWGQGTLVTVSSGGGGSGGGGSGGGGSMADYKDIQMTQSPSSVSASVGDRVTITCRASQNVDSAVAWYQQKPGKAPKALIYSASYRYSGVPSRFSGRGSGTDFTLTISSLQPEDFATYYCQQYYSTPWTFGQGTKVEIKRTTTPAPRPPTPAPTIASQPLSLRPEACRPAAGGAVHTRGLDFACDIYIWAPLAGTCGVLLLSLVITLYCKRGRKKLLYIFKQPFMRPVQTTQEEDGCSCRFPEEEEGGCELRVKFSRSADAPAYQQGQNQLYNELNLGRREEYDVLDKRRGRDPEMGGKPRRKNPQEGLYNELQKDKMAEAYSEIGMKGERRRGKGHDGLYQGLSTATKDTYDALHMQALPPR

SEQ ID NO: 5478 - protein, 499 aa, Artificial Sequence
  Description of Artificial Sequence: Synthetic Chimeric Antigen Receptor sequence
MALPVTALLLPLALLLHAARPEVKLVESGGGLVQPGRSLRLSCTASGFTFTDYYMSWVRQAPGKGLEWVGLIRSKADGYTTEYSASVKGRFTISRDDSKSILYLQMNSLKTEDTAVYYCARDAAYYSYYSPEGAMDYWGQGTLVTVSSGGGGSGGGGSGGGGSMADYKDIQMTQSPSSVSASVGDRVTITCRASQNVDSAVAWYQQKPGKAPKALIYSASYRYSGVPSRFSGSGSGTDFTLTISSLQPEDFATYYCQQYYSTPWTFGQGTKVEIKRTTTPAPRPPTPAPTIASQPLSLRPEACRPAAGGAVHTRGLDFACDIYIWAPLAGTCGVLLLSLVITLYCKRGRKKLLYIFKQPFMRPVQTTQEEDGCSCRFPEEEEGGCELRVKFSRSADAPAYQQGQNQLYNELNLGRREEYDVLDKRRGRDPEMGGKPRRKNPQEGLYNELQKDKMAEAYSEIGMKGERRRGKGHDGLYQGLSTATKDTYDALHMQALPPR

SEQ ID NO: 5479 - protein, 499 aa, Artificial Sequence
  Description of Artificial Sequence: Synthetic Chimeric Antigen Receptor sequence
MALPVTALLLPLALLLHAARPEVKLVESGGGLVQPGRSLRLSCTASGFTFTDYYMSWVRQAPGKGLEWVGLIRSKADGYTTEYSASVKGRFTISRDDSKSILYLQMNSLKTEDTAVYYCARDAAYYSYYSPEGAMDYWGQGTLVTVSSGGGGSGGGGSGGGGSMADYKDIQMTQSPSSVSASVGDRVTITCRASQNVDSAVAWYQQKPGKAPKLLIYSASYGQSGVPSRFSGSGSGTDFTLTISSLQPEDFATYYCQQYYSTPWTFGQGTKVEIKRTTTPAPRPPTPAPTIASQPLSLRPEACRPAAGGAVHTRGLDFACDIYIWAPLAGTCGVLLLSLVITLYCKRGRKKLLYIFKQPFMRPVQTTQEEDGCSCRFPEEEEGGCELRVKFSRSADAPAYQQGQNQLYNELNLGRREEYDVLDKRRGRDPEMGGKPRRKNPQEGLYNELQKDKMAEAYSEIGMKGERRRGKGHDGLYQGLSTATKDTYDALHMQALPPR

SEQ ID NO: 5480 - protein, 499 aa, Artificial Sequence
  Description of Artificial Sequence: Synthetic Chimeric Antigen Receptor sequence
MALPVTALLLPLALLLHAARPEVKLVESGGGLVQPGRSLRLSCTASGFTFTDYYMSWVRQAPGKGLEWVGLIRSKADGYTTEYSASVKGRFTISRDDSKSILYLQMNSLKTEDTAVYYCARDAAYYSYYSPEGAMDYWGQGTLVTVSSGGGGSGGGGSGGGGSMADYKDIQMTQSPSSVSASVGDRVTITCRASQNVDSAVAWYQQKPGKAPKLLIYSASYRQSGVPSRFSGSGSGTDFTLTISSLQPEDFATYYCQQYYSTPWTFGQGTKVEIKRTTTPAPRPPTPAPTIASQPLSLRPEACRPAAGGAVHTRGLDFACDIYIWAPLAGTCGVLLLSLVITLYCKRGRKKLLYIFKQPFMRPVQTTQEEDGCSCRFPEEEEGGCELRVKFSRSADAPAYQQGQNQLYNELNLGRREEYDVLDKRRGRDPEMGGKPRRKNPQEGLYNELQKDKMAEAYSEIGMKGERRRGKGHDGLYQGLSTATKDTYDALHMQALPPR

SEQ ID NO: 5481 - protein, 499 aa, Artificial Sequence
  Description of Artificial Sequence: Synthetic Chimeric Antigen Receptor sequence
MALPVTALLLPLALLLHAARPEVKLVESGGGLVQPGRSLRLSCTASGFTFTDYYMSWVRQAPGKGLEWVGLIRSKADGYTTEYSASVKGRFTISRDDSKSILYLQMNSLKTEDTAVYYCARDAAYYSYYSPEGAMDYWGQGTLVTVSSGGGGSGGGGSGGGGSMADYKDIQMTQSPSSVSASVGDRVTITCRASQNVDSAVAWYQQKPGKAPKLLIYSASYRYSGVPSRFSGSGSGTDFTLTISSLQPEDFATYYCQQYYSTPWTFGQGTKVEIKRTTTPAPRPPTPAPTIASQPLSLRPEACRPAAGGAVHTRGLDFACDIYIWAPLAGTCGVLLLSLVITLYCKRGRKKLLYIFKQPFMRPVQTTQEEDGCSCRFPEEEEGGCELRVKFSRSADAPAYQQGQNQLYNELNLGRREEYDVLDKRRGRDPEMGGKPRRKNPQEGLYNELQKDKMAEAYSEIGMKGERRRGKGHDGLYQGLSTATKDTYDALHMQALPPR

SEQ ID NO: 5482 - protein, 499 aa, Artificial Sequence
  Description of Artificial Sequence: Synthetic Chimeric Antigen Receptor sequence
MALPVTALLLPLALLLHAARPEVKLVESGGGLVQPGRSLRLSCTASGFTFTDYYMSWVRQAPGKGLEWVGLIRSKADGYTTEYSASVKGRFTISRDDSKSILYLQMNSLKTEDTAVYYCARDAAYYSYYSPEGAMDYWGQGTLVTVSSGGGGSGGGGSGGGGSMADYKDIVMTQSPSSVSASVGDRVTITCRASQNVDSAVAWYQQKPGKAPKALIYSASYRYSGVPSRFSGRGSGTDFTLTISSLQPEDFATYYCQQYYSTPWTFGQGTKVEIKRTTTPAPRPPTPAPTIASQPLSLRPEACRPAAGGAVHTRGLDFACDIYIWAPLAGTCGVLLLSLVITLYCKRGRKKLLYIFKQPFMRPVQTTQEEDGCSCRFPEEEEGGCELRVKFSRSADAPAYQQGQNQLYNELNLGRREEYDVLDKRRGRDPEMGGKPRRKNPQEGLYNELQKDKMAEAYSEIGMKGERRRGKGHDGLYQGLSTATKDTYDALHMQALPPR

SEQ ID NO: 5483 - protein, 499 aa, Artificial Sequence
  Description of Artificial Sequence: Synthetic Chimeric Antigen Receptor sequence
MALPVTALLLPLALLLHAARPEVQLVESGGGLVQPGRSLRLSCTASGFTFTDYYMSWVRQAPGKGLEWVGFIRSKADGYTTEYAASVKGRFTISRDDSKSIAYLQMNSLKTEDTAVYYCARDAAYYSYYSPEGAMDYWGQGTLVTVSSGGGGSGGGGSGGGGSMADYKDIQMTQSPSSVSASVGDRVTITCRASQNVDSAVAWYQQKPGKAPKALIYSASYRYSGVPSRFSGRGSGTDFTLTISSLQPEDFATYYCQQYYSTPWTFGQGTKVEIKRTTTPAPRPPTPAPTIASQPLSLRPEACRPAAGGAVHTRGLDFACDIYIWAPLAGTCGVLLLSLVITLYCKRGRKKLLYIFKQPFMRPVQTTQEEDGCSCRFPEEEEGGCELRVKFSRSADAPAYQQGQNQLYNELNLGRREEYDVLDKRRGRDPEMGGKPRRKNPQEGLYNELQKDKMAEAYSEIGMKGERRRGKGHDGLYQGLSTATKDTYDALHMQALPPR

SEQ ID NO: 5484 - protein, 499 aa, Artificial Sequence
  Description of Artificial Sequence: Synthetic Chimeric Antigen Receptor sequence
MALPVTALLLPLALLLHAARPEVQLVESGGGLVQPGRSLRLSCTASGFTFTDYYMSWVRQAPGKGLEWVGFIRSKADGYTTEYAASVKGRFTISRDDSKSIAYLQMNSLKTEDTAVYYCARDAAYYSYYSPEGAMDYWGQGTLVTVSSGGGGSGGGGSGGGGSMADYKDIQMTQSPSSVSASVGDRVTITCRASQNVDSAVAWYQQKPGKAPKALIYSASYRYSGVPSRFSGSGSGTDFTLTISSLQPEDFATYYCQQYYSTPWTFGQGTKVEIKRTTTPAPRPPTPAPTIASQPLSLRPEACRPAAGGAVHTRGLDFACDIYIWAPLAGTCGVLLLSLVITLYCKRGRKKLLYIFKQPFMRPVQTTQEEDGCSCRFPEEEEGGCELRVKFSRSADAPAYQQGQNQLYNELNLGRREEYDVLDKRRGRDPEMGGKPRRKNPQEGLYNELQKDKMAEAYSEIGMKGERRRGKGHDGLYQGLSTATKDTYDALHMQALPPR

SEQ ID NO: 5485 - protein, 499 aa, Artificial Sequence
  Description of Artificial Sequence: Synthetic Chimeric Antigen Receptor sequence
MALPVTALLLPLALLLHAARPEVQLVESGGGLVQPGRSLRLSCTASGFTFTDYYMSWVRQAPGKGLEWVGFIRSKADGYTTEYAASVKGRFTISRDDSKSIAYLQMNSLKTEDTAVYYCARDAAYYSYYSPEGAMDYWGQGTLVTVSSGGGGSGGGGSGGGGSMADYKDIQMTQSPSSVSASVGDRVTITCRASQNVDSAVAWYQQKPGKAPKLLIYSASYGQSGVPSRFSGSGSGTDFTLTISSLQPEDFATYYCQQYYSTPWTFGQGTKVEIKRTTTPAPRPPTPAPTIASQPLSLRPEACRPAAGGAVHTRGLDFACDIYIWAPLAGTCGVLLLSLVITLYCKRGRKKLLYIFKQPFMRPVQTTQEEDGCSCRFPEEEEGGCELRVKFSRSADAPAYQQGQNQLYNELNLGRREEYDVLDKRRGRDPEMGGKPRRKNPQEGLYNELQKDKMAEAYSEIGMKGERRRGKGHDGLYQGLSTATKDTYDALHMQALPPR

SEQ ID NO: 5486 - protein, 499 aa, Artificial Sequence
  Description of Artificial Sequence: Synthetic Chimeric Antigen Receptor sequence
MALPVTALLLPLALLLHAARPEVQLVESGGGLVQPGRSLRLSCTASGFTFTDYYMSWVRQAPGKGLEWVGFIRSKADGYTTEYAASVKGRFTISRDDSKSIAYLQMNSLKTEDTAVYYCARDAAYYSYYSPEGAMDYWGQGTLVTVSSGGGGSGGGGSGGGGSMADYKDIQMTQSPSSVSASVGDRVTITCRASQNVDSAVAWYQQKPGKAPKLLIYSASYRQSGVPSRFSGSGSGTDFTLTISSLQPEDFATYYCQQYYSTPWTFGQGTKVEIKRTTTPAPRPPTPAPTIASQPLSLRPEACRPAAGGAVHTRGLDFACDIYIWAPLAGTCGVLLLSLVITLYCKRGRKKLLYIFKQPFMRPVQTTQEEDGCSCRFPEEEEGGCELRVKFSRSADAPAYQQGQNQLYNELNLGRREEYDVLDKRRGRDPEMGGKPRRKNPQEGLYNELQKDKMAEAYSEIGMKGERRRGKGHDGLYQGLSTATKDTYDALHMQALPPR

SEQ ID NO: 5487 - protein, 499 aa, Artificial Sequence
  Description of Artificial Sequence: Synthetic Chimeric Antigen Receptor sequence
MALPVTALLLPLALLLHAARPEVQLVESGGGLVQPGRSLRLSCTASGFTFTDYYMSWVRQAPGKGLEWVGFIRSKADGYTTEYAASVKGRFTISRDDSKSIAYLQMNSLKTEDTAVYYCARDAAYYSYYSPEGAMDYWGQGTLVTVSSGGGGSGGGGSGGGGSMADYKDIQMTQSPSSVSASVGDRVTITCRASQNVDSAVAWYQQKPGKAPKLLIYSASYRYSGVPSRFSGSGSGTDFTLTISSLQPEDFATYYCQQYYSTPWTFGQGTKVEIKRTTTPAPRPPTPAPTIASQPLSLRPEACRPAAGGAVHTRGLDFACDIYIWAPLAGTCGVLLLSLVITLYCKRGRKKLLYIFKQPFMRPVQTTQEEDGCSCRFPEEEEGGCELRVKFSRSADAPAYQQGQNQLYNELNLGRREEYDVLDKRRGRDPEMGGKPRRKNPQEGLYNELQKDKMAEAYSEIGMKGERRRGKGHDGLYQGLSTATKDTYDALHMQALPPR

SEQ ID NO: 5488 - protein, 499 aa, Artificial Sequence
  Description of Artificial Sequence: Synthetic Chimeric Antigen Receptor sequence
MALPVTALLLPLALLLHAARPEVQLVESGGGLVQPGRSLRLSCTASGFTFTDYYMSWVRQAPGKGLEWVGFIRSKADGYTTEYAASVKGRFTISRDDSKSIAYLQMNSLKTEDTAVYYCARDAAYYSYYSPEGAMDYWGQGTLVTVSSGGGGSGGGGSGGGGSMADYKDIVMTQSPSSVSASVGDRVTITCRASQNVDSAVAWYQQKPGKAPKALIYSASYRYSGVPSRFSGRGSGTDFTLTISSLQPEDFATYYCQQYYSTPWTFGQGTKVEIKRTTTPAPRPPTPAPTIASQPLSLRPEACRPAAGGAVHTRGLDFACDIYIWAPLAGTCGVLLLSLVITLYCKRGRKKLLYIFKQPFMRPVQTTQEEDGCSCRFPEEEEGGCELRVKFSRSADAPAYQQGQNQLYNELNLGRREEYDVLDKRRGRDPEMGGKPRRKNPQEGLYNELQKDKMAEAYSEIGMKGERRRGKGHDGLYQGLSTATKDTYDALHMQALPPR

SEQ ID NO: 5489 - protein, 499 aa, Artificial Sequence
  Description of Artificial Sequence: Synthetic Chimeric Antigen Receptor sequence
MALPVTALLLPLALLLHAARPEVQLVESGGGLVQPGRSLRLSCTASGFTFTDYYMSWVRQAPGKGLEWVGFIRSKADGYTTEYAASVKGRFTISRDDSKSIAYLQMNSLKTEDTAVYYCTRDAAYYSYYSPEGAMDYWGQGTLVTVSSGGGGSGGGGSGGGGSMADYKDIQMTQSPSSVSASVGDRVTITCRASQNVDSAVAWYQQKPGKAPKALIYSASYRYSGVPSRFSGRGSGTDFTLTISSLQPEDFATYYCQQYYSTPWTFGQGTKVEIKRTTTPAPRPPTPAPTIASQPLSLRPEACRPAAGGAVHTRGLDFACDIYIWAPLAGTCGVLLLSLVITLYCKRGRKKLLYIFKQPFMRPVQTTQEEDGCSCRFPEEEEGGCELRVKFSRSADAPAYQQGQNQLYNELNLGRREEYDVLDKRRGRDPEMGGKPRRKNPQEGLYNELQKDKMAEAYSEIGMKGERRRGKGHDGLYQGLSTATKDTYDALHMQALPPR

SEQ ID NO: 5490 - protein, 499 aa, Artificial Sequence
  Description of Artificial Sequence: Synthetic Chimeric Antigen Receptor sequence
MALPVTALLLPLALLLHAARPEVQLVESGGGLVQPGRSLRLSCTASGFTFTDYYMSWVRQAPGKGLEWVGFIRSKADGYTTEYAASVKGRFTISRDDSKSIAYLQMNSLKTEDTAVYYCTRDAAYYSYYSPEGAMDYWGQGTLVTVSSGGGGSGGGGSGGGGSMADYKDIQMTQSPSSVSASVGDRVTITCRASQNVDSAVAWYQQKPGKAPKALIYSASYRYSGVPSRFSGSGSGTDFTLTISSLQPEDFATYYCQQYYSTPWTFGQGTKVEIKRTTTPAPRPPTPAPTIASQPLSLRPEACRPAAGGAVHTRGLDFACDIYIWAPLAGTCGVLLLSLVITLYCKRGRKKLLYIFKQPFMRPVQTTQEEDGCSCRFPEEEEGGCELRVKFSRSADAPAYQQGQNQLYNELNLGRREEYDVLDKRRGRDPEMGGKPRRKNPQEGLYNELQKDKMAEAYSEIGMKGERRRGKGHDGLYQGLSTATKDTYDALHMQALPPR

SEQ ID NO: 5491 - protein, 499 aa, Artificial Sequence
  Description of Artificial Sequence: Synthetic Chimeric Antigen Receptor sequence
MALPVTALLLPLALLLHAARPEVQLVESGGGLVQPGRSLRLSCTASGFTFTDYYMSWVRQAPGKGLEWVGFIRSKADGYTTEYAASVKGRFTISRDDSKSIAYLQMNSLKTEDTAVYYCTRDAAYYSYYSPEGAMDYWGQGTLVTVSSGGGGSGGGGSGGGGSMADYKDIQMTQSPSSVSASVGDRVTITCRASQNVDSAVAWYQQKPGKAPKLLIYSASYGQSGVPSRFSGSGSGTDFTLTISSLQPEDFATYYCQQYYSTPWTFGQGTKVEIKRTTTPAPRPPTPAPTIASQPLSLRPEACRPAAGGAVHTRGLDFACDIYIWAPLAGTCGVLLLSLVITLYCKRGRKKLLYIFKQPFMRPVQTTQEEDGCSCRFPEEEEGGCELRVKFSRSADAPAYQQGQNQLYNELNLGRREEYDVLDKRRGRDPEMGGKPRRKNPQEGLYNELQKDKMAEAYSEIGMKGERRRGKGHDGLYQGLSTATKDTYDALHMQALPPR

SEQ ID NO: 5492 - protein, 499 aa, Artificial Sequence
  Description of Artificial Sequence: Synthetic Chimeric Antigen Receptor sequence
MALPVTALLLPLALLLHAARPEVQLVESGGGLVQPGRSLRLSCTASGFTFTDYYMSWVRQAPGKGLEWVGFIRSKADGYTTEYAASVKGRFTISRDDSKSIAYLQMNSLKTEDTAVYYCTRDAAYYSYYSPEGAMDYWGQGTLVTVSSGGGGSGGGGSGGGGSMADYKDIQMTQSPSSVSASVGDRVTITCRASQNVDSAVAWYQQKPGKAPKLLIYSASYRQSGVPSRFSGSGSGTDFTLTISSLQPEDFATYYCQQYYSTPWTFGQGTKVEIKRTTTPAPRPPTPAPTIASQPLSLRPEACRPAAGGAVHTRGLDFACDIYIWAPLAGTCGVLLLSLVITLYCKRGRKKLLYIFKQPFMRPVQTTQEEDGCSCRFPEEEEGGCELRVKFSRSADAPAYQQGQNQLYNELNLGRREEYDVLDKRRGRDPEMGGKPRRKNPQEGLYNELQKDKMAEAYSEIGMKGERRRGKGHDGLYQGLSTATKDTYDALHMQALPPR

SEQ ID NO: 5493 - protein, 499 aa, Artificial Sequence
  Description of Artificial Sequence: Synthetic Chimeric Antigen Receptor sequence
MALPVTALLLPLALLLHAARPEVQLVESGGGLVQPGRSLRLSCTASGFTFTDYYMSWVRQAPGKGLEWVGFIRSKADGYTTEYAASVKGRFTISRDDSKSIAYLQMNSLKTEDTAVYYCTRDAAYYSYYSPEGAMDYWGQGTLVTVSSGGGGSGGGGSGGGGSMADYKDIQMTQSPSSVSASVGDRVTITCRASQNVDSAVAWYQQKPGKAPKLLIYSASYRYSGVPSRFSGSGSGTDFTLTISSLQPEDFATYYCQQYYSTPWTFGQGTKVEIKRTTTPAPRPPTPAPTIASQPLSLRPEACRPAAGGAVHTRGLDFACDIYIWAPLAGTCGVLLLSLVITLYCKRGRKKLLYIFKQPFMRPVQTTQEEDGCSCRFPEEEEGGCELRVKFSRSADAPAYQQGQNQLYNELNLGRREEYDVLDKRRGRDPEMGGKPRRKNPQEGLYNELQKDKMAEAYSEIGMKGERRRGKGHDGLYQGLSTATKDTYDALHMQALPPR

SEQ ID NO: 5494 - protein, 499 aa, Artificial Sequence
  Description of Artificial Sequence: Synthetic Chimeric Antigen Receptor sequence
MALPVTALLLPLALLLHAARPEVQLVESGGGLVQPGRSLRLSCTASGFTFTDYYMSWVRQAPGKGLEWVGFIRSKADGYTTEYAASVKGRFTISRDDSKSIAYLQMNSLKTEDTAVYYCTRDAAYYSYYSPEGAMDYWGQGTLVTVSSGGGGSGGGGSGGGGSMADYKDIVMTQSPSSVSASVGDRVTITCRASQNVDSAVAWYQQKPGKAPKALIYSASYRYSGVPSRFSGRGSGTDFTLTISSLQPEDFATYYCQQYYSTPWTFGQGTKVEIKRTTTPAPRPPTPAPTIASQPLSLRPEACRPAAGGAVHTRGLDFACDIYIWAPLAGTCGVLLLSLVITLYCKRGRKKLLYIFKQPFMRPVQTTQEEDGCSCRFPEEEEGGCELRVKFSRSADAPAYQQGQNQLYNELNLGRREEYDVLDKRRGRDPEMGGKPRRKNPQEGLYNELQKDKMAEAYSEIGMKGERRRGKGHDGLYQGLSTATKDTYDALHMQALPPR

SEQ ID NO: 5495 - protein, 499 aa, Artificial Sequence
  Description of Artificial Sequence: Synthetic Chimeric Antigen Receptor sequence
MALPVTALLLPLALLLHAARPEVQLVESGGGLVQPGRSLRLSCTASGFTFTDYYMSWVRQAPGKGLEWVGFIRSKADGYTTEYSASVKGRFTISRDDSKSIAYLQMNSLKTEDTAVYYCARDAAYYSYYSPEGAMDYWGQGTLVTVSSGGGGSGGGGSGGGGSMADYKDIQMTQSPSSVSASVGDRVTITCRASQNVDSAVAWYQQKPGKAPKALIYSASYRYSGVPSRFSGRGSGTDFTLTISSLQPEDFATYYCQQYYSTPWTFGQGTKVEIKRTTTPAPRPPTPAPTIASQPLSLRPEACRPAAGGAVHTRGLDFACDIYIWAPLAGTCGVLLLSLVITLYCKRGRKKLLYIFKQPFMRPVQTTQEEDGCSCRFPEEEEGGCELRVKFSRSADAPAYQQGQNQLYNELNLGRREEYDVLDKRRGRDPEMGGKPRRKNPQEGLYNELQKDKMAEAYSEIGMKGERRRGKGHDGLYQGLSTATKDTYDALHMQALPPR

SEQ ID NO: 5496 - protein, 499 aa, Artificial Sequence
  Description of Artificial Sequence: Synthetic Chimeric Antigen Receptor sequence
MALPVTALLLPLALLLHAARPEVQLVESGGGLVQPGRSLRLSCTASGFTFTDYYMSWVRQAPGKGLEWVGFIRSKADGYTTEYSASVKGRFTISRDDSKSIAYLQMNSLKTEDTAVYYCARDAAYYSYYSPEGAMDYWGQGTLVTVSSGGGGSGGGGSGGGGSMADYKDIQMTQSPSSVSASVGDRVTITCRASQNVDSAVAWYQQKPGKAPKALIYSASYRYSGVPSRFSGSGSGTDFTLTISSLQPEDFATYYCQQYYSTPWTFGQGTKVEIKRTTTPAPRPPTPAPTIASQPLSLRPEACRPAAGGAVHTRGLDFACDIYIWAPLAGTCGVLLLSLVITLYCKRGRKKLLYIFKQPFMRPVQTTQEEDGCSCRFPEEEEGGCELRVKFSRSADAPAYQQGQNQLYNELNLGRREEYDVLDKRRGRDPEMGGKPRRKNPQEGLYNELQKDKMAEAYSEIGMKGERRRGKGHDGLYQGLSTATKDTYDALHMQALPPR

SEQ ID NO: 5497 - protein, 499 aa, Artificial Sequence
  Description of Artificial Sequence: Synthetic Chimeric Antigen Receptor sequence
MALPVTALLLPLALLLHAARPEVQLVESGGGLVQPGRSLRLSCTASGFTFTDYYMSWVRQAPGKGLEWVGFIRSKADGYTTEYSASVKGRFTISRDDSKSIAYLQMNSLKTEDTAVYYCARDAAYYSYYSPEGAMDYWGQGTLVTVSSGGGGSGGGGSGGGGSMADYKDIQMTQSPSSVSASVGDRVTITCRASQNVDSAVAWYQQKPGKAPKLLIYSASYGQSGVPSRFSGSGSGTDFTLTISSLQPEDFATYYCQQYYSTPWTFGQGTKVEIKRTTTPAPRPPTPAPTIASQPLSLRPEACRPAAGGAVHTRGLDFACDIYIWAPLAGTCGVLLLSLVITLYCKRGRKKLLYIFKQPFMRPVQTTQEEDGCSCRFPEEEEGGCELRVKFSRSADAPAYQQGQNQLYNELNLGRREEYDVLDKRRGRDPEMGGKPRRKNPQEGLYNELQKDKMAEAYSEIGMKGERRRGKGHDGLYQGLSTATKDTYDALHMQALPPR

SEQ ID NO: 5498 - protein, 499 aa, Artificial Sequence
  Description of Artificial Sequence: Synthetic Chimeric Antigen Receptor sequence
MALPVTALLLPLALLLHAARPEVQLVESGGGLVQPGRSLRLSCTASGFTFTDYYMSWVRQAPGKGLEWVGFIRSKADGYTTEYSASVKGRFTISRDDSKSIAYLQMNSLKTEDTAVYYCARDAAYYSYYSPEGAMDYWGQGTLVTVSSGGGGSGGGGSGGGGSMADYKDIQMTQSPSSVSASVGDRVTITCRASQNVDSAVAWYQQKPGKAPKLLIYSASYRQSGVPSRFSGSGSGTDFTLTISSLQPEDFATYYCQQYYSTPWTFGQGTKVEIKRTTTPAPRPPTPAPTIASQPLSLRPEACRPAAGGAVHTRGLDFACDIYIWAPLAGTCGVLLLSLVITLYCKRGRKKLLYIFKQPFMRPVQTTQEEDGCSCRFPEEEEGGCELRVKFSRSADAPAYQQGQNQLYNELNLGRREEYDVLDKRRGRDPEMGGKPRRKNPQEGLYNELQKDKMAEAYSEIGMKGERRRGKGHDGLYQGLSTATKDTYDALHMQALPPR

SEQ ID NO: 5499 - protein, 499 aa, Artificial Sequence
  Description of Artificial Sequence: Synthetic Chimeric Antigen Receptor sequence
MALPVTALLLPLALLLHAARPEVQLVESGGGLVQPGRSLRLSCTASGFTFTDYYMSWVRQAPGKGLEWVGFIRSKADGYTTEYSASVKGRFTISRDDSKSIAYLQMNSLKTEDTAVYYCARDAAYYSYYSPEGAMDYWGQGTLVTVSSGGGGSGGGGSGGGGSMADYKDIQMTQSPSSVSASVGDRVTITCRASQNVDSAVAWYQQKPGKAPKLLIYSASYRYSGVPSRFSGSGSGTDFTLTISSLQPEDFATYYCQQYYSTPWTFGQGTKVEIKRTTTPAPRPPTPAPTIASQPLSLRPEACRPAAGGAVHTRGLDFACDIYIWAPLAGTCGVLLLSLVITLYCKRGRKKLLYIFKQPFMRPVQTTQEEDGCSCRFPEEEEGGCELRVKFSRSADAPAYQQGQNQLYNELNLGRREEYDVLDKRRGRDPEMGGKPRRKNPQEGLYNELQKDKMAEAYSEIGMKGERRRGKGHDGLYQGLSTATKDTYDALHMQALPPR

SEQ ID NO: 5500 - protein, 499 aa, Artificial Sequence
  Description of Artificial Sequence: Synthetic Chimeric Antigen Receptor sequence
MALPVTALLLPLALLLHAARPEVQLVESGGGLVQPGRSLRLSCTASGFTFTDYYMSWVRQAPGKGLEWVGFIRSKADGYTTEYSASVKGRFTISRDDSKSIAYLQMNSLKTEDTAVYYCARDAAYYSYYSPEGAMDYWGQGTLVTVSSGGGGSGGGGSGGGGSMADYKDIVMTQSPSSVSASVGDRVTITCRASQNVDSAVAWYQQKPGKAPKALIYSASYRYSGVPSRFSGRGSGTDFTLTISSLQPEDFATYYCQQYYSTPWTFGQGTKVEIKRTTTPAPRPPTPAPTIASQPLSLRPEACRPAAGGAVHTRGLDFACDIYIWAPLAGTCGVLLLSLVITLYCKRGRKKLLYIFKQPFMRPVQTTQEEDGCSCRFPEEEEGGCELRVKFSRSADAPAYQQGQNQLYNELNLGRREEYDVLDKRRGRDPEMGGKPRRKNPQEGLYNELQKDKMAEAYSEIGMKGERRRGKGHDGLYQGLSTATKDTYDALHMQALPPR

SEQ ID NO: 5501 - protein, 499 aa, Artificial Sequence
  Description of Artificial Sequence: Synthetic Chimeric Antigen Receptor sequence
MALPVTALLLPLALLLHAARPEVQLVESGGGLVQPGRSLRLSCTASGFTFTDYYMSWVRQAPGKGLEWVGLIRSKADGYTTEYAASVKGRFTISRDDSKSIAYLQMNSLKTEDTAVYYCARDAAYYSYYSPEGAMDYWGQGTLVTVSSGGGGSGGGGSGGGGSMADYKDIQMTQSPSSVSASVGDRVTITCRASQNVDSAVAWYQQKPGKAPKALIYSASYRYSGVPSRFSGRGSGTDFTLTISSLQPEDFATYYCQQYYSTPWTFGQGTKVEIKRTTTPAPRPPTPAPTIASQPLSLRPEACRPAAGGAVHTRGLDFACDIYIWAPLAGTCGVLLLSLVITLYCKRGRKKLLYIFKQPFMRPVQTTQEEDGCSCRFPEEEEGGCELRVKFSRSADAPAYQQGQNQLYNELNLGRREEYDVLDKRRGRDPEMGGKPRRKNPQEGLYNELQKDKMAEAYSEIGMKGERRRGKGHDGLYQGLSTATKDTYDALHMQALPPR

SEQ ID NO: 5502 - protein, 499 aa, Artificial Sequence
  Description of Artificial Sequence: Synthetic Chimeric Antigen Receptor sequence
MALPVTALLLPLALLLHAARPEVQLVESGGGLVQPGRSLRLSCTASGFTFTDYYMSWVRQAPGKGLEWVGLIRSKADGYTTEYAASVKGRFTISRDDSKSIAYLQMNSLKTEDTAVYYCARDAAYYSYYSPEGAMDYWGQGTLVTVSSGGGGSGGGGSGGGGSMADYKDIQMTQSPSSVSASVGDRVTITCRASQNVDSAVAWYQQKPGKAPKALIYSASYRYSGVPSRFSGSGSGTDFTLTISSLQPEDFATYYCQQYYSTPWTFGQGTKVEIKRTTTPAPRPPTPAPTIASQPLSLRPEACRPAAGGAVHTRGLDFACDIYIWAPLAGTCGVLLLSLVITLYCKRGRKKLLYIFKQPFMRPVQTTQEEDGCSCRFPEEEEGGCELRVKFSRSADAPAYQQGQNQLYNELNLGRREEYDVLDKRRGRDPEMGGKPRRKNPQEGLYNELQKDKMAEAYSEIGMKGERRRGKGHDGLYQGLSTATKDTYDALHMQALPPR

SEQ ID NO: 5503 - protein, 499 aa, Artificial Sequence
  Description of Artificial Sequence: Synthetic Chimeric Antigen Receptor sequence
MALPVTALLLPLALLLHAARPEVQLVESGGGLVQPGRSLRLSCTASGFTFTDYYMSWVRQAPGKGLEWVGLIRSKADGYTTEYAASVKGRFTISRDDSKSIAYLQMNSLKTEDTAVYYCARDAAYYSYYSPEGAMDYWGQGTLVTVSSGGGGSGGGGSGGGGSMADYKDIQMTQSPSSVSASVGDRVTITCRASQNVDSAVAWYQQKPGKAPKLLIYSASYGQSGVPSRFSGSGSGTDFTLTISSLQPEDFATYYCQQYYSTPWTFGQGTKVEIKRTTTPAPRPPTPAPTIASQPLSLRPEACRPAAGGAVHTRGLDFACDIYIWAPLAGTCGVLLLSLVITLYCKRGRKKLLYIFKQPFMRPVQTTQEEDGCSCRFPEEEEGGCELRVKFSRSADAPAYQQGQNQLYNELNLGRREEYDVLDKRRGRDPEMGGKPRRKNPQEGLYNELQKDKMAEAYSEIGMKGERRRGKGHDGLYQGLSTATKDTYDALHMQALPPR

SEQ ID NO: 5504 - protein, 499 aa, Artificial Sequence
  Description of Artificial Sequence: Synthetic Chimeric Antigen Receptor sequence
MALPVTALLLPLALLLHAARPEVQLVESGGGLVQPGRSLRLSCTASGFTFTDYYMSWVRQAPGKGLEWVGLIRSKADGYTTEYAASVKGRFTISRDDSKSIAYLQMNSLKTEDTAVYYCARDAAYYSYYSPEGAMDYWGQGTLVTVSSGGGGSGGGGSGGGGSMADYKDIQMTQSPSSVSASVGDRVTITCRASQNVDSAVAWYQQKPGKAPKLLIYSASYRQSGVPSRFSGSGSGTDFTLTISSLQPEDFATYYCQQYYSTPWTFGQGTKVEIKRTTTPAPRPPTPAPTIASQPLSLRPEACRPAAGGAVHTRGLDFACDIYIWAPLAGTCGVLLLSLVITLYCKRGRKKLLYIFKQPFMRPVQTTQEEDGCSCRFPEEEEGGCELRVKFSRSADAPAYQQGQNQLYNELNLGRREEYDVLDKRRGRDPEMGGKPRRKNPQEGLYNELQKDKMAEAYSEIGMKGERRRGKGHDGLYQGLSTATKDTYDALHMQALPPR

SEQ ID NO: 5505 - protein, 499 aa, Artificial Sequence
  Description of Artificial Sequence: Synthetic Chimeric Antigen Receptor sequence
MALPVTALLLPLALLLHAARPEVQLVESGGGLVQPGRSLRLSCTASGFTFTDYYMSWVRQAPGKGLEWVGLIRSKADGYTTEYAASVKGRFTISRDDSKSIAYLQMNSLKTEDTAVYYCARDAAYYSYYSPEGAMDYWGQGTLVTVSSGGGGSGGGGSGGGGSMADYKDIQMTQSPSSVSASVGDRVTITCRASQNVDSAVAWYQQKPGKAPKLLIYSASYRYSGVPSRFSGSGSGTDFTLTISSLQPEDFATYYCQQYYSTPWTFGQGTKVEIKRTTTPAPRPPTPAPTIASQPLSLRPEACRPAAGGAVHTRGLDFACDIYIWAPLAGTCGVLLLSLVITLYCKRGRKKLLYIFKQPFMRPVQTTQEEDGCSCRFPEEEEGGCELRVKFSRSADAPAYQQGQNQLYNELNLGRREEYDVLDKRRGRDPEMGGKPRRKNPQEGLYNELQKDKMAEAYSEIGMKGERRRGKGHDGLYQGLSTATKDTYDALHMQALPPR

SEQ ID NO: 5506 - protein, 499 aa, Artificial Sequence
  Description of Artificial Sequence: Synthetic Chimeric Antigen Receptor sequence
MALPVTALLLPLALLLHAARPEVQLVESGGGLVQPGRSLRLSCTASGFTFTDYYMSWVRQAPGKGLEWVGLIRSKADGYTTEYAASVKGRFTISRDDSKSIAYLQMNSLKTEDTAVYYCARDAAYYSYYSPEGAMDYWGQGTLVTVSSGGGGSGGGGSGGGGSMADYKDIVMTQSPSSVSASVGDRVTITCRASQNVDSAVAWYQQKPGKAPKALIYSASYRYSGVPSRFSGRGSGTDFTLTISSLQPEDFATYYCQQYYSTPWTFGQGTKVEIKRTTTPAPRPPTPAPTIASQPLSLRPEACRPAAGGAVHTRGLDFACDIYIWAPLAGTCGVLLLSLVITLYCKRGRKKLLYIFKQPFMRPVQTTQEEDGCSCRFPEEEEGGCELRVKFSRSADAPAYQQGQNQLYNELNLGRREEYDVLDKRRGRDPEMGGKPRRKNPQEGLYNELQKDKMAEAYSEIGMKGERRRGKGHDGLYQGLSTATKDTYDALHMQALPPR

SEQ ID NO: 5507 - protein, 499 aa, Artificial Sequence
  Description of Artificial Sequence: Synthetic Chimeric Antigen Receptor sequence
MALPVTALLLPLALLLHAARPEVQLVESGGGLVQPGRSLRLSCTASGFTFTDYYMSWVRQAPGKGLEWVGLIRSKADGYTTEYSASVKGRFTISRDDSKSIAYLQMNSLKTEDTAVYYCARDAAYYSYYSPEGAMDYWGQGTLVTVSSGGGGSGGGGSGGGGSMADYKDIQMTQSPSSVSASVGDRVTITCRASQNVDSAVAWYQQKPGKAPKALIYSASYRYSGVPSRFSGRGSGTDFTLTISSLQPEDFATYYCQQYYSTPWTFGQGTKVEIKRTTTPAPRPPTPAPTIASQPLSLRPEACRPAAGGAVHTRGLDFACDIYIWAPLAGTCGVLLLSLVITLYCKRGRKKLLYIFKQPFMRPVQTTQEEDGCSCRFPEEEEGGCELRVKFSRSADAPAYQQGQNQLYNELNLGRREEYDVLDKRRGRDPEMGGKPRRKNPQEGLYNELQKDKMAEAYSEIGMKGERRRGKGHDGLYQGLSTATKDTYDALHMQALPPR

SEQ ID NO: 5508 - protein, 499 aa, Artificial Sequence
  Description of Artificial Sequence: Synthetic Chimeric Antigen Receptor sequence
MALPVTALLLPLALLLHAARPEVQLVESGGGLVQPGRSLRLSCTASGFTFTDYYMSWVRQAPGKGLEWVGLIRSKADGYTTEYSASVKGRFTISRDDSKSIAYLQMNSLKTEDTAVYYCARDAAYYSYYSPEGAMDYWGQGTLVTVSSGGGGSGGGGSGGGGSMADYKDIQMTQSPSSVSASVGDRVTITCRASQNVDSAVAWYQQKPGKAPKALIYSASYRYSGVPSRFSGSGSGTDFTLTISSLQPEDFATYYCQQYYSTPWTFGQGTKVEIKRTTTPAPRPPTPAPTIASQPLSLRPEACRPAAGGAVHTRGLDFACDIYIWAPLAGTCGVLLLSLVITLYCKRGRKKLLYIFKQPFMRPVQTTQEEDGCSCRFPEEEEGGCELRVKFSRSADAPAYQQGQNQLYNELNLGRREEYDVLDKRRGRDPEMGGKPRRKNPQEGLYNELQKDKMAEAYSEIGMKGERRRGKGHDGLYQGLSTATKDTYDALHMQALPPR

SEQ ID NO: 5509 - protein, 499 aa, Artificial Sequence
  Description of Artificial Sequence: Synthetic Chimeric Antigen Receptor sequence
MALPVTALLLPLALLLHAARPEVQLVESGGGLVQPGRSLRLSCTASGFTFTDYYMSWVRQAPGKGLEWVGLIRSKADGYTTEYSASVKGRFTISRDDSKSIAYLQMNSLKTEDTAVYYCARDAAYYSYYSPEGAMDYWGQGTLVTVSSGGGGSGGGGSGGGGSMADYKDIQMTQSPSSVSASVGDRVTITCRASQNVDSAVAWYQQKPGKAPKLLIYSASYGQSGVPSRFSGSGSGTDFTLTISSLQPEDFATYYCQQYYSTPWTFGQGTKVEIKRTTTPAPRPPTPAPTIASQPLSLRPEACRPAAGGAVHTRGLDFACDIYIWAPLAGTCGVLLLSLVITLYCKRGRKKLLYIFKQPFMRPVQTTQEEDGCSCRFPEEEEGGCELRVKFSRSADAPAYQQGQNQLYNELNLGRREEYDVLDKRRGRDPEMGGKPRRKNPQEGLYNELQKDKMAEAYSEIGMKGERRRGKGHDGLYQGLSTATKDTYDALHMQALPPR

SEQ ID NO: 5510 - protein, 499 aa, Artificial Sequence
  Description of Artificial Sequence: Synthetic Chimeric Antigen Receptor sequence
MALPVTALLLPLALLLHAARPEVQLVESGGGLVQPGRSLRLSCTASGFTFTDYYMSWVRQAPGKGLEWVGLIRSKADGYTTEYSASVKGRFTISRDDSKSIAYLQMNSLKTEDTAVYYCARDAAYYSYYSPEGAMDYWGQGTLVTVSSGGGGSGGGGSGGGGSMADYKDIQMTQSPSSVSASVGDRVTITCRASQNVDSAVAWYQQKPGKAPKLLIYSASYRQSGVPSRFSGSGSGTDFTLTISSLQPEDFATYYCQQYYSTPWTFGQGTKVEIKRTTTPAPRPPTPAPTIASQPLSLRPEACRPAAGGAVHTRGLDFACDIYIWAPLAGTCGVLLLSLVITLYCKRGRKKLLYIFKQPFMRPVQTTQEEDGCSCRFPEEEEGGCELRVKFSRSADAPAYQQGQNQLYNELNLGRREEYDVLDKRRGRDPEMGGKPRRKNPQEGLYNELQKDKMAEAYSEIGMKGERRRGKGHDGLYQGLSTATKDTYDALHMQALPPR

SEQ ID NO: 5511 - protein, 499 aa, Artificial Sequence
  Description of Artificial Sequence: Synthetic Chimeric Antigen Receptor sequence
MALPVTALLLPLALLLHAARPEVQLVESGGGLVQPGRSLRLSCTASGFTFTDYYMSWVRQAPGKGLEWVGLIRSKADGYTTEYSASVKGRFTISRDDSKSIAYLQMNSLKTEDTAVYYCARDAAYYSYYSPEGAMDYWGQGTLVTVSSGGGGSGGGGSGGGGSMADYKDIQMTQSPSSVSASVGDRVTITCRASQNVDSAVAWYQQKPGKAPKLLIYSASYRYSGVPSRFSGSGSGTDFTLTISSLQPEDFATYYCQQYYSTPWTFGQGTKVEIKRTTTPAPRPPTPAPTIASQPLSLRPEACRPAAGGAVHTRGLDFACDIYIWAPLAGTCGVLLLSLVITLYCKRGRKKLLYIFKQPFMRPVQTTQEEDGCSCRFPEEEEGGCELRVKFSRSADAPAYQQGQNQLYNELNLGRREEYDVLDKRRGRDPEMGGKPRRKNPQEGLYNELQKDKMAEAYSEIGMKGERRRGKGHDGLYQGLSTATKDTYDALHMQALPPR

SEQ ID NO: 5512 - protein, 499 aa, Artificial Sequence
  Description of Artificial Sequence: Synthetic Chimeric Antigen Receptor sequence
MALPVTALLLPLALLLHAARPEVQLVESGGGLVQPGRSLRLSCTASGFTFTDYYMSWVRQAPGKGLEWVGLIRSKADGYTTEYSASVKGRFTISRDDSKSIAYLQMNSLKTEDTAVYYCARDAAYYSYYSPEGAMDYWGQGTLVTVSSGGGGSGGGGSGGGGSMADYKDIVMTQSPSSVSASVGDRVTITCRASQNVDSAVAWYQQKPGKAPKALIYSASYRYSGVPSRFSGRGSGTDFTLTISSLQPEDFATYYCQQYYSTPWTFGQGTKVEIKRTTTPAPRPPTPAPTIASQPLSLRPEACRPAAGGAVHTRGLDFACDIYIWAPLAGTCGVLLLSLVITLYCKRGRKKLLYIFKQPFMRPVQTTQEEDGCSCRFPEEEEGGCELRVKFSRSADAPAYQQGQNQLYNELNLGRREEYDVLDKRRGRDPEMGGKPRRKNPQEGLYNELQKDKMAEAYSEIGMKGERRRGKGHDGLYQGLSTATKDTYDALHMQALPPR

SEQ ID NO: 5513 - protein, 499 aa, Artificial Sequence
  Description of Artificial Sequence: Synthetic Chimeric Antigen Receptor sequence
MALPVTALLLPLALLLHAARPEVQLVESGGGLVQPGRSLRLSCTASGFTFTDYYMSWVRQAPGKGLEWVGLIRSKADGYTTEYSASVKGRFTISRDDSKSILYLQMNSLKTEDTAVYYCARDAAYYSYYSPEGAMDYWGQGTLVTVSSGGGGSGGGGSGGGGSMADYKDIQMTQSPSSVSASVGDRVTITCRASQNVDSAVAWYQQKPGKAPKALIYSASYRYSGVPSRFSGRGSGTDFTLTISSLQPEDFATYYCQQYYSTPWTFGQGTKVEIKRTTTPAPRPPTPAPTIASQPLSLRPEACRPAAGGAVHTRGLDFACDIYIWAPLAGTCGVLLLSLVITLYCKRGRKKLLYIFKQPFMRPVQTTQEEDGCSCRFPEEEEGGCELRVKFSRSADAPAYQQGQNQLYNELNLGRREEYDVLDKRRGRDPEMGGKPRRKNPQEGLYNELQKDKMAEAYSEIGMKGERRRGKGHDGLYQGLSTATKDTYDALHMQALPPR

SEQ ID NO: 5514 - protein, 499 aa, Artificial Sequence
  Description of Artificial Sequence: Synthetic Chimeric Antigen Receptor sequence
MALPVTALLLPLALLLHAARPEVQLVESGGGLVQPGRSLRLSCTASGFTFTDYYMSWVRQAPGKGLEWVGLIRSKADGYTTEYSASVKGRFTISRDDSKSILYLQMNSLKTEDTAVYYCARDAAYYSYYSPEGAMDYWGQGTLVTVSSGGGGSGGGGSGGGGSMADYKDIQMTQSPSSVSASVGDRVTITCRASQNVDSAVAWYQQKPGKAPKALIYSASYRYSGVPSRFSGSGSGTDFTLTISSLQPEDFATYYCQQYYSTPWTFGQGTKVEIKRTTTPAPRPPTPAPTIASQPLSLRPEACRPAAGGAVHTRGLDFACDIYIWAPLAGTCGVLLLSLVITLYCKRGRKKLLYIFKQPFMRPVQTTQEEDGCSCRFPEEEEGGCELRVKFSRSADAPAYQQGQNQLYNELNLGRREEYDVLDKRRGRDPEMGGKPRRKNPQEGLYNELQKDKMAEAYSEIGMKGERRRGKGHDGLYQGLSTATKDTYDALHMQALPPR

SEQ ID NO: 5515 - protein, 499 aa, Artificial Sequence
  Description of Artificial Sequence: Synthetic Chimeric Antigen Receptor sequence
MALPVTALLLPLALLLHAARPEVQLVESGGGLVQPGRSLRLSCTASGFTFTDYYMSWVRQAPGKGLEWVGLIRSKADGYTTEYSASVKGRFTISRDDSKSILYLQMNSLKTEDTAVYYCARDAAYYSYYSPEGAMDYWGQGTLVTVSSGGGGSGGGGSGGGGSMADYKDIQMTQSPSSVSASVGDRVTITCRASQNVDSAVAWYQQKPGKAPKLLIYSASYGQSGVPSRFSGSGSGTDFTLTISSLQPEDFATYYCQQYYSTPWTFGQGTKVEIKRTTTPAPRPPTPAPTIASQPLSLRPEACRPAAGGAVHTRGLDFACDIYIWAPLAGTCGVLLLSLVITLYCKRGRKKLLYIFKQPFMRPVQTTQEEDGCSCRFPEEEEGGCELRVKFSRSADAPAYQQGQNQLYNELNLGRREEYDVLDKRRGRDPEMGGKPRRKNPQEGLYNELQKDKMAEAYSEIGMKGERRRGKGHDGLYQGLSTATKDTYDALHMQALPPR

SEQ ID NO: 5516 - protein, 499 aa, Artificial Sequence
  Description of Artificial Sequence: Synthetic Chimeric Antigen Receptor sequence
MALPVTALLLPLALLLHAARPEVQLVESGGGLVQPGRSLRLSCTASGFTFTDYYMSWVRQAPGKGLEWVGLIRSKADGYTTEYSASVKGRFTISRDDSKSILYLQMNSLKTEDTAVYYCARDAAYYSYYSPEGAMDYWGQGTLVTVSSGGGGSGGGGSGGGGSMADYKDIQMTQSPSSVSASVGDRVTITCRASQNVDSAVAWYQQKPGKAPKLLIYSASYRQSGVPSRFSGSGSGTDFTLTISSLQPEDFATYYCQQYYSTPWTFGQGTKVEIKRTTTPAPRPPTPAPTIASQPLSLRPEACRPAAGGAVHTRGLDFACDIYIWAPLAGTCGVLLLSLVITLYCKRGRKKLLYIFKQPFMRPVQTTQEEDGCSCRFPEEEEGGCELRVKFSRSADAPAYQQGQNQLYNELNLGRREEYDVLDKRRGRDPEMGGKPRRKNPQEGLYNELQKDKMAEAYSEIGMKGERRRGKGHDGLYQGLSTATKDTYDALHMQALPPR

SEQ ID NO: 5517 - protein, 499 aa, Artificial Sequence
  Description of Artificial Sequence: Synthetic Chimeric Antigen Receptor sequence
MALPVTALLLPLALLLHAARPEVQLVESGGGLVQPGRSLRLSCTASGFTFTDYYMSWVRQAPGKGLEWVGLIRSKADGYTTEYSASVKGRFTISRDDSKSILYLQMNSLKTEDTAVYYCARDAAYYSYYSPEGAMDYWGQGTLVTVSSGGGGSGGGGSGGGGSMADYKDIQMTQSPSSVSASVGDRVTITCRASQNVDSAVAWYQQKPGKAPKLLIYSASYRYSGVPSRFSGSGSGTDFTLTISSLQPEDFATYYCQQYYSTPWTFGQGTKVEIKRTTTPAPRPPTPAPTIASQPLSLRPEACRPAAGGAVHTRGLDFACDIYIWAPLAGTCGVLLLSLVITLYCKRGRKKLLYIFKQPFMRPVQTTQEEDGCSCRFPEEEEGGCELRVKFSRSADAPAYQQGQNQLYNELNLGRREEYDVLDKRRGRDPEMGGKPRRKNPQEGLYNELQKDKMAEAYSEIGMKGERRRGKGHDGLYQGLSTATKDTYDALHMQALPPR

SEQ ID NO: 5518 - protein, 499 aa, Artificial Sequence
  Description of Artificial Sequence: Synthetic Chimeric Antigen Receptor sequence
MALPVTALLLPLALLLHAARPEVQLVESGGGLVQPGRSLRLSCTASGFTFTDYYMSWVRQAPGKGLEWVGLIRSKADGYTTEYSASVKGRFTISRDDSKSILYLQMNSLKTEDTAVYYCARDAAYYSYYSPEGAMDYWGQGTLVTVSSGGGGSGGGGSGGGGSMADYKDIVMTQSPSSVSASVGDRVTITCRASQNVDSAVAWYQQKPGKAPKALIYSASYRYSGVPSRFSGRGSGTDFTLTISSLQPEDFATYYCQQYYSTPWTFGQGTKVEIKRTTTPAPRPPTPAPTIASQPLSLRPEACRPAAGGAVHTRGLDFACDIYIWAPLAGTCGVLLLSLVITLYCKRGRKKLLYIFKQPFMRPVQTTQEEDGCSCRFPEEEEGGCELRVKFSRSADAPAYQQGQNQLYNELNLGRREEYDVLDKRRGRDPEMGGKPRRKNPQEGLYNELQKDKMAEAYSEIGMKGERRRGKGHDGLYQGLSTATKDTYDALHMQALPPR

SEQ ID NO: 5519 - protein, 501 aa, Artificial Sequence
  Description of Artificial Sequence: Synthetic Chimeric Antigen Receptor sequence
MALPVTALLLPLALLLHAARPQIQLVQSGPELKKPGETVKISCKASGYIFTNYGMNWVKQAPGKSFKWMGWINTYTGESTYSADFKGRFAFSLETSASTAYLHINDLKNEDTATYFCARSGGYDPMDYWGQGTSVTVSSGGGGGGCPYSNPSLCGGGGGGGSDIVLTQSPASLAVSLGQRATISCRASESVDNYGNTFMHWYQQKPGQPPKLLIYRASNLESGIPARFSGSGSRTDFTLTINPVEADDVATYYCQQSNEDPPTFGAGTKLELKRSDPTTTPAPRPPTPAPTIASQPLSLRPEACRPAAGGAVHTRGLDFACDIYIWAPLAGTCGVLLLSLVITLYCRRGRKKLLYIFKQPFMRPVQTTQEEDGCSCRFPEEEEGGCELRVKFSRSADAPAYQQGQNQLYNELNLGRREEYDVLDKRRGRDPEMGGKPRRKNPQEGLYNELQKDKMAEAYSEIGMKGERRRGKGHDGLYQGLSTATKDTYDALHMQALPPRE

SEQ ID NO: 5520 - protein, 508 aa, Artificial Sequence
  Description of Artificial Sequence: Synthetic Chimeric Antigen Receptor sequence
MALPVTALLLPLALLLHAARPGGGGSCPYSNPSLCGQIQLVQSGPELKKPGETVKISCKASGYIFTNYGMNWVKQAPGKSFKWMGWINTYTGESTYSADFKGRFAFSLETSASTAYLHINDLKNEDTATYFCARSGGYDPMDYWGQGTSVTVSSGGGGSGGGGSGGGGSDIVLTQSPASLAVSLGQRATISCRASESVDNYGNTFMHWYQQKPGQPPKLLIYRASNLESGIPARFSGSGSRTDFTLTINPVEADDVATYYCQQSNEDPPTFGAGTKLELKRSDPTTTPAPRPPTPAPTIASQPLSLRPEACRPAAGGAVHTRGLDFACDIYIWAPLAGTCGVLLLSLVITLYCRRGRKKLLYIFKQPFMRPVQTTQEEDGCSCRFPEEEEGGCELRVKFSRSADAPAYQQGQNQLYNELNLGRREEYDVLDKRRGRDPEMGGKPRRKNPQEGLYNELQKDKMAEAYSEIGMKGERRRGKGHDGLYQGLSTATKDTYDALHMQALPPRE

SEQ ID NO: 5521 - protein, 510 aa, Artificial Sequence
  Description of Artificial Sequence: Synthetic Chimeric Antigen Receptor sequence
WTWRFLFVVAAATGVQSQVQLLQSGAEVKKPGSSVKVSCKASGGTFSTYAISWVRQAPGQGLEWMGGIIPIFGIVNYAQKFQGRVTITADESTSTAYMELSSLRSEDTAVYYCARGGGSGPDVLDIWGQGTMVTVSSASTGGGGSGGGGSGGGGSMDMRVPAQLLGLLLLWLPGARCVIWMTQSPSLLSASTGDRVTISCRMSQGIRSYLAWYQQKPGKAPELLIYAASTLQSGVPSRFSGSGSGTDFTLTISSLQSEDFATYYCQQYYSFPYTFGQGTKLEIKRTVTTTPAPRPPTPAPTIASQPLSLRPEACRPAAGGAVHTRGLDFACDIYIWAPLAGTCGVLLLSLVITLYCKRGRKKLLYIFKQPFMRPVQTTQEEDGCSCRFPEEEEGGCELRVKFSRSADAPAYQQGQNQLYNELNLGRREEYDVLDKRRGRDPEMGGKPRRKNPQEGLYNELQKDKMAEAYSEIGMKGERRRGKGHDGLYQGLSTATKDTYDALHMQALPPR

SEQ ID NO: 5522 - protein, 511 aa, Artificial Sequence
  Description of Artificial Sequence: Synthetic Chimeric Antigen Receptor sequence
MALPVTALLLPLALLLHAARPQIQLVQSGPELKKPGETVKISCKASGYIFTNYGMNWVKQAPGKSFKWMGWINTYTGESTYSADFKGRFAFSLETSASTAYLHINDLKNEDTATYFCARSGGYDPMDYWGQGTSVTVSSGGGGSGGGGSGGGGSDIVLTQSPASLAVSLGQRATISCRASESVDNYGNTFMHWYQQKPGQPPKLLIYRASNLESGIPARFSGSGSRTDFTLTINPVEADDVATYYCQQSNEDPPTFGAGTKLELKRSDPGSGGGGSCPYSNPSLCAPTTTPAPRPPTPAPTIASQPLSLRPEACRPAAGGAVHTRGLDFACDIYIWAPLAGTCGVLLLSLVITLYCRRGRKKLLYIFKQPFMRPVQTTQEEDGCSCRFPEEEEGGCELRVKFSRSADAPAYQQGQNQLYNELNLGRREEYDVLDKRRGRDPEMGGKPRRKNPQEGLYNELQKDKMAEAYSEIGMKGERRRGKGHDGLYQGLSTATKDTYDALHMQALPPRE

SEQ ID NO: 5523 - protein, 513 aa, Artificial Sequence
  Description of Artificial Sequence: Synthetic Chimeric Antigen Receptor sequence
MGWSWIFLFLVSGTGGVLSEVQLQQSGPELVKPGASVKMSCKASGYTFTDYYMKWVKQSHGKSLEWIGDIIPSNGATFYNQKFKGKATLTVDRSSSTAYMHLNSLTSEDSAVYYCTRSHLLRASWFAYWGQGTLVTVSAASGGGGSGGGGSGGGGSMESQTQVLMSLLFWVSGTCGDFVMTQSPSSLTVTAGEKVTMSCKSSQSLLNSGNQKNYLTWYLQKPGQPPKLLIYWASTRESGVPDRFTGSGSGTDFTLTISSVQAEDLAVYYCQNDYSYPYTFGGGTKLEIKRTTTPAPRPPTPAPTIASQPLSLRPEACRPAAGGAVHTRGLDFACDIYIWAPLAGTCGVLLLSLVITLYCKRGRKKLLYIFKQPFMRPVQTTQEEDGCSCRFPEEEEGGCELRVKFSRSADAPAYQQGQNQLYNELNLGRREEYDVLDKRRGRDPEMGGKPRRKNPQEGLYNELQKDKMAEAYSEIGMKGERRRGKGHDGLYQGLSTATKDTYDALHMQALPPR

SEQ ID NO: 5524 - protein, 514 aa, Artificial Sequence
  Description of Artificial Sequence: Synthetic Chimeric Antigen Receptor sequence
MALPVTALLLPLALLLHAARPGGGGSCPYSNPSLCSGGGGSGQIQLVQSGPELKKPGETVKISCKASGYIFTNYGMNWVKQAPGKSFKWMGWINTYTGESTYSADFKGRFAFSLETSASTAYLHINDLKNEDTATYFCARSGGYDPMDYWGQGTSVTVSSGGGGSGGGGSGGGGSDIVLTQSPASLAVSLGQRATISCRASESVDNYGNTFMHWYQQKPGQPPKLLIYRASNLESGIPARFSGSGSRTDFTLTINPVEADDVATYYCQQSNEDPPTFGAGTKLELKRSDPTTTPAPRPPTPAPTIASQPLSLRPEACRPAAGGAVHTRGLDFACDIYIWAPLAGTCGVLLLSLVITLYCRRGRKKLLYIFKQPFMRPVQTTQEEDGCSCRFPEEEEGGCELRVKFSRSADAPAYQQGQNQLYNELNLGRREEYDVLDKRRGRDPEMGGKPRRKNPQEGLYNELQKDKMAEAYSEIGMKGERRRGKGHDGLYQGLSTATKDTYDALHMQALPPRE

SEQ ID NO: 5525 - protein, 516 aa, Artificial Sequence
  Description of Artificial Sequence: Synthetic Chimeric Antigen Receptor sequence
MGWSWIFLFLVSGTGGVLSEVQLQQSGPELVKPGASVKMSCKASGYTFTDYYMKWVKQSHGKSLEWIGDIIPSNGATFYNQKFKGKATLTVDRSSSTAYMHLNSLTSEDSAVYYCTRSHLLRASWFAYWGQGTLVTVSAASGGGGSGGGGSGGGGSMESQTQVLMSLLFWVSGTCGDFVMTQSPSSLTVTAGEKVTMSCKSSQSLLNSGNQKNYLTWYLQKPGQPPKLLIYWASTRESGVPDRFTGSGSGTDFTLTISSVQAEDLAVYYCQNDYSYPYTFGGGTKLEIKRTTTPAPRPPTPAPTIASQPLSLRPEACRPAAGGAVHTRGLDFACDIISFFLALTSTALLFLLFFLTLRFSVVKRGRKKLLYIFKQPFMRPVQTTQEEDGCSCRFPEEEEGGCELRVKFSRSADAPAYQQGQNQLYNELNLGRREEYDVLDKRRGRDPEMGGKPRRKNPQEGLYNELQKDKMAEAYSEIGMKGERRRGKGHDGLYQGLSTATKDTYDALHMQALPPR

SEQ ID NO: 5526 - protein, 517 aa, Artificial Sequence
  Description of Artificial Sequence: Synthetic Chimeric Antigen Receptor sequence
MALPVTALLLPLALLLHAARPQIQLVQSGPELKKPGETVKISCKASGYIFTNYGMNWVKQAPGKSFKWMGWINTYTGESTYSADFKGRFAFSLETSASTAYLHINDLKNEDTATYFCARSGGYDPMDYWGQGTSVTVSSGGGGSGGGGSGGGGSDIVLTQSPASLAVSLGQRATISCRASESVDNYGNTFMHWYQQKPGQPPKLLIYRASNLESGIPARFSGSGSRTDFTLTINPVEADDVATYYCQQSNEDPPTFGAGTKLELKRSDPGSGGGGSCPYSNPSLCSGGGGSAPTTTPAPRPPTPAPTIASQPLSLRPEACRPAAGGAVHTRGLDFACDIYIWAPLAGTCGVLLLSLVITLYCRRGRKKLLYIFKQPFMRPVQTTQEEDGCSCRFPEEEEGGCELRVKFSRSADAPAYQQGQNQLYNELNLGRREEYDVLDKRRGRDPEMGGKPRRKNPQEGLYNELQKDKMAEAYSEIGMKGERRRGKGHDGLYQGLSTATKDTYDALHMQALPPRE

SEQ ID NO: 5527 - protein, 520 aa, Artificial Sequence
  Description of Artificial Sequence: Synthetic Chimeric Antigen Receptor sequence
GPVPPSTALRYLIEELVNITQNQKAPLCNGSMVWSINLTAGMYCAALESLINVSGCSAIEKTQRMLSGFCPHKVSAGQFSSLHVRDTKIEVAQFVKDLLLHLKKLFREGRFNESKYGPPCPPCPAPEFEGGPSVFLFPPKPKDTLMISRTPEVTCVVVDVSQEDPEVQFNWYVDGVEVHNAKTKPREEQFQSTYRVVSVLTVLHQDWLNGKEYKCKVSNKGLPSSIEKTISKAKGQPREPQVYTLPPSQEEMTKNQVSLTCLVKGFYPSDIAVEWESNGQPENNYKTTPPVLDSDGSFFLYSRLTVDKSRWQEGNVFSCSVMHEALHNHYTQKSLSLSLGKMALIVLGGVAGLLLFIGLGIFFKRGRKKLLYIFKQPFMRPVQTTQEEDGCSCRFPEEEEGGCELGGGRVKFSRSADAPAYQQGQNQLYNELNLGRREEYDVLDKRRGRDPEMGGKPRRKNPQEGLYNELQKDKMAEAYSEIGMKGERRRGKGHDGLYQGLSTATKDTYDALHMQALPPR

SEQ ID NO: 5528 - protein, 523 aa, Artificial Sequence
  Description of Artificial Sequence: Synthetic Chimeric Antigen Receptor sequence
MALPVTALLLPLALLLHAARPGGGGSCPYSNPSLCSGGGGSCPYSNPSLCGQIQLVQSGPELKKPGETVKISCKASGYIFTNYGMNWVKQAPGKSFKWMGWINTYTGESTYSADFKGRFAFSLETSASTAYLHINDLKNEDTATYFCARSGGYDPMDYWGQGTSVTVSSGGGGSGGGGSGGGGSDIVLTQSPASLAVSLGQRATISCRASESVDNYGNTFMHWYQQKPGQPPKLLIYRASNLESGIPARFSGSGSRTDFTLTINPVEADDVATYYCQQSNEDPPTFGAGTKLELKRSDPTTTPAPRPPTPAPTIASQPLSLRPEACRPAAGGAVHTRGLDFACDIYIWAPLAGTCGVLLLSLVITLYCRRGRKKLLYIFKQPFMRPVQTTQEEDGCSCRFPEEEEGGCELRVKFSRSADAPAYQQGQNQLYNELNLGRREEYDVLDKRRGRDPEMGGKPRRKNPQEGLYNELQKDKMAEAYSEIGMKGERRRGKGHDGLYQGLSTATKDTYDALHMQALPPRE

SEQ ID NO: 5529 - protein, 526 aa, Artificial Sequence
  Description of Artificial Sequence: Synthetic Chimeric Antigen Receptor sequence
MALPVTALLLPLALLLHAARPEVKLVESGGGLVQPGGSLSLSCAASGFTFTDYYMSWVRQPPGKALEWLALIRSKADGYTTEYSASVKGRFTLSRDDSQSILYLQMNALRPEDSATYYCARDAAYYSYYSPEGAMDYWGQGTSVTVSSGGGGSGGGGSGGGGSMADYKDIVMTQSHKFMSTSVGDRVNITCKASQNVDSAVAWYQQKPGQSPKALIYSASYRYSGVPDRFTGRGSGTDFTLTISSVQAEDLAVYYCQQYYSTPWTFGGGTKLEIKRGSGGGGSCPYSNPSLCSGGGGSCPYSNPSLCSGGGGSAPTIASQPLSLRPEACRPAAGGAVHTRGLDFACDIYIWAPLAGTCGVLLLSLVITLYCRRGRKKLLYIFKQPFMRPVQTTQEEDGCSCRFPEEEEGGCELRVKFSRSADAPAYQQGQNQLYNELNLGRREEYDVLDKRRGRDPEMGGKPRRKNPQEGLYNELQKDKMAEAYSEIGMKGERRRGKGHDGLYQGLSTATKDTYDALHMQALPPRE

SEQ ID NO: 5530 - protein, 526 aa, Artificial Sequence
  Description of Artificial Sequence: Synthetic Chimeric Antigen Receptor sequence
MALPVTALLLPLALLLHAARPQIQLVQSGPELKKPGETVKISCKASGYIFTNYGMNWVKQAPGKSFKWMGWINTYTGESTYSADFKGRFAFSLETSASTAYLHINDLKNEDTATYFCARSGGYDPMDYWGQGTSVTVSSGGGGSGGGGSGGGGSDIVLTQSPASLAVSLGQRATISCRASESVDNYGNTFMHWYQQKPGQPPKLLIYRASNLESGIPARFSGSGSRTDFTLTINPVEADDVATYYCQQSNEDPPTFGAGTKLELKRSDPGSGGGGSCPYSNPSLCSGGGGSCPYSNPSLCAPTTTPAPRPPTPAPTIASQPLSLRPEACRPAAGGAVHTRGLDFACDIYIWAPLAGTCGVLLLSLVITLYCRRGRKKLLYIFKQPFMRPVQTTQEEDGCSCRFPEEEEGGCELRVKFSRSADAPAYQQGQNQLYNELNLGRREEYDVLDKRRGRDPEMGGKPRRKNPQEGLYNELQKDKMAEAYSEIGMKGERRRGKGHDGLYQGLSTATKDTYDALHMQALPPRE

SEQ ID NO: 5531 - protein, 529 aa, Artificial Sequence
  Description of Artificial Sequence: Synthetic Chimeric Antigen Receptor sequence
MALPVTALLLPLALLLHAARPGGGGSCPYSNPSLCSGGGGSCPYSNPSLCSGGGGSGQIQLVQSGPELKKPGETVKISCKASGYIFTNYGMNWVKQAPGKSFKWMGWINTYTGESTYSADFKGRFAFSLETSASTAYLHINDLKNEDTATYFCARSGGYDPMDYWGQGTSVTVSSGGGGSGGGGSGGGGSDIVLTQSPASLAVSLGQRATISCRASESVDNYGNTFMHWYQQKPGQPPKLLIYRASNLESGIPARFSGSGSRTDFTLTINPVEADDVATYYCQQSNEDPPTFGAGTKLELKRSDPTTTPAPRPPTPAPTIASQPLSLRPEACRPAAGGAVHTRGLDFACDIYIWAPLAGTCGVLLLSLVITLYCRRGRKKLLYIFKQPFMRPVQTTQEEDGCSCRFPEEEEGGCELRVKFSRSADAPAYQQGQNQLYNELNLGRREEYDVLDKRRGRDPEMGGKPRRKNPQEGLYNELQKDKMAEAYSEIGMKGERRRGKGHDGLYQGLSTATKDTYDALHMQALPPRE

SEQ ID NO: 5532 - protein, 531 aa, Artificial Sequence
  Description of Artificial Sequence: Synthetic Chimeric Antigen Receptor sequence
MALPVTALLLPLALLLHAARPEVKLVESGGGLVQPGRSLRLSCTASGFTFTDYYMSWVRQAPGKGLEWVGLIRSKADGYTTEYSASVKGRFTISRDDSKSILYLQMNSLKTEDTAVYYCARDAAYYSYYSPEGAMDYWGQGTLVTVSSGGGGSGGGGSGGGGSMADYKDIQMTQSPSSVSASVGDRVTITCRASQNVDSAVAWYQQKPGKAPKALIYSASYRYSGVPSRFSGRGSGTDFTLTISSLQPEDFATYYCQQYYSTPWTFGQGTKVEIKREPKSPDKTHTCPPCPAPPVAGPSVFLFPPKPKDTLMIARTPEVTCVVVDVSHEDPEVKFNWYVDGVEVHNAKTKPREEQYNSTYRVVSVLTVLHQDWLNGKEYKCKVSNKALPAPIEKTISKAKGQPREPQVYTLPPSRDELTKNQVSLTCLVKGFYPSDIAVEWESNGQPENNYKTTPPVLDSDGSFFLYSKLTVDKSRWQQGNVFSCSVMHEALHNHYTQKSLSLSPGKIYIWAPLAGTCGVLLLSLVITLYC

SEQ ID NO: 5533 - protein, 531 aa, Artificial Sequence
  Description of Artificial Sequence: Synthetic Chimeric Antigen Receptor sequence
MALPVTALLLPLALLLHAARPEVKLVESGGGLVQPGRSLRLSCTASGFTFTDYYMSWVRQAPGKGLEWVGLIRSKADGYTTEYSASVKGRFTISRDDSKSILYLQMNSLKTEDTAVYYCARDAAYYSYYSPEGAMDYWGQGTLVTVSSGGGGSGGGGSGGGGSMADYKDIQMTQSPSSVSASVGDRVTITCRASQNVDSAVAWYQQKPGKAPKALIYSASYRYSGVPSRFSGSGSGTDFTLTISSLQPEDFATYYCQQYYSTPWTFGQGTKVEIKREPKSPDKTHTCPPCPAPPVAGPSVFLFPPKPKDTLMIARTPEVTCVVVDVSHEDPEVKFNWYVDGVEVHNAKTKPREEQYNSTYRVVSVLTVLHQDWLNGKEYKCKVSNKALPAPIEKTISKAKGQPREPQVYTLPPSRDELTKNQVSLTCLVKGFYPSDIAVEWESNGQPENNYKTTPPVLDSDGSFFLYSKLTVDKSRWQQGNVFSCSVMHEALHNHYTQKSLSLSPGKIYIWAPLAGTCGVLLLSLVITLYC

SEQ ID NO: 5534 - protein, 531 aa, Artificial Sequence
  Description of Artificial Sequence: Synthetic Chimeric Antigen Receptor sequence
MALPVTALLLPLALLLHAARPEVKLVESGGGLVQPGRSLRLSCTASGFTFTDYYMSWVRQAPGKGLEWVGLIRSKADGYTTEYSASVKGRFTISRDDSKSILYLQMNSLKTEDTAVYYCARDAAYYSYYSPEGAMDYWGQGTLVTVSSGGGGSGGGGSGGGGSMADYKDIQMTQSPSSVSASVGDRVTITCRASQNVDSAVAWYQQKPGKAPKLLIYSASYGQSGVPSRFSGSGSGTDFTLTISSLQPEDFATYYCQQYYSTPWTFGQGTKVEIKREPKSPDKTHTCPPCPAPPVAGPSVFLFPPKPKDTLMIARTPEVTCVVVDVSHEDPEVKFNWYVDGVEVHNAKTKPREEQYNSTYRVVSVLTVLHQDWLNGKEYKCKVSNKALPAPIEKTISKAKGQPREPQVYTLPPSRDELTKNQVSLTCLVKGFYPSDIAVEWESNGQPENNYKTTPPVLDSDGSFFLYSKLTVDKSRWQQGNVFSCSVMHEALHNHYTQKSLSLSPGKIYIWAPLAGTCGVLLLSLVITLYC

SEQ ID NO: 5535 - protein, 531 aa, Artificial Sequence
  Description of Artificial Sequence: Synthetic Chimeric Antigen Receptor sequence
MALPVTALLLPLALLLHAARPEVKLVESGGGLVQPGRSLRLSCTASGFTFTDYYMSWVRQAPGKGLEWVGLIRSKADGYTTEYSASVKGRFTISRDDSKSILYLQMNSLKTEDTAVYYCARDAAYYSYYSPEGAMDYWGQGTLVTVSSGGGGSGGGGSGGGGSMADYKDIQMTQSPSSVSASVGDRVTITCRASQNVDSAVAWYQQKPGKAPKLLIYSASYRQSGVPSRFSGSGSGTDFTLTISSLQPEDFATYYCQQYYSTPWTFGQGTKVEIKREPKSPDKTHTCPPCPAPPVAGPSVFLFPPKPKDTLMIARTPEVTCVVVDVSHEDPEVKFNWYVDGVEVHNAKTKPREEQYNSTYRVVSVLTVLHQDWLNGKEYKCKVSNKALPAPIEKTISKAKGQPREPQVYTLPPSRDELTKNQVSLTCLVKGFYPSDIAVEWESNGQPENNYKTTPPVLDSDGSFFLYSKLTVDKSRWQQGNVFSCSVMHEALHNHYTQKSLSLSPGKIYIWAPLAGTCGVLLLSLVITLYC

SEQ ID NO: 5536 - protein, 531 aa, Artificial Sequence
  Description of Artificial Sequence: Synthetic Chimeric Antigen Receptor sequence
MALPVTALLLPLALLLHAARPEVKLVESGGGLVQPGRSLRLSCTASGFTFTDYYMSWVRQAPGKGLEWVGLIRSKADGYTTEYSASVKGRFTISRDDSKSILYLQMNSLKTEDTAVYYCARDAAYYSYYSPEGAMDYWGQGTLVTVSSGGGGSGGGGSGGGGSMADYKDIQMTQSPSSVSASVGDRVTITCRASQNVDSAVAWYQQKPGKAPKLLIYSASYRYSGVPSRFSGSGSGTDFTLTISSLQPEDFATYYCQQYYSTPWTFGQGTKVEIKREPKSPDKTHTCPPCPAPPVAGPSVFLFPPKPKDTLMIARTPEVTCVVVDVSHEDPEVKFNWYVDGVEVHNAKTKPREEQYNSTYRVVSVLTVLHQDWLNGKEYKCKVSNKALPAPIEKTISKAKGQPREPQVYTLPPSRDELTKNQVSLTCLVKGFYPSDIAVEWESNGQPENNYKTTPPVLDSDGSFFLYSKLTVDKSRWQQGNVFSCSVMHEALHNHYTQKSLSLSPGKIYIWAPLAGTCGVLLLSLVITLYC

SEQ ID NO: 5537 - protein, 531 aa, Artificial Sequence
  Description of Artificial Sequence: Synthetic Chimeric Antigen Receptor sequence
MALPVTALLLPLALLLHAARPEVKLVESGGGLVQPGRSLRLSCTASGFTFTDYYMSWVRQAPGKGLEWVGLIRSKADGYTTEYSASVKGRFTISRDDSKSILYLQMNSLKTEDTAVYYCARDAAYYSYYSPEGAMDYWGQGTLVTVSSGGGGSGGGGSGGGGSMADYKDIVMTQSPSSVSASVGDRVTITCRASQNVDSAVAWYQQKPGKAPKALIYSASYRYSGVPSRFSGRGSGTDFTLTISSLQPEDFATYYCQQYYSTPWTFGQGTKVEIKREPKSPDKTHTCPPCPAPPVAGPSVFLFPPKPKDTLMIARTPEVTCVVVDVSHEDPEVKFNWYVDGVEVHNAKTKPREEQYNSTYRVVSVLTVLHQDWLNGKEYKCKVSNKALPAPIEKTISKAKGQPREPQVYTLPPSRDELTKNQVSLTCLVKGFYPSDIAVEWESNGQPENNYKTTPPVLDSDGSFFLYSKLTVDKSRWQQGNVFSCSVMHEALHNHYTQKSLSLSPGKIYIWAPLAGTCGVLLLSLVITLYC

SEQ ID NO: 5538 - protein, 531 aa, Artificial Sequence
  Description of Artificial Sequence: Synthetic Chimeric Antigen Receptor sequence
MALPVTALLLPLALLLHAARPEVQLVESGGGLVQPGRSLRLSCTASGFTFTDYYMSWVRQAPGKGLEWVGFIRSKADGYTTEYAASVKGRFTISRDDSKSIAYLQMNSLKTEDTAVYYCARDAAYYSYYSPEGAMDYWGQGTLVTVSSGGGGSGGGGSGGGGSMADYKDIQMTQSPSSVSASVGDRVTITCRASQNVDSAVAWYQQKPGKAPKALIYSASYRYSGVPSRFSGRGSGTDFTLTISSLQPEDFATYYCQQYYSTPWTFGQGTKVEIKREPKSPDKTHTCPPCPAPPVAGPSVFLFPPKPKDTLMIARTPEVTCVVVDVSHEDPEVKFNWYVDGVEVHNAKTKPREEQYNSTYRVVSVLTVLHQDWLNGKEYKCKVSNKALPAPIEKTISKAKGQPREPQVYTLPPSRDELTKNQVSLTCLVKGFYPSDIAVEWESNGQPENNYKTTPPVLDSDGSFFLYSKLTVDKSRWQQGNVFSCSVMHEALHNHYTQKSLSLSPGKIYIWAPLAGTCGVLLLSLVITLYC

SEQ ID NO: 5539 - protein, 531 aa, Artificial Sequence
  Description of Artificial Sequence: Synthetic Chimeric Antigen Receptor sequence
MALPVTALLLPLALLLHAARPEVQLVESGGGLVQPGRSLRLSCTASGFTFTDYYMSWVRQAPGKGLEWVGFIRSKADGYTTEYAASVKGRFTISRDDSKSIAYLQMNSLKTEDTAVYYCARDAAYYSYYSPEGAMDYWGQGTLVTVSSGGGGSGGGGSGGGGSMADYKDIQMTQSPSSVSASVGDRVTITCRASQNVDSAVAWYQQKPGKAPKALIYSASYRYSGVPSRFSGSGSGTDFTLTISSLQPEDFATYYCQQYYSTPWTFGQGTKVEIKREPKSPDKTHTCPPCPAPPVAGPSVFLFPPKPKDTLMIARTPEVTCVVVDVSHEDPEVKFNWYVDGVEVHNAKTKPREEQYNSTYRVVSVLTVLHQDWLNGKEYKCKVSNKALPAPIEKTISKAKGQPREPQVYTLPPSRDELTKNQVSLTCLVKGFYPSDIAVEWESNGQPENNYKTTPPVLDSDGSFFLYSKLTVDKSRWQQGNVFSCSVMHEALHNHYTQKSLSLSPGKIYIWAPLAGTCGVLLLSLVITLYC

SEQ ID NO: 5540 - protein, 531 aa, Artificial Sequence
  Description of Artificial Sequence: Synthetic Chimeric Antigen Receptor sequence
MALPVTALLLPLALLLHAARPEVQLVESGGGLVQPGRSLRLSCTASGFTFTDYYMSWVRQAPGKGLEWVGFIRSKADGYTTEYAASVKGRFTISRDDSKSIAYLQMNSLKTEDTAVYYCARDAAYYSYYSPEGAMDYWGQGTLVTVSSGGGGSGGGGSGGGGSMADYKDIQMTQSPSSVSASVGDRVTITCRASQNVDSAVAWYQQKPGKAPKLLIYSASYGQSGVPSRFSGSGSGTDFTLTISSLQPEDFATYYCQQYYSTPWTFGQGTKVEIKREPKSPDKTHTCPPCPAPPVAGPSVFLFPPKPKDTLMIARTPEVTCVVVDVSHEDPEVKFNWYVDGVEVHNAKTKPREEQYNSTYRVVSVLTVLHQDWLNGKEYKCKVSNKALPAPIEKTISKAKGQPREPQVYTLPPSRDELTKNQVSLTCLVKGFYPSDIAVEWESNGQPENNYKTTPPVLDSDGSFFLYSKLTVDKSRWQQGNVFSCSVMHEALHNHYTQKSLSLSPGKIYIWAPLAGTCGVLLLSLVITLYC

SEQ ID NO: 5541 - protein, 531 aa, Artificial Sequence
  Description of Artificial Sequence: Synthetic Chimeric Antigen Receptor sequence
MALPVTALLLPLALLLHAARPEVQLVESGGGLVQPGRSLRLSCTASGFTFTDYYMSWVRQAPGKGLEWVGFIRSKADGYTTEYAASVKGRFTISRDDSKSIAYLQMNSLKTEDTAVYYCARDAAYYSYYSPEGAMDYWGQGTLVTVSSGGGGSGGGGSGGGGSMADYKDIQMTQSPSSVSASVGDRVTITCRASQNVDSAVAWYQQKPGKAPKLLIYSASYRQSGVPSRFSGSGSGTDFTLTISSLQPEDFATYYCQQYYSTPWTFGQGTKVEIKREPKSPDKTHTCPPCPAPPVAGPSVFLFPPKPKDTLMIARTPEVTCVVVDVSHEDPEVKFNWYVDGVEVHNAKTKPREEQYNSTYRVVSVLTVLHQDWLNGKEYKCKVSNKALPAPIEKTISKAKGQPREPQVYTLPPSRDELTKNQVSLTCLVKGFYPSDIAVEWESNGQPENNYKTTPPVLDSDGSFFLYSKLTVDKSRWQQGNVFSCSVMHEALHNHYTQKSLSLSPGKIYIWAPLAGTCGVLLLSLVITLYC

SEQ ID NO: 5542 - protein, 531 aa, Artificial Sequence
  Description of Artificial Sequence: Synthetic Chimeric Antigen Receptor sequence
MALPVTALLLPLALLLHAARPEVQLVESGGGLVQPGRSLRLSCTASGFTFTDYYMSWVRQAPGKGLEWVGFIRSKADGYTTEYAASVKGRFTISRDDSKSIAYLQMNSLKTEDTAVYYCARDAAYYSYYSPEGAMDYWGQGTLVTVSSGGGGSGGGGSGGGGSMADYKDIQMTQSPSSVSASVGDRVTITCRASQNVDSAVAWYQQKPGKAPKLLIYSASYRYSGVPSRFSGSGSGTDFTLTISSLQPEDFATYYCQQYYSTPWTFGQGTKVEIKREPKSPDKTHTCPPCPAPPVAGPSVFLFPPKPKDTLMIARTPEVTCVVVDVSHEDPEVKFNWYVDGVEVHNAKTKPREEQYNSTYRVVSVLTVLHQDWLNGKEYKCKVSNKALPAPIEKTISKAKGQPREPQVYTLPPSRDELTKNQVSLTCLVKGFYPSDIAVEWESNGQPENNYKTTPPVLDSDGSFFLYSKLTVDKSRWQQGNVFSCSVMHEALHNHYTQKSLSLSPGKIYIWAPLAGTCGVLLLSLVITLYC

SEQ ID NO: 5543 - protein, 531 aa, Artificial Sequence
  Description of Artificial Sequence: Synthetic Chimeric Antigen Receptor sequence
MALPVTALLLPLALLLHAARPEVQLVESGGGLVQPGRSLRLSCTASGFTFTDYYMSWVRQAPGKGLEWVGFIRSKADGYTTEYAASVKGRFTISRDDSKSIAYLQMNSLKTEDTAVYYCARDAAYYSYYSPEGAMDYWGQGTLVTVSSGGGGSGGGGSGGGGSMADYKDIVMTQSPSSVSASVGDRVTITCRASQNVDSAVAWYQQKPGKAPKALIYSASYRYSGVPSRFSGRGSGTDFTLTISSLQPEDFATYYCQQYYSTPWTFGQGTKVEIKREPKSPDKTHTCPPCPAPPVAGPSVFLFPPKPKDTLMIARTPEVTCVVVDVSHEDPEVKFNWYVDGVEVHNAKTKPREEQYNSTYRVVSVLTVLHQDWLNGKEYKCKVSNKALPAPIEKTISKAKGQPREPQVYTLPPSRDELTKNQVSLTCLVKGFYPSDIAVEWESNGQPENNYKTTPPVLDSDGSFFLYSKLTVDKSRWQQGNVFSCSVMHEALHNHYTQKSLSLSPGKIYIWAPLAGTCGVLLLSLVITLYC

SEQ ID NO: 5544 - protein, 531 aa, Artificial Sequence
  Description of Artificial Sequence: Synthetic Chimeric Antigen Receptor sequence
MALPVTALLLPLALLLHAARPEVQLVESGGGLVQPGRSLRLSCTASGFTFTDYYMSWVRQAPGKGLEWVGFIRSKADGYTTEYAASVKGRFTISRDDSKSIAYLQMNSLKTEDTAVYYCTRDAAYYSYYSPEGAMDYWGQGTLVTVSSGGGGSGGGGSGGGGSMADYKDIQMTQSPSSVSASVGDRVTITCRASQNVDSAVAWYQQKPGKAPKALIYSASYRYSGVPSRFSGRGSGTDFTLTISSLQPEDFATYYCQQYYSTPWTFGQGTKVEIKREPKSPDKTHTCPPCPAPPVAGPSVFLFPPKPKDTLMIARTPEVTCVVVDVSHEDPEVKFNWYVDGVEVHNAKTKPREEQYNSTYRVVSVLTVLHQDWLNGKEYKCKVSNKALPAPIEKTISKAKGQPREPQVYTLPPSRDELTKNQVSLTCLVKGFYPSDIAVEWESNGQPENNYKTTPPVLDSDGSFFLYSKLTVDKSRWQQGNVFSCSVMHEALHNHYTQKSLSLSPGKIYIWAPLAGTCGVLLLSLVITLYC

SEQ ID NO: 5545 - protein, 531 aa, Artificial Sequence
  Description of Artificial Sequence: Synthetic Chimeric Antigen Receptor sequence
MALPVTALLLPLALLLHAARPEVQLVESGGGLVQPGRSLRLSCTASGFTFTDYYMSWVRQAPGKGLEWVGFIRSKADGYTTEYAASVKGRFTISRDDSKSIAYLQMNSLKTEDTAVYYCTRDAAYYSYYSPEGAMDYWGQGTLVTVSSGGGGSGGGGSGGGGSMADYKDIQMTQSPSSVSASVGDRVTITCRASQNVDSAVAWYQQKPGKAPKALIYSASYRYSGVPSRFSGSGSGTDFTLTISSLQPEDFATYYCQQYYSTPWTFGQGTKVEIKREPKSPDKTHTCPPCPAPPVAGPSVFLFPPKPKDTLMIARTPEVTCVVVDVSHEDPEVKFNWYVDGVEVHNAKTKPREEQYNSTYRVVSVLTVLHQDWLNGKEYKCKVSNKALPAPIEKTISKAKGQPREPQVYTLPPSRDELTKNQVSLTCLVKGFYPSDIAVEWESNGQPENNYKTTPPVLDSDGSFFLYSKLTVDKSRWQQGNVFSCSVMHEALHNHYTQKSLSLSPGKIYIWAPLAGTCGVLLLSLVITLYC

SEQ ID NO: 5546 - protein, 531 aa, Artificial Sequence
  Description of Artificial Sequence: Synthetic Chimeric Antigen Receptor sequence
MALPVTALLLPLALLLHAARPEVQLVESGGGLVQPGRSLRLSCTASGFTFTDYYMSWVRQAPGKGLEWVGFIRSKADGYTTEYAASVKGRFTISRDDSKSIAYLQMNSLKTEDTAVYYCTRDAAYYSYYSPEGAMDYWGQGTLVTVSSGGGGSGGGGSGGGGSMADYKDIQMTQSPSSVSASVGDRVTITCRASQNVDSAVAWYQQKPGKAPKLLIYSASYGQSGVPSRFSGSGSGTDFTLTISSLQPEDFATYYCQQYYSTPWTFGQGTKVEIKREPKSPDKTHTCPPCPAPPVAGPSVFLFPPKPKDTLMIARTPEVTCVVVDVSHEDPEVKFNWYVDGVEVHNAKTKPREEQYNSTYRVVSVLTVLHQDWLNGKEYKCKVSNKALPAPIEKTISKAKGQPREPQVYTLPPSRDELTKNQVSLTCLVKGFYPSDIAVEWESNGQPENNYKTTPPVLDSDGSFFLYSKLTVDKSRWQQGNVFSCSVMHEALHNHYTQKSLSLSPGKIYIWAPLAGTCGVLLLSLVITLYC

SEQ ID NO: 5547 - protein, 531 aa, Artificial Sequence
  Description of Artificial Sequence: Synthetic Chimeric Antigen Receptor sequence
MALPVTALLLPLALLLHAARPEVQLVESGGGLVQPGRSLRLSCTASGFTFTDYYMSWVRQAPGKGLEWVGFIRSKADGYTTEYAASVKGRFTISRDDSKSIAYLQMNSLKTEDTAVYYCTRDAAYYSYYSPEGAMDYWGQGTLVTVSSGGGGSGGGGSGGGGSMADYKDIQMTQSPSSVSASVGDRVTITCRASQNVDSAVAWYQQKPGKAPKLLIYSASYRQSGVPSRFSGSGSGTDFTLTISSLQPEDFATYYCQQYYSTPWTFGQGTKVEIKREPKSPDKTHTCPPCPAPPVAGPSVFLFPPKPKDTLMIARTPEVTCVVVDVSHEDPEVKFNWYVDGVEVHNAKTKPREEQYNSTYRVVSVLTVLHQDWLNGKEYKCKVSNKALPAPIEKTISKAKGQPREPQVYTLPPSRDELTKNQVSLTCLVKGFYPSDIAVEWESNGQPENNYKTTPPVLDSDGSFFLYSKLTVDKSRWQQGNVFSCSVMHEALHNHYTQKSLSLSPGKIYIWAPLAGTCGVLLLSLVITLYC

SEQ ID NO: 5548 - protein, 531 aa, Artificial Sequence
  Description of Artificial Sequence: Synthetic Chimeric Antigen Receptor sequence
MALPVTALLLPLALLLHAARPEVQLVESGGGLVQPGRSLRLSCTASGFTFTDYYMSWVRQAPGKGLEWVGFIRSKADGYTTEYAASVKGRFTISRDDSKSIAYLQMNSLKTEDTAVYYCTRDAAYYSYYSPEGAMDYWGQGTLVTVSSGGGGSGGGGSGGGGSMADYKDIQMTQSPSSVSASVGDRVTITCRASQNVDSAVAWYQQKPGKAPKLLIYSASYRYSGVPSRFSGSGSGTDFTLTISSLQPEDFATYYCQQYYSTPWTFGQGTKVEIKREPKSPDKTHTCPPCPAPPVAGPSVFLFPPKPKDTLMIARTPEVTCVVVDVSHEDPEVKFNWYVDGVEVHNAKTKPREEQYNSTYRVVSVLTVLHQDWLNGKEYKCKVSNKALPAPIEKTISKAKGQPREPQVYTLPPSRDELTKNQVSLTCLVKGFYPSDIAVEWESNGQPENNYKTTPPVLDSDGSFFLYSKLTVDKSRWQQGNVFSCSVMHEALHNHYTQKSLSLSPGKIYIWAPLAGTCGVLLLSLVITLYC

SEQ ID NO: 5549 - protein, 531 aa, Artificial Sequence
  Description of Artificial Sequence: Synthetic Chimeric Antigen Receptor sequence
MALPVTALLLPLALLLHAARPEVQLVESGGGLVQPGRSLRLSCTASGFTFTDYYMSWVRQAPGKGLEWVGFIRSKADGYTTEYAASVKGRFTISRDDSKSIAYLQMNSLKTEDTAVYYCTRDAAYYSYYSPEGAMDYWGQGTLVTVSSGGGGSGGGGSGGGGSMADYKDIVMTQSPSSVSASVGDRVTITCRASQNVDSAVAWYQQKPGKAPKALIYSASYRYSGVPSRFSGRGSGTDFTLTISSLQPEDFATYYCQQYYSTPWTFGQGTKVEIKREPKSPDKTHTCPPCPAPPVAGPSVFLFPPKPKDTLMIARTPEVTCVVVDVSHEDPEVKFNWYVDGVEVHNAKTKPREEQYNSTYRVVSVLTVLHQDWLNGKEYKCKVSNKALPAPIEKTISKAKGQPREPQVYTLPPSRDELTKNQVSLTCLVKGFYPSDIAVEWESNGQPENNYKTTPPVLDSDGSFFLYSKLTVDKSRWQQGNVFSCSVMHEALHNHYTQKSLSLSPGKIYIWAPLAGTCGVLLLSLVITLYC

SEQ ID NO: 5550 - protein, 531 aa, Artificial Sequence
  Description of Artificial Sequence: Synthetic Chimeric Antigen Receptor sequence
MALPVTALLLPLALLLHAARPEVQLVESGGGLVQPGRSLRLSCTASGFTFTDYYMSWVRQAPGKGLEWVGFIRSKADGYTTEYSASVKGRFTISRDDSKSIAYLQMNSLKTEDTAVYYCARDAAYYSYYSPEGAMDYWGQGTLVTVSSGGGGSGGGGSGGGGSMADYKDIQMTQSPSSVSASVGDRVTITCRASQNVDSAVAWYQQKPGKAPKALIYSASYRYSGVPSRFSGRGSGTDFTLTISSLQPEDFATYYCQQYYSTPWTFGQGTKVEIKREPKSPDKTHTCPPCPAPPVAGPSVFLFPPKPKDTLMIARTPEVTCVVVDVSHEDPEVKFNWYVDGVEVHNAKTKPREEQYNSTYRVVSVLTVLHQDWLNGKEYKCKVSNKALPAPIEKTISKAKGQPREPQVYTLPPSRDELTKNQVSLTCLVKGFYPSDIAVEWESNGQPENNYKTTPPVLDSDGSFFLYSKLTVDKSRWQQGNVFSCSVMHEALHNHYTQKSLSLSPGKIYIWAPLAGTCGVLLLSLVITLYC

SEQ ID NO: 5551 - protein, 531 aa, Artificial Sequence
  Description of Artificial Sequence: Synthetic Chimeric Antigen Receptor sequence
MALPVTALLLPLALLLHAARPEVQLVESGGGLVQPGRSLRLSCTASGFTFTDYYMSWVRQAPGKGLEWVGFIRSKADGYTTEYSASVKGRFTISRDDSKSIAYLQMNSLKTEDTAVYYCARDAAYYSYYSPEGAMDYWGQGTLVTVSSGGGGSGGGGSGGGGSMADYKDIQMTQSPSSVSASVGDRVTITCRASQNVDSAVAWYQQKPGKAPKALIYSASYRYSGVPSRFSGSGSGTDFTLTISSLQPEDFATYYCQQYYSTPWTFGQGTKVEIKREPKSPDKTHTCPPCPAPPVAGPSVFLFPPKPKDTLMIARTPEVTCVVVDVSHEDPEVKFNWYVDGVEVHNAKTKPREEQYNSTYRVVSVLTVLHQDWLNGKEYKCKVSNKALPAPIEKTISKAKGQPREPQVYTLPPSRDELTKNQVSLTCLVKGFYPSDIAVEWESNGQPENNYKTTPPVLDSDGSFFLYSKLTVDKSRWQQGNVFSCSVMHEALHNHYTQKSLSLSPGKIYIWAPLAGTCGVLLLSLVITLYC

SEQ ID NO: 5552 - protein, 531 aa, Artificial Sequence
  Description of Artificial Sequence: Synthetic Chimeric Antigen Receptor sequence
MALPVTALLLPLALLLHAARPEVQLVESGGGLVQPGRSLRLSCTASGFTFTDYYMSWVRQAPGKGLEWVGFIRSKADGYTTEYSASVKGRFTISRDDSKSIAYLQMNSLKTEDTAVYYCARDAAYYSYYSPEGAMDYWGQGTLVTVSSGGGGSGGGGSGGGGSMADYKDIQMTQSPSSVSASVGDRVTITCRASQNVDSAVAWYQQKPGKAPKLLIYSASYGQSGVPSRFSGSGSGTDFTLTISSLQPEDFATYYCQQYYSTPWTFGQGTKVEIKREPKSPDKTHTCPPCPAPPVAGPSVFLFPPKPKDTLMIARTPEVTCVVVDVSHEDPEVKFNWYVDGVEVHNAKTKPREEQYNSTYRVVSVLTVLHQDWLNGKEYKCKVSNKALPAPIEKTISKAKGQPREPQVYTLPPSRDELTKNQVSLTCLVKGFYPSDIAVEWESNGQPENNYKTTPPVLDSDGSFFLYSKLTVDKSRWQQGNVFSCSVMHEALHNHYTQKSLSLSPGKIYIWAPLAGTCGVLLLSLVITLYC

SEQ ID NO: 5553 - protein, 531 aa, Artificial Sequence
  Description of Artificial Sequence: Synthetic Chimeric Antigen Receptor sequence
MALPVTALLLPLALLLHAARPEVQLVESGGGLVQPGRSLRLSCTASGFTFTDYYMSWVRQAPGKGLEWVGFIRSKADGYTTEYSASVKGRFTISRDDSKSIAYLQMNSLKTEDTAVYYCARDAAYYSYYSPEGAMDYWGQGTLVTVSSGGGGSGGGGSGGGGSMADYKDIQMTQSPSSVSASVGDRVTITCRASQNVDSAVAWYQQKPGKAPKLLIYSASYRQSGVPSRFSGSGSGTDFTLTISSLQPEDFATYYCQQYYSTPWTFGQGTKVEIKREPKSPDKTHTCPPCPAPPVAGPSVFLFPPKPKDTLMIARTPEVTCVVVDVSHEDPEVKFNWYVDGVEVHNAKTKPREEQYNSTYRVVSVLTVLHQDWLNGKEYKCKVSNKALPAPIEKTISKAKGQPREPQVYTLPPSRDELTKNQVSLTCLVKGFYPSDIAVEWESNGQPENNYKTTPPVLDSDGSFFLYSKLTVDKSRWQQGNVFSCSVMHEALHNHYTQKSLSLSPGKIYIWAPLAGTCGVLLLSLVITLYC

SEQ ID NO: 5554 - protein, 531 aa, Artificial Sequence
  Description of Artificial Sequence: Synthetic Chimeric Antigen Receptor sequence
MALPVTALLLPLALLLHAARPEVQLVESGGGLVQPGRSLRLSCTASGFTFTDYYMSWVRQAPGKGLEWVGFIRSKADGYTTEYSASVKGRFTISRDDSKSIAYLQMNSLKTEDTAVYYCARDAAYYSYYSPEGAMDYWGQGTLVTVSSGGGGSGGGGSGGGGSMADYKDIQMTQSPSSVSASVGDRVTITCRASQNVDSAVAWYQQKPGKAPKLLIYSASYRYSGVPSRFSGSGSGTDFTLTISSLQPEDFATYYCQQYYSTPWTFGQGTKVEIKREPKSPDKTHTCPPCPAPPVAGPSVFLFPPKPKDTLMIARTPEVTCVVVDVSHEDPEVKFNWYVDGVEVHNAKTKPREEQYNSTYRVVSVLTVLHQDWLNGKEYKCKVSNKALPAPIEKTISKAKGQPREPQVYTLPPSRDELTKNQVSLTCLVKGFYPSDIAVEWESNGQPENNYKTTPPVLDSDGSFFLYSKLTVDKSRWQQGNVFSCSVMHEALHNHYTQKSLSLSPGKIYIWAPLAGTCGVLLLSLVITLYC

SEQ ID NO: 5555 - protein, 531 aa, Artificial Sequence
  Description of Artificial Sequence: Synthetic Chimeric Antigen Receptor sequence
MALPVTALLLPLALLLHAARPEVQLVESGGGLVQPGRSLRLSCTASGFTFTDYYMSWVRQAPGKGLEWVGFIRSKADGYTTEYSASVKGRFTISRDDSKSIAYLQMNSLKTEDTAVYYCARDAAYYSYYSPEGAMDYWGQGTLVTVSSGGGGSGGGGSGGGGSMADYKDIVMTQSPSSVSASVGDRVTITCRASQNVDSAVAWYQQKPGKAPKALIYSASYRYSGVPSRFSGRGSGTDFTLTISSLQPEDFATYYCQQYYSTPWTFGQGTKVEIKREPKSPDKTHTCPPCPAPPVAGPSVFLFPPKPKDTLMIARTPEVTCVVVDVSHEDPEVKFNWYVDGVEVHNAKTKPREEQYNSTYRVVSVLTVLHQDWLNGKEYKCKVSNKALPAPIEKTISKAKGQPREPQVYTLPPSRDELTKNQVSLTCLVKGFYPSDIAVEWESNGQPENNYKTTPPVLDSDGSFFLYSKLTVDKSRWQQGNVFSCSVMHEALHNHYTQKSLSLSPGKIYIWAPLAGTCGVLLLSLVITLYC

SEQ ID NO: 5556 - protein, 531 aa, Artificial Sequence
  Description of Artificial Sequence: Synthetic Chimeric Antigen Receptor sequence
MALPVTALLLPLALLLHAARPEVQLVESGGGLVQPGRSLRLSCTASGFTFTDYYMSWVRQAPGKGLEWVGLIRSKADGYTTEYAASVKGRFTISRDDSKSIAYLQMNSLKTEDTAVYYCARDAAYYSYYSPEGAMDYWGQGTLVTVSSGGGGSGGGGSGGGGSMADYKDIQMTQSPSSVSASVGDRVTITCRASQNVDSAVAWYQQKPGKAPKALIYSASYRYSGVPSRFSGRGSGTDFTLTISSLQPEDFATYYCQQYYSTPWTFGQGTKVEIKREPKSPDKTHTCPPCPAPPVAGPSVFLFPPKPKDTLMIARTPEVTCVVVDVSHEDPEVKFNWYVDGVEVHNAKTKPREEQYNSTYRVVSVLTVLHQDWLNGKEYKCKVSNKALPAPIEKTISKAKGQPREPQVYTLPPSRDELTKNQVSLTCLVKGFYPSDIAVEWESNGQPENNYKTTPPVLDSDGSFFLYSKLTVDKSRWQQGNVFSCSVMHEALHNHYTQKSLSLSPGKIYIWAPLAGTCGVLLLSLVITLYC

SEQ ID NO: 5557 - protein, 531 aa, Artificial Sequence
  Description of Artificial Sequence: Synthetic Chimeric Antigen Receptor sequence
MALPVTALLLPLALLLHAARPEVQLVESGGGLVQPGRSLRLSCTASGFTFTDYYMSWVRQAPGKGLEWVGLIRSKADGYTTEYAASVKGRFTISRDDSKSIAYLQMNSLKTEDTAVYYCARDAAYYSYYSPEGAMDYWGQGTLVTVSSGGGGSGGGGSGGGGSMADYKDIQMTQSPSSVSASVGDRVTITCRASQNVDSAVAWYQQKPGKAPKALIYSASYRYSGVPSRFSGSGSGTDFTLTISSLQPEDFATYYCQQYYSTPWTFGQGTKVEIKREPKSPDKTHTCPPCPAPPVAGPSVFLFPPKPKDTLMIARTPEVTCVVVDVSHEDPEVKFNWYVDGVEVHNAKTKPREEQYNSTYRVVSVLTVLHQDWLNGKEYKCKVSNKALPAPIEKTISKAKGQPREPQVYTLPPSRDELTKNQVSLTCLVKGFYPSDIAVEWESNGQPENNYKTTPPVLDSDGSFFLYSKLTVDKSRWQQGNVFSCSVMHEALHNHYTQKSLSLSPGKIYIWAPLAGTCGVLLLSLVITLYC

SEQ ID NO: 5558 - protein, 531 aa, Artificial Sequence
  Description of Artificial Sequence: Synthetic Chimeric Antigen Receptor sequence
MALPVTALLLPLALLLHAARPEVQLVESGGGLVQPGRSLRLSCTASGFTFTDYYMSWVRQAPGKGLEWVGLIRSKADGYTTEYAASVKGRFTISRDDSKSIAYLQMNSLKTEDTAVYYCARDAAYYSYYSPEGAMDYWGQGTLVTVSSGGGGSGGGGSGGGGSMADYKDIQMTQSPSSVSASVGDRVTITCRASQNVDSAVAWYQQKPGKAPKLLIYSASYGQSGVPSRFSGSGSGTDFTLTISSLQPEDFATYYCQQYYSTPWTFGQGTKVEIKREPKSPDKTHTCPPCPAPPVAGPSVFLFPPKPKDTLMIARTPEVTCVVVDVSHEDPEVKFNWYVDGVEVHNAKTKPREEQYNSTYRVVSVLTVLHQDWLNGKEYKCKVSNKALPAPIEKTISKAKGQPREPQVYTLPPSRDELTKNQVSLTCLVKGFYPSDIAVEWESNGQPENNYKTTPPVLDSDGSFFLYSKLTVDKSRWQQGNVFSCSVMHEALHNHYTQKSLSLSPGKIYIWAPLAGTCGVLLLSLVITLYC

SEQ ID NO: 5559 - protein, 531 aa, Artificial Sequence
  Description of Artificial Sequence: Synthetic Chimeric Antigen Receptor sequence
MALPVTALLLPLALLLHAARPEVQLVESGGGLVQPGRSLRLSCTASGFTFTDYYMSWVRQAPGKGLEWVGLIRSKADGYTTEYAASVKGRFTISRDDSKSIAYLQMNSLKTEDTAVYYCARDAAYYSYYSPEGAMDYWGQGTLVTVSSGGGGSGGGGSGGGGSMADYKDIQMTQSPSSVSASVGDRVTITCRASQNVDSAVAWYQQKPGKAPKLLIYSASYRQSGVPSRFSGSGSGTDFTLTISSLQPEDFATYYCQQYYSTPWTFGQGTKVEIKREPKSPDKTHTCPPCPAPPVAGPSVFLFPPKPKDTLMIARTPEVTCVVVDVSHEDPEVKFNWYVDGVEVHNAKTKPREEQYNSTYRVVSVLTVLHQDWLNGKEYKCKVSNKALPAPIEKTISKAKGQPREPQVYTLPPSRDELTKNQVSLTCLVKGFYPSDIAVEWESNGQPENNYKTTPPVLDSDGSFFLYSKLTVDKSRWQQGNVFSCSVMHEALHNHYTQKSLSLSPGKIYIWAPLAGTCGVLLLSLVITLYC

SEQ ID NO: 5560 - protein, 531 aa, Artificial Sequence
  Description of Artificial Sequence: Synthetic Chimeric Antigen Receptor sequence
MALPVTALLLPLALLLHAARPEVQLVESGGGLVQPGRSLRLSCTASGFTFTDYYMSWVRQAPGKGLEWVGLIRSKADGYTTEYAASVKGRFTISRDDSKSIAYLQMNSLKTEDTAVYYCARDAAYYSYYSPEGAMDYWGQGTLVTVSSGGGGSGGGGSGGGGSMADYKDIQMTQSPSSVSASVGDRVTITCRASQNVDSAVAWYQQKPGKAPKLLIYSASYRYSGVPSRFSGSGSGTDFTLTISSLQPEDFATYYCQQYYSTPWTFGQGTKVEIKREPKSPDKTHTCPPCPAPPVAGPSVFLFPPKPKDTLMIARTPEVTCVVVDVSHEDPEVKFNWYVDGVEVHNAKTKPREEQYNSTYRVVSVLTVLHQDWLNGKEYKCKVSNKALPAPIEKTISKAKGQPREPQVYTLPPSRDELTKNQVSLTCLVKGFYPSDIAVEWESNGQPENNYKTTPPVLDSDGSFFLYSKLTVDKSRWQQGNVFSCSVMHEALHNHYTQKSLSLSPGKIYIWAPLAGTCGVLLLSLVITLYC

SEQ ID NO: 5561 - protein, 531 aa, Artificial Sequence
  Description of Artificial Sequence: Synthetic Chimeric Antigen Receptor sequence
MALPVTALLLPLALLLHAARPEVQLVESGGGLVQPGRSLRLSCTASGFTFTDYYMSWVRQAPGKGLEWVGLIRSKADGYTTEYAASVKGRFTISRDDSKSIAYLQMNSLKTEDTAVYYCARDAAYYSYYSPEGAMDYWGQGTLVTVSSGGGGSGGGGSGGGGSMADYKDIVMTQSPSSVSASVGDRVTITCRASQNVDSAVAWYQQKPGKAPKALIYSASYRYSGVPSRFSGRGSGTDFTLTISSLQPEDFATYYCQQYYSTPWTFGQGTKVEIKREPKSPDKTHTCPPCPAPPVAGPSVFLFPPKPKDTLMIARTPEVTCVVVDVSHEDPEVKFNWYVDGVEVHNAKTKPREEQYNSTYRVVSVLTVLHQDWLNGKEYKCKVSNKALPAPIEKTISKAKGQPREPQVYTLPPSRDELTKNQVSLTCLVKGFYPSDIAVEWESNGQPENNYKTTPPVLDSDGSFFLYSKLTVDKSRWQQGNVFSCSVMHEALHNHYTQKSLSLSPGKIYIWAPLAGTCGVLLLSLVITLYC

SEQ ID NO: 5562 - protein, 531 aa, Artificial Sequence
  Description of Artificial Sequence: Synthetic Chimeric Antigen Receptor sequence
MALPVTALLLPLALLLHAARPEVQLVESGGGLVQPGRSLRLSCTASGFTFTDYYMSWVRQAPGKGLEWVGLIRSKADGYTTEYSASVKGRFTISRDDSKSIAYLQMNSLKTEDTAVYYCARDAAYYSYYSPEGAMDYWGQGTLVTVSSGGGGSGGGGSGGGGSMADYKDIQMTQSPSSVSASVGDRVTITCRASQNVDSAVAWYQQKPGKAPKALIYSASYRYSGVPSRFSGRGSGTDFTLTISSLQPEDFATYYCQQYYSTPWTFGQGTKVEIKREPKSPDKTHTCPPCPAPPVAGPSVFLFPPKPKDTLMIARTPEVTCVVVDVSHEDPEVKFNWYVDGVEVHNAKTKPREEQYNSTYRVVSVLTVLHQDWLNGKEYKCKVSNKALPAPIEKTISKAKGQPREPQVYTLPPSRDELTKNQVSLTCLVKGFYPSDIAVEWESNGQPENNYKTTPPVLDSDGSFFLYSKLTVDKSRWQQGNVFSCSVMHEALHNHYTQKSLSLSPGKIYIWAPLAGTCGVLLLSLVITLYC

SEQ ID NO: 5563 - protein, 531 aa, Artificial Sequence
  Description of Artificial Sequence: Synthetic Chimeric Antigen Receptor sequence
MALPVTALLLPLALLLHAARPEVQLVESGGGLVQPGRSLRLSCTASGFTFTDYYMSWVRQAPGKGLEWVGLIRSKADGYTTEYSASVKGRFTISRDDSKSIAYLQMNSLKTEDTAVYYCARDAAYYSYYSPEGAMDYWGQGTLVTVSSGGGGSGGGGSGGGGSMADYKDIQMTQSPSSVSASVGDRVTITCRASQNVDSAVAWYQQKPGKAPKALIYSASYRYSGVPSRFSGSGSGTDFTLTISSLQPEDFATYYCQQYYSTPWTFGQGTKVEIKREPKSPDKTHTCPPCPAPPVAGPSVFLFPPKPKDTLMIARTPEVTCVVVDVSHEDPEVKFNWYVDGVEVHNAKTKPREEQYNSTYRVVSVLTVLHQDWLNGKEYKCKVSNKALPAPIEKTISKAKGQPREPQVYTLPPSRDELTKNQVSLTCLVKGFYPSDIAVEWESNGQPENNYKTTPPVLDSDGSFFLYSKLTVDKSRWQQGNVFSCSVMHEALHNHYTQKSLSLSPGKIYIWAPLAGTCGVLLLSLVITLYC

SEQ ID NO: 5564 - protein, 531 aa, Artificial Sequence
  Description of Artificial Sequence: Synthetic Chimeric Antigen Receptor sequence
MALPVTALLLPLALLLHAARPEVQLVESGGGLVQPGRSLRLSCTASGFTFTDYYMSWVRQAPGKGLEWVGLIRSKADGYTTEYSASVKGRFTISRDDSKSIAYLQMNSLKTEDTAVYYCARDAAYYSYYSPEGAMDYWGQGTLVTVSSGGGGSGGGGSGGGGSMADYKDIQMTQSPSSVSASVGDRVTITCRASQNVDSAVAWYQQKPGKAPKLLIYSASYGQSGVPSRFSGSGSGTDFTLTISSLQPEDFATYYCQQYYSTPWTFGQGTKVEIKREPKSPDKTHTCPPCPAPPVAGPSVFLFPPKPKDTLMIARTPEVTCVVVDVSHEDPEVKFNWYVDGVEVHNAKTKPREEQYNSTYRVVSVLTVLHQDWLNGKEYKCKVSNKALPAPIEKTISKAKGQPREPQVYTLPPSRDELTKNQVSLTCLVKGFYPSDIAVEWESNGQPENNYKTTPPVLDSDGSFFLYSKLTVDKSRWQQGNVFSCSVMHEALHNHYTQKSLSLSPGKIYIWAPLAGTCGVLLLSLVITLYC

SEQ ID NO: 5565 - protein, 531 aa, Artificial Sequence
  Description of Artificial Sequence: Synthetic Chimeric Antigen Receptor sequence
MALPVTALLLPLALLLHAARPEVQLVESGGGLVQPGRSLRLSCTASGFTFTDYYMSWVRQAPGKGLEWVGLIRSKADGYTTEYSASVKGRFTISRDDSKSIAYLQMNSLKTEDTAVYYCARDAAYYSYYSPEGAMDYWGQGTLVTVSSGGGGSGGGGSGGGGSMADYKDIQMTQSPSSVSASVGDRVTITCRASQNVDSAVAWYQQKPGKAPKLLIYSASYRQSGVPSRFSGSGSGTDFTLTISSLQPEDFATYYCQQYYSTPWTFGQGTKVEIKREPKSPDKTHTCPPCPAPPVAGPSVFLFPPKPKDTLMIARTPEVTCVVVDVSHEDPEVKFNWYVDGVEVHNAKTKPREEQYNSTYRVVSVLTVLHQDWLNGKEYKCKVSNKALPAPIEKTISKAKGQPREPQVYTLPPSRDELTKNQVSLTCLVKGFYPSDIAVEWESNGQPENNYKTTPPVLDSDGSFFLYSKLTVDKSRWQQGNVFSCSVMHEALHNHYTQKSLSLSPGKIYIWAPLAGTCGVLLLSLVITLYC

SEQ ID NO: 5566 - protein, 531 aa, Artificial Sequence
  Description of Artificial Sequence: Synthetic Chimeric Antigen Receptor sequence
MALPVTALLLPLALLLHAARPEVQLVESGGGLVQPGRSLRLSCTASGFTFTDYYMSWVRQAPGKGLEWVGLIRSKADGYTTEYSASVKGRFTISRDDSKSIAYLQMNSLKTEDTAVYYCARDAAYYSYYSPEGAMDYWGQGTLVTVSSGGGGSGGGGSGGGGSMADYKDIQMTQSPSSVSASVGDRVTITCRASQNVDSAVAWYQQKPGKAPKLLIYSASYRYSGVPSRFSGSGSGTDFTLTISSLQPEDFATYYCQQYYSTPWTFGQGTKVEIKREPKSPDKTHTCPPCPAPPVAGPSVFLFPPKPKDTLMIARTPEVTCVVVDVSHEDPEVKFNWYVDGVEVHNAKTKPREEQYNSTYRVVSVLTVLHQDWLNGKEYKCKVSNKALPAPIEKTISKAKGQPREPQVYTLPPSRDELTKNQVSLTCLVKGFYPSDIAVEWESNGQPENNYKTTPPVLDSDGSFFLYSKLTVDKSRWQQGNVFSCSVMHEALHNHYTQKSLSLSPGKIYIWAPLAGTCGVLLLSLVITLYC

SEQ ID NO: 5567 - protein, 531 aa, Artificial Sequence
  Description of Artificial Sequence: Synthetic Chimeric Antigen Receptor sequence
MALPVTALLLPLALLLHAARPEVQLVESGGGLVQPGRSLRLSCTASGFTFTDYYMSWVRQAPGKGLEWVGLIRSKADGYTTEYSASVKGRFTISRDDSKSIAYLQMNSLKTEDTAVYYCARDAAYYSYYSPEGAMDYWGQGTLVTVSSGGGGSGGGGSGGGGSMADYKDIVMTQSPSSVSASVGDRVTITCRASQNVDSAVAWYQQKPGKAPKALIYSASYRYSGVPSRFSGRGSGTDFTLTISSLQPEDFATYYCQQYYSTPWTFGQGTKVEIKREPKSPDKTHTCPPCPAPPVAGPSVFLFPPKPKDTLMIARTPEVTCVVVDVSHEDPEVKFNWYVDGVEVHNAKTKPREEQYNSTYRVVSVLTVLHQDWLNGKEYKCKVSNKALPAPIEKTISKAKGQPREPQVYTLPPSRDELTKNQVSLTCLVKGFYPSDIAVEWESNGQPENNYKTTPPVLDSDGSFFLYSKLTVDKSRWQQGNVFSCSVMHEALHNHYTQKSLSLSPGKIYIWAPLAGTCGVLLLSLVITLYC

SEQ ID NO: 5568 - protein, 531 aa, Artificial Sequence
  Description of Artificial Sequence: Synthetic Chimeric Antigen Receptor sequence
MALPVTALLLPLALLLHAARPEVQLVESGGGLVQPGRSLRLSCTASGFTFTDYYMSWVRQAPGKGLEWVGLIRSKADGYTTEYSASVKGRFTISRDDSKSILYLQMNSLKTEDTAVYYCARDAAYYSYYSPEGAMDYWGQGTLVTVSSGGGGSGGGGSGGGGSMADYKDIQMTQSPSSVSASVGDRVTITCRASQNVDSAVAWYQQKPGKAPKALIYSASYRYSGVPSRFSGRGSGTDFTLTISSLQPEDFATYYCQQYYSTPWTFGQGTKVEIKREPKSPDKTHTCPPCPAPPVAGPSVFLFPPKPKDTLMIARTPEVTCVVVDVSHEDPEVKFNWYVDGVEVHNAKTKPREEQYNSTYRVVSVLTVLHQDWLNGKEYKCKVSNKALPAPIEKTISKAKGQPREPQVYTLPPSRDELTKNQVSLTCLVKGFYPSDIAVEWESNGQPENNYKTTPPVLDSDGSFFLYSKLTVDKSRWQQGNVFSCSVMHEALHNHYTQKSLSLSPGKIYIWAPLAGTCGVLLLSLVITLYC

SEQ ID NO: 5569 - protein, 531 aa, Artificial Sequence
  Description of Artificial Sequence: Synthetic Chimeric Antigen Receptor sequence
MALPVTALLLPLALLLHAARPEVQLVESGGGLVQPGRSLRLSCTASGFTFTDYYMSWVRQAPGKGLEWVGLIRSKADGYTTEYSASVKGRFTISRDDSKSILYLQMNSLKTEDTAVYYCARDAAYYSYYSPEGAMDYWGQGTLVTVSSGGGGSGGGGSGGGGSMADYKDIQMTQSPSSVSASVGDRVTITCRASQNVDSAVAWYQQKPGKAPKALIYSASYRYSGVPSRFSGSGSGTDFTLTISSLQPEDFATYYCQQYYSTPWTFGQGTKVEIKREPKSPDKTHTCPPCPAPPVAGPSVFLFPPKPKDTLMIARTPEVTCVVVDVSHEDPEVKFNWYVDGVEVHNAKTKPREEQYNSTYRVVSVLTVLHQDWLNGKEYKCKVSNKALPAPIEKTISKAKGQPREPQVYTLPPSRDELTKNQVSLTCLVKGFYPSDIAVEWESNGQPENNYKTTPPVLDSDGSFFLYSKLTVDKSRWQQGNVFSCSVMHEALHNHYTQKSLSLSPGKIYIWAPLAGTCGVLLLSLVITLYC

SEQ ID NO: 5570 - protein, 531 aa, Artificial Sequence
  Description of Artificial Sequence: Synthetic Chimeric Antigen Receptor sequence
MALPVTALLLPLALLLHAARPEVQLVESGGGLVQPGRSLRLSCTASGFTFTDYYMSWVRQAPGKGLEWVGLIRSKADGYTTEYSASVKGRFTISRDDSKSILYLQMNSLKTEDTAVYYCARDAAYYSYYSPEGAMDYWGQGTLVTVSSGGGGSGGGGSGGGGSMADYKDIQMTQSPSSVSASVGDRVTITCRASQNVDSAVAWYQQKPGKAPKLLIYSASYGQSGVPSRFSGSGSGTDFTLTISSLQPEDFATYYCQQYYSTPWTFGQGTKVEIKREPKSPDKTHTCPPCPAPPVAGPSVFLFPPKPKDTLMIARTPEVTCVVVDVSHEDPEVKFNWYVDGVEVHNAKTKPREEQYNSTYRVVSVLTVLHQDWLNGKEYKCKVSNKALPAPIEKTISKAKGQPREPQVYTLPPSRDELTKNQVSLTCLVKGFYPSDIAVEWESNGQPENNYKTTPPVLDSDGSFFLYSKLTVDKSRWQQGNVFSCSVMHEALHNHYTQKSLSLSPGKIYIWAPLAGTCGVLLLSLVITLYC

SEQ ID NO: 5571 - protein, 531 aa, Artificial Sequence
  Description of Artificial Sequence: Synthetic Chimeric Antigen Receptor sequence
MALPVTALLLPLALLLHAARPEVQLVESGGGLVQPGRSLRLSCTASGFTFTDYYMSWVRQAPGKGLEWVGLIRSKADGYTTEYSASVKGRFTISRDDSKSILYLQMNSLKTEDTAVYYCARDAAYYSYYSPEGAMDYWGQGTLVTVSSGGGGSGGGGSGGGGSMADYKDIQMTQSPSSVSASVGDRVTITCRASQNVDSAVAWYQQKPGKAPKLLIYSASYRQSGVPSRFSGSGSGTDFTLTISSLQPEDFATYYCQQYYSTPWTFGQGTKVEIKREPKSPDKTHTCPPCPAPPVAGPSVFLFPPKPKDTLMIARTPEVTCVVVDVSHEDPEVKFNWYVDGVEVHNAKTKPREEQYNSTYRVVSVLTVLHQDWLNGKEYKCKVSNKALPAPIEKTISKAKGQPREPQVYTLPPSRDELTKNQVSLTCLVKGFYPSDIAVEWESNGQPENNYKTTPPVLDSDGSFFLYSKLTVDKSRWQQGNVFSCSVMHEALHNHYTQKSLSLSPGKIYIWAPLAGTCGVLLLSLVITLYC

SEQ ID NO: 5572 - protein, 531 aa, Artificial Sequence
  Description of Artificial Sequence: Synthetic Chimeric Antigen Receptor sequence
MALPVTALLLPLALLLHAARPEVQLVESGGGLVQPGRSLRLSCTASGFTFTDYYMSWVRQAPGKGLEWVGLIRSKADGYTTEYSASVKGRFTISRDDSKSILYLQMNSLKTEDTAVYYCARDAAYYSYYSPEGAMDYWGQGTLVTVSSGGGGSGGGGSGGGGSMADYKDIQMTQSPSSVSASVGDRVTITCRASQNVDSAVAWYQQKPGKAPKLLIYSASYRYSGVPSRFSGSGSGTDFTLTISSLQPEDFATYYCQQYYSTPWTFGQGTKVEIKREPKSPDKTHTCPPCPAPPVAGPSVFLFPPKPKDTLMIARTPEVTCVVVDVSHEDPEVKFNWYVDGVEVHNAKTKPREEQYNSTYRVVSVLTVLHQDWLNGKEYKCKVSNKALPAPIEKTISKAKGQPREPQVYTLPPSRDELTKNQVSLTCLVKGFYPSDIAVEWESNGQPENNYKTTPPVLDSDGSFFLYSKLTVDKSRWQQGNVFSCSVMHEALHNHYTQKSLSLSPGKIYIWAPLAGTCGVLLLSLVITLYC

SEQ ID NO: 5573 - protein, 531 aa, Artificial Sequence
  Description of Artificial Sequence: Synthetic Chimeric Antigen Receptor sequence
MALPVTALLLPLALLLHAARPEVQLVESGGGLVQPGRSLRLSCTASGFTFTDYYMSWVRQAPGKGLEWVGLIRSKADGYTTEYSASVKGRFTISRDDSKSILYLQMNSLKTEDTAVYYCARDAAYYSYYSPEGAMDYWGQGTLVTVSSGGGGSGGGGSGGGGSMADYKDIVMTQSPSSVSASVGDRVTITCRASQNVDSAVAWYQQKPGKAPKALIYSASYRYSGVPSRFSGRGSGTDFTLTISSLQPEDFATYYCQQYYSTPWTFGQGTKVEIKREPKSPDKTHTCPPCPAPPVAGPSVFLFPPKPKDTLMIARTPEVTCVVVDVSHEDPEVKFNWYVDGVEVHNAKTKPREEQYNSTYRVVSVLTVLHQDWLNGKEYKCKVSNKALPAPIEKTISKAKGQPREPQVYTLPPSRDELTKNQVSLTCLVKGFYPSDIAVEWESNGQPENNYKTTPPVLDSDGSFFLYSKLTVDKSRWQQGNVFSCSVMHEALHNHYTQKSLSLSPGKIYIWAPLAGTCGVLLLSLVITLYC

SEQ ID NO: 5574 - protein, 532 aa, Artificial Sequence
  Description of Artificial Sequence: Synthetic Chimeric Antigen Receptor sequence
MALPVTALLLPLALLLHAARPQIQLVQSGPELKKPGETVKISCKASGYIFTNYGMNWVKQAPGKSFKWMGWINTYTGESTYSADFKGRFAFSLETSASTAYLHINDLKNEDTATYFCARSGGYDPMDYWGQGTSVTVSSGGGGSGGGGSGGGGSDIVLTQSPASLAVSLGQRATISCRASESVDNYGNTFMHWYQQKPGQPPKLLIYRASNLESGIPARFSGSGSRTDFTLTINPVEADDVATYYCQQSNEDPPTFGAGTKLELKRSDPGSGGGGSCPYSNPSLCSGGGGSCPYSNPSLCSGGGGSAPTTTPAPRPPTPAPTIASQPLSLRPEACRPAAGGAVHTRGLDFACDIYIWAPLAGTCGVLLLSLVITLYCRRGRKKLLYIFKQPFMRPVQTTQEEDGCSCRFPEEEEGGCELRVKFSRSADAPAYQQGQNQLYNELNLGRREEYDVLDKRRGRDPEMGGKPRRKNPQEGLYNELQKDKMAEAYSEIGMKGERRRGKGHDGLYQGLSTATKDTYDALHMQALPPRE

SEQ ID NO: 5575 - protein, 646 aa, Artificial Sequence
  Description of Artificial Sequence: Synthetic Chimeric Antigen Receptor sequence
QVQLQQPGAELVRPGASVKLSCKASGYTFTSYWMNWVKQRPDQGLEWIGRIDPYDSETHYNQKFKDKAILTVDKSSSTAYMQLSSLTSEDSAVYYCARGNWDDYWGQGTTLTVSSGGGGSGGGGSGGGGSDVQITQSPSYLAASPGETITINCRASKSISKDLAWYQEKPGKTNKLLIYSGSTLQSGIPSRFSGSGSGTDFTLTISSLEPEDFAMYYCQQHNKYPYTFGGGTKLEIKEPKSPDKTHTCPPCPAPPVAGPSVFLFPPKPKDTLMIARTPEVTCVVVDVSHEDPEVKFNWYVDGVEVHNAKTKPREEQYNSTYRVVSVLTVLHQDWLNGKEYKCKVSNKALPAPIEKTISKAKGQPREPQVYTLPPSRDELTKNQVSLTCLVKGFYPSDIAVEWESNGQPENNYKTTPPVLDSDGSFFLYSKLTVDKSRWQQGNVFSCSVMHEALHNHYTQKSLSLSPGKIYIWAPLAGTCGVLLLSLVITLYCKRGRKKLLYIFKQPFMRPVQTTQEEDGCSCRFPEEEEGGCELRVKFSRSADAPAYQQGQNQLYNELNLGRREEYDVLDKRRGRDPEMGGKPRRKNPQEGLYNELQKDKMAEAYSEIGMKGERRRGKGHDGLYQGLSTATKDTYDALHMQALPPR

SEQ ID NO: 5576 - protein, 649 aa, Artificial Sequence
  Description of Artificial Sequence: Synthetic Chimeric Antigen Receptor sequence
QVQLQQPGAELVRPGASVKLSCKASGYTFTSYWMNWVKQRPDQGLEWIGRIDPYDSETHYNQKFKDKAILTVDKSSSTAYMQLSSLTSEDSAVYYCARGNWDDYWGQGTTLTVSSGGGGSGGGGSGGGGSDVQITQSPSYLAASPGETITINCRASKSISKDLAWYQEKPGKTNKLLIYSGSTLQSGIPSRFSGSGSGTDFTLTISSLEPEDFAMYYCQQHNKYPYTFGGGTKLEIKEPKSPDKTHTCPPCPAPPVAGPSVFLFPPKPKDTLMIARTPEVTCVVVDVSHEDPEVKFNWYVDGVEVHNAKTKPREEQYNSTYRVVSVLTVLHQDWLNGKEYKCKVSNKALPAPIEKTISKAKGQPREPQVYTLPPSRDELTKNQVSLTCLVKGFYPSDIAVEWESNGQPENNYKTTPPVLDSDGSFFLYSKLTVDKSRWQQGNVFSCSVMHEALHNHYTQKSLSLSPGKIISFFLALTSTALLFLLFFLTLRFSVVKRGRKKLLYIFKQPFMRPVQTTQEEDGCSCRFPEEEEGGCELRVKFSRSADAPAYQQGQNQLYNELNLGRREEYDVLDKRRGRDPEMGGKPRRKNPQEGLYNELQKDKMAEAYSEIGMKGERRRGKGHDGLYQGLSTATKDTYDALHMQALPPR

SEQ ID NO: 5577 - protein, 653 aa, Artificial Sequence
  Description of Artificial Sequence: Synthetic Chimeric Antigen Receptor sequence
QIQLVQSGPELKKPGETVKISCKASGYIFTNYGMNWVKQAPGKSFKWMGWINTYTGESTYSADFKGRFAFSLETSASTAYLHINDLKNEDTATYFCARSGGYDPMDYWGQGTSVTVSSGGGGSGGGGSGGGGSDIVLTQSPASLAVSLGQRATISCRASESVDNYGNTFMHWYQQKPGQPPKLLIYRASNLESGIPARFSGSGSRTDFTLTINPVEADDVATYYCQQSNEDPPTFGAGTKLELKEPKSPDKTHTCPPCPAPPVAGPSVFLFPPKPKDTLMIARTPEVTCVVVDVSHEDPEVKFNWYVDGVEVHNAKTKPREEQYNSTYRVVSVLTVLHQDWLNGKEYKCKVSNKALPAPIEKTISKAKGQPREPQVYTLPPSRDELTKNQVSLTCLVKGFYPSDIAVEWESNGQPENNYKTTPPVLDSDGSFFLYSKLTVDKSRWQQGNVFSCSVMHEALHNHYTQKSLSLSPGKIYIWAPLAGTCGVLLLSLVITLYCKRGRKKLLYIFKQPFMRPVQTTQEEDGCSCRFPEEEEGGCELRVKFSRSADAPAYQQGQNQLYNELNLGRREEYDVLDKRRGRDPEMGGKPRRKNPQEGLYNELQKDKMAEAYSEIGMKGERRRGKGHDGLYQGLSTATKDTYDALHMQALPPR

SEQ ID NO: 5578 - protein, 656 aa, Artificial Sequence
  Description of Artificial Sequence: Synthetic Chimeric Antigen Receptor sequence
QIQLVQSGPELKKPGETVKISCKASGYIFTNYGMNWVKQAPGKSFKWMGWINTYTGESTYSADFKGRFAFSLETSASTAYLHINDLKNEDTATYFCARSGGYDPMDYWGQGTSVTVSSGGGGSGGGGSGGGGSDIVLTQSPASLAVSLGQRATISCRASESVDNYGNTFMHWYQQKPGQPPKLLIYRASNLESGIPARFSGSGSRTDFTLTINPVEADDVATYYCQQSNEDPPTFGAGTKLELKEPKSPDKTHTCPPCPAPPVAGPSVFLFPPKPKDTLMIARTPEVTCVVVDVSHEDPEVKFNWYVDGVEVHNAKTKPREEQYNSTYRVVSVLTVLHQDWLNGKEYKCKVSNKALPAPIEKTISKAKGQPREPQVYTLPPSRDELTKNQVSLTCLVKGFYPSDIAVEWESNGQPENNYKTTPPVLDSDGSFFLYSKLTVDKSRWQQGNVFSCSVMHEALHNHYTQKSLSLSPGKIISFFLALTSTALLFLLFFLTLRFSVVKRGRKKLLYIFKQPFMRPVQTTQEEDGCSCRFPEEEEGGCELRVKFSRSADAPAYQQGQNQLYNELNLGRREEYDVLDKRRGRDPEMGGKPRRKNPQEGLYNELQKDKMAEAYSEIGMKGERRRGKGHDGLYQGLSTATKDTYDALHMQALPPR

SEQ ID NO: 5579 - protein, 657 aa, Artificial Sequence
  Description of Artificial Sequence: Synthetic Chimeric Antigen Receptor sequence
EVQLVESGGGLVQPGRSLRLSCTASGFTFTDYYMSWVRQAPGKGLEWVGLIRSKADGYTTEYAASVKGRFTISRDDSQSIAYLQMNSLKTEDTAVYYCARDAAYYSYYSPEGAMDYGQGTLVTVSSGGGGSGGGGSGGGGSDIQMTQSPSSVSASVGDRVTITCKASQVDSAVAWYQQKPGKAPKALIYSASYRYSGVPDRFSGSGSGTDFTLTISSLQPEDLATYYCQQYYSTPWTFGQGTKVEIKREPKSPDKTHTCPPCPAPPVAGPSVFLFPPKPKDTLMIARTPEVTCVVVDVSHEDPEVKFNWYVDGVEVHNAKTKPREEQYNSTYRVVSVLTVLHQDWLNGKEYKCKVSNKALPAPIEKTISKAKGQPREPQVYTLPPSRDELTKNQVSLTCLVKGFYPSDIAVEWESNGQPENNYKTTPPVLDSDGSFFLYSKLTVDKSRWQQGNVFSCSVMHEALHNHYTQKSLSLSPGKIYIWAPLAGTCGVLLLSLVITLYCKRGRKKLLYIFKQPFMRPVQTTQEEDGCSCRFPEEEEGGCELRVKFSRSADAPAYQQGQNQLYNELNLGRREEYDVLDKRRGRDPEMGGKPRRKNPQEGLYNELQKDKMAEAYSEIGMKGERRRGKGHDGLYQGLSTATKDTYDALHMQALPPR

SEQ ID NO: 5580 - protein, 657 aa, Artificial Sequence
  Description of Artificial Sequence: Synthetic Chimeric Antigen Receptor sequence
EVQLVESGGGLVQPGRSLRLSCTASGFTFTDYYMSWVRQAPGKGLEWVGLIRSKADGYTTEYAASVKGRFTISRDDSQSIAYLQMNSLKTEDTAVYYCARDAAYYSYYSPEGAMDYGQGTLVTVSSGGGGSGGGGSGGGGSDIQMTQSPSSVSASVGDRVTITCRASQVDSAVAWYQQKPGKAPKALIYSASYRYSGVPSRFSGSGSGTDFTLTISSLQPEDFATYYCQQYYSTPWTFGQGTKVEIKREPKSPDKTHTCPPCPAPPVAGPSVFLFPPKPKDTLMIARTPEVTCVVVDVSHEDPEVKFNWYVDGVEVHNAKTKPREEQYNSTYRVVSVLTVLHQDWLNGKEYKCKVSNKALPAPIEKTISKAKGQPREPQVYTLPPSRDELTKNQVSLTCLVKGFYPSDIAVEWESNGQPENNYKTTPPVLDSDGSFFLYSKLTVDKSRWQQGNVFSCSVMHEALHNHYTQKSLSLSPGKIYIWAPLAGTCGVLLLSLVITLYCKRGRKKLLYIFKQPFMRPVQTTQEEDGCSCRFPEEEEGGCELRVKFSRSADAPAYQQGQNQLYNELNLGRREEYDVLDKRRGRDPEMGGKPRRKNPQEGLYNELQKDKMAEAYSEIGMKGERRRGKGHDGLYQGLSTATKDTYDALHMQALPPR

SEQ ID NO: 5581 - protein, 657 aa, Artificial Sequence
  Description of Artificial Sequence: Synthetic Chimeric Antigen Receptor sequence
EVQLVESGGGLVQPGRSLRLSCTASGFTFTDYYMSWVRQAPGKGLEWVGLIRSKADGYTTEYAASVKGRFTISRDDSQSIAYLQMNSLKTEDTAVYYCARDAAYYSYYSPEGAMDYGQGTLVTVSSGGGGSGGGGSGGGGSDIVMTQSPSSVSASVGDRVTITCRASQNVDSAVAYQQKPGKAPKALIYSASYRYSGVPSRFSGRGSGTDFTLTISSLQPEDFATYYCQQYYSTPWTFGQGTKVEIKREPKSPDKTHTCPPCPAPPVAGPSVFLFPPKPKDTLMIARTPEVTCVVVDVSHEDPEVKFNWYVDGVEVHNAKTKPREEQYNSTYRVVSVLTVLHQDWLNGKEYKCKVSNKALPAPIEKTISKAKGQPREPQVYTLPPSRDELTKNQVSLTCLVKGFYPSDIAVEWESNGQPENNYKTTPPVLDSDGSFFLYSKLTVDKSRWQQGNVFSCSVMHEALHNHYTQKSLSLSPGKIYIWAPLAGTCGVLLLSLVITLYCKRGRKKLLYIFKQPFMRPVQTTQEEDGCSCRFPEEEEGGCELRVKFSRSADAPAYQQGQNQLYNELNLGRREEYDVLDKRRGRDPEMGGKPRRKNPQEGLYNELQKDKMAEAYSEIGMKGERRRGKGHDGLYQGLSTATKDTYDALHMQALPPR

SEQ ID NO: 5582 - protein, 657 aa, Artificial Sequence
  Description of Artificial Sequence: Synthetic Chimeric Antigen Receptor sequence
EVQLVESGGGLVQPGRSLRLSCTASGFTFTDYYMSWVRQAPGKGLEWVGLIRSKADGYTTEYSASVKGRFTISRDDSKSILYLQMNSLKTEDTAVYYCARDAAYYSYYSPEGAMDYGQGTLVTVSSGGGGSGGGGSGGGGSDIQMTQSPSSVSASVGDRVTITCRASQVDSAVAWYQQKPGKAPKALIYSASYRYSGVPSRFSGSGSGTDFTLTISSLQPEDFATYYCQQYYSTPWTFGQGTKVEIKREPKSPDKTHTCPPCPAPPVAGPSVFLFPPKPKDTLMIARTPEVTCVVVDVSHEDPEVKFNWYVDGVEVHNAKTKPREEQYNSTYRVVSVLTVLHQDWLNGKEYKCKVSNKALPAPIEKTISKAKGQPREPQVYTLPPSRDELTKNQVSLTCLVKGFYPSDIAVEWESNGQPENNYKTTPPVLDSDGSFFLYSKLTVDKSRWQQGNVFSCSVMHEALHNHYTQKSLSLSPGKIYIWAPLAGTCGVLLLSLVITLYCKRGRKKLLYIFKQPFMRPVQTTQEEDGCSCRFPEEEEGGCELRVKFSRSADAPAYQQGQNQLYNELNLGRREEYDVLDKRRGRDPEMGGKPRRKNPQEGLYNELQKDKMAEAYSEIGMKGERRRGKGHDGLYQGLSTATKDTYDALHMQALPPR

SEQ ID NO: 5583 - protein, 657 aa, Artificial Sequence
  Description of Artificial Sequence: Synthetic Chimeric Antigen Receptor sequence
EVQLVESGGGLVQPGRSLRLSCTASGFTFTDYYMSWVRQAPGKGLEWVGLIRSKADGYTTEYSASVKGRFTISRDDSKSILYLQMNSLKTEDTAVYYCARDAAYYSYYSPEGAMDYWGQGTLVTVSSGGGGSGGGGSGGGGSDIVMTQSPSSVSASVGDRVTITCRASQNVDSAVAWYQQKPGKAPKALIYSASYRYSGVPSRFSGRGSGTDFTLTISSLQPEDFATYYCQQYYSTPWTFGQGTKVEIKREPKSPDKTHTCPPCPAPPVAGPSVFLFPPKPKDTLMIARTPEVTCWVDVSHEDPEVKFNWYVDGVEVHNAKTKPREEQYNSTYRWSVLTVLHQDWLNGKEYKCKVSNKALPAPIEKTISKAKGQPREPQVYTLPPSRDELTKNQVSLTCLVKGFYPSDIAVEWESNGQPENNYKTTPPVLDSDGSFFLYSKLTVDKSRWQQGNVFSCSVMHEALHNHYTQKSLSLSPGKIYIWAPLAGTCGVLLLSLVITLYCKRGRKKLLYIFKQPFMRPVQTTQEEDGCSCRFPEEEEGGCELRVKFSRSADAPAYQQGQNQLYNELNLGRREEYDVLDKRRGRDPEMGGKPRRKNPQEGLYNELQKDKMAEAYSEIGMKGERRRGKGHDGLYQGLSTATKDTYDALHMQALPPR

SEQ ID NO: 5584 - protein, 657 aa, Artificial Sequence
  Description of Artificial Sequence: Synthetic Chimeric Antigen Receptor sequence
EVQLVESGGGLVQPGRSLRLSCTASGFTFTDYYMSWVRQAPGKGLEWVGLIRSKADGYTTEYSASVKGRFTISRDDSQSIAYLQMNSLKTEDTAVYYCARDAAYYSYYSPEGAMDYGQGTLVTVSSGGGGSGGGGSGGGGSDIQMTQSPSSVSASVGDRVTITCKASQVDSAVAWYQQKPGKAPKLLIYSASYRYSGVPSRFSGSGSGTDFTLTISSLQPEDFATYYCQQYYSTPWTFGQGTKVEIKREPKSPDKTHTCPPCPAPPVAGPSVFLFPPKPKDTLMIARTPEVTCVVVDVSHEDPEVKFNWYVDGVEVHNAKTKPREEQYNSTYRVVSVLTVLHQDWLNGKEYKCKVSNKALPAPIEKTISKAKGQPREPQVYTLPPSRDELTKNQVSLTCLVKGFYPSDIAVEWESNGQPENNYKTTPPVLDSDGSFFLYSKLTVDKSRWQQGNVFSCSVMHEALHNHYTQKSLSLSPGKIYIWAPLAGTCGVLLLSLVITLYCKRGRKKLLYIFKQPFMRPVQTTQEEDGCSCRFPEEEEGGCELRVKFSRSADAPAYQQGQNQLYNELNLGRREEYDVLDKRRGRDPEMGGKPRRKNPQEGLYNELQKDKMAEAYSEIGMKGERRRGKGHDGLYQGLSTATKDTYDALHMQALPPR

SEQ ID NO: 5585 - protein, 657 aa, Artificial Sequence
  Description of Artificial Sequence: Synthetic Chimeric Antigen Receptor sequence
EVQLVESGGGLVQPGRSLRLSCTASGFTFTDYYMSWVRQAPGKGLEWVGLIRSKADGYTTEYSASVKGRFTISRDDSQSIAYLQMNSLKTEDTAVYYCARDAAYYSYYSPEGAMDYGQGTLVTVSSGGGGSGGGGSGGGGSDIQMTQSPSSVSASVGDRVTITCRASQVDSAVAWYQQKPGKAPKALIYSASYRYSGVPSRFSGSGSGTDFTLTISSLQPEDFATYYCQQYYSTPWTFGQGTKVEIKREPKSPDKTHTCPPCPAPPVAGPSVFLFPPKPKDTLMIARTPEVTCVVVDVSHEDPEVKFNWYVDGVEVHNAKTKPREEQYNSTYRVVSVLTVLHQDWLNGKEYKCKVSNKALPAPIEKTISKAKGQPREPQVYTLPPSRDELTKNQVSLTCLVKGFYPSDIAVEWESNGQPENNYKTTPPVLDSDGSFFLYSKLTVDKSRWQQGNVFSCSVMHEALHNHYTQKSLSLSPGKIYIWAPLAGTCGVLLLSLVITLYCKRGRKKLLYIFKQPFMRPVQTTQEEDGCSCRFPEEEEGGCELRVKFSRSADAPAYQQGQNQLYNELNLGRREEYDVLDKRRGRDPEMGGKPRRKNPQEGLYNELQKDKMAEAYSEIGMKGERRRGKGHDGLYQGLSTATKDTYDALHMQALPPR

SEQ ID NO: 5586 - protein, 657 aa, Artificial Sequence
  Description of Artificial Sequence: Synthetic Chimeric Antigen Receptor sequence
EVQLVESGGGLVQPGRSLRLSCTASGFTFTDYYMSWVRQAPGKGLEWVGLIRSKADGYTTEYSASVKGRFTISRDDSQSIAYLQMNSLKTEDTAVYYCARDAAYYSYYSPEGAMDYGQGTLVTVSSGGGGSGGGGSGGGGSDIQMTQSPSSVSASVGDRVTITCRASQVDSAVAWYQQKPGKAPKALIYSASYRYSGVPSRFSGSGSGTDFTLTISSLQPEDLATYYCQQYYSTPWTFGQGTKVEIKREPKSPDKTHTCPPCPAPPVAGPSVFLFPPKPKDTLMIARTPEVTCVVVDVSHEDPEVKFNWYVDGVEVHNAKTKPREEQYNSTYRVVSVLTVLHQDWLNGKEYKCKVSNKALPAPIEKTISKAKGQPREPQVYTLPPSRDELTKNQVSLTCLVKGFYPSDIAVEWESNGQPENNYKTTPPVLDSDGSFFLYSKLTVDKSRWQQGNVFSCSVMHEALHNHYTQKSLSLSPGKIYIWAPLAGTCGVLLLSLVITLYCKRGRKKLLYIFKQPFMRPVQTTQEEDGCSCRFPEEEEGGCELRVKFSRSADAPAYQQGQNQLYNELNLGRREEYDVLDKRRGRDPEMGGKPRRKNPQEGLYNELQKDKMAEAYSEIGMKGERRRGKGHDGLYQGLSTATKDTYDALHMQALPPR

SEQ ID NO: 5587 - protein, 664 aa, Artificial Sequence
  Description of Artificial Sequence: Synthetic Chimeric Antigen Receptor sequence
EVKLVESGGGLVQPGGSLSLSCAASGFTFTDYYMSWVRQPPGKALEWLALIRSKADGYTTEYSASVKGRFTLSRDDSQSILYLQMNALRPEDSATYYCARDAAYYSYYSPEGAMDYWGQGTSVTVSSGGGGSGGGGSGGGGSMADYKDIVMTQSHKFMSTSVGDRVNITCKASQNVDSAVAWYQQKPGQSPKALIYSASYRYSGVPDRFTGRGSGTDFTLTISSVQAEDLAVYYCQQYYSTPWTFGGGTKLEIKREPKSPDKTHTCPPCPAPPVAGPSVFLFPPKPKDTLMIARTPEVTCVVVDVSHEDPEVKFNWYVDGVEVHNAKTKPREEQYNSTYRVVSVLTVLHQDWLNGKEYKCKVSNKALPAPIEKTISKAKGQPREPQVYTLPPSRDELTKNQVSLTCLVKGFYPSDIAVEWESNGQPENNYKTTPPVLDSDGSFFLYSKLTVDKSRWQQGNVFSCSVMHEALHNHYTQKSLSLSPGKIYIWAPLAGTCGVLLLSLVITLYCKRGRKKLLYIFKQPFMRPVQTTQEEDGCSCRFPEEEEGGCELRVKFSRSADAPAYQQGQNQLYNELNLGRREEYDVLDKRRGRDPEMGGKPRRKNPQEGLYNELQKDKMAEAYSEIGMKGERRRGKGHDGLYQGLSTATKDTYDALHMQALPPR

SEQ ID NO: 5588 - protein, 667 aa, Artificial Sequence
  Description of Artificial Sequence: Synthetic Chimeric Antigen Receptor sequence
EVKLVESGGGLVQPGGSLSLSCAASGFTFTDYYMSWVRQPPGKALEWLALIRSKADGYTTEYSASVKGRFTLSRDDSQSILYLQMNALRPEDSATYYCARDAAYYSYYSPEGAMDYWGQGTSVTVSSGGGGSGGGGSGGGGSMADYKDIVMTQSHKFMSTSVGDRVNITCKASQNVDSAVAWYQQKPGQSPKALIYSASYRYSGVPDRFTGRGSGTDFTLTISSVQAEDLAVYYCQQYYSTPWTFGGGTKLEIKREPKSPDKTHTCPPCPAPPVAGPSVFLFPPKPKDTLMIARTPEVTCVVVDVSHEDPEVKFNWYVDGVEVHNAKTKPREEQYNSTYRVVSVLTVLHQDWLNGKEYKCKVSNKALPAPIEKTISKAKGQPREPQVYTLPPSRDELTKNQVSLTCLVKGFYPSDIAVEWESNGQPENNYKTTPPVLDSDGSFFLYSKLTVDKSRWQQGNVFSCSVMHEALHNHYTQKSLSLSPGKIISFFLALTSTALLFLLFFLTLRFSVVKRGRKKLLYIFKQPFMRPVQTTQEEDGCSCRFPEEEEGGCELRVKFSRSADAPAYQQGQNQLYNELNLGRREEYDVLDKRRGRDPEMGGKPRRKNPQEGLYNELQKDKMAEAYSEIGMKGERRRGKGHDGLYQGLSTATKDTYDALHMQALPPR

SEQ ID NO: 5589 - protein, 672 aa, Artificial Sequence
  Description of Artificial Sequence: Synthetic Chimeric Antigen Receptor sequence
MLLLVTSLLLCELPHPAFLLIPQVQLQQPGAELVRPGASVKLSCKASGYTFTSYWMNWVKQRPDQGLEWIGRIDPYDSETHYNQKFKDKAILTVDKSSSTAYMQLSSLTSEDSAVYYCARGNWDDYWGQGTTLTVSSGGGGSGGGGSGGGGSDVQITQSPSYLAASPGETITINCRASKSISKDLAWYQEKPGKTNKLLIYSGSTLQSGIPSRFSGSGSGTDFTLTISSLEPEDFAMYYCQQHNKYPYTFGGGTKLEIKESKYGPPCPPCPAPEFEGGPSVFLFPPKPKDTLMISRTPEVTCVVVDVSQEDPEVQFNWYVDGVEVHNAKTKPREEQFNSTYRVVSVLTVLHQDWLNGKEYKCKVSNKGLPSSIEKTISKAKGQPREPQVYTLPPSQEEMTKNQVSLTCLVKGFYPSDIAVEWESNGQPENNYKTTPPVLDSDGSFFLYSRLTVDKSRWQEGNVFSCSVMHEALHNHYTQKSLSLSLGKMFWVLVVVGGVLACYSLLVTVAFIIFWVRSKRSRGGHSDYMNMTPRRPGPTRKHYQPYAPPRDFAAYRSGGGRVKFSRSADAPAYQQGQNQLYNELNLGRREEYDVLDKRRGRDPEMGGKPRRKNPQEGLYNELQKDKMAEAYSEIGMKGERRRGKGHDGLYQGLSTATKDTYDALHMQALPPR

SEQ ID NO: 5590 - protein, 672 aa, Artificial Sequence
  Description of Artificial Sequence: Synthetic Chimeric Antigen Receptor sequence
MLLLVTSLLLCELPHPAFLLIPQVQLQQPGAELVRPGASVKLSCKASGYTFTSYWMNWVKQRPDQGLEWIGRIDPYDSETHYNQKFKDKAILTVDKSSSTAYMQLSSLTSEDSAVYYCARGNWDDYWGQGTTLTVSSGGGGSGGGGSGGGGSDVQITQSPSYLAASPGETITINCRASKSISKDLAWYQEKPGKTNKLLIYSGSTLQSGIPSRFSGSGSGTDFTLTISSLEPEDFAMYYCQQHNKYPYTFGGGTKLEIKESKYGPPCPPCPAPEFEGGPSVFLFPPKPKDTLMISRTPEVTCVVVDVSQEDPEVQFNWYVDGVEVHNAKTKPREEQFQSTYRVVSVLTVLHQDWLNGKEYKCKVSNKGLPSSIEKTISKAKGQPREPQVYTLPPSQEEMTKNQVSLTCLVKGFYPSDIAVEWESNGQPENNYKTTPPVLDSDGSFFLYSRLTVDKSRWQEGNVFSCSVMHEALHNHYTQKSLSLSLGKMFWVLVVVGGVLACYSLLVTVAFIIFWVRSKRSRGGHSDYMNMTPRRPGPTRKHYQPYAPPRDFAAYRSGGGRVKFSRSADAPAYQQGQNQLYNELNLGRREEYDVLDKRRGRDPEMGGKPRRKNPQEGLYNELQKDKMAEAYSEIGMKGERRRGKGHDGLYQGLSTATKDTYDALHMQALPPR

SEQ ID NO: 5591 - protein, 679 aa, Artificial Sequence
  Description of Artificial Sequence: Synthetic Chimeric Antigen Receptor sequence
MLLLVTSLLLCELPHPAFLLIPQIQLVQSGPELKKPGETVKISCKASGYIFTNYGMNWVKQAPGKSFKWMGWINTYTGESTYSADFKGRFAFSLETSASTAYLHINDLKNEDTATYFCARSGGYDPMDYWGQGTSVTVSSGGGGSGGGGSGGGGSDIVLTQSPASLAVSLGQRATISCRASESVDNYGNTFMHWYQQKPGQPPKLLIYRASNLESGIPARFSGSGSRTDFTLTINPVEADDVATYYCQQSNEDPPTFGAGTKLELKESKYGPPCPPCPAPEFEGGPSVFLFPPKPKDTLMISRTPEVTCVVVDVSQEDPEVQFNWYVDGVEVHNAKTKPREEQFNSTYRVVSVLTVLHQDWLNGKEYKCKVSNKGLPSSIEKTISKAKGQPREPQVYTLPPSQEEMTKNQVSLTCLVKGFYPSDIAVEWESNGQPENNYKTTPPVLDSDGSFFLYSRLTVDKSRWQEGNVFSCSVMHEALHNHYTQKSLSLSLGKMFWVLVVVGGVLACYSLLVTVAFIIFWVRSKRSRGGHSDYMNMTPRRPGPTRKHYQPYAPPRDFAAYRSGGGRVKFSRSADAPAYQQGQNQLYNELNLGRREEYDVLDKRRGRDPEMGGKPRRKNPQEGLYNELQKDKMAEAYSEIGMKGERRRGKGHDGLYQGLSTATKDTYDALHMQALPPR

SEQ ID NO: 5592 - protein, 679 aa, Artificial Sequence
  Description of Artificial Sequence: Synthetic Chimeric Antigen Receptor sequence
MLLLVTSLLLCELPHPAFLLIPQIQLVQSGPELKKPGETVKISCKASGYIFTNYGMNWVKQAPGKSFKWMGWINTYTGESTYSADFKGRFAFSLETSASTAYLHINDLKNEDTATYFCARSGGYDPMDYWGQGTSVTVSSGGGGSGGGGSGGGGSDIVLTQSPASLAVSLGQRATISCRASESVDNYGNTFMHWYQQKPGQPPKLLIYRASNLESGIPARFSGSGSRTDFTLTINPVEADDVATYYCQQSNEDPPTFGAGTKLELKESKYGPPCPPCPAPEFEGGPSVFLFPPKPKDTLMISRTPEVTCVVVDVSQEDPEVQFNWYVDGVEVHNAKTKPREEQFQSTYRVVSVLTVLHQDWLNGKEYKCKVSNKGLPSSIEKTISKAKGQPREPQVYTLPPSQEEMTKNQVSLTCLVKGFYPSDIAVEWESNGQPENNYKTTPPVLDSDGSFFLYSRLTVDKSRWQEGNVFSCSVMHEALHNHYTQKSLSLSLGKMFWVLVVVGGVLACYSLLVTVAFIIFWVRSKRSRGGHSDYMNMTPRRPGPTRKHYQPYAPPRDFAAYRSGGGRVKFSRSADAPAYQQGQNQLYNELNLGRREEYDVLDKRRGRDPEMGGKPRRKNPQEGLYNELQKDKMAEAYSEIGMKGERRRGKGHDGLYQGLSTATKDTYDALHMQALPPR

SEQ ID NO: 5593 - protein, 685 aa, Artificial Sequence
  Description of Artificial Sequence: Synthetic Chimeric Antigen Receptor sequence
MALPVTALLLPLALLLHAARPEVKLVESGGGLVQPGGSLSLSCAASGFTFTDYYMSWVRQPPGKALEWLALIRSKADGYTTEYSASVKGRFTLSRDDSQSILYLQMNALRPEDSATYYCARDAAYYSYYSPEGAMDYWGQGTSVTVSSGGGGSGGGGSGGGGSMADYKDIVMTQSHKFMSTSVGDRVNITCKASQNVDSAVAWYQQKPGQSPKALIYSASYRYSGVPDRFTGRGSGTDFTLTISSVQAEDLAVYYCQQYYSTPWTFGGGTKLEIKREPKSPDKTHTCPPCPAPPVAGPSVFLFPPKPKDTLMIARTPEVTCVVVDVSHEDPEVKFNWYVDGVEVHNAKTKPREEQYNSTYRVVSVLTVLHQDWLNGKEYKCKVSNKALPAPIEKTISKAKGQPREPQVYTLPPSRDELTKNQVSLTCLVKGFYPSDIAVEWESNGQPENNYKTTPPVLDSDGSFFLYSKLTVDKSRWQQGNVFSCSVMHEALHNHYTQKSLSLSPGKIYIWAPLAGTCGVLLLSLVITLYCKRGRKKLLYIFKQPFMRPVQTTQEEDGCSCRFPEEEEGGCELRVKFSRSADAPAYQQGQNQLYNELNLGRREEYDVLDKRRGRDPEMGGKPRRKNPQEGLYNELQKDKMAEAYSEIGMKGERRRGKGHDGLYQGLSTATKDTYDALHMQALPPR

SEQ ID NO: 5594 - protein, 699 aa, Artificial Sequence
  Description of Artificial Sequence: Synthetic Chimeric Antigen Receptor sequence
MGWSWIFLFLVSGTGGVLSEVQLQQSGPELVKPGASVKMSCKASGYTFTDYYMKWVKQSHGKSLEWIGDIIPSNGATFYNQKFKGKATLTVDRSSSTAYMHLNSLTSEDSAVYYCTRSHLLRASWFAYWGQGTLVTVSAASGGGGSGGGGSGGGGSMESQTQVLMSLLFWVSGTCGDFVMTQSPSSLTVTAGEKVTMSCKSSQSLLNSGNQKNYLTWYLQKPGQPPKLLIYWASTRESGVPDRFTGSGSGTDFTLTISSVQAEDLAVYYCQNDYSYPYTFGGGTKLEIKREPKSPDKTHTCPPCPAPPVAGPSVFLFPPKPKDTLMIARTPEVTCVVVDVSHEDPEVKFNWYVDGVEVHNAKTKPREEQYNSTYRVVSVLTVLHQDWLNGKEYKCKVSNKALPAPIEKTISKAKGQPREPQVYTLPPSRDELTKNQVSLTCLVKGFYPSDIAVEWESNGQPENNYKTTPPVLDSDGSFFLYSKLTVDKSRWQQGNVFSCSVMHEALHNHYTQKSLSLSPGKIYIWAPLAGTCGVLLLSLVITLYCKRGRKKLLYIFKQPFMRPVQTTQEEDGCSCRFPEEEEGGCELRVKFSRSADAPAYQQGQNQLYNELNLGRREEYDVLDKRRGRDPEMGGKPRRKNPQEGLYNELQKDKMAEAYSEIGMKGERRRGKGHDGLYQGLSTATKDTYDALHMQALPPR

SEQ ID NO: 5595 - protein, 702 aa, Artificial Sequence
  Description of Artificial Sequence: Synthetic Chimeric Antigen Receptor sequence
MGWSWIFLFLVSGTGGVLSEVQLQQSGPELVKPGASVKMSCKASGYTFTDYYMKWVKQSHGKSLEWIGDIIPSNGATFYNQKFKGKATLTVDRSSSTAYMHLNSLTSEDSAVYYCTRSHLLRASWFAYWGQGTLVTVSAASGGGGSGGGGSGGGGSMESQTQVLMSLLFWVSGTCGDFVMTQSPSSLTVTAGEKVTMSCKSSQSLLNSGNQKNYLTWYLQKPGQPPKLLIYWASTRESGVPDRFTGSGSGTDFTLTISSVQAEDLAVYYCQNDYSYPYTFGGGTKLEIKREPKSPDKTHTCPPCPAPPVAGPSVFLFPPKPKDTLMIARTPEVTCVVVDVSHEDPEVKFNWYVDGVEVHNAKTKPREEQYNSTYRVVSVLTVLHQDWLNGKEYKCKVSNKALPAPIEKTISKAKGQPREPQVYTLPPSRDELTKNQVSLTCLVKGFYPSDIAVEWESNGQPENNYKTTPPVLDSDGSFFLYSKLTVDKSRWQQGNVFSCSVMHEALHNHYTQKSLSLSPGKIISFFLALTSTALLFLLFFLTLRFSVVKRGRKKLLYIFKQPFMRPVQTTQEEDGCSCRFPEEEEGGCELRVKFSRSADAPAYQQGQNQLYNELNLGRREEYDVLDKRRGRDPEMGGKPRRKNPQEGLYNELQKDKMAEAYSEIGMKGERRRGKGHDGLYQGLSTATKDTYDALHMQALPPR

SEQ ID NO: 5596 - protein, 487 aa, Artificial Sequence
  Description of Artificial Sequence: Synthetic Chimeric Antigen Receptor sequence
MALPVTALLLPLALLLHAARPQVQLVQSGAEVKKPGASVKVSCKASGYTFTGYYMHWVRQAPGQGLEWMGWINPNSGGTNYAQKFQGRVTMTRDTSISTAYMELSRLRSDDTAVYYCARDMNILATVPFDIWGQGTMVTVSSGGGGSGGGGSGGGGSDIQMTQSPSSLSASVGDRVTITCRASQSISTYLNWYQQKPGKAPNLLIYAAFSLQSGVPSRFSGSGSGTDFTLTINSLQPEDFATYYCQQGDSVPLTFGGGTKLEIKTTTPAPRPPTPAPTIASQPLSLRPEACRPAAGGAVHTRGLDFACDIYIWAPLAGTCGVLLLSLVITLYCKRGRKKLLYIFKQPFMRPVQTTQEEDGCSCRFPEEEEGGCELRVKFSRSADAPAYKQGQNQLYNELNLGRREEYDVLDKRRGRDPEMGGKPRRKNPQEGLYNELQKDKMAEAYSEIGMKGERRRGKGHDGLYQGLSTATKDTYDALHMQALPPR

SEQ ID NO: 5597 - protein, 487 aa, Artificial Sequence
  Description of Artificial Sequence: Synthetic Chimeric Antigen Receptor sequence
MALPVTALLLPLALLLHAARPQVQLVQSGAEVKKPGASVKVSCKASGYTFTGYYMHWVRQAPGQGLEWMGWINPNSGGTNYAQKFQGRVTLTRDTSISTVYMELSRLRSDDTAVYYCARDMNILATVPFDIWGQGTMVTVSSGGGGSGGGGSGGGGSDIQMTQSPSSLSASVGDRVTITCRASQSISSYLNWYQQKPGKAPKLLIYAASSLQSGVPSRFSGSGSGTDFTLTVNSLQPEDFATYYCQQGDSVPLTFGGGTRLEIKTTTPAPRPPTPAPTIASQPLSLRPEACRPAAGGAVHTRGLDFACDIYIWAPLAGTCGVLLLSLVITLYCKRGRKKLLYIFKQPFMRPVQTTQEEDGCSCRFPEEEEGGCELRVKFSRSADAPAYKQGQNQLYNELNLGRREEYDVLDKRRGRDPEMGGKPRRKNPQEGLYNELQKDKMAEAYSEIGMKGERRRGKGHDGLYQGLSTATKDTYDALHMQALPPR

SEQ ID NO: 5598 - protein, 487 aa, Artificial Sequence
  Description of Artificial Sequence: Synthetic Chimeric Antigen Receptor sequence
MALPVTALLLPLALLLHAARPQVQLVQSGAEVKKPGASVKVSCKASGYIFTGYYIHWVRQAPGQGLEWMGWINPNSGGTNYAQKFQGRVTMTRDTSISTAYMELSGLRSDDPAVYYCARDMNILATVPFDIWGQGTLVTVSSGGGGSGGGGSGGGGSDIQLTQSPSSLSASVGDRVTITCRASQSISSYLNWYQQKPGKAPKLLIYAASSLQSGVPSRFSGSGSGTDFTLTVNSLQPEDFATYYCQQGDSVPLTFGGGTKVEIKTTTPAPRPPTPAPTIASQPLSLRPEACRPAAGGAVHTRGLDFACDIYIWAPLAGTCGVLLLSLVITLYCKRGRKKLLYIFKQPFMRPVQTTQEEDGCSCRFPEEEEGGCELRVKFSRSADAPAYKQGQNQLYNELNLGRREEYDVLDKRRGRDPEMGGKPRRKNPQEGLYNELQKDKMAEAYSEIGMKGERRRGKGHDGLYQGLSTATKDTYDALHMQALPPR

SEQ ID NO: 5599 - protein, 336 aa, Artificial Sequence
  Description of Artificial Sequence: Synthetic Chimeric Antigen Receptor sequence
MALPVTALLLPLALLLHAARPQVQLQQSGAEVKKSGASVKVSCKASGYTFTDYYMHWLRQAPGQGLEWMGWINPNSGDTNYAQKFQGRVTLTRDTSISTVYMELSRLRSDDTAVYYCARDMNILATVPFDIWGQGTMVTVSSASGGGGSGGRASGGGGSDIQMTQSPSSLSASVGDRVTITCRASQSISSYLNWYQQKPGKAPKLLIYAASSLQSGVPSRFSGSGSGTDFTLTISSLQPEDFATYYCQQGDSVPLTFGGGTKVEIKTTTPAPRPPTPAPTIASQPLSLRPEACRPAAGGAVHTRGLDFACDIYIWAPLAGTCGVLLLSLVITLYCK

SEQ ID NO: 5600 - protein, 486 aa, Artificial Sequence
  Description of Artificial Sequence: Synthetic Chimeric Antigen Receptor sequence
MALPVTALLLPLALLLHAARPEIVMTQSPATLSLSPGERATLSCRASQDISKYLNWYQQKPGQAPRLLIYHTSRLHSGIPARFSGSGSGTDYTLTISSLQPEDFAVYFCQQGNTLPYTFGQGTKLEIKGGGGSGGGGSGGGGSQVQLQESGPGLVKPSETLSLTCTVSGVSLPDYGVSWIRQPPGKGLEWIGVIWGSETTYYSSSLKSRVTISKDNSKNQVSLKLSSVTAADTAVYYCAKHYYYGGSYAMDYWGQGTLVTVSSTTTPAPRPPTPAPTIASQPLSLRPEACRPAAGGAVHTRGLDFACDIYIWAPLAGTCGVLLLSLVITLYCKRGRKKLLYIFKQPFMRPVQTTQEEDGCSCRFPEEEEGGCELRVKFSRSADAPAYKQGQNQLYNELNLGRREEYDVLDKRRGRDPEMGGKPRRKNPQEGLYNELQKDKMAEAYSEIGMKGERRRGKGHDGLYQGLSTATKDTYDALHMQALPPR

SEQ ID NO: 5601 - protein, 486 aa, Artificial Sequence
  Description of Artificial Sequence: Synthetic Chimeric Antigen Receptor sequence
MALPVTALLLPLALLLHAARPDIQMTQTTSSLSASLGDRVTISCRASQDISKYLNWYQQKPDGTVKLLIYHTSRLHSGVPSRFSGSGSGTDYSLTISNLEQEDIATYFCQQGNTLPYTFGGGTKLEITGGGGSGGGGSGGGGSEVKLQESGPGLVAPSQSLSVTCTVSGVSLPDYGVSWIRQPPRKGLEWLGVIWGSETTYYNSALKSRLTIIKDNSKSQVFLKMNSLQTDDTAIYYCAKHYYYGGSYAMDYWGQGTSVTVSSTTTPAPRPPTPAPTIASQPLSLRPEACRPAAGGAVHTRGLDFACDIYIWAPLAGTCGVLLLSLVITLYCKRGRKKLLYIFKQPFMRPVQTTQEEDGCSCRFPEEEEGGCELRVKFSRSADAPAYKQGQNQLYNELNLGRREEYDVLDKRRGRDPEMGGKPRRKNPQEGLYNELQKDKMAEAYSEIGMKGERRRGKGHDGLYQGLSTATKDTYDALHMQALPPR

SEQ ID NO: 5602 - protein, 276 aa, Artificial Sequence
  Description of Artificial Sequence: Synthetic polypeptide
MALPVTALLLPLALLLHAARPEIVMTQSPATLSLSPGERATLSCRASQDISKYLNWYQQKPGQAPRLLIYHTSRLHSGIPARFSGSGSGTDYTLTISSLQPEDFAVYFCQQGNTLPYTFGQGTKLEIKGGGGSGGGGSGGGGSGGGGSQVQLQESGPGLVKPSETLSLTCTVSGVSLPDYGVSWIRQPPGKGLEWIGVIWGSETTYYNSSLKSRVTISKDNSKNQVSLKLSSVTAADTAVYYCAKHYYYGGSYAMDYWGQGTLVTVSSHHHHHHHH

SEQ ID NO: 5603 - protein, 276 aa, Artificial Sequence
  Description of Artificial Sequence: Synthetic polypeptide
MALPVTALLLPLALLLHAARPQVQLQESGPGLVKPSETLSLTCTVSGVSLPDYGVSWIRQPPGKGLEWIGVIWGSETTYYNSSLKSRVTISKDNSKNQVSLKLSSVTAADTAVYYCAKHYYYGGSYAMDYWGQGTLVTVSSGGGGSGGGGSGGGGSGGGGSEIVMTQSPATLSLSPGERATLSCRASQDISKYLNWYQQKPGQAPRLLIYHTSRLHSGIPARFSGSGSGTDYTLTISSLQPEDFAVYFCQQGNTLPYTFGQGTKLEIKHHHHHHHH

SEQ ID NO: 5604 - protein, 276 aa, Artificial Sequence
  Description of Artificial Sequence: Synthetic polypeptide
MALPVTALLLPLALLLHAARPQVQLQESGPGLVKPSETLSLTCTVSGVSLPDYGVSWIRQPPGKGLEWIGVIWGSETTYYSSSLKSRVTISKDNSKNQVSLKLSSVTAADTAVYYCAKHYYYGGSYAMDYWGQGTLVTVSSGGGGSGGGGSGGGGSGGGGSEIVMTQSPATLSLSPGERATLSCRASQDISKYLNWYQQKPGQAPRLLIYHTSRLHSGIPARFSGSGSGTDYTLTISSLQPEDFAVYFCQQGNTLPYTFGQGTKLEIKHHHHHHHH

SEQ ID NO: 5605 - protein, 276 aa, Artificial Sequence
  Description of Artificial Sequence: Synthetic polypeptide
MALPVTALLLPLALLLHAARPQVQLQESGPGLVKPSETLSLTCTVSGVSLPDYGVSWIRQPPGKGLEWIGVIWGSETTYYQSSLKSRVTISKDNSKNQVSLKLSSVTAADTAVYYCAKHYYYGGSYAMDYWGQGTLVTVSSGGGGSGGGGSGGGGSGGGGSEIVMTQSPATLSLSPGERATLSCRASQDISKYLNWYQQKPGQAPRLLIYHTSRLHSGIPARFSGSGSGTDYTLTISSLQPEDFAVYFCQQGNTLPYTFGQGTKLEIKHHHHHHHH

SEQ ID NO: 5606 - protein, 271 aa, Artificial Sequence
  Description of Artificial Sequence: Synthetic polypeptide
MALPVTALLLPLALLLHAARPEIVMTQSPATLSLSPGERATLSCRASQDISKYLNWYQQKPGQAPRLLIYHTSRLHSGIPARFSGSGSGTDYTLTISSLQPEDFAVYFCQQGNTLPYTFGQGTKLEIKGGGGSGGGGSGGGGSQVQLQESGPGLVKPSETLSLTCTVSGVSLPDYGVSWIRQPPGKGLEWIGVIWGSETTYYNSSLKSRVTISKDNSKNQVSLKLSSVTAADTAVYYCAKHYYYGGSYAMDYWGQGTLVTVSSHHHHHHHH

SEQ ID NO: 5607 - protein, 271 aa, Artificial Sequence
  Description of Artificial Sequence: Synthetic polypeptide
MALPVTALLLPLALLLHAARPQVQLQESGPGLVKPSETLSLTCTVSGVSLPDYGVSWIRQPPGKGLEWIGVIWGSETTYYNSSLKSRVTISKDNSKNQVSLKLSSVTAADTAVYYCAKHYYYGGSYAMDYWGQGTLVTVSSGGGGSGGGGSGGGGSEIVMTQSPATLSLSPGERATLSCRASQDISKYLNWYQQKPGQAPRLLIYHTSRLHSGIPARFSGSGSGTDYTLTISSLQPEDFAVYFCQQGNTLPYTFGQGTKLEIKHHHHHHHH

SEQ ID NO: 5608 - protein, 276 aa, Artificial Sequence
  Description of Artificial Sequence: Synthetic polypeptide
MALPVTALLLPLALLLHAARPEIVMTQSPATLSLSPGERATLSCRASQDISKYLNWYQQKPGQAPRLLIYHTSRLHSGIPARFSGSGSGTDYTLTISSLQPEDFAVYFCQQGNTLPYTFGQGTKLEIKGGGGSGGGGSGGGGSGGGGSQVQLQESGPGLVKPSETLSLTCTVSGVSLPDYGVSWIRQPPGKGLEWIGVIWGSETTYYQSSLKSRVTISKDNSKNQVSLKLSSVTAADTAVYYCAKHYYYGGSYAMDYWGQGTLVTVSSHHHHHHHH

SEQ ID NO: 5609 - protein, 144 aa, Artificial Sequence
  Description of Artificial Sequence: Synthetic Chimeric Antigen Receptor sequence
MALPVTALLLPLALLLHAARPDIQMTQTTSSLSASLGDRVTISCRASQDISKYLNWYQQKPDGTVKLLIYHTSRLHSGVPSRFSGSGSGTDYSLTISNLEQEDIATYFCQQGNTLPYTFGGGTKLEITGGGGSGGGGSGGGGSE

SEQ ID NO: 5610 - protein, 246 aa, Artificial Sequence
  Description of Artificial Sequence: Synthetic polypeptide
DIQMTQTTSSLSASLGDRVTISCRASQDISKYLNWYQQKPDGTVKLLIYHTSRLHSGVPSRFSGSGSGTDYSLTISNLEQEDIATYFCQQGNTLPYTFGGGTKLEITGSTSGSGKPGSGEGSTKGEVKLQESGPGLVAPSQSLSVTCTVSGVSLPDYGVSWIRQPPRKGLEWLGVIWGSETTYYNSALKSRLTIIKDNSKSQVFLKMNSLQTDDTAIYYCAKHYYYGGSYAMDYWGQGTSVTVSSE

SEQ ID NO: 5611 - protein, 248 aa, Artificial Sequence
  Description of Artificial Sequence: Synthetic Chimeric Antigen Receptor sequence
DIQMTQTTSSLSASLGDRVTISCRASQDISKYLNWYQQKPDGTVKLLIYHTSRLHSGVPSRFSGSGSGTDYSLTISNLEQEDIATYFCQQGNTLPYTFGGGTKLEITKAGGGGSGGGGSGGGGSGGGGSEVKLQESGPGLVAPSQSLSVTCTVSGVSLPDYGVSWIRQPPRKGLEWLGVIWGSETTYYNSALKSRLTIIKDNSKSQVFLKMNSLQTDDTAIYYCAKHYYYGGSYAMDYWGQGTSVTVS

SEQ ID NO: 5612 - protein, 251 aa, Artificial Sequence; identical to SEQ ID NO: 4064
  Description of Artificial Sequence: Synthetic Chimeric Antigen Receptor sequence

SEQ ID NO: 5613 - protein, 254 aa, Artificial Sequence
  Description of Artificial Sequence: Synthetic Chimeric Antigen Receptor sequence
RCDIQMTQSPSSLSASVGDRVTITCRASEDIYFNLVWYQQKPGKAPKLLIYDTNRLADGVPSRFSGSGSGTQYTLTISSLQPEDFATYYCQHYKNYPLTFGQGTKLEIKRSGGGGSGGGGSGGGGSGGGGSRSEVQLVESGGGLVQPGGSLRLSCAASGFTLSNYGMHWIRQAPGKGLEWVSSISLNGGSTYYRDSVKGRFTISRDNAKSTLYLQMNSLRAEDTAVYYCAAQDAYTGGYFDYWGQGTLVTVSSM

SEQ ID NO: 5614 - protein, 428 aa, Artificial Sequence
  Description of Artificial Sequence: Synthetic Chimeric Antigen Receptor sequence
MALPVTALLLPLALLLHAARPEIVLTQSPGTLSLSPGERATLSCRASQSVSSSYLAWYQQKPGQAPRLLIYGASSRATGIPDRFSGSGSGTDFTLTISRLEPEDFAVYYCQQYGSSRFTFGPGTKVDIKGSTSGSGKPGSGEGSTKGQVQLVQSGAEVKKPGSSVKVSCKDSGGTFSSYAISWVRQAPGQGLEWMGGIIPIFGTTNYAQQFQGRVTITADESTSTAYMELSSLRSEDTAVYYCAREAVAADWLDPWGQGTLVTVSSFVPVFLPAKPTTTPAPRPPTPAPTIASQPLSLRPEACRPAAGGAVHTRGLDFACDIYIWAPLAGTCGVLLLSLVITLYCNHRNRSKRSRLLHSDYMNMTPRRPGPTRKHYQPYAPPRDFAAYRSQVRKAAITSYEKSDGVYTGLSTRNQETYETLKHEKPPQ

SEQ ID NO: 5615 - protein, 432 aa, Artificial Sequence
  Description of Artificial Sequence: Synthetic Chimeric Antigen Receptor sequence
MLLLVTSLLLCELPHPAFLLIPDIQMTQTTSSLSASLGDRVTISCRASQDISKYLNWYQQKPDGTVKLLIYHTSRLHSGVPSRFSGSGSGTDYSLTISNLEQEDIATYFCQQGNTLPYTFGGGTKLEITGSTSGSGKPGSGEGSTKGEVKLQESGPGLVAPSQSLSVTCTVSGVSLPDYGVSWIRQPPRKGLEWLGVIWGSETTYYNSALKSRLTIIKDNSKSQVFLKMNSLQTDDTAIYYCAKHYYYGGSYAMDYWGQGTSVTVSSAAAFVPVFLPAKPTTTPAPRPPTPAPTIASQPLSLRPEACRPAAGGAVHTRGLDFACDIYIWAPLAGTCGVLLLSLVITLYCNHRNRSKRSRLLHSDYMNMTPRRPGPTRKHYQPYAPPRDFAAYRSQVRKAAITSYEKSDGVYTGLSTRNQETYETLKHEKPPQ

SEQ ID NO: 5616 - protein, 465 aa, Artificial Sequence
  Description of Artificial Sequence: Synthetic polypeptide
DIQMTQTTSSLSASLGDRVTISCRASQDISKYLNWYQQKPDGTVKLLIYHTSRLHSGVPSRFSGSGSGTDYSLTISNLEQEDIATYFCQQGNTLPYTFGGGTKLEITGGGGSGGGGSGGGGSEVKLQESGPGLVAPSQSLSVTCTVSGVSLPDYGVSWIRQPPRKGLEWLGVIWGSETTYYNSALKSRLTIIKDNSKSQVFLKMNSLQTDDTAIYYCAKHYYYGGSYAMDYWGQGTSVTVSSTTTPAPRPPTPAPTIASQPLSLRPEACRPAAGGAVHTRGLDFACDIYIWAPLAGTCGVLLLSLVITLYCKRGRKKLLYIFKQPFMRPVQTTQEEDGCSCRFPEEEEGGCELRVKFSRSADAPAYKQGQNQLYNELNLGRREEYDVLDKRRGRDPEMGGKPRRKNPQEGLYNELQKDKMAEAYSEIGMKGERRRGKGHDGLYQGLSTATKDTYDALHMQALPPR

SEQ ID NO: 5617 - protein, 465 aa, Artificial Sequence
  Description of Artificial Sequence: Synthetic Chimeric Antigen Receptor sequence
MGTSLLCWMALCLLGADHADAQVQLQQSGPELVKPGASVKISCKASGYAFSSSWMNWVKQRPGKGLEWIGRIYPGDEDTNYSGKFKDKATLTADKSSTTAYMQLSSLTSEDSAVYFCARSLLYGDYLDYWGQGTTLTVSSGGGGSGGGGSGGGGSQIVLTQSPAIMSASPGEKVTMTCSASSSVSYMHWYQQKSGTSPKRWIYDTSKLASGVPDRFSGSGSGTSYFLTINNMEAEDAATYYCQQWNINPLTFGAGTKLELKRSDPAEPKSPDKTHTCPPCPKDPKFWVLVVVGGVLACYSLLVTVAFIIFWVRSKRSRLLHSDYMNMTPRRPGPTRKHYQPYAPPRDFAAYRSRVKFSRSADAPAYQQGQNQLYNELNLGRREEYDVLDKRRGRDPEMGGKPRRKNPQEGLYNELQKDKMAEAYSEIGMKGERRRGKGHDGLYQGLSTATKDTYDALHMQALPPR

SEQ ID NO: 5618 - protein, 467 aa, Artificial Sequence
  Description of Artificial Sequence: Synthetic polypeptide
DIQMTQTTSSLSASLGDRVTISCRASQDISKYLNWYQQKPDGTVKLLIYHTSRLHSGVPSRFSGSGSGTDYSLTISNLEQEDIATYFCQQGNTLPYTFGGGTKLEITGSTSGSGKPGSGEGSTKGEVKLQESGPGLVAPSQSLSVTCTVSGVSLPDYGVSWIRQPPRKGLEWLGVIWGSETTYYNSALKSRLTIIKDNSKSQVFLKMNSLQTDDTAIYYCAKHYYYGGSYAMDYWGQGTSVTVSSAAAIEVMYPPPYLDNEKSNGTIIHVKGKHLCPSPLFPGPSKPFWVLVVVGGVLACYSLLVTVAFIIFWVRSKRSRLLHSDYMNMTPRRPGPTRKHYQPYAPPRDFAAYRSRVKFSRSADAPAYQQGQNQLYNELNLGRREEYDVLDKRRGRDPEMGGKPRRKNPQEGLYNELQKDKMAEAYSEIGMKGERRRGKGHDGLYQGLSTATKDTYDALHMQALPPR

SEQ ID NO: 5619 - protein, 476 aa, Artificial Sequence
  Description of Artificial Sequence: Synthetic Chimeric Antigen Receptor sequence
MALPVTALLLPLALLLHAARPEIVLTQSPGTLSLSPGERATLSCRASQSVSSSYLAWYQQKPGQAPRLLIYGASSRATGIPDRFSGSGSGTDFTLTISRLEPEDFAVYYCQQYGSSRFTFGPGTKVDIKGSTSGSGKPGSGEGSTKGQVQLVQSGAEVKKPGSSVKVSCKDSGGTFSSYAISWVRQAPGQGLEWMGGIIPIFGTTNYAQQFQGRVTITADESTSTAYMELSSLRSEDTAVYYCAREAVAADWLDPWGQGTLVTVSSFVPVFLPAKPTTTPAPRPPTPAPTIASQPLSLRPEACRPAAGGAVHTRGLDFACDIYIWAPLAGTCGVLLLSLVITLYCNHRNRSKRSRLLHSDYMNMTPRRPGPTRKHYQPYAPPRDFAAYRSQRRKYRSNKGESPVEPAEPCRYSCPREEEGSTIPIQEDYRKPEPACSPQVRKAAITSYEKSDGVYTGLSTRNQETYETLKHEKPPQ

SEQ ID NO: 5620 - protein, 476 aa, Artificial Sequence
  Description of Artificial Sequence: Synthetic Chimeric Antigen Receptor sequence
MLLLVTSLLLCELPHPAFLLIPDIQMTQTTSSLSASLGDRVTISCRASQDISKYLNWYQQKPDGTVKLLIYHTSRLHSGVPSRFSGSGSGTDYSLTISNLEQEDIATYFCQQGNTLPYTFGGGTKLEITGSTSGSGKPGSGEGSTKGEVKLQESGPGLVAPSQSLSVTCTVSGVSLPDYGVSWIRQPPRKGLEWLGVIWGSETTYYNSALKSRLTIIKDNSKSQVFLKMNSLQTDDTAIYYCAKHYYYGGSYAMDYWGQGTSVTVSSESKYGPPCPPCPMFWVLVVVGGVLACYSLLVTVAFIIFWVKRGRKKLLYIFKQPFMRPVQTTQEEDGCSCRFPEEEEGGCELRVKFSRSADAPAYQQGQNQLYNELNLGRREEYDVLDKRRGRDPEMGGKPRRKNPQEGLYNELQKDKMAEAYSEIGMKGERRRGKGHDGLYQGLSTATKDTYDALHMQALPPRLEGGGEGRGSLLTCG

SEQ ID NO: 5621 - protein, 480 aa, Artificial Sequence
  Description of Artificial Sequence: Synthetic Chimeric Antigen Receptor sequence
MLLLVTSLLLCELPHPAFLLIPDIQMTQTTSSLSASLGDRVTISCRASQDISKYLNWYQQKPDGTVKLLIYHTSRLHSGVPSRFSGSGSGTDYSLTISNLEQEDIATYFCQQGNTLPYTFGGGTKLEITGSTSGSGKPGSGEGSTKGEVKLQESGPGLVAPSQSLSVTCTVSGVSLPDYGVSWIRQPPRKGLEWLGVIWGSETTYYNSALKSRLTIIKDNSKSQVFLKMNSLQTDDTAIYYCAKHYYYGGSYAMDYWGQGTSVTVSSAAAFVPVFLPAKPTTTPAPRPPTPAPTIASQPLSLRPEACRPAAGGAVHTRGLDFACDIYIWAPLAGTCGVLLLSLVITLYCNHRNRSKRSRLLHSDYMNMTPRRPGPTRKHYQPYAPPRDFAAYRSQRRKYRSNKGESPVEPAEPCRYSCPREEEGSTIPIQEDYRKPEPACSPQVRKAAITSYEKSDGVYTGLSTRNQETYETLKHEKPPQ

SEQ ID NO: 5622 - protein, 484 aa, Artificial Sequence
  Description of Artificial Sequence: Synthetic Chimeric Antigen Receptor sequence
MALPVTALLLPLALLLHAARPDIQMTQTTSSLSASLGDRVTISCRASQDISKYLNWYQQKPDGTVKLLIYHTSRLHSGVPSRFSGSGSGTDYSLTISNLEQEDIATYFCQQGNTLPYTFGGGTKLEITGGGGSGGGGSGGGGSEVKLQESGPGLVAPSQSLSVTCTVSGVSLPDYGVSWIRQPPRKGLEWLGVIWGSETTYYNSALKSRLTIIKDNSKSQVFLKMNSLQTDDTAIYYCAKHYYYGGSYAMDYWGQGTSVTVSSTTTPAPRPPTPAPTIASQPLSLRPEACRPAAGGAVHTRGLDFACDMWAPLAGTCGVLLLSLVITLYCKRGRKKLLYIFKQPFMRPVQTTQEEDGCSCRFPEEEEGGCELRVKFSRSADAPAYKQGQNQLYNELNLGRREEYDVLDKRRGRDPEMGGKPRRKNPQEGLYNELQKDKMAEAYSEIGMKGERRRGKGHDGLYQGLSTATKDTYDALHMQALPPR

SEQ ID NO: 5623 - protein, 486 aa, Artificial Sequence
  Description of Artificial Sequence: Synthetic Chimeric Antigen Receptor sequence
MALPVTALLLPLALLLHAARPEIVMTQSPATLSLSPGERATLSCRASQDISKYLNWYQQKPGQAPRLLIYHTSRLHSGIPARFSGSGSGTDYTLTISSLQPEDFAVYFCQQGNTLPYTFGQGTKLEIKGGGGSGGGGSGGGGSQVQLQESGPGLVKPSETLSLTCTVSGVSLPDYGVSWIRQPPGKGLEWIGVIWGSETTYYQSSLKSRVTISKDNSKNQVSLKLSSVTAADTAVYYCAKHYYYGGSYAMDYWGQGTLVTVSSTTTPAPRPPTPAPTIASQPLSLRPEACRPAAGGAVHTRGLDFACDIYIWAPLAGTCGVLLLSLVITLYCKRGRKKLLYIFKQPFMRPVQTTQEEDGCSCRFPEEEEGGCELRVKFSRSADAPAYKQGQNQLYNELNLGRREEYDVLDKRRGRDPEMGGKPRRKNPQEGLYNELQKDKMAEAYSEIGMKGERRRGKGHDGLYQGLSTATKDTYDALHMQALPPR

SEQ ID NO: 5624 - protein, 486 aa, Artificial Sequence
  Description of Artificial Sequence: Synthetic Chimeric Antigen Receptor sequence
MALPVTALLLPLALLLHAARPQVQLQESGPGLVKPSETLSLTCTVSGVSLPDYGVSWIRQPPGKGLEWIGVIWGSETTYYQSSLKSRVTISKDNSKNQVSLKLSSVTAADTAVYYCAKHYYYGGSYAMDYWGQGTLVTVSSGGGGSGGGGSGGGGSEIVMTQSPATLSLSPGERATLSCRASQDISKYLNWYQQKPGQAPRLLIYHTSRLHSGIPARFSGSGSGTDYTLTISSLQPEDFAVYFCQQGNTLPYTFGQGTKLEIKTTTPAPRPPTPAPTIASQPLSLRPEACRPAAGGAVHTRGLDFACDIYIWAPLAGTCGVLLLSLVITLYCKRGRKKLLYIFKQPFMRPVQTTQEEDGCSCRFPEEEEGGCELRVKFSRSADAPAYKQGQNQLYNELNLGRREEYDVLDKRRGRDPEMGGKPRRKNPQEGLYNELQKDKMAEAYSEIGMKGERRRGKGHDGLYQGLSTATKDTYDALHMQALPPR

SEQ ID NO: 5625 - protein, 489 aa, Artificial Sequence
  Description of Artificial Sequence: Synthetic Chimeric Antigen Receptor sequence
MALPVTALLLPLALLLHAARPDIQMTQTTSSLSASLGDRVTISCRASQDISKYLNWYQQKPDGTVKLLIYHTSRLHSGVPSRFSGSGSGTDYSLTISNLEQEDIATYFCQQGNTLPYTFGGGTKLEITGGGGSGGGGSGGGGSEVKLQESGPGLVAPSQSLSVTCTVSGVSLPDYGVSWIRQPPRKGLEWLGVIWGSETTYYNSALKSRLTIIKDNSKSQVFLKMNSLQTDDTAIYYCAKHYYYGGSYAMDYWGQGTSVTVSSTRTTTPAPRPPTPAPTIASQPLSLRPEACRPAAGGAVHTRGLDFACDIYIWAPLAGTCGVLLLSLVITLYCAVSLSKMLKKRSPLTTGVYVKMPPTEPECEKQFQPYFIPINSARVKFSRSADAPAYKQGQNQLYNELNLGRREEYDVLDKRRGRDPEMGGKPRRKNPQEGLYNELQKDKMAEAYSEIGMKGERRRGKGHDGLYQGLSTATKDTYDALHMQALPPR

SEQ ID NO: 5626 - protein, 491 aa, Artificial Sequence
  Description of Artificial Sequence: Synthetic Chimeric Antigen Receptor sequence
MALPVTALLLPLALLLHAARPEIVMTQSPATLSLSPGERATLSCRASQDISKYLNWYQQKPGQAPRLLIYHTSRLHSGIPARFSGSGSGTDYTLTISSLQPEDFAVYFCQQGNTLPYTFGQGTKLEIKGGGGSGGGGSGGGGSGGGGSQVQLQESGPGLVKPSETLSLTCTVSGVSLPDYGVSWIRQPPGKGLEWIGVIWGSETTYYNSSLKSRVTISKDNSKNQVSLKLSSVTAADTAVYYCAKHYYYGGSYAMDYWGQGTLVTVSSTTTPAPRPPTPAPTIASQPLSLRPEACRPAAGGAVHTRGLDFACDIYIWAPLAGTCGVLLLSLVITLYCKRGRKKLLYIFKQPFMRPVQTTQEEDGCSCRFPEEEEGGCELRVKFSRSADAPAYKQGQNQLYNELNLGRREEYDVLDKRRGRDPEMGGKPRRKNPQEGLYNELQKDKMAEAYSEIGMKGERRRGKGHDGLYQGLSTATKDTYDALHMQALPPR

SEQ ID NO: 5627 - protein, 494 aa, Artificial Sequence
  Description of Artificial Sequence: Synthetic Chimeric Antigen Receptor sequence
METDTLLLWVLLLWVPGSTGDIQMTQTTSSLSASLGDRVTISCRASQDISKYLNWYQQKPDGTVKLLIYHTSRLHSGVPSRFSGSGSGTDYSLTISNLEQEDIATYFCQQGNTLPYTFGGGTKLEITKAGGGGSGGGGSGGGGSGGGGSEVKLQESGPGLVAPSQSLSVTCTVSGVSLPDYGVSWIRQPPRKGLEWLGVIWGSETTYYNSALKSRLTIIKDNSKSQVFLKMNSLQTDDTAIYYCAKHYYYGGSYAMDYWGQGTSVTVSSDPTTTPAPRPPTPAPTIASQPLSLRPEACRPAAGGAVHTRGLDFACDIYIWAPLAGTCGVLLLSLVITLYCKRGRKKLLYIFKQPFMRPVQTTQEEDGCSCRFPEEEEGGCELRVKFSRSADAPAYQQGQNQLYNELNLGRREEYDVLDKRRGRDPEMGGKPRRKNPQEGLYNELQKDKMAEAYSEIGMKGERRRGKGHDGLYQGLSTATKDTYDALHMQALPPR

SEQ ID NO: 5628 - protein, 495 aa, Artificial Sequence
  Description of Artificial Sequence: Synthetic Chimeric Antigen Receptor sequence
MALPVTALLLPLALLLHAARPEVQLQQSGPELIKPGASVKMSCKASGYTFTSYVMHWVKQKPGQGLEWIGYINPYNDGTKYNEKFKGKATLTSDKSSSTAYMELSSLTSEDSAVYYCARGTYYYGSRVFDYWGQGTTLTVSSGGGGSGGGGSGGGGSDIVMTQAAPSIPVTPGESVSISCRSSKSLLNSNGNTYLYWFLQRPGQSPQLLIYRMSNLASGVPDRFSGSGSGTAFTLRISRVEAEDVGVYYCMQHLEYPFTFGAGTKLELKRADTTTPAPRPPTPAPTIASQPLSLRPEACRPAAGGAVHTRGLDFACDIYIWAPLAGTCGVLLLSLVITLYCKRGRKKLLYIFKQPFMRPVQTTQEEDGCSCRFPEEEEGGCELRVKFSRSADAPAYQQGQNQLYNELNLGRREEYDVLDKRRGRDPEMGGKPRRKNPQEGLYNELQKDKMAEAYSEIGMKGERRRGKGHDGLYQGLSTATKDTYDALHMQALPPR

SEQ ID NO: 5629 - protein, 495 aa, Artificial Sequence; identical to SEQ ID NO: 4089
  Description of Artificial Sequence: Synthetic Chimeric Antigen Receptor sequence

SEQ ID NO: 5630 - protein, 502 aa, Artificial Sequence
  Description of Artificial Sequence: Synthetic Chimeric Antigen Receptor sequence
MALPVTALLLPLALLLHAARPEIVLTQSPGTLSLSPGERATLSCRASQSVSSSYLAWYQQKPGQAPRLLIYGASSRATGIPDRFSGSGSGTDFTLTISRLEPEDFAVYYCQQYGSSRFTFGPGTKVDIKGSTSGSGKPGSGEGSTKGQVQLVQSGAEVKKPGSSVKVSCKDSGGTFSSYAISWVRQAPGQGLEWMGGIIPIFGTTNYAQQFQGRVTITADESTSTAYMELSSLRSEDTAVYYCAREAVAADWLDPWGQGTLVTVSSFVPVFLPAKPTTTPAPRPPTPAPTIASQPLSLRPEACRPAAGGAVHTRGLDFACDIYIWAPLAGTCGVLLLSLVITLYCNHRNRSKRSRLLHSDYMNMTPRRPGPTRKHYQPYAPPRDFAAYRSRVKFSRSADAPAYQQGQNQLYNELNLGRREEYDVLDKRRGRDPEMGGKPRRKNPQEGLYNELQKDKMAEAYSEIGMKGERRRGKGHDGLYQGLSTATKDTYDALHMQALPPR

SEQ ID NO: 5631 - protein, 506 aa, Artificial Sequence
  Description of Artificial Sequence: Synthetic Chimeric Antigen Receptor sequence
MLLLVTSLLLCELPHPAFLLIPDIQMTQTTSSLSASLGDRVTISCRASQDISKYLNWYQQKPDGTVKLLIYHTSRLHSGVPSRFSGSGSGTDYSLTISNLEQEDIATYFCQQGNTLPYTFGGGTKLEITGSTSGSGKPGSGEGSTKGEVKLQESGPGLVAPSQSLSVTCTVSGVSLPDYGVSWIRQPPRKGLEWLGVIWGSETTYYNSALKSRLTIIKDNSKSQVFLKMNSLQTDDTAIYYCAKHYYYGGSYAMDYWGQGTSVTVSSAAAFVPVFLPAKPTTTPAPRPPTPAPTIASQPLSLRPEACRPAAGGAVHTRGLDFACDIYIWAPLAGTCGVLLLSLVITLYCNHRNRSKRSRLLHSDYMNMTPRRPGPTRKHYQPYAPPRDFAAYRSRVKFSRSADAPAYQQGQNQLYNELNLGRREEYDVLDKRRGRDPEMGGKPRRKNPQEGLYNELQKDKMAEAYSEIGMKGERRRGKGHDGLYQGLSTATKDTYDALHMQALPPR

SEQ ID NO: 5632 - protein, 508 aa, Artificial Sequence
  Description of Artificial Sequence: Synthetic Chimeric Antigen Receptor sequence
MALPVTALLLPLALLLHAARPEIVLTQSPGTLSLSPGERATLSCRASQSVSSSYLAWYQQKPGQAPRLLIYGASSRATGIPDRFSGSGSGTDFTLTISRLEPEDFAVYYCQQYGSSRFTFGPGTKVDIKGSTSGSGKPGSGEGSTKGQVQLVQSGAEVKKPGSSVKVSCKDSGGTFSSYAISWVRQAPGQGLEWMGGIIPIFGTTNYAQQFQGRVTITADESTSTAYMELSSLRSEDTAVYYCAREAVAADWLDPWGQGTLVTVSSFVPVFLPAKPTTTPAPRPPTPAPTIASQPLSLRPEACRPAAGGAVHTRGLDFACDIYIWAPLAGTCGVLLLSLVITLYCNHRNRFSVVKRGRKKLLYIFKQPFMRPVQTTQEEDGCSCRFPEEEEGGCELRVKFSRSADAPAYQQGQNQLYNELNLGRREEYDVLDKRRGRDPEMGGKPRRKNPQEGLYNELQKDKMAEAYSEIGMKGERRRGKGHDGLYQGLSTATKDTYDALHMQALPPR

SEQ ID NO: 5633 - protein, 508 aa, Artificial Sequence
  Description of Artificial Sequence: Synthetic Chimeric Antigen Receptor sequence
MALPVTALLLPLALLLHAARPEIVMTQSPATLSLSPGERATLSCRASQDISKYLNWYQQKPGQAPRLLIYHTSRLHSGIPARFSGSGSGTDYTLTISSLQPEDFAVYFCQQGNTLPYTFGQGTKLEIKGGGGSGGGGSGGGGSQVQLQESGPGLVKPSETLSLTCTVSGVSLPDYGVSWIRQPPGKGLEWIGVIWGSETTYYSSSLKSRVTISKDNSKNQVSLKLSSVTAADTAVYYCAKHYYYGGSYAMDYWGQGTLVTVSSTTTPAPRPPTPAPTIASQPLSLRPEACRPAAGGAVHTRGLDFACDIYIWAPLAGTCGVLLLSLVITLYCALYLLRRDQRLPPDAHKPPGGGSFRTPIQEEQADAHSTLAKIRSKRSRLLHSDYMNMTPRRPGPTRKHYQPYAPPRDFAAYRSILWHEMWHEGLIEASRLYFGERNVKGMFEVLEPLHAMMERGPQTLKETSFNQAYGRDLMEAQEWCRKYMKSGNVKDLLQAWDLYYHVFRRISK

SEQ ID NO: 5634 - protein, 508 aa, Artificial Sequence
  Description of Artificial Sequence: Synthetic Chimeric Antigen Receptor sequence
MALPVTALLLPLALLLHAARPEIVMTQSPATLSLSPGERATLSCRASQDISKYLNWYQQKPGQAPRLLIYHTSRLHSGIPARFSGSGSGTDYTLTISSLQPEDFAVYFCQQGNTLPYTFGQGTKLEIKGGGGSGGGGSGGGGSQVQLQESGPGLVKPSETLSLTCTVSGVSLPDYGVSWIRQPPGKGLEWIGVIWGSETTYYSSSLKSRVTISKDNSKNQVSLKLSSVTAADTAVYYCAKHYYYGGSYAMDYWGQGTLVTVSSTTTPAPRPPTPAPTIASQPLSLRPEACRPAAGGAVHTRGLDFACDIYIWAPLAGTCGVLLLSLVITLYCKRGRKKLLYIFKQPFMRPVQTTQEEDGCSCRFPEEEEGGCELRSKRSRLLHSDYMNMTPRRPGPTRKHYQPYAPPRDFAAYRSILWHEMWHEGLIEASRLYFGERNVKGMFEVLEPLHAMMERGPQTLKETSFNQAYGRDLMEAQEWCRKYMKSGNVKDLLQAWDLYYHVFRRISK

SEQ ID NO: 5635 - protein, 509 aa, Artificial Sequence
  Description of Artificial Sequence: Synthetic Chimeric Antigen Receptor sequence
MALPVTALLLPLALLLHAARPEIVLTQSPGTLSLSPGERATLSCRASQSVSSSYLAWYQQKPGQAPRLLIYGASSRATGIPDRFSGSGSGTDFTLTISRLEPEDFAVYYCQQYGSSRFTFGPGTKVDIKGSTSGSGKPGSGEGSTKGQVQLVQSGAEVKKPGSSVKVSCKDSGGTFSSYAISWVRQAPGQGLEWMGGIIPIFGTTNYAQQFQGRVTITADESTSTAYMELSSLRSEDTAVYYCAREAVAADWLDPWGQGTLVTVSSFVPVFLPAKPTTTPAPRPPTPAPTIASQPLSLRPEACRPAAGGAVHTRGLDFACDIYIWAPLAGTCGVLLLSLVITLYCNHRNQRRKYRSNKGESPVEPAEPCRYSCPREEEGSTIPIQEDYRKPEPACSPRVKFSRSADAPAYQQGQNQLYNELNLGRREEYDVLDKRRGRDPEMGGKPRRKNPQEGLYNELQKDKMAEAYSEIGMKGERRRGKGHDGLYQGLSTATKDTYDALHMQALPPR

SEQ ID NO: 5636 - protein, 513 aa, Artificial Sequence
  Description of Artificial Sequence: Synthetic Chimeric Antigen Receptor sequence
MLLLVTSLLLCELPHPAFLLIPDIQMTQTTSSLSASLGDRVTISCRASQDISKYLNWYQQKPDGTVKLLIYHTSRLHSGVPSRFSGSGSGTDYSLTISNLEQEDIATYFCQQGNTLPYTFGGGTKLEITGSTSGSGKPGSGEGSTKGEVKLQESGPGLVAPSQSLSVTCTVSGVSLPDYGVSWIRQPPRKGLEWLGVIWGSETTYYNSALKSRLTIIKDNSKSQVFLKMNSLQTDDTAIYYCAKHYYYGGSYAMDYWGQGTSVTVSSAAAFVPVFLPAKPTTTPAPRPPTPAPTIASQPLSLRPEACRPAAGGAVHTRGLDFACDIYIWAPLAGTCGVLLLSLVITLYCNHRNQRRKYRSNKGESPVEPAEPCRYSCPREEEGSTIPIQEDYRKPEPACSPRVKFSRSADAPAYQQGQNQLYNELNLGRREEYDVLDKRRGRDPEMGGKPRRKNPQEGLYNELQKDKMAEAYSEIGMKGERRRGKGHDGLYQGLSTATKDTYDALHMQALPPR

SEQ ID NO: 5637 - protein, 514 aa, Artificial Sequence
  Description of Artificial Sequence: Synthetic Chimeric Antigen Receptor sequence
MALPVTALLLPLALLLHAARPEIVMTQSPATLSLSPGERATLSCRASQDISKYLNWYQQKPGQAPRLLIYHTSRLHSGIPARFSGSGSGTDYTLTISSLQPEDFAVYFCQQGNTLPYTFGQGTKLEIKGGGGSGGGGSGGGGSQVQLQESGPGLVKPSETLSLTCTVSGVSLPDYGVSWIRQPPGKGLEWIGVIWGSETTYYSSSLKSRVTISKDNSKNQVSLKLSSVTAADTAVYYCAKHYYYGGSYAMDYWGQGTLVTVSSTTTPAPRPPTPAPTIASQPLSLRPEACRPAAGGAVHTRGLDFACDIYIWAPLAGTCGVLLLSLVITLYCQRRKYRSNKGESPVEPAEPCHYSCPREEEGSTIPIQEDYRKPEPACSPRSKRSRLLHSDYMNMTPRRPGPTRKHYQPYAPPRDFAAYRSILWHEMWHEGLIEASRLYFGERNVKGMFEVLEPLHAMMERGPQTLKETSFNQAYGRDLMEAQEWCRKYMKSGNVKDLLQAWDLYYHVFRRISK

SEQ ID NO: 5638 - protein, 522 aa, Artificial Sequence
  Description of Artificial Sequence: Synthetic Chimeric Antigen Receptor sequence
MALPVTALLLPLALLLHAARPEIVMTQSPATLSLSPGERATLSCRASQDISKYLNWYQQKPGQAPRLLIYHTSRLHSGIPARFSGSGSGTDYTLTISSLQPEDFAVYFCQQGNTLPYTFGQGTKLEIKGGGGSGGGGSGGGGSQVQLQESGPGLVKPSETLSLTCTVSGVSLPDYGVSWIRQPPGKGLEWIGVIWGSETTYYSSSLKSRVTISKDNSKNQVSLKLSSVTAADTAVYYCAKHYYYGGSYAMDYWGQGTLVTVSSTTTPAPRPPTPAPTIASQPLSLRPEACRPAAGGAVHTRGLDFACDIYIWAPLAGTCGVLLLSLVITLYCALYLLRRDQRLPPDAHKPPGGGSFRTPIQEEQADAHSTLAKIRSKRSRLLHSDYMNMTPRRPGPTRKHYQPYAPPRDFAAYRSGVQVETISPGDGRTFPKRGQTCVVHYTGMLEDGKKFDSSRDRNKPFKFMLGKQEVIRGWEEGVAQMSVGQRAKLTISPDYAYGATGHPGIIPPHATLVFDVELLKLE

SEQ ID NO: 5639 - protein, 522 aa, Artificial Sequence
  Description of Artificial Sequence: Synthetic Chimeric Antigen Receptor sequence
MALPVTALLLPLALLLHAARPEIVMTQSPATLSLSPGERATLSCRASQDISKYLNWYQQKPGQAPRLLIYHTSRLHSGIPARFSGSGSGTDYTLTISSLQPEDFAVYFCQQGNTLPYTFGQGTKLEIKGGGGSGGGGSGGGGSQVQLQESGPGLVKPSETLSLTCTVSGVSLPDYGVSWIRQPPGKGLEWIGVIWGSETTYYSSSLKSRVTISKDNSKNQVSLKLSSVTAADTAVYYCAKHYYYGGSYAMDYWGQGTLVTVSSTTTPAPRPPTPAPTIASQPLSLRPEACRPAAGGAVHTRGLDFACDIYIWAPLAGTCGVLLLSLVITLYCKRGRKKLLYIFKQPFMRPVQTTQEEDGCSCRFPEEEEGGCELRSKRSRLLHSDYMNMTPRRPGPTRKHYQPYAPPRDFAAYRSGVQVETISPGDGRTFPKRGQTCVVHYTGMLEDGKKFDSSRDRNKPFKFMLGKQEVIRGWEEGVAQMSVGQRAKLTISPDYAYGATGHPGIIPPHATLVFDVELLKLE

SEQ ID NO: 5640 - protein, 527 aa, Artificial Sequence
  Description of Artificial Sequence: Synthetic Chimeric Antigen Receptor sequence
DIQMTQTTSSLSASLGDRVTISCRASQDISKYLNWYQQKPDGTVKLLIYHTSRLHSGVPSRFSGSGSGTDYSLTISNLEQEDIATYFCQQGNTLPYTFGGGTKLEITGSTSGSGKPGSGEGSTKGEVKLQESGPGLVAPSQSLSVTCTVSGVSLPDYGVSWIRQPPRKGLEWLGVRWGSETTYYNSALKSRLTIIKDNSKSQVFLKMNSLQTDDTAIYYCAKHYYYGGSYAMDYWGQGTSVTVSSAAIEVMYPPPYLDNEKSNGTIIHVKGKHLCPSPLFPGPSKPFWVLVVVGGVLACYSLLVTVAFIIFWVRSKRSRLLHSDYMNMTPRRPGPTRKHYQPYAPPRDFAAYRSASGGGGSGGGGSKSRQTPPLASVEMEAMEALPVTWGTSSRDEDLENCSHHLGGGGSGGGGSRVKFSRSADAPAYQQGQNQLYNELNLGRREEYDVLDKRRGRDPEMGGKPRRKNPQEGLYNELQKDKMAEAYSEIGMKGERRRGKGHDGLYQGLSTATKDTYDALHMQALPPR

SEQ ID NO: 5641 - protein, 528 aa, Artificial Sequence
  Description of Artificial Sequence: Synthetic Chimeric Antigen Receptor sequence
MALPVTALLLPLALLLHAARPEIVMTQSPATLSLSPGERATLSCRASQDISKYLNWYQQKPGQAPRLLIYHTSRLHSGIPARFSGSGSGTDYTLTISSLQPEDFAVYFCQQGNTLPYTFGQGTKLEIKGGGGSGGGGSGGGGSQVQLQESGPGLVKPSETLSLTCTVSGVSLPDYGVSWIRQPPGKGLEWIGVIWGSETTYYSSSLKSRVTISKDNSKNQVSLKLSSVTAADTAVYYCAKHYYYGGSYAMDYWGQGTLVTVSSTTTPAPRPPTPAPTIASQPLSLRPEACRPAAGGAVHTRGLDFACDIYIWAPLAGTCGVLLLSLVITLYCQRRKYRSNKGESPVEPAEPCHYSCPREEEGSTIPIQEDYRKPEPACSPRSKRSRLLHSDYMNMTPRRPGPTRKHYQPYAPPRDFAAYRSGVQVETISPGDGRTFPKRGQTCVVHYTGMLEDGKKFDSSRDRNKPFKFMLGKQEVIRGWEEGVAQMSVGQRAKLTISPDYAYGATGHPGIIPPHATLVFDVELLKLE

SEQ ID NO: 5642 - protein, 530 aa, Artificial Sequence
  Description of Artificial Sequence: Synthetic Chimeric Antigen Receptor sequence
MALPVTALLLPLALLLHAARPDIMMTQSPSSLAVSAGEKVTMTCKSSQSVLYSSNQKNYLAWYQQKPGQSPKLLIYWASTRESGVPDRFTGSGSGTDFTLTISSVQPEDLAVYYCHQYLSSHTFGGGTKLEIKRGGGGSGGGGSGGGGSQLQQPGAELVRPGSSVKLSCKASGYTFTRYWIHWVKQRPIQGLEWIGNIDPSDSETHYNQKFKDKATLTVDKSSGTAYMQLSSLTSEDSAVYYCATEDLYYAMEYWGQGTSVTVSSTTTPAPRPPTPAPTIASQPLSLRPEACRPAAGGAVHTRGLDFACDIYIWAPLAGTCGVLLLSLVITLYCRSKRSRLLHSDYMNMTPRRPGPTRKHYQPYAPPRDFAAYRSKRGRKKLLYIFKQPFMRPVQTTQEEDGCSCRFPEEEEGGCELRVKFSRSADAPAYQQGQNQLYNELNLGRREEYDVLDKRRGRDPEMGGKPQRRKNPQEGLYNELQKDKMAEAYSEIGMKGERRRGKGHDGLYQGLSTATKDTYDALHMQALPPR

SEQ ID NO: 5643 - protein, 550 aa, Artificial Sequence
  Description of Artificial Sequence: Synthetic Chimeric Antigen Receptor sequence
MALPVTALLLPLALLLHAARPEIVLTQSPGTLSLSPGERATLSCRASQSVSSSYLAWYQQKPGQAPRLLIYGASSRATGIPDRFSGSGSGTDFTLTISRLEPEDFAVYYCQQYGSSRFTFGPGTKVDIKGSTSGSGKPGSGEGSTKGQVQLVQSGAEVKKPGSSVKVSCKDSGGTFSSYAISWVRQAPGQGLEWMGGIIPIFGTTNYAQQFQGRVTITADESTSTAYMELSSLRSEDTAVYYCAREAVAADWLDPWGQGTLVTVSSFVPVFLPAKPTTTPAPRPPTPAPTIASQPLSLRPEACRPAAGGAVHTRGLDFACDIYIWAPLAGTCGVLLLSLVITLYCNHRNRSKRSRLLHSDYMNMTPRRPGPTRKHYQPYAPPRDFAAYRSQRRKYRSNKGESPVEPAEPCRYSCPREEEGSTIPIQEDYRKPEPACSPRVKFSRSADAPAYQQGQNQLYNELNLGRREEYDVLDKRRGRDPEMGGKPRRKNPQEGLYNELQKDKMAEAYSEIGMKGERRRGKGHDGLYQGLSTATKDTYDALHMQALPPR

SEQ ID NO: 5644 - protein, 554 aa, Artificial Sequence
  Description of Artificial Sequence: Synthetic Chimeric Antigen Receptor sequence
MLLLVTSLLLCELPHPAFLLIPDIQMTQTTSSLSASLGDRVTISCRASQDISKYLNWYQQKPDGTVKLLIYHTSRLHSGVPSRFSGSGSGTDYSLTISNLEQEDIATYFCQQGNTLPYTFGGGTKLEITGSTSGSGKPGSGEGSTKGEVKLQESGPGLVAPSQSLSVTCTVSGVSLPDYGVSWIRQPPRKGLEWLGVIWGSETTYYNSALKSRLTIIKDNSKSQVFLKMNSLQTDDTAIYYCAKHYYYGGSYAMDYWGQGTSVTVSSAAAFVPVFLPAKPTTTPAPRPPTPAPTIASQPLSLRPEACRPAAGGAVHTRGLDFACDIYIWAPLAGTCGVLLLSLVITLYCNHRNRSKRSRLLHSDYMNMTPRRPGPTRKHYQPYAPPRDFAAYRSQRRKYRSNKGESPVEPAEPCRYSCPREEEGSTIPIQEDYRKPEPACSPRVKFSRSADAPAYQQGQNQLYNELNLGRREEYDVLDKRRGRDPEMGGKPRRKNPQEGLYNELQKDKMAEAYSEIGMKGERRRGKGHDGLYQGLSTATKDTYDALHMQALPPR

SEQ ID NO: 5645 - protein, 556 aa, Artificial Sequence
  Description of Artificial Sequence: Synthetic Chimeric Antigen Receptor sequence
MALPVTALLLPLALLLHAARPEIVLTQSPGTLSLSPGERATLSCRASQSVSSSYLAWYQQKPGQAPRLLIYGASSRATGIPDRFSGSGSGTDFTLTISRLEPEDFAVYYCQQYGSSRFTFGPGTKVDIKGSTSGSGKPGSGEGSTKGQVQLVQSGAEVKKPGSSVKVSCKDSGGTFSSYAISWVRQAPGQGLEWMGGIIPIFGTTNYAQQFQGRVTITADESTSTAYMELSSLRSEDTAVYYCAREAVAADWLDPWGQGTLVTVSSFVPVFLPAKPTTTPAPRPPTPAPTIASQPLSLRPEACRPAAGGAVHTRGLDFACDIYIWAPLAGTCGVLLLSLVITLYCNHRNQRRKYRSNKGESPVEPAEPCRYSCPREEEGSTIPIQEDYRKPEPACSPRFSVVKRGRKKLLYIFKQPFMRPVQTTQEEDGCSCRFPEEEEGGCELRVKFSRSADAPAYQQGQNQLYNELNLGRREEYDVLDKRRGRDPEMGGKPRRKNPQEGLYNELQKDKMAEAYSEIGMKGERRRGKGHDGLYQGLSTATKDTYDALHMQALPPR

SEQ ID NO: 5646 - protein, 560 aa, Artificial Sequence
  Description of Artificial Sequence: Synthetic Chimeric Antigen Receptor sequence
MLLLVTSLLLCELPHPAFLLIPDIQMTQTTSSLSASLGDRVTISCRASQDISKYLNWYQQKPDGTVKLLIYHTSRLHSGVPSRFSGSGSGTDYSLTISNLEQEDIATYFCQQGNTLPYTFGGGTKLEITGSTSGSGKPGSGEGSTKGEVKLQESGPGLVAPSQSLSVTCTVSGVSLPDYGVSWIRQPPRKGLEWLGVIWGSETTYYNSALKSRLTIIKDNSKSQVFLKMNSLQTDDTAIYYCAKHYYYGGSYAMDYWGQGTSVTVSSAAAFVPVFLPAKPTTTPAPRPPTPAPTIASQPLSLRPEACRPAAGGAVHTRGLDFACDIYIWAPLAGTCGVLLLSLVITLYCNHRNQRRKYRSNKGESPVEPAEPCRYSCPREEEGSTIPIQEDYRKPEPACSPRFSVVKRGRKKLLYIFKQPFMRPVQTTQEEDGCSCRFPEEEEGGCELRVKFSRSADAPAYQQGQNQLYNELNLGRREEYDVLDKRRGRDPEMGGKPRRKNPQEGLYNELQKDKMAEAYSEIGMKGERRRGKGHDGLYQGLSTATKDTYDALHMQALPPR

SEQ ID NO: 5647 - protein, 580 aa, Artificial Sequence
  Description of Artificial Sequence: Synthetic Chimeric Antigen Receptor sequence
MLLLVTSLLLCELPHPAFLLIPDIQMTQTTSSLSASLGDRVTISCRASQDISKYLNWYQQKPDGTVKLLIYHTSRLHSGVPSRFSGSGSGTDYSLTISNLEQEDIATYFCQQGNTLPYTFGGGTKLEITGSTSGSGKPGSGEGSTKGEVKLQESGPGLVAPSQSLSVTCTVSGVSLPDYGVSWIRQPPRKGLEWLGVIWGSETTYYNSALKSRLTIIKDNSKSQVFLKMNSLQTDDTAIYYCAKHYYYGGSYAMDYWGQGTSVTVSSESKYGPPCPPCPGGGSSGGGSGGQPREPQVYTLPPSQEEMTKNQVSLTCLVKGFYPSDIAVEWESNGQPENNYKTTPPVLDSDGSFFLYSRLTVDKSRWQEGNVFSCSVMHEALHNHYTQKSLSLSLGKMFWVLVVVGGVLACYSLLVTVAFIIFWVRSKRSRGGHSDYMNMTPRRPGPTRKHYQPYAPPRDFAAYRSGGGRVKFSRSADAPAYQQGQNQLYNELNLGRREEYDVLDKRRGRDPEMGGKPRRKNPQEGLYNELQKDKMAEAYSEIGMKGERRRGKGHDGLYQGLSTATKDTYDALHMQALPPR

SEQ ID NO: 5648 - protein, 680 aa, Artificial Sequence
  Description of Artificial Sequence: Synthetic Chimeric Antigen Receptor sequence
MLLLVTSLLLCELPHPAFLLIPDIQMTQTTSSLSASLGDRVTISCRASQDISKYLNWYQQKPDGTVKLLIYHTSRLHSGVPSRFSGSGSGTDYSLTISNLEQEDIATYFCQQGNTLPYTFGGGTKLEITGSTSGSGKPGSGEGSTKGEVKLQESGPGLVAPSQSLSVTCTVSGVSLPDYGVSWIRQPPRKGLEWLGVIWGSETTYYNSALKSRLTIIKDNSKSQVFLKMNSLQTDDTAIYYCAKHYYYGGSYAMDYWGQGTSVTVSSESKYGPPCPPCPAPEFEGGPSVFLFPPKPKDTLMISRTPEVTCVVVDVSQEDPEVQFNWYVDGVEVHNAKTKPREEQFNSTYRVVSVLTVLHQDWLNGKEYKCKVSNKGLPSSIEKTISKAKGQPREPQVYTLPPSQEEMTKNQVSLTCLVKGFYPSDIAVEWESNGQPENNYKTTPPVLDSDGSFFLYSRLTVDKSRWQEGNVFSCSVMHEALHNHYTQKSLSLSLGKMFWVLVVVGGVLACYSLLVTVAFIIFWVRSKRSRGGHSDYMNMTPRRPGPTRKHYQPYAPPRDFAAYRSGGGRVKFSRSADAPAYQQGQNQLYNELNLGRREEYDVLDKRRGRDPEMGGKPRRKNPQEGLYNELQKDKMAEAYSEIGMKGERRRGKGHDGLYQGLSTATKDTYDALHMQALPPR

SEQ ID NO: 5649 - protein, 680 aa, Artificial Sequence
  Description of Artificial Sequence: Synthetic Chimeric Antigen Receptor sequence
MLLLVTSLLLCELPHPAFLLIPDIQMTQTTSSLSASLGDRVTISCRASQDISKYLNWYQQKPDGTVKLLIYHTSRLHSGVPSRFSGSGSGTDYSLTISNLEQEDIATYFCQQGNTLPYTFGGGTKLEITGSTSGSGKPGSGEGSTKGEVKLQESGPGLVAPSQSLSVTCTVSGVSLPDYGVSWIRQPPRKGLEWLGVIWGSETTYYNSALKSRLTIIKDNSKSQVFLKMNSLQTDDTAIYYCAKHYYYGGSYAMDYWGQGTSVTVSSESKYGPPCPPCPAPEFLGGPSVFLFPPKPKDTLMISRTPEVTCVVVDVSQEDPEVQFNWYVDGVEVHNAKTKPREEQFQSTYRVVSVLTVLHQDWLNGKEYKCKVSNKGLPSSIEKTISKAKGQPREPQVYTLPPSQEEMTKNQVSLTCLVKGFYPSDIAVEWESNGQPENNYKTTPPVLDSDGSFFLYSRLTVDKSRWQEGNVFSCSVMHEALHNHYTQKSLSLSLGKMFWVLVVVGGVLACYSLLVTVAFIIFWVRSKRSRGGHSDYMNMTPRRPGPTRKHYQPYAPPRDFAAYRSGGGRVKFSRSADAPAYQQGQNQLYNELNLGRREEYDVLDKRRGRDPEMGGKPRRKNPQEGLYNELQKDKMAEAYSEIGMKGERRRGKGHDGLYQGLSTATKDTYDALHMQALPPR

SEQ ID NO: 5650 - protein, 680 aa, Artificial Sequence
  Description of Artificial Sequence: Synthetic Chimeric Antigen Receptor sequence
MLLLVTSLLLCELPHPAFLLIPDIQMTQTTSSLSASLGDRVTISCRASQDISKYLNWYQQKPDGTVKLLIYHTSRLHSGVPSRFSGSGSGTDYSLTISNLEQEDIATYFCQQGNTLPYTFGGGTKLEITGSTSGSGKPGSGEGSTKGEVKLQESGPGLVAPSQSLSVTCTVSGVSLPDYGVSWIRQPPRKGLEWLGVIWGSETTYYNSALKSRLTIIKDNSKSQVFLKMNSLQTDDTAIYYCAKHYYYGGSYAMDYWGQGTSVTVSSESKYGPPCPPCPAPEFEGGPSVFLFPPKPKDTLMISRTPEVTCVVVDVSQEDPEVQFNWYVDGVEVHNAKTKPREEQFQSTYRVVSVLTVLHQDWLNGKEYKCKVSNKGLPSSIEKTISKAKGQPREPQVYTLPPSQEEMTKNQVSLTCLVKGFYPSDIAVEWESNGQPENNYKTTPPVLDSDGSFFLYSRLTVDKSRWQEGNVFSCSVMHEALHNHYTQKSLSLSLGKMFWVLVVVGGVLACYSLLVTVAFIIFWVRSKRSRGGHSDYMNMTPRRPGPTRKHYQPYAPPRDFAAYRSGGGRVKFSRSADAPAYQQGQNQLYNELNLGRREEYDVLDKRRGRDPEMGGKPRRKNPQEGLYNELQKDKMAEAYSEIGMKGERRRGKGHDGLYQGLSTATKDTYDALHMQALPPR

SEQ ID NO: 5651 - protein, 681 aa, Artificial Sequence
  Description of Artificial Sequence: Synthetic Chimeric Antigen Receptor sequence
MGTSLLCWMALCLLGADHADAQVQLQQSGPELVKPGASVKISCKASGYAFSSSWMNWVKQRPGKGLEWIGRIYPGDEDTNYSGKFKDKATLTADKSSTTAYMQLSSLTSEDSAVYFCARSLLYGDYLDYWGQGTTLTVSSGGGGSGGGGSGGGGSQIVLTQSPAIMSASPGEKVTMTCSASSSVSYMHWYQQKSGTSPKRWIYDTSKLASGVPDRFSGSGSGTSYFLTINNMEAEDAATYYCQQWNINPLTFGAGTKLELKRSDPAEPKSPDKTHTCPPCPAPPVAGPSVFLFPPKPKDTLMIARTPEVTCVVVDVSHEDPEVKFNWYVDGVEVHNAKTKPREEQYNSTYRVVSVLTVLHQDWLNGKEYKCKVSNKALPAPIEKTISKAKGQPREPQVYTLPPSRDELTKNQVSLTCLVKGFYPSDIAVEWESNGQPENNYKTTPPVLDSDGSFFLYSKLTVDKSRWQQGNVFSCSVMHEALHNHYTQKSLSLSPGKKDPKFWVLVVVGGVLACYSLLVTVAFIIFWVRSKRSRLLHSDYMNMTPRRPGPTRKHYQPYAPPRDFAAYRSRVKFSRSADAPAYQQGQNQLYNELNLGRREEYDVLDKRRGRDPEMGGKPRRKNPQEGLYNELQKDKMAEAYSEIGMKGERRRGKGHDGLYQGLSTATKDTYDALHMQALPPR

SEQ ID NO: 5652 - protein, 711 aa, Artificial Sequence
  Description of Artificial Sequence: Synthetic Chimeric Antigen Receptor sequence
MLLLVTSLLLLCELPHPAFLLIPDIQMTQQTTSSLSASLGDRVTISCRASSQDISKYLNWYQQKPDGTVKLLLIYHTSRLHSGVPSRFSGSGGSGTDYSLTISNLEQEDIATYYFCQQGNTLPYTFGGGTKLEIITGSTSGSGKPGSGEGSTKGEEVKLQESGPGLVAPSQSLSVTTCTVSGVSLPDYGVSWIRQPPPRKGLEWLGVIWGSETTYYNSSALKSRLTIIKDNSKSQVFLKKMNSLQTDDTAIYYCAKHYYYYGGSYAMDYWGQGTSVTVSSEESKYGPPCPPCPAPEFLGGPSSVFLFPPKPKDTLMISRTPEVVTCVVVDVSQEDPEVQFNWYVVDGVEVHNAKTKPREEQFNSTTYRVVSVLTVLHQDWLNGKEYYKCKVSNKGLPSSIEKTISKAAKGQPREPQVYTLPPSQEEMTTKNQVSLTCLVKGFYPSDIAVVEWESNGQPENNYKTTPPVLDDSDGSFFLYSRLTVDKSRWQEEGNVFSCSVMHEALHNHYTQKKSLSLSLGKMFWVLVVVGGVLLACYSLLVTVAFIIFWVRSKRRSRGGHSDYMNMTPRRPGPTRRKHYQPYAPPRDFAAYRSRVKKFSRSADAPAYQQGQNQLYNEELNLGRREEYDVLDKRRGRDPPEMGGKPRRKNPQEGLYNELQQKDKMAEAYSEIGMKGERRRGGKGHDGLYQGLSTATKDTYDAALHMQALPPR

SEQ ID NO: 5653 - protein, 737 aa, Artificial Sequence
  Description of Artificial Sequence: Synthetic Chimeric Antigen Receptor sequence
EIVMTQSPATLSLSPGERATLSCRASQDISKYLNWYQQKPGQAPRLLIYHTSRLHSGIPARFSGSGSGTDYTLTISSLQPEDFAVYFCQQGNTLPYTFGQGTKLEIKGGGGSGGGGSGGGGSQVQLQESGPGLVKPSETLSLTCTVSGVSLPDYGVSWIRQPPGKGLEWIGVIWGSETTYYQSSLKSRVTISKDNSKNQVSLKLSSVTAADTAVYYCAKHYYYGGSYAMDYWGQGTLVTVSSGGGGSGGGGSGGGGSGGGGSEVQLQQSGPGLVKPSQTLSLTCAISGDSVSSNSAAWNWIRQSPSRGLEWLGRTYYRSKWYNDYAVSVKSRITINPDTSKNQFSLQLNSVTPEDTAVYYCARDLGWIAVAGTFDYWGQGTLVTVSSGGGGSGGGGSGGGGSQSALTQPASVSGSPGQSITISCTGTSSDVGGYNYVSWYQQHPGKAPKLMIYDVSKRPSGVSNRFSGSKSGNTASLTISGLQAEDEADYYCSSYTSSSLNHVFGTGTKVTVLTTTTPAPRPPTPAPTIASQPLSLRPEACRPAAGGAVHTRGLDFACDIYIWAPLAGTCGVLLLSLVITLYCKRGRKKLLYIFKQPFMRPVQTTQEEDGCSCRFPEEEEGGCELRVKFSRSADAPAYKQGQNQLYNELNLGRREEYDVLDKRRGRDPEMGGKPRRKNPQEGLYNELQKDKMAEAYSEIGMKGERRRGKGHDGLYQGLSTATKDTYDALHMQALPPR

SEQ ID NO: 5654 - protein, 819 aa, Artificial Sequence
  Description of Artificial Sequence: Synthetic polypeptide
DIQMTQTTSSLSASLGDRVTISCRASQDISKYLNWYQQKPDGTVKLLIYHTSRLHSGVPSRFSGSGSGTDYSLTISNLEQEDIATYFCQQGNTLPYTFGGGTKLEITGSTSGSGKPGSGEGSTKGEVKLQESGPGLVAPSQSLSVTCTVSGVSLPDYGVSWIRQPPRKGLEWLGVIWGSETTYYNSALKSRLTIIKDNSKSQVFLKMNSLQTDDTAIYYCAKHYYYGGSYAMDYWGQGTSVTVSSESKYGPPCPPCPMFWVLVVVGGVLACYSLLVTVAFIIFWVKRGRKKLLYIFKQPFMRPVQTTQEEDGCSCRFEEEEGGCELRVKFSRSADAPAYQQGQNQLYNELNLGRREEYDVLDKRRGRDPEMGGKPRRKNPQEGLYNELQKDKMAEAYSEIGMKGERRRGKGHDGLYQGLSTATKDTYDALHMQALPPRLEGGGEGRGSLLTCGDVEENPGPRMLLLVTSLLLCELPHPAFLLIPRKVCNGIGIGEFKDSLSINATNIKHFKNCTSISGDLHILPVAFRGDSFTHTPPLDPQELDILKTVKEITGFLLIQAWPENRTDLHAFENLEIIRGRTKQHGQFSLAVVSLNITSLGLRSLKEISDGDVIISGNKNLCYANTINWKKLFGTSGQKTKIISNRGENSCKATGQVCHALCSPEGCWGPEPRDCVSCRNVSRGRECVDKCNLLEGEPREFVENSECIQCHPECLPQAMNITCTGRGPDNCIQCAHYIDGPHCVKTCPAGVMGENNTLVWKYADAGHVCHLCHPNCTYGCTGPGLEGCPTNGPKIPSIATGMVGALLLLLVVALGIGLFM

SEQ ID NO: 5655 - protein, 838 aa, Artificial Sequence
  Description of Artificial Sequence: Synthetic Chimeric Antigen Receptor sequence
MLLLVTSLLLCELPHPAFLLIPQSVKESEGDLVTPAGNLTLTCTASGSDINDYPISWVRQAPGKGLEWIGFINSGGSTWYASWVKGRFTISRTSTTVDLKMTSLTTDDTATYFCARGYSTYYGDFNIWGPGTLVTISSGGGGSGGGGSGGGGSELVMTQTPSSTSGAVGGTVTINCQASQSIDSNLAWFQQKPGQPPTLLIYRASNLASGVPSRFSGSRSGTEYTLTISGVQREDAATYYCLGGVGNVSYRTSFGGGTEVVVKESKYGPPCPPCPMFWVLVVVGGVLACYSLLVTVAFIIFWVKRGRKKLLYIFKQPFMRPVQTTQEEDGCSCRFPEEEEGGCELRVKFSRSADAPAYQQGQNQLYNELNLGRREEYDVLDKRRGRDPEMGGKPRRKNPQEGLYNELQKDKMAEAYSEIGMKGERRRGKGHDGLYQGLSTATKDTYDALHMQALPPRLEGGGEGRGSLLTCGDVEENPGPRMLLLVTSLLLCELPHPAFLLIPRKVCNGIGIGEFKDSLSINATNIKHFKNCTSISGDLHILPVAFRGDSFTHTPPLDPQELDILKTVKEITGFLLIQAWPENRTDLHAFENLEIIRGRTKQHGQFSLAVVSLNITSLGLRSLKEISDGDVIISGNKNLCYANTINWKKLFGTSGQKTKIISNRGENSCKATGQVCHALCSPEGCWGPEPRDCVSCRNVSRGRECVDKCNLLEGEPREFVENSECIQCHPECLPQAMNITCTGRGPDNCIQCAHYIDGPHCVKTCPAGVMGENNTLVWKYADAGHVCHLCHPNCTYGCTGPGLEGCPTNGPKIPSIATGMVGALLLLLVVALGIGLFM

SEQ ID NO: 5656 - protein, 845 aa, Artificial Sequence
  Description of Artificial Sequence: Synthetic Chimeric Antigen Receptor sequence
MLLLVTSLLLCELPHPAFLLIPQEQLVESGGRLVTPGGSLTLSCKASGFDFSAYYMSWVRQAPGKGLEWIATIYPSSGKTYYATWVNGRFTISSDNAQNTVDLQMNSLTAADRATYFCARDSYADDGALFNIWGPGTLVTISSGGGGSGGGGSGGGGSELVLTQSPSVSAALGSPAKITCTLSSAHKTDTIDWYQQLQGEAPRYLMQVQSDGSYTKRPGVPDRFSGSSSGADRYLIIPSVQADDEADYYCGADYIGGYVFGGGTQLTVTGESKYGPPCPPCPMFWVLVVVGGVLACYSLLVTVAFIIFWVKRGRKKLLYIFKQPFMRPVQTTQEEDGCSCRFPEEEEGGCELRVKFSRSADAPAYQQGQNQLYNELNLGRREEYDVLDKRRGRDPEMGGKPRRKNPQEGLYNELQKDKMAEAYSEIGMKGERRRGKGHDGLYQGLSTATKDTYDALHMQALPPRLEGGGEGRGSLLTCGDVEENPGPRMLLLVTSLLLCELPHPAFLLIPRKVCNGIGIGEFKDSLSINATNIKHFKNCTSISGDLHILPVAFRGDSFTHTPPLDPQELDILKTVKEITGFLLIQAWPENRTDLHAFENLEIIRGRTKQHGQFSLAVVSLNITSLGLRSLKEISDGDVIISGNKNLCYANTINWKKLFGTSGQKTKIISNRGENSCKATGQVCHALCSPEGCWGPEPRDCVSCRNVSRGRECVDKCNLLEGEPREFVENSECIQCHPECLPQAMNITCTGRGPDNCIQCAHYIDGPHCVKTCPAGVMGENNTLVWKYADAGHVCHLCHPNCTYGCTGPGLEGCPTNGPKIPSIATGMVGALLLLLVVALGIGLFM

SEQ ID NO: 5657 - protein, 945 aa, Artificial Sequence
  Description of Artificial Sequence: Synthetic Chimeric Antigen Receptor sequence
MLLLVTSLLLCELPHPAFLLIPQSVKESEGDLVTPAGNLTLTCTASGSDINDYPISWVRQAPGKGLEWIGFINSGGSTWYASWVKGRFTISRTSTTVDLKMTSLTTDDTATYFCARGYSTYYGDFNIWGPGTLVTISSGGGGSGGGGSGGGGSELVMTQTPSSTSGAVGGTVTINCQASQSIDSNLAWFQQKPGQPPTLLIYRASNLASGVPSRFSGSRSGTEYTLTISGVQREDAATYYCLGGVGNVSYRTSFGGGTEVVVKESKYGPPCPPCPGQPREPQVYTLPPSQEEMTKNQVSLTCLVKGFYPSDIAVEWESNGQPENNYKTTPPVLDSDGSFFLYSRLTVDKSRWQEGNVFSCSVMHEALHNHYTQKSLSLSLGKMFWVLVVVGGVLACYSLLVTVAFIIFWVKRGRKKLLYIFKQPFMRPVQTTQEEDGCSCRFPEEEEGGCELRVKFSRSADAPAYQQGQNQLYNELNLGRREEYDVLDKRRGRDPEMGGKPRRKNPQEGLYNELQKDKMAEAYSEIGMKGERRRGKGHDGLYQGLSTATKDTYDALHMQALPPRLEGGGEGRGSLLTCGDVEENPGPRMLLLVTSLLLCELPHPAFLLIPRKVCNGIGIGEFKDSLSINATNIKHFKNCTSISGDLHILPVAFRGDSFTHTPPLDPQELDILKTVKEITGFLLIQAWPENRTDLHAFENLEIIRGRTKQHGQFSLAVVSLNITSLGLRSLKEISDGDVIISGNKNLCYANTINWKKLFGTSGQKTKIISNRGENSCKATGQVCHALCSPEGCWGPEPRDCVSCRNVSRGRECVDKCNLLEGEPREFVENSECIQCHPECLPQAMNITCTGRGPDNCIQCAHYIDGPHCVKTCPAGVMGENNTLVWKYADAGHVCHLCHPNCTYGCTGPGLEGCPTNGPKIPSIATGMVGALLLLLVVALGIGLFM

SEQ ID NO: 5658 - protein, 952 aa, Artificial Sequence
  Description of Artificial Sequence: Synthetic Chimeric Antigen Receptor sequence
MLLLVTSLLLCELPHPAFLLIPQEQLVESGGRLVTPGGSLTLSCKASGFDFSAYYMSWVRQAPGKGLEWIATIYPSSGKTYYATWVNGRFTISSDNAQNTVDLQMNSLTAADRATYFCARDSYADDGALFNIWGPGTLVTISSGGGGSGGGGSGGGGSELVLTQSPSVSAALGSPAKITCTLSSAHKTDTIDWYQQLQGEAPRYLMQVQSDGSYTKRPGVPDRFSGSSSGADRYLIIPSVQADDEADYYCGADYIGGYVFGGGTQLTVTGESKYGPPCPPCPGQPREPQVYTLPPSQEEMTKNQVSLTCLVKGFYPSDIAVEWESNGQPENNYKTTPPVLDSDGSFFLYSRLTVDKSRWQEGNVFSCSVMHEALHNHYTQKSLSLSLGKMFWVLVVVGGVLACYSLLVTVAFIIFWVKRGRKKLLYIFKQPFMRPVQTTQEEDGCSCRFPEEEEGGCELRVKFSRSADAPAYQQGQNQLYNELNLGRREEYDVLDKRRGRDPEMGGKPRRKNPQEGLYNELQKDKMAEAYSEIGMKGERRRGKGHDGLYQGLSTATKDTYDALHMQALPPRLEGGGEGRGSLLTCGDVEENPGPRMLLLVTSLLLCELPHPAFLLIPRKVCNGIGIGEFKDSLSINATNIKHFKNCTSISGDLHILPVAFRGDSFTHTPPLDPQELDILKTVKEITGFLLIQAWPENRTDLHAFENLEIIRGRTKQHGQFSLAVVSLNITSLGLRSLKEISDGDVIISGNKNLCYANTINWKKLFGTSGQKTKIISNRGENSCKATGQVCHALCSPEGCWGPEPRDCVSCRNVSRGRECVDKCNLLEGEPREFVENSECIQCHPECLPQAMNITCTGRGPDNCIQCAHYIDGPHCVKTCPAGVMGENNTLVWKYADAGHVCHLCHPNCTYGCTGPGLEGCPTNGPKIPSIATGMVGALLLLLVVALGIGLFM

SEQ ID NO: 5659 - protein, 1055 aa, Artificial Sequence [sequence omitted]

SEQ ID NO: 5660 - protein, 1062 aa, Artificial Sequence
  Description of Artificial Sequence: Synthetic Chimeric Antigen Receptor sequence
MLLLVTSLLLCELPHPAFLLIPQEQLVESGGRLVTPGGSLTLSCKASGFDFSAYYMSWVRQAPGKGLEWIATIYPSSGKTYYATWVNGRFTISSDNAQNTVDLQMNSLTAADRATYFCARDSYADDGALFNIWGPGTLVTISSGGGGSGGGGSGGGGSELVLTQSPSVSAALGSPAKITCTLSSAHKTDTIDWYQQLQGEAPRYLMQVQSDGSYTKRPGVPDRFSGSSSGADRYLIIPSVQADDEADYYCGADYIGGYVFGGGTQLTVTGESKYGPPCPPCPAPEFLGGPSVFLFPPKPKDTLMISRTPEVTCVVVDVSQEDPEVQFNWYVDGVEVHNAKTKPREEQFNSTYRVVSVLTVLHQDWLNGKEYKCKVSNKGLPSSIEKTISKAKGQPREPQVYTLPPSQEEMTKNQVSLTCLVKGFYPSDIAVEWESNGQPENNYKTTPPVLDSDGSFFLYSRLTVDKSRWQEGNVFSCSVMHEALHNHYTQKSLSLSLGKMFWVLVVVGGVLACYSLLVTVAFIIFWVKRGRKKLLYIFKQPFMRPVQTTQEEDGCSCRFPEEEEGGCELRVKFSRSADAPAYQQGQNQLYNELNLGRREEYDVLDKRRGRDPEMGGKPRRKNPQEGLYNELQKDKMAEAYSEIGMKGERRRGKGHDGLYQGLSTATKDTYDALHMQALPPRLEGGGEGRGSLLTCGDVEENPGPRMLLLVTSLLLCELPHPAFLLIPRKVCNGIGIGEFKDSLSINATNIKHFKNCTSISGDLHILPVAFRGDSFTHTPPLDPQELDILKTVKEITGFLLIQAWPENRTDLHAFENLEIIRGRTKQHGQFSLAVVSLNITSLGLRSLKEISDGDVIISGNKNLCYANTINWKKLFGTSGQKTKIISNRGENSCKATGQVCHALCSPEGCWGPEPRDCVSCRNVSRGRECVDKCNLLEGEPREFVENSECIQCHPECLPQAMNITCTGRGPDNCIQCAHYIDGPHCVKTCPAGVMGENNTLVWKYADAGHVCHLCHPNCTYGCTGPGLEGCPTNGPKIPSIATGMVGALLLLLVVALGIGLFM

SEQ ID NO: 5661 - protein, 1124 aa, Artificial Sequence
  Description of Artificial Sequence: Synthetic Chimeric Antigen Receptor sequence
MSLPVTALLLPLALLLHAARPDIQMTQTTSSLSASLGDRVTISCRASQDISKYLNWYQQKPDGTVKLLIYHTSRLHSGVPSRFSGSGSGTDYSLTISNLEQEDIATYFCQQGNTLPYTFGGGTKLEITKAGGGGSGGGGSGGGGSGGGGSEVKLQESGPGLVAPSQSLSVTCTVSGVSLPDYGVSWIRQPPRKGLEWLGVIWGSETTYYNSALKSRLTIIKDNSKSQVFLKMNSLQTDDTAIYYCAKHYYYGGSYAMDYWGQGTSVTVSSDPTTTPAPRPPTPAPTIASQPLSLRPEACRPAAGGAVHTRGLDFACDIFVWLVWGGVLACYSLLVTVAFIIFWVRRVKFSRSADAPAYQQGQNQLYNELNLGRREEYDVLDKRRGRDPEMGGKPRRKNPQEGLYNELQKDKMAEAYSEIGMKGERRRGKGHDGLYQGLSTATKDTYDALHMQALPPRRAEGRGSLLTCGDVEENPGPMAVPTQVLGLLLLWLTDARCDIQMTQSPSSLSASVGDRVTITCRASEDIYFNLVWYQQKPGKAPKLLIYDTNRLADGVPSRFSGSGSGTQYTLTISSLQPEDFATYYCQHYKNYPLTFGQGTKLEIKRSGGGGSGGGGSGGGGSGGGGSRSEVQLVESGGGLVQPGGSLRLSCAASGFTLSNYGMHWIRQAPGKGLEWVSSISLNGGSTYYRDSVKGRFTISRDNAKSTLYLQMNSLRAEDTAVYYCAAQDAYTGGYFDYWGQGTLVTVSSMDPAEPKSPDKTHTCPPCPAPPVAGPSVFLFPPKPKDTLMIARTPEVTCVWDVSHEDPEVKFNWYVDGVEVHNAKTKPREEQYNSTYRWSVLTVLHQDWLNGKEYKCKVSNKALPAPIEKTISKAKGQPREPQVYTLPPSRDELTKNQVSLTCLVKGFYPSDIAVEWESNGQPENNYKTTPPVLDSDGSFFLYSKLTVDKSRWQQGNVFSCSVMHEALHNHYTQKSLSLSPGKKDPKFWVLVWGGVLACYSLLVTVAFIIFWVRSRVFSRSADAPAYQQGQNQLYNELNLGRREEYDVLDKRRGRDPEMGGKPRRKNPQEGLYNELQKDKMAEAYSEIGMKGERRRGKGHDGLYQGLSTATKDTYDALHMQALPPR

SEQ ID NO: 5662 - protein, 486 aa, Artificial Sequence
  Description of Artificial Sequence: Synthetic Chimeric Antigen Receptor sequence
MALPVTALLLPLALLLHAARPQVQLQESGPGLVKPSETLSLTCTVSGVSLPDYGVSWIRQPPGKGLEWIGVIWGSETTYYSSSLKSRVTISKDNSKNQVSLKLSSVTAADTAVYYCAKHYYYGGSYAMDYWGQGTLVTVSSGGGGSGGGGSGGGGSEIVMTQSPATLSLSPGERATLSCRASQDISKYLNWYQQKPGQAPRLLIYHTSRLHSGIPARFSGSGSGTDYTLTISSLQPEDFAVYFCQQGNTLPYTFGQGTKLEIKTTTPAPRPPTPAPTIASQPLSLRPEACRPAAGGAVHTRGLDFACDIYIWAPLAGTCGVLLLSLVITLYCKRGRKKLLYIFKQPFMRPVQTTQEEDGCSCRFPEEEEGGCELRVKFSRSADAPAYKQGQNQLYNELNLGRREEYDVLDKRRGRDPEMGGKPRRKNPQEGLYNELQKDKMAEAYSEIGMKGERRRGKGHDGLYQGLSTATKDTYDALHMQALPPR

SEQ ID NO: 5663 - protein, 491 aa, Artificial Sequence
  Description of Artificial Sequence: Synthetic Chimeric Antigen Receptor sequence
MALPVTALLLPLALLLHAARPEIVMTQSPATLSLSPGERATLSCRASQDISKYLNWYQQKPGQAPRLLIYHTSRLHSGIPARFSGSGSGTDYTLTISSLQPEDFAVYFCQQGNTLPYTFGQGTKLEIKGGGGSGGGGSGGGGSGGGGSQVQLQESGPGLVKPSETLSLTCTVSGVSLPDYGVSWIRQPPGKGLEWIGVIWGSETTYYSSSLKSRVTISKDNSKNQVSLKLSSVTAADTAVYYCAKHYYYGGSYAMDYWGQGTLVTVSSTTTPAPRPPTPAPTIASQPLSLRPEACRPAAGGAVHTRGLDFACDIYIWAPLAGTCGVLLLSLVITLYCKRGRKKLLYIFKQPFMRPVQTTQEEDGCSCRFPEEEEGGCELRVKFSRSADAPAYKQGQNQLYNELNLGRREEYDVLDKRRGRDPEMGGKPRRKNPQEGLYNELQKDKMAEAYSEIGMKGERRRGKGHDGLYQGLSTATKDTYDALHMQALPPR

SEQ ID NO: 5664 - protein, 491 aa, Artificial Sequence
  Description of Artificial Sequence: Synthetic Chimeric Antigen Receptor sequence
MALPVTALLLPLALLLHAARPEIVMTQSPATLSLSPGERATLSCRASQDISKYLNWYQQKPGQAPRLLIYHTSRLHSGIPARFSGSGSGTDYTLTISSLQPEDFAVYFCQQGNTLPYTFGQGTKLEIKGGGGSGGGGSGGGGSGGGGSQVQLQESGPGLVKPSETLSLTCTVSGVSLPDYGVSWIRQPPGKGLEWIGVIWGSETTYYQSSLKSRVTISKDNSKNQVSLKLSSVTAADTAVYYCAKHYYYGGSYAMDYWGQGTLVTVSSTTTPAPRPPTPAPTIASQPLSLRPEACRPAAGGAVHTRGLDFACDIYIWAPLAGTCGVLLLSLVITLYCKRGRKKLLYIFKQPFMRPVQTTQEEDGCSCRFPEEEEGGCELRVKFSRSADAPAYKQGQNQLYNELNLGRREEYDVLDKRRGRDPEMGGKPRRKNPQEGLYNELQKDKMAEAYSEIGMKGERRRGKGHDGLYQGLSTATKDTYDALHMQALPPR

SEQ ID NO: 5665 - protein, 491 aa, Artificial Sequence
  Description of Artificial Sequence: Synthetic Chimeric Antigen Receptor sequence
MALPVTALLLPLALLLHAARPQVQLQESGPGLVKPSETLSLTCTVSGVSLPDYGVSWIRQPPGKGLEWIGVIWGSETTYYSSSLKSRVTISKDNSKNQVSLKLSSVTAADTAVYYCAKHYYYGGSYAMDYWGQGTLVTVSSGGGGSGGGGSGGGGSGGGGSEIVMTQSPATLSLSPGERATLSCRASQDISKYLNWYQQKPGQAPRLLIYHTSRLHSGIPARFSGSGSGTDYTLTISSLQPEDFAVYFCQQGNTLPYTFGQGTKLEIKTTTPAPRPPTPAPTIASQPLSLRPEACRPAAGGAVHTRGLDFACDIYIWAPLAGTCGVLLLSLVITLYCKRGRKKLLYIFKQPFMRPVQTTQEEDGCSCRFPEEEEGGCELRVKFSRSADAPAYKQGQNQLYNELNLGRREEYDVLDKRRGRDPEMGGKPRRKNPQEGLYNELQKDKMAEAYSEIGMKGERRRGKGHDGLYQGLSTATKDTYDALHMQALPPR

SEQ ID NO: 5666 - protein, 491 aa, Artificial Sequence
  Description of Artificial Sequence: Synthetic Chimeric Antigen Receptor sequence
MALPVTALLLPLALLLHAARPQVQLQESGPGLVKPSETLSLTCTVSGVSLPDYGVSWIRQPPGKGLEWIGVIWGSETTYYQSSLKSRVTISKDNSKNQVSLKLSSVTAADTAVYYCAKHYYYGGSYAMDYWGQGTLVTVSSGGGGSGGGGSGGGGSGGGGSEIVMTQSPATLSLSPGERATLSCRASQDISKYLNWYQQKPGQAPRLLIYHTSRLHSGIPARFSGSGSGTDYTLTISSLQPEDFAVYFCQQGNTLPYTFGQGTKLEIKTTTPAPRPPTPAPTIASQPLSLRPEACRPAAGGAVHTRGLDFACDIYIWAPLAGTCGVLLLSLVITLYCKRGRKKLLYIFKQPFMRPVQTTQEEDGCSCRFPEEEEGGCELRVKFSRSADAPAYKQGQNQLYNELNLGRREEYDVLDKRRGRDPEMGGKPRRKNPQEGLYNELQKDKMAEAYSEIGMKGERRRGKGHDGLYQGLSTATKDTYDALHMQALPPR

SEQ ID NO: 5667 - protein, 491 aa, Artificial Sequence
  Description of Artificial Sequence: Synthetic Chimeric Antigen Receptor sequence
MALPVTALLLPLALLLHAARPQVQLQESGPGLVKPSETLSLTCTVSGVSLPDYGVSWIRQPPGKGLEWIGVIWGSETTYYNSSLKSRVTISKDNSKNQVSLKLSSVTAADTAVYYCAKHYYYGGSYAMDYWGQGTLVTVSSGGGGSGGGGSGGGGSGGGGSEIVMTQSPATLSLSPGERATLSCRASQDISKYLNWYQQKPGQAPRLLIYHTSRLHSGIPARFSGSGSGTDYTLTISSLQPEDFAVYFCQQGNTLPYTFGQGTKLEIKTTTPAPRPPTPAPTIASQPLSLRPEACRPAAGGAVHTRGLDFACDIYIWAPLAGTCGVLLLSLVITLYCKRGRKKLLYIFKQPFMRPVQTTQEEDGCSCRFPEEEEGGCELRVKFSRSADAPAYKQGQNQLYNELNLGRREEYDVLDKRRGRDPEMGGKPRRKNPQEGLYNELQKDKMAEAYSEIGMKGERRRGKGHDGLYQGLSTATKDTYDALHMQALPPR

SEQ ID NO: 5668 - protein, 486 aa, Artificial Sequence
  Description of Artificial Sequence: Synthetic Chimeric Antigen Receptor sequence
MALPVTALLLPLALLLHAARPEIVMTQSPATLSLSPGERATLSCRASQDISKYLNWYQQKPGQAPRLLIYHTSRLHSGIPARFSGSGSGTDYTLTISSLQPEDFAVYFCQQGNTLPYTFGQGTKLEIKGGGGSGGGGSGGGGSQVQLQESGPGLVKPSETLSLTCTVSGVSLPDYGVSWIRQPPGKGLEWIGVIWGSETTYYNSSLKSRVTISKDNSKNQVSLKLSSVTAADTAVYYCAKHYYYGGSYAMDYWGQGTLVTVSSTTTPAPRPPTPAPTIASQPLSLRPEACRPAAGGAVHTRGLDFACDIYIWAPLAGTCGVLLLSLVITLYCKRGRKKLLYIFKQPFMRPVQTTQEEDGCSCRFPEEEEGGCELRVKFSRSADAPAYKQGQNQLYNELNLGRREEYDVLDKRRGRDPEMGGKPRRKNPQEGLYNELQKDKMAEAYSEIGMKGERRRGKGHDGLYQGLSTATKDTYDALHMQALPPR

SEQ ID NO: 5669 - protein, 939 aa, Artificial Sequence
  Description of Artificial Sequence: Synthetic polypeptide
MALPVTALLLPLALLLHAARPGSRGVQVETISPGDGRTFPKRGQTCVVHYTGMLEDGKKMDSSRDRNKPFKFMLGKQEVIRGWEEGVAQMSVGQRAKLTISPDYAYGATGHPGIIPPHATLVFDVELLKLETRGVQVETISPGDGRTFPKRGQTCVVHYTGMLEDGKKMDSSRDRNKPFKFMLGKQEVIRGWEEGVAQMSVGQRAKLTISPDYAYGATGHPGIIPPHATLVFDVELLKLETRGVQVETISPGDGRTFPKRGQTCVVHYTGMLEDGKKMDSSRDRNKPFKFMLGKQEVIRGWEEGVAQMSVGQRAKLTISPDYAYGATGHPGIIPPHATLVFDVELLKLETRGVQVETISPGDGRTFPKRGQTCVVHYTGMLEDGKKMDSSRDRNKPFKFMLGKQEVIRGWEEGVAQMSVGQRAKLTISPDYAYGATGHPGIIPPHATLVFDVELLKLETSARNRRKRGSDIQMTQTTSSLSASLGDRVTISCRASQDISKYLNWYQQKPDGTVKLLIYHTSRLHSGVPSRFSGSGSGTDYSLTISNLEQEDIATYFCQQGNTLPYTFGGGTKLEITGGGGSGGGGSGGGGSEVKLQESGPGLVAPSQSLSVTCTVSGVSLPDYGVSWIRQPPRKGLEWLGVIWGSETTYYNSALKSRLTIIKDNSKSQVFLKMNSLQTDDTAIYYCAKHYYYGGSYAMDYWGQGTSVTVSSASTTTPAPRPPTPAPTIASQPLSLRPEACRPAAGGAVHTRGLDFACDSGIYIWAPLAGTCGVLLLSLVITLYCKRGRKKLLYIFKQPFMRPVQTTQEEDGCSCRFPEEEEGGCELRVKFSRSADAPAYQQGQNQLYNELNLGRREEYDVLDKRRGRDPEMGGKPRRKNPQEGLYNELQKDKMAEAYSEIGMKGERRRGKGHDGLYQGLSTATKDTYDALHMQALPPRZ

SEQ ID NO: 5670 - protein, 970 aa, Artificial Sequence
  Description of Artificial Sequence: Synthetic Chimeric Antigen Receptor sequence
MLLLVTSLLLCELPHPAFLLIPDIQMTQTTSSLSASLGDRVTISCRASQDISKYLNWYQQKPDGTVKLLIYHTSRLHSGVPSRFSGSGSGTDYSLTISNLEQEDIATYFCQQGNTLPYTFGGGTKLEITGSTSGSGKPGSGEGSTKGEVKLQESGPGLVAPSQSLSVTCTVSGVSLPDYGVSWIRQPPRKGLEWLGVIWGSETTYYNSALKSRLTIIKDNSKSQVFLKMNSLQTDDTAIYYCAKHYYYGGSYAMDYWGQGTSVTVSSGGGGSEVQLQQSGAELVKPGASVKMSCKASGYTFTSYNMHWVKQTPGQGLEWIGAIYPGNGDTSYNQKFKGKATLTADKSSSTAYMQLSSLTSEDSADYYCARSNYYGSSYWFFDVWGAGTTVTVSSGSTSGGGSGGGSGGGGSSDIVLTQSPAILSASPGEKVTMTCRASSSVNYMDWYQKKPGSSPKPWIYATSNLASGVPARFSGSGSGTSYSLTISRVEAEDAATYYCQQWSFNPPTFGGGTKLEIKESKYGPPCPPCPAPEFLGGPSVFLFPPKPKDTLMISRTPEVTCVVVDVSQEDPEVQFNWYVDGVEVHNAKTKPREEQFNSTYRVVSVLTVLHQDWLNGKEYKCKVSNKGLPSSIEKTISKAKGQPREPQVYTLPPSQEEMTKNQVSLTCLVKGFYPSDIAVEWESNGQPENNYKTTPPVLDSDGSFFLYSRLTVDKSRWQEGNVFSCSVMHEALHNHYTQKSLSLSLGKMFWVLVVVGGVLACYSLLVTVAFIIFWVRSKRSRGGHSDYMNMTPRRPGPTRKHYQPYAPPRDFAAYRSKRGRKKLLYIFKQPFMRPVQTTQEEDGCSCRFPEEEEGGCELRVKFSRSADAPAYQQGQNQLYNELNLGRREEYDVLDKRRGRDPEMGGKPRRKNPQEGLYNELQKDKMAEAYSEIGMKGERRRGKGHDGLYQGLSTATKDTYDALHMQALPPR

SEQ ID NO: 5671 - protein, 1090 aa, Artificial Sequence
  Description of Artificial Sequence: Synthetic Chimeric Antigen Receptor sequence
MLLLVTSLLLCELPHPAFLLIPMTQTTSSLSASLGDRVTISCRASQDISKYLNWYQQKPDGTVKLLIYHTSRLHSGVPSRFSGSGSGTDYSLTISNLEQEDIATYFCQQGNTLPYTFGGGTKLEITGSTSGSGKPGSGEGSTKGEVKLQESGPGLVAPSQSLSVTCTVSGVSLPDYGVSWIRQPPRKGLEWLGVIWGSETTYYNSALKSRLTIIKDNSKSQVFLKMNSLQTDDTAIYYCAKHYYYGGSYAMDYWGQGTSVTVSSGGGGSEVQLQQSGAELVKPGASVKMSCKASGYTFTSYNMHWVKQTPGQGLEWIGAIYPGNGDTSYNQKFKGKATLTADKSSSTAYMQLSSLTSEDSADYYCARSNYYGSSYWFFDVWGAGTTVTVSSGSTSGGGSGGGSGGGGSSDIVLTQSPAILSASPGEKVTMTCRASSSVNYMDWYQKKPGSSPKPWIYATSNLASGVPARFSGSGSGTSYSLTISRVEAEDAATYYCQQWSFNPPTFGGGTKLEIKESKYGPPCPPCPMFWVLVVVGGVLACYSLLVTVAFIIFWVKRGRKKLLYIFKQPFMRPVQTTQEEDGCSCRFPEEEEGGCELRVKFSRSADAPAYQQGQNQLYNELNLGRREEYDVLDKRRGRDPEMGGKPRRKNPQEGLYNELQKDKMAEAYSEIGMKGERRRGKGHDGLYQGLSTATKDTYDALHMQALPPRLEGGGEGRGSLLTCGDVEENPGPRMLLLVTSLLLCELPHPAFLLIPRKVCNGIGIGEFKDSLSINATNIKHFKNCTSISGDLHILPVAFRGDSFTHTPPLDPQELDILKTVKEITGFLLIQAWPENRTDLHAFENLEIIRGRTKQHGQFSLAVVSLNITSLGLRSLKEISDGDVIISGNKNLCYANTINWKKLFGTSGQKTKIISNRGENSCKATGQVCHALCSPEGCWGPEPRDCVSCRNVSRGRECVDKCNLLEGEPREFVENSECIQCHPECLPQAMNITCTGRGPDNCIQCAHYIDGPHCVKTCPAGVMGENNTLVWKYADAGHVCHLCHPNCTYGCTGPGLEGCPTNGPKIPSIATGMVGALLLLLVVALGIGLFM

SEQ ID NO: 5672 - protein, 1133 aa, Artificial Sequence
  Description of Artificial Sequence: Synthetic Chimeric Antigen Receptor sequence
MLLLVTSLLLCELPHPAFLLIPDIQMTQTTSSLSASLGDRVTISCRASQDISKYLNWYQQKPDGTVKLLIYHTSRLHSGVPSRFSGSGSGTDYSLTISNLEQEDIATYFCQQGNTLPYTFGGGTKLEITGSTSGSGKPGSGEGSTKGEVKLQESGPGLVAPSQSLSVTCTVSGVSLPDYGVSWIRQPPRKGLEWLGVIWGSETTYYNSALKSRLTIIKDNSKSQVFLKMNSLQTDDTAIYYCAKHYYYGGSYAMDYWGQGTSVTVSSGGGGSEVQLQQSGAELVKPGASVKMSCKASGYTFTSYNMHWVKQTPGQGLEWIGAIYPGNGDTSYNQKFKGKATLTADKSSSTAYMQLSSLTSEDSADYYCARSNYYGSSYWFFDVWGAGTTVTVSSGSTSGGGSGGGSGGGGSSDIVLTQSPAILSASPGEKVTMTCRASSSVNYMDWYQKKPGSSPKPWIYATSNLASGVPARFSGSGSGTSYSLTISRVEAEDAATYYCQQWSFNPPTFGGGTKLEIKESKYGPPCPPCPKPTTTPAPRPPTPAPTIASQPLSLRPEACRPAAGGAVHTRGLDFACDIYIWAPLAGTCGVLLLSLVITKRGRKKLLYIFKQPFMRPVQTTQEEDGCSCRFPEEEEGGCELRVKFSRSADAPAYQQGQNQLYNELNLGRREEYDVLDKRRGRDPEMGGKPRRKNPQEGLYNELQKDKMAEAYSEIGMKGERRRGKGHDGLYQGLSTATKDTYDALHMQALPPRLEGGGEGRGSLLTCGDVEENPGPRMLLLVTSLLLCELPHPAFLLIPRKVCNGIGIGEFKDSLSINATNIKHFKNCTSISGDLHILPVAFRGDSFTHTPPLDPQELDILKTVKEITGFLLIQAWPENRTDLHAFENLEIIRGRTKQHGQFSLAVVSLNITSLGLRSLKEISDGDVIISGNKNLCYANTINWKKLFGTSGQKTKIISNRGENSCKATGQVCHALCSPEGCWGPEPRDCVSCRNVSRGRECVDKCNLLEGEPREFVENSECIQCHPECLPQAMNITCTGRGPDNCIQCAHYIDGPHCVKTCPAGVMGENNTLVWKYADAGHVCHLCHPNCTYGCTGPGLEGCPTNGPKIPSIATGMVGALLLLLVVALGIGLFM

SEQ ID NO: 5673 - protein, 727 aa, Artificial Sequence
  Description of Artificial Sequence: Synthetic Chimeric Antigen Receptor sequence
MVLLVTSLLLCELPHPAFLLIPDTEVQLVESGGGLVKPGGSLKLSCAASGFAFSIYDMSWVRQTPEKRLEWVAYISSGGGTYYPDTVKGRFTISRDNAKNTLYLQMSSLKSEDTAMYYCARHSGYGTHWGVLFAYWGQGTLVTVSAGGGGSGGGGSGGGGSDIQMTQTTSSLSASLGDRVTISCRASQDISNYLNWYQQKPDGTVKLLIYYTSILHSGVPSRFSGSGSGTDYSLTISNLEQEDFATYFCQQGNTLPWTFGGGTKLEIKAEPKSCDKTHTCPPCPAPELLGGPSVFLFPPKPKDTLMISRTPEVTCVVVDVSHEDPEVKFNWYVDGVEVHNAKTKPREEQYNSTYRVVSVLTVLHQDWLNGKEYKCKVSNKALPAPIEKTISKAKGQPREPQVYTLPPSRDELTKNQVSLTCLVKGFYPSDIAVEWESNGQPENNYKTTPPVLDSDGSFFLYSKLTVDKSRWQQGNVFSCSVMHEALHNHYTQKSLSLSPGKKDPKAAAIEVMYPPPYLDNEKSNGTIIHVKGKHLCPSPLFPGPSKPFWVLVVVGGVLACYSLLVTVAFIIFWVRSKRSRLLHSDYMNMTPRRPGPTRKHYQPYAPPRDFAAYRSRVKFSRSADAPAYQQGQNQLYNELNLGRREEYDVLDKRRGRDPEMGGKPRRKNPQEGLYNELQKDKMAEAYSEIGMKGERRRGKGHDGLYQGLSTATKDTYDALHMQALPPR

SEQ ID NO: 5674 - protein, 266 aa, Artificial Sequence
  Description of Artificial Sequence: Synthetic Chimeric Antigen Receptor sequence
METDTLLLWVLLLWVPGSTGDIVLTQSPAILSASPGEKVTMTCRASSSVNYMDWYQKKPGSSPKPWIYATSNLASGVPARFSGSGSGTSYSLTISRVEAEDAATYYCQQWSFNPPTFGGGTKLEIKGSTSGGGSGGGSGGGGSSEVQLQQSGAELVKPGASVKMSCKASGYTFTSYNMHWVKQTPGQGLEWIGAIYPGNGDTSYNQKFKGKATLTADKSSSTAYMQLSSLTSEDSADYYCARSNYYGSSYWFFDVWGAGTTVTVSS

SEQ ID NO: 5675 - protein, 529 aa, Artificial Sequence
  Description of Artificial Sequence: Synthetic Chimeric Antigen Receptor sequence
MALPVTALLLPLALLLHAARPDIVMTQSPATLSVTPGDRVSLSCRASQSISDYLHWYQQKSHESPRLLIKYASQSISGIPSRFSGSGSGSDFTLSINSVEPEDVGVYYCQNGHSFPLTFGAGTKLELRRGGGGSGGGGSGGGGSQVQLQQPGTELVRPGSSVKLSCKASGYTFTSYWVNWVKQRPDQGLEWIGRIDPYDSETHYNQKFTDKAISTIDTSSNTAYMQLSTLTSDASAVYYCSRSPRDSSTNLADWGQGTLVTVSSTTTPAPRPPTPAPTIASQPLSLRPEACRPAAGGAVHTRGLDFACDIYIWAPLAGTCGVLLLSLVITLYCRSKRSRLLHSDYMNMTPRRPGPTRKHYQPYAPPRDFAAYRSKRGRKKLLYIFKQPFMRPVQTTQEEDGCSCRFPEEEEGGCELRVKFSRSADAPAYQQGQNQLYNELNLGRREEYDVLDKRRGRDPEMGGKPQRRKNPQEGLYNELQKDKMAEAYSEIGMKGERRRGKGHDGLYQGLSTATKDTYDALHMQALPPR

SEQ ID NO: 5676 - protein, 389 aa, Artificial Sequence
  Description of Artificial Sequence: Synthetic Chimeric Antigen Receptor sequence
MALPVTALLLPLALLLHAARPGSGSGAQAAEVQLVESGGGLVQPGRSLRLSCAASGFTFNDYAMHWVRQAPGKGLEWVSTISWNSGSIGYADSVKGRFTISRDNAKKSLYLQMNSLRAEDTALYYCAKDIQYGNYYYGMDVWGQGTTVTVSSGGGGSGGGGSGGGGSEIVLTQSPATLSLSPGERATLSCRASQSVSSYLAWYQQKPGQAPRLLIYDASNRATGIPARFSGSGSGTDFTLTISSLEPEDFAVYYCQQRSNWPITFGQGTRLEIKRSDPASGAGSGSGSAIELLPVPGAKKSAKLYIPYIILTIIILTIVGFIWLLKVNGCRKYKLNKTESTPVVEEDEMQPYASYTEKNNPLYDTTNKVKASEALQSEVDTDLHTLSHG

SEQ ID NO: 5677 - protein, 381 aa, Artificial Sequence
  Description of Artificial Sequence: Synthetic Chimeric Antigen Receptor sequence
MALPVTALLLPLALLLHAARPGSGSGAQAAEVQLVESGGGLVQPGRSLRLSCAASGFTFNDYAMHWVRQAPGKGLEWVSTISWNSGSIGYADSVKGRFTISRDNAKKSLYLQMNSLRAEDTALYYCAKDIQYGNYYYGMDVWGQGTTVTVSSGGGGSGGGGSGGGGSEIVLTQSPATLSLSPGERATLSCRASQSVSSYLAWYQQKPGQAPRLLIYDASNRATGIPARFSGSGSGTDFTLTISSLEPEDFAVYYCQQRSNWPITFGQGTRLEIKRSDPASGAGSGSGSAVKEGPPSEHSGISRNAIIFLVLGILVFLILLGIGIYFYWSKCSREVLWHCHLCPSSTEHASASANGHVSYSAVSRENSSSQDPQTEGTRSHG

SEQ ID NO: 5678 - protein, 389 aa, Artificial Sequence
  Description of Artificial Sequence: Synthetic Chimeric Antigen Receptor sequence
MALPVTALLLPLALLLHAARPGSGSGAQAAEVQLVESGGGLVQPGRSLRLSCAASGFTFNDYAMHWVRQAPGKGLEWVSTISWNSGSIGYADSVKGRFTISRDNAKKSLYLQMNSLRAEDTALYYCAKDIQYGNYYYGMDVWGQGTTVTVSSGGGGSGGGGSGGGGSEIVLTQSPATLSLSPGERATLSCRASQSVSSYLAWYQQKPGQAPRLLIYDASNRATGIPARFSGSGSGTDFTLTISSLEPEDFAVYYCQQRSNWPITFGQGTRLEIKRSDPASGAGSGSGSAVQAPSSSPMGIIVAVVTGIAVAAIVAAVVALIYCRKKRISALPGYPECREMGETLPEKPANPTNPDEADKVGAENTITYSLLMHPDALEEPDDQNRISHG

SEQ ID NO: 5679 - protein, 407 aa, Artificial Sequence
  Description of Artificial Sequence: Synthetic Chimeric Antigen Receptor sequence
MALPVTALLLPLALLLHAARPGSGSGAQAAEVQLVESGGGLVQPGRSLRLSCAASGFTFNDYAMHWVRQAPGKGLEWVSTISWNSGSIGYADSVKGRFTISRDNAKKSLYLQMNSLRAEDTALYYCAKDIQYGNYYYGMDVWGQGTTVTVSSGGGGSGGGGSGGGGSEIVLTQSPATLSLSPGERATLSCRASQSVSSYLAWYQQKPGQAPRLLIYDASNRATGIPARFSGSGSGTDFTLTISSLEPEDFAVYYCQQRSNWPITFGQGTRLEIKRSDPASGAGSGSGSASFRALPHAWSDPSDPLPVSVTGNSRYLHALIGTSVVIIPFAILLFFLLHRWCANKKNAVVMDQEPAGNRTVNREDSDEQDPQEVTYAQLNHCVFTQRKITRPSQRPKTPPTDTSVSHG

SEQ ID NO: 5680 - protein, 412 aa, Artificial Sequence
  Description of Artificial Sequence: Synthetic Chimeric Antigen Receptor sequence
MALPVTALLLPLALLLHAARPGSGSGAQAAEVQLVESGGGLVQPGRSLRLSCAASGFTFNDYAMHWVRQAPGKGLEWVSTISWNSGSIGYADSVKGRFTISRDNAKKSLYLQMNSLRAEDTALYYCAKDIQYGNYYYGMDVWGQGTTVTVSSGGGGSGGGGSGGGGSEIVLTQSPATLSLSPGERATLSCRASQSVSSYLAWYQQKPGQAPRLLIYDASNRATGIPARFSGSGSGTDFTLTISSLEPEDFAVYYCQQRSNWPITFGQGTRLEIKRSDPASGAGSGSGSALFVHWKPEGRAGGVLGAVWGASITTLVFLCVCFIFRVKTRRKKAAQPVQNTDDVNPVMVSGSRGHQHQFQTGIVSDHPAEAGPISEDEQELHYAVLHFHKVQPQEPKVTDTEYSEIKIHKSHG

SEQ ID NO: 5681 - protein, 413 aa, Artificial Sequence
  Description of Artificial Sequence: Synthetic Chimeric Antigen Receptor sequence
MALPVTALLLPLALLLHAARPGSGSGAQAAEVQLVESGGGLVQPGRSLRLSCAASGFTFNDYAMHWVRQAPGKGLEWVSTISWNSGSIGYADSVKGRFTISRDNAKKSLYLQMNSLRAEDTALYYCAKDIQYGNYYYGMDVWGQGTTVTVSSGGGGSGGGGSGGGGSEIVLTQSPATLSLSPGERATLSCRASQSVSSYLAWYQQKPGQAPRLLIYDASNRATGIPARFSGSGSGTDFTLTISSLEPEDFAVYYCQQRSNWPITFGQGTRLEIKRSDPASGAGSGSGSAGPDGYRRDLMTAGVLWGLFGVLGFTGVALLLYALFHKISGESSATNEPRGASRPNPQEFTYSSPTPDMEELQPVYVNVGSVDVDVVYSQVWSMQQPESSANIRTLLENKDSQVIYSSVKKSSHG

SEQ ID NO: 5682 - protein, 415 aa, Artificial Sequence
  Description of Artificial Sequence: Synthetic Chimeric Antigen Receptor sequence
MALPVTALLLPLALLLHAARPGSGSGAQAAEVQLVESGGGLVQPGRSLRLSCAASGFTFNDYAMHWVRQAPGKGLEWVSTISWNSGSIGYADSVKGRFTISRDNAKKSLYLQMNSLRAEDTALYYCAKDIQYGNYYYGMDVWGQGTTVTVSSGGGGSGGGGSGGGGSEIVLTQSPATLSLSPGERATLSCRASQSVSSYLAWYQQKPGQAPRLLIYDASNRATGIPARFSGSGSGTDFTLTISSLEPEDFAVYYCQQRSNWPITFGQGTRLEIKRSDPASGAGSGSGSAPGHIRLYVVEKENLPVFPVWVVVGIVTAVVLGLTLLISMILAVLYRRKNSKRDYTGCSTSESLSPVKQAPRKSPSDTEGLVKSLPSGSHQGPVIYAQLDHSGGHHSDKINKSESVVYADIRKNSHG

SEQ ID NO: 5683 - protein, 419 aa, Artificial Sequence
  Description of Artificial Sequence: Synthetic Chimeric Antigen Receptor sequence
MALPVTALLLPLALLLHAARPGSGSGAQAAEVQLVESGGGLVQPGRSLRLSCAASGFTFNDYAMHWVRQAPGKGLEWVSTISWNSGSIGYADSVKGRFTISRDNAKKSLYLQMNSLRAEDTALYYCAKDIQYGNYYYGMDVWGQGTTVTVSSGGGGSGGGGSGGGGSEIVLTQSPATLSLSPGERATLSCRASQSVSSYLAWYQQKPGQAPRLLIYDASNRATGIPARFSGSGSGTDFTLTISSLEPEDFAVYYCQQRSNWPITFGQGTRLEIKRSDPASGAGSGSGSALQSKATSGVTQGVVGGAGATALVFLSFCVIFVVVRSCRKKSARPAAGVGDTGIEDANAVRGSASQGPLTEPWAEDSPPDQPPPASARSSVGEGELQYASLSFQMVKPWDSRGQEATDTEYSEIKIHRSHG

SEQ ID NO: 5684 - protein, 422 aa, Artificial Sequence
  Description of Artificial Sequence: Synthetic Chimeric Antigen Receptor sequence
MALPVTALLLPLALLLHAARPGSGSGAQAAEVQLVESGGGLVQPGRSLRLSCAASGFTFNDYAMHWVRQAPGKGLEWVSTISWNSGSIGYADSVKGRFTISRDNAKKSLYLQMNSLRAEDTALYYCAKDIQYGNYYYGMDVWGQGTTVTVSSGGGGSGGGGSGGGGSEIVLTQSPATLSLSPGERATLSCRASQSVSSYLAWYQQKPGQAPRLLIYDASNRATGIPARFSGSGSGTDFTLTISSLEPEDFAVYYCQQRSNWPITFGQGTRLEIKRSDPASGAGSGSGSAMPSTGGDSCPFCLKLLLPGLLLLLVVIILILAFWVLPKYKTRKAMRNNVPRDRGDTAMEVGIYANILEKQAKEESVPEVGSRPCVSTAQDEAKHSQELQYATPVFQEVAPREQEACDSYKSGYVYSELNFSHG

SEQ ID NO: 5685 - protein, 423 aa, Artificial Sequence
  Description of Artificial Sequence: Synthetic Chimeric Antigen Receptor sequence
MALPVTALLLPLALLLHAARPGSGSGAQAAEVQLVESGGGLVQPGRSLRLSCAASGFTFNDYAMHWVRQAPGKGLEWVSTISWNSGSIGYADSVKGRFTISRDNAKKSLYLQMNSLRAEDTALYYCAKDIQYGNYYYGMDVWGQGTTVTVSSGGGGSGGGGSGGGGSEIVLTQSPATLSLSPGERATLSCRASQSVSSYLAWYQQKPGQAPRLLIYDASNRATGIPARFSGSGSGTDFTLTISSLEPEDFAVYYCQQRSNWPITFGQGTRLEIKRSDPASGAGSGSGSALQQEYTGKMRPVSGVLLGAVGGAGATALVFLSFCVIFIVVRSCRKKSARPAADVGDIGMKDANTIRGSASQGNLTESWADDNPRHHGLAAHSSGEEREIQYAPLSFHKGEPQDLSGQEATNNEYSEIKIPKSHG

SEQ ID NO: 5686 - protein, 425 aa, Artificial Sequence
  Description of Artificial Sequence: Synthetic Chimeric Antigen Receptor sequence
MALPVTALLLPLALLLHAARPGSGSGAQAAEVQLVESGGGLVQPGRSLRLSCAASGFTFNDYAMHWVRQAPGKGLEWVSTISWNSGSIGYADSVKGRFTISRDNAKKSLYLQMNSLRAEDTALYYCAKDIQYGNYYYGMDVWGQGTTVTVSSGGGGSGGGGSGGGGSEIVLTQSPATLSLSPGERATLSCRASQSVSSYLAWYQQKPGQAPRLLIYDASNRATGIPARFSGSGSGTDFTLTISSLEPEDFAVYYCQQRSNWPITFGQGTRLEIKRSDPASGAGSGSGSALQNEYTGKMRPISGVTLGAFGGAGATALVFLYFCIIFVVVRSCRKKSARPAVGVGDTGMEDANAVRGSASQGPLIESPADDSPPHHAPPALATPSPEEGEIQYASLSFHKARPQYPQEQEAIGYEYSEINIPKSHG

SEQ ID NO: 5687 - protein, 428 aa, Artificial Sequence
  Description of Artificial Sequence: Synthetic Chimeric Antigen Receptor sequence
MALPVTALLLPLALLLHAARPGSGSGAQAAEVQLVESGGGLVQPGRSLRLSCAASGFTFNDYAMHWVRQAPGKGLEWVSTISWNSGSIGYADSVKGRFTISRDNAKKSLYLQMNSLRAEDTALYYCAKDIQYGNYYYGMDVWGQGTTVTVSSGGGGSGGGGSGGGGSEIVLTQSPATLSLSPGERATLSCRASQSVSSYLAWYQQKPGQAPRLLIYDASNRATGIPARFSGSGSGTDFTLTISSLEPEDFAVYYCQQRSNWPITFGQGTRLEIKRSDPASGAGSGSGSALNVTYVPQNPTTGIFPGDGSGKQETRAGVVHGAIGGAGVTALLALCLCLIFFIVKTHRRKAARTAVGRNDTHPTTGSASPKHQKKSKLHGPTETSSCSGAAPTVEMDEELHYASLNFHGMNPSKDTSTEYSEVRTQSHG

SEQ ID NO: 5688 - protein, 428 aa, Artificial Sequence
  Description of Artificial Sequence: Synthetic Chimeric Antigen Receptor sequence
MALPVTALLLPLALLLHAARPGSGSGAQAAEVQLVESGGGLVQPGRSLRLSCAASGFTFNDYAMHWVRQAPGKGLEWVSTISWNSGSIGYADSVKGRFTISRDNAKKSLYLQMNSLRAEDTALYYCAKDIQYGNYYYGMDVWGQGTTVTVSSGGGGSGGGGSGGGGSEIVLTQSPATLSLSPGERATLSCRASQSVSSYLAWYQQKPGQAPRLLIYDASNRATGIPARFSGSGSGTDFTLTISSLEPEDFAVYYCQQRSNWPITFGQGTRLEIKRSDPASGAGSGSGSAPYEWSNSSDPLLVSVTGNPSNSWPSPTEPSSETGNPRHLHVLIGTSVVIILFILLLFFLLHRWCCNKKNAVVMDQEPAGNRTVNREDSDEQDPQEVTYAQLNHCVFTQRKITRPSQRPKTPPTDIIVYTELPNAEPSHG

SEQ ID NO: 5689 - protein, 430 aa, Artificial Sequence
  Description of Artificial Sequence: Synthetic Chimeric Antigen Receptor sequence
MALPVTALLLPLALLLHAARPGSGSGAQAAEVQLVESGGGLVQPGRSLRLSCAASGFTFNDYAMHWVRQAPGKGLEWVSTISWNSGSIGYADSVKGRFTISRDNAKKSLYLQMNSLRAEDTALYYCAKDIQYGNYYYGMDVWGQGTTVTVSSGGGGSGGGGSGGGGSEIVLTQSPATLSLSPGERATLSCRASQSVSSYLAWYQQKPGQAPRLLIYDASNRATGIPARFSGSGSGTDFTLTISSLEPEDFAVYYCQQRSNWPITFGQGTRLEIKRSDPASGAGSGSGSALNFTVPTGARSNHLTSGVIEGLLSTLGPATVALLFCYGLKRKIGRRSARDPLRSLPSPLPQEFTYLNSPTPGQLQPIYENVNVVSGDEVYSLAYYNQPEQESVAAETLGTHMEDKVSLDIYSRLRKANITDVDYEDAMSHG

SEQ ID NO: 5690 - protein, 433 aa, Artificial Sequence
  Description of Artificial Sequence: Synthetic Chimeric Antigen Receptor sequence
MALPVTALLLPLALLLHAARPGSGSGAQAAEVQLVESGGGLVQPGRSLRLSCAASGFTFNDYAMHWVRQAPGKGLEWVSTISWNSGSIGYADSVKGRFTISRDNAKKSLYLQMNSLRAEDTALYYCAKDIQYGNYYYGMDVWGQGTTVTVSSGGGGSGGGGSGGGGSEIVLTQSPATLSLSPGERATLSCRASQSVSSYLAWYQQKPGQAPRLLIYDASNRATGIPARFSGSGSGTDFTLTISSLEPEDFAVYYCQQRSNWPITFGQGTRLEIKRSDPASGAGSGSGSAVTVRETPGNRDGLVAAGATGGLLSALLLAVALLFHCWRRRKSGVGFLGDETRLPPAPGPGESSHSICPAQVELQSLYVDVHPKKGDLVYSEIQTTQLGEEEEANTSRTLLEDKDVSVVYSEVKTQHPDNSAGKISSKDEESSHG

SEQ ID NO: 5691 - protein, 434 aa, Artificial Sequence
  Description of Artificial Sequence: Synthetic Chimeric Antigen Receptor sequence
MALPVTALLLPLALLLHAARPGSGSGAQAAEVQLVESGGGLVQPGRSLRLSCAASGFTFNDYAMHWVRQAPGKGLEWVSTISWNSGSIGYADSVKGRFTISRDNAKKSLYLQMNSLRAEDTALYYCAKDIQYGNYYYGMDVWGQGTTVTVSSGGGGSGGGGSGGGGSEIVLTQSPATLSLSPGERATLSCRASQSVSSYLAWYQQKPGQAPRLLIYDASNRATGIPARFSGSGSGTDFTLTISSLEPEDFAVYYCQQRSNWPITFGQGTRLEIKRSDPASGAGSGSGSAERRAEVPTAHPSPSPRPAGQFQTLVVGVVGGLLGSLVLLVWVLAVICSRAARGTIGARRTGQPLKEDPSAVPVFSVDYGELDFQWREKTPEPPVPCVPEQTEYATIVFPSGMGTSSPARRGSADGPRSAQPLRPEDGHCSWPLSH

SEQ ID NO: 5692 - protein, 435 aa, Artificial Sequence
  Description of Artificial Sequence: Synthetic Chimeric Antigen Receptor sequence
MALPVTALLLPLALLLHAARPGSGSGAQAAEVQLVESGGGLVQPGRSLRLSCAASGFTFNDYAMHWVRQAPGKGLEWVSTISWNSGSIGYADSVKGRFTISRDNAKKSLYLQMNSLRAEDTALYYCAKDIQYGNYYYGMDVWGQGTTVTVSSGGGGSGGGGSGGGGSEIVLTQSPATLSLSPGERATLSCRASQSVSSYLAWYQQKPGQAPRLLIYDASNRATGIPARFSGSGSGTDFTLTISSLEPEDFAVYYCQQRSNWPITFGQGTRLEIKRSDPASGAGSGSGSALYITGLTANRSGPFATGVAGGLLSIAGLAAGALLLYCWLSRKAGRKPASDPARSPPDSDSQEPTYHNVPAWEELQPVYTNANPRGENVVYSEVRIIQEKKKHAVASDPRHLRNKGSPIIYSEVKVASTPVSGSLFLASSAPHRSHG

SEQ ID NO: 5693 - protein, 435 aa, Artificial Sequence
  Description of Artificial Sequence: Synthetic Chimeric Antigen Receptor sequence
MALPVTALLLPLALLLHAARPGSGSGAQAAEVQLVESGGGLVQPGRSLRLSCAASGFTFNDYAMHWVRQAPGKGLEWVSTISWNSGSIGYADSVKGRFTISRDNAKKSLYLQMNSLRAEDTALYYCAKDIQYGNYYYGMDVWGQGTTVTVSSGGGGSGGGGSGGGGSEIVLTQSPATLSLSPGERATLSCRASQSVSSYLAWYQQKPGQAPRLLIYDASNRATGIPARFSGSGSGTDFTLTISSLEPEDFAVYYCQQRSNWPITFGQGTRLEIKRSDPASGAGSGSGSAPYEWSNSSDPLLVSVIGNPSNSWPSPTEPSSKTGNPRHLHILIGTSVVIILFILLFFLLHRWCSNKKNAAVMDQESAGNRTANSEDSDEQDPQEVTYTQLNHCVFTQRKITRPSQRPKTPPTDIIVYAELPNAESRSKVVSCPSHG

SEQ ID NO: 5694 - protein, 436 aa, Artificial Sequence
  Description of Artificial Sequence: Synthetic Chimeric Antigen Receptor sequence
MALPVTALLLPLALLLHAARPGSGSGAQAAEVQLVESGGGLVQPGRSLRLSCAASGFTFNDYAMHWVRQAPGKGLEWVSTISWNSGSIGYADSVKGRFTISRDNAKKSLYLQMNSLRAEDTALYYCAKDIQYGNYYYGMDVWGQGTTVTVSSGGGGSGGGGSGGGGSEIVLTQSPATLSLSPGERATLSCRASQSVSSYLAWYQQKPGQAPRLLIYDASNRATGIPARFSGSGSGTDFTLTISSLEPEDFAVYYCQQRSNWPITFGQGTRLEIKRSDPASGAGSGSGSAPYEWSDPSDPLLVSVTGNPSSSWPSPTEPSSKSGNPRHLHILIGTSVVIILFILLLFFLLHLWCSNKKNAAVMDQEPAGNRTANSEDSDEQDPEEVTYAQLDHCVFTQRKITRPSQRPKTPPTDTILYTELPNAKPRSKVVSCPSHG

SEQ ID NO: 5695 - protein, 439 aa, Artificial Sequence
  Description of Artificial Sequence: Synthetic Chimeric Antigen Receptor sequence
MALPVTALLLPLALLLHAARPGSGSGAQAAEVQLVESGGGLVQPGRSLRLSCAASGFTFNDYAMHWVRQAPGKGLEWVSTISWNSGSIGYADSVKGRFTISRDNAKKSLYLQMNSLRAEDTALYYCAKDIQYGNYYYGMDVWGQGTTVTVSSGGGGSGGGGSGGGGSEIVLTQSPATLSLSPGERATLSCRASQSVSSYLAWYQQKPGQAPRLLIYDASNRATGIPARFSGSGSGTDFTLTISSLEPEDFAVYYCQQRSNWPITFGQGTRLEIKRSDPASGAGSGSGSAVRVILAPWKKGLIAVVIIGVIIALLIIAAKCYFLRKAKAKQMPVEMSRPAVPLLNSNNEKMSDPNMEANSHYGHNDDVGNHAMKPINDNKEPLNSDVQYTEVQVSSAESHKDLGKKDTETVYSEVRKAVPDAVESRYSRTEGSLDGTSHG

SEQ ID NO: 5696 - protein, 445 aa, Artificial Sequence
  Description of Artificial Sequence: Synthetic Chimeric Antigen Receptor sequence
MALPVTALLLPLALLLHAARPGSGSGAQAAEVQLVESGGGLVQPGRSLRLSCAASGFTFNDYAMHWVRQAPGKGLEWVSTISWNSGSIGYADSVKGRFTISRDNAKKSLYLQMNSLRAEDTALYYCAKDIQYGNYYYGMDVWGQGTTVTVSSGGGGSGGGGSGGGGSEIVLTQSPATLSLSPGERATLSCRASQSVSSYLAWYQQKPGQAPRLLIYDASNRATGIPARFSGSGSGTDFTLTISSLEPEDFAVYYCQQRSNWPITFGQGTRLEIKRSDPASGAGSGSGSAQAVTTTTQRPSSMTTTWRLSSTTTTTGLRVTQGKRRSDSWHISLETAVGVAVAVTVLGIMILGLICLLRWRRRKGQQRTKATTPAREPFQNTEEPYENIRNEGQNTDPKLNPKDDGIVYASLALSSSTSPKAPPSHRPLKSPQNETLYSVLKASHG

SEQ ID NO: 5697 - protein, 447 aa, Artificial Sequence
  Description of Artificial Sequence: Synthetic Chimeric Antigen Receptor sequence
MALPVTALLLPLALLLHAARPGSGSGAQAAEVQLVESGGGLVQPGRSLRLSCAASGFTFNDYAMHWVRQAPGKGLEWVSTISWNSGSIGYADSVKGRFTISRDNAKKSLYLQMNSLRAEDTALYYCAKDIQYGNYYYGMDVWGQGTTVTVSSGGGGSGGGGSGGGGSEIVLTQSPATLSLSPGERATLSCRASQSVSSYLAWYQQKPGQAPRLLIYDASNRATGIPARFSGSGSGTDFTLTISSLEPEDFAVYYCQQRSNWPITFGQGTRLEIKRSDPASGAGSGSGSAPCVWSNSSDPLLVSVTGNPSSSWPSPTEPSSKSGICRHLHVLIGTSVVIFLFILLLFFLLYRWCSNKKNAAVMDQEPAGDRTVNRQDSDEQDPQEVTYAQLDHCVFIQRKISRPSQRPKTPLTDTSVYTELPNAEPRSKVVSCPRAPQSGLEGVFSHG

SEQ ID NO: 5698 - protein, 447 aa, Artificial Sequence
  Description of Artificial Sequence: Synthetic Chimeric Antigen Receptor sequence
MALPVTALLLPLALLLHAARPGSGSGAQAAEVQLVESGGGLVQPGRSLRLSCAASGFTFNDYAMHWVRQAPGKGLEWVSTISWNSGSIGYADSVKGRFTISRDNAKKSLYLQMNSLRAEDTALYYCAKDIQYGNYYYGMDVWGQGTTVTVSSGGGGSGGGGSGGGGSEIVLTQSPATLSLSPGERATLSCRASQSVSSYLAWYQQKPGQAPRLLIYDASNRATGIPARFSGSGSGTDFTLTISSLEPEDFAVYYCQQRSNWPITFGQGTRLEIKRSDPASGAGSGSGSALQNEGTGTSRPVSQVTLAAVGGAGATALAFLSFCIIFIIVRSCRKKSARPAAGVGDTGMEDAKAIRGSASQGPLTESWKDGNPLKKPPPAVAPSSGEEGELHYATLSFHKVKPQDPQGQEATDSEYSEIKIHKRETAETQACLRNHNPSSKEVRGSHG

SEQ ID NO: 5699 - protein, 463 aa, Artificial Sequence
  Description of Artificial Sequence: Synthetic Chimeric Antigen Receptor sequence
MALPVTALLLPLALLLHAARPGSGSGAQAAEVQLVESGGGLVQPGRSLRLSCAASGFTFNDYAMHWVRQAPGKGLEWVSTISWNSGSIGYADSVKGRFTISRDNAKKSLYLQMNSLRAEDTALYYCAKDIQYGNYYYGMDVWGQGTTVTVSSGGGGSGGGGSGGGGSEIVLTQSPATLSLSPGERATLSCRASQSVSSYLAWYQQKPGQAPRLLIYDASNRATGIPARFSGSGSGTDFTLTISSLEPEDFAVYYCQQRSNWPITFGQGTRLEIKRSDPASGAGSGSGSAGTSRNRTGLTAAGITGLVLSILVLAAAAALLHYARARRKPGGLSATGTSSHSPSECQEPSSSRPSRIDPQEPTHSKPLAPMELEPMYSNANPGDSNPIYSQIWSIQHTKENSANCPMMHQEHEELTVLYSELKKTHPDDSAGEASSRGRAHEEDDEENYENVPRVLLASDHSHG

SEQ ID NO: 5700 - protein, 464 aa, Artificial Sequence
  Description of Artificial Sequence: Synthetic Chimeric Antigen Receptor sequence
MALPVTALLLPLALLLHAARPGSGSGAQAAEVQLVESGGGLVQPGRSLRLSCAASGFTFNDYAMHWVRQAPGKGLEWVSTISWNSGSIGYADSVKGRFTISRDNAKKSLYLQMNSLRAEDTALYYCAKDIQYGNYYYGMDVWGQGTTVTVSSGGGGSGGGGSGGGGSEIVLTQSPATLSLSPGERATLSCRASQSVSSYLAWYQQKPGQAPRLLIYDASNRATGIPARFSGSGSGTDFTLTISSLEPEDFAVYYCQQRSNWPITFGQGTRLEIKRSDPASGAGSGSGSAGPSGDPSLSPTGSTPTPGPEDQPLTPTGLDPQSGLGRHLGVVTGVSVAFVLLLFLLLFLLLRHRHQSKHRTSAHFYRPAGAAGPEPKDQGLQKRASPVADIQEEILNAAVKDTQPKDGVEMDARAAASEAPQDVTYAQLHSLTLRREATEPPPSQEREPPAEPSIYAPLAIHSHG

SEQ ID NO: 5701 - protein, 467 aa, Artificial Sequence
  Description of Artificial Sequence: Synthetic Chimeric Antigen Receptor sequence
MALPVTALLLPLALLLHAARPGSGSGAQAAEVQLVESGGGLVQPGRSLRLSCAASGFTFNDYAMHWVRQAPGKGLEWVSTISWNSGSIGYADSVKGRFTISRDNAKKSLYLQMNSLRAEDTALYYCAKDIQYGNYYYGMDVWGQGTTVTVSSGGGGSGGGGSGGGGSEIVLTQSPATLSLSPGERATLSCRASQSVSSYLAWYQQKPGQAPRLLIYDASNRATGIPARFSGSGSGTDFTLTISSLEPEDFAVYYCQQRSNWPITFGQGTRLEIKRSDPASGAGSGSGSAPYEWSDASDPLPVSVTGNPSSSWPSPTEPSFKTGIARHLHAVIRYSVAIILFTILPFFLLHRWCSKKKDAAVMNQEPAGHRTVNREDSDEQDPQEVTYAQLDHCIFTQRKITGPSQRSKRPSTDTSVCIELPNAEPRALSPAHEHHSQALMGSSRETTALSQTQLASSHVPAAGISHG

SEQ ID NO: 5702 - protein, 467 aa, Artificial Sequence
  Description of Artificial Sequence: Synthetic Chimeric Antigen Receptor sequence
MALPVTALLLPLALLLHAARPGSGSGAQAAEVQLVESGGGLVQPGRSLRLSCAASGFTFNDYAMHWVRQAPGKGLEWVSTISWNSGSIGYADSVKGRFTISRDNAKKSLYLQMNSLRAEDTALYYCAKDIQYGNYYYGMDVWGQGTTVTVSSGGGGSGGGGSGGGGSEIVLTQSPATLSLSPGERATLSCRASQSVSSYLAWYQQKPGQAPRLLIYDASNRATGIPARFSGSGSGTDFTLTISSLEPEDFAVYYCQQRSNWPITFGQGTRLEIKRSDPASGAGSGSGSAPYEWSDPSDPLLVSVTGNSSSSSSSPTEPSSKTGIRRHLHILIGTSVAIILFIILFFFLLHCCCSNKKNAAVMDQEPAGDRTVNREDSDDQDPQEVTYAQLDHCVFTQTKITSPSQRPKTPPTDTTMYMELPNAKPRSLSPAHKHHSQALRGSSRETTALSQNRVASSHVPAAGISHG

SEQ ID NO: 5703 - protein, 471 aa, Artificial Sequence
  Description of Artificial Sequence: Synthetic Chimeric Antigen Receptor sequence
MALPVTALLLPLALLLHAARPGSGSGAQAAEVQLVESGGGLVQPGRSLRLSCAASGFTFNDYAMHWVRQAPGKGLEWVSTISWNSGSIGYADSVKGRFTISRDNAKKSLYLQMNSLRAEDTALYYCAKDIQYGNYYYGMDVWGQGTTVTVSSGGGGSGGGGSGGGGSEIVLTQSPATLSLSPGERATLSCRASQSVSSYLAWYQQKPGQAPRLLIYDASNRATGIPARFSGSGSGTDFTLTISSLEPEDFAVYYCQQRSNWPITFGQGTRLEIKRSDPASGAGSGSGSAGPSMGSSPPPTGPISTPAGPEDQPLTPTGSDPQSGLGRHLGVVIGILVAVVLLLLLLLLLFLILRHRRQGKHWTSTQRKADFQHPAGAVGPEPTDRGLQWRSSPAADAQEENLYAAVKDTQPEDGVEMDTRAAASEAPQDVTYAQLHSLTLRRKATEPPPSQEREPPAEPSIYATLAIHSHG

SEQ ID NO: 5704 - protein, 496 aa, Artificial Sequence
  Description of Artificial Sequence: Synthetic Chimeric Antigen Receptor sequence
MALPVTALLLPLALLLHAARPEVQLVESGAEVKKPGASVKVSCKASGYTFTGYYMHWVRQAPGQGLEWMGWINPNSGGTNYAQKFQGRVTMTRDTSISTAYMELSRLRSDDTAVYYCAREPASSSWYGYYYYMDVWGKGTLVTVSSGGGGSGGGGSGGGGSGGGGSDIQMTQSPSSLSASVGDRVTITCRASQSINTYLNWYQQKPGKPPKLLIYAASNLQSGVPSRFSGSGSGTHFTLTISSLQPDDFATYYCQQSYSSLLTFGGGTKLEIKTTTPAPRPPTPAPTIASQPLSLRPEACRPAAGGAVHTRGLDFACDIYIWAPLAGTCGVLLLSLVITLYCKRGRKKLLYIFKQPFMRPVQTTQEEDGCSCRFPEEEEGGCELRVKFSRSADAPAYKQGQNQLYNELNLGRREEYDVLDKRRGRDPEMGGKPRRKNPQEGLYNELQKDKMAEAYSEIGMKGERRRGKGHDGLYQGLSTATKDTYDALHMQALPPR

SEQ ID NO: 5705 - protein, 498 aa, Artificial Sequence
  Description of Artificial Sequence: Synthetic Chimeric Antigen Receptor sequence
MALPVTALLLPLALLLHAARPGSGSGAQAAEVQLVESGGGLVQPGRSLRLSCAASGFTFNDYAMHWVRQAPGKGLEWVSTISWNSGSIGYADSVKGRFTISRDNAKKSLYLQMNSLRAEDTALYYCAKDIQYGNYYYGMDVWGQGTTVTVSSGGGGSGGGGSGGGGSEIVLTQSPATLSLSPGERATLSCRASQSVSSYLAWYQQKPGQAPRLLIYDASNRATGIPARFSGSGSGTDFTLTISSLEPEDFAVYYCQQRSNWPITFGQGTRLEIKRSDPASGAGSGSGSAKNESAASSTGKTPAAEETVTTILGMLASPYHYLIIIVVLVIILAVVVVGFSCRKKFISYLKGICSGGGGGPERVHRVLFRRRSCPSRVPGAEDNARNETLSNRYLQPTQVSEQEIQGQELAELTGVTVELPEEPQRLLEQAEAEGCQRRRLLVPVNDADSADISTLLDASATLEEGHAKETIQDQLVGSEKLFYEEDEAGSATSCLSHG

SEQ ID NO: 5706 - protein, 504 aa, Artificial Sequence
  Description of Artificial Sequence: Synthetic Chimeric Antigen Receptor sequence
MALPVTALLLPLALLLHAARPGSGSGAQAAEVQLVESGGGLVQPGRSLRLSCAASGFTFNDYAMHWVRQAPGKGLEWVSTISWNSGSIGYADSVKGRFTISRDNAKKSLYLQMNSLRAEDTALYYCAKDIQYGNYYYGMDVWGQGTTVTVSSGGGGSGGGGSGGGGSEIVLTQSPATLSLSPGERATLSCRASQSVSSYLAWYQQKPGQAPRLLIYDASNRATGIPARFSGSGSGTDFTLTISSLEPEDFAVYYCQQRSNWPITFGQGTRLEIKRSDPASGAGSGSGSAGHSGGSSLPPTGPPSTPGLGRYLEVLIGVSVAFVLLLFLLLFLLLRRQRHSKHRTSDQRKTDFQRPAGAAETEPKDRGLLRRSSPAADVQEENLYAAVKDTQSEDRVELDSQSPHDEDPQAVTYAPVKHSSPRREMASPPSSLSGEFLDTKDRQVEEDRQMDTEAAASEASQDVTYAQLHSLTLRRKATEPPPSQEGEPPAEPSIYATLAIHSHG

SEQ ID NO: 5707 - protein, 513 aa, Artificial Sequence
  Description of Artificial Sequence: Synthetic Chimeric Antigen Receptor sequence
MALPVTALLLPLALLLHAARPGSGSGAQAAEVQLVESGGGLVQPGRSLRLSCAASGFTFNDYAMHWVRQAPGKGLEWVSTISWNSGSIGYADSVKGRFTISRDNAKKSLYLQMNSLRAEDTALYYCAKDIQYGNYYYGMDVWGQGTTVTVSSGGGGSGGGGSGGGGSEIVLTQSPATLSLSPGERATLSCRASQSVSSYLAWYQQKPGQAPRLLIYDASNRATGIPARFSGSGSGTDFTLTISSLEPEDFAVYYCQQRSNWPITFGQGTRLEIKRSDPASGAGSGSGSAVYSLPQLLGPSCSWEAEGLHCRCSFRAWPAPSLCWRLEEKPLEGNSSQGSFKVNSSSPGPWANSSLILHGGLNSDLKVSCKAWNIYGSQSGSVLLLQGRSNLGTGVVPAALGGAGVMALLCICLCLIFFLIVKARRKQAAGRPEKMDDEDPIMGTITSGSRKKPWPDSPGDQASPPGDAPPLEEQKELHYASLSFSEMKSREPKDQEAPSTTEYSEIKTSKSHG

SEQ ID NO: 5708 - protein, 522 aa, Artificial Sequence
  Description of Artificial Sequence: Synthetic Chimeric Antigen Receptor sequence
MALPVTALLLPLALLLHAARPGSGSGAQAAEVQLVESGGGLVQPGRSLRLSCAASGFTFNDYAMHWVRQAPGKGLEWVSTISWNSGSIGYADSVKGRFTISRDNAKKSLYLQMNSLRAEDTALYYCAKDIQYGNYYYGMDVWGQGTTVTVSSGGGGSGGGGSGGGGSEIVLTQSPATLSLSPGERATLSCRASQSVSSYLAWYQQKPGQAPRLLIYDASNRATGIPARFSGSGSGTDFTLTISSLEPEDFAVYYCQQRSNWPITFGQGTRLEIKRSDPASGAGSGSGSAGSLEGPRPSPTRSVSTAAGPEDQPLMPTGSVPHSGLRRHWEVLIGVLVVSILLLSLLLFLLLQHWRQGKHRTLAQRQADFQRPPGAAEPEPKDGGLQRRSSPAADVQGENFCAAVKNTQPEDGVEMDTRQSPHDEDPQAVTYAKVKHSRPRREMASPPSPLSGEFLDTKDRQAEEDRQMDTEAAASEAPQDVTYAQLHSFTLRQKATEPPPSQEGASPAEPSVYATLAIHSHG

SEQ ID NO: 5709 - protein, 531 aa, Artificial Sequence
  Description of Artificial Sequence: Synthetic Chimeric Antigen Receptor sequence
MALPVTALLLPLALLLHAARPGSGSGAQAAEVQLVESGGGLVQPGRSLRLSCAASGFTFNDYAMHWVRQAPGKGLEWVSTISWNSGSIGYADSVKGRFTISRDNAKKSLYLQMNSLRAEDTALYYCAKDIQYGNYYYGMDVWGQGTTVTVSSGGGGSGGGGSGGGGSEIVLTQSPATLSLSPGERATLSCRASQSVSSYLAWYQQKPGQAPRLLIYDASNRATGIPARFSGSGSGTDFTLTISSLEPEDFAVYYCQQRSNWPITFGQGTRLEIKRSDPASGAGSGSGSAVHKESGNGHNIWVILVVTLVVPLLLVAVLIVCCCIGSGCGGDPKCMDRVCFWRLGLLRGPGAEDNAHNEILSNADSLSTFVSEQQMESQEPADLTGVTVQSPGEAQCLLGPAEAEGSQRRRLLVPANGADPTETLMLFFDKFANIVPFDSWDQLMRQLDLTKNEIDVVRAGTAGPGDALYAMLMKWVNKTGRNASIHTLLDALERMEERHAKEKIQDLLVDSGKFIYLEDGTGSAVSLESHG

SEQ ID NO: 5710 - protein, 538 aa, Artificial Sequence
  Description of Artificial Sequence: Synthetic Chimeric Antigen Receptor sequence
MALPVTALLLPLALLLHAARPGSGSGAQAAEVQLVESGGGLVQPGRSLRLSCAASGFTFNDYAMHWVRQAPGKGLEWVSTISWNSGSIGYADSVKGRFTISRDNAKKSLYLQMNSLRAEDTALYYCAKDIQYGNYYYGMDVWGQGTTVTVSSGGGGSGGGGSGGGGSEIVLTQSPATLSLSPGERATLSCRASQSVSSYLAWYQQKPGQAPRLLIYDASNRATGIPARFSGSGSGTDFTLTISSLEPEDFAVYYCQQRSNWPITFGQGTRLEIKRSDPASGAGSGSGSAVHYPPQLLGPSCSWEAEGLHCSCSSQASPAPSLRWWLGEELLEGNSSQGSFEVTPSSAGPWANSSLSLHGGLSSGLRLRCKAWNVHGAQSGSVFQLLPGKLEHGGGLGLGAALGAGVAALLAFCSCLVVFRVKICRKEARKRAAAEQDVPSTLGPISQGHQHECSAGSSQDHPPPGAATYTPGKGEEQELHYASLSFQGLRLWEPADQEAPSTTEYSEIKIHTGQPLRGPGFGLQLEREMSGMVPKSHG

SEQ ID NO: 5711 - protein, 548 aa, Artificial Sequence
  Description of Artificial Sequence: Synthetic Chimeric Antigen Receptor sequence
MALPVTALLLPLALLLHAARPGSGSGAQAAEVQLVESGGGLVQPGRSLRLSCAASGFTFNDYAMHWVRQAPGKGLEWVSTISWNSGSIGYADSVKGRFTISRDNAKKSLYLQMNSLRAEDTALYYCAKDIQYGNYYYGMDVWGQGTTVTVSSGGGGSGGGGSGGGGSEIVLTQSPATLSLSPGERATLSCRASQSVSSYLAWYQQKPGQAPRLLIYDASNRATGIPARFSGSGSGTDFTLTISSLEPEDFAVYYCQQRSNWPITFGQGTRLEIKRSDPASGAGSGSGSAVHYSPKLLGPSCSWEAEGLHCSCSSQASPAPSLRWWLGEELLEGNSSQDSFEVTPSSAGPWANSSLSLHGGLSSGLRLRCEAWNVHGAQSGSILQLPDKKGLISTAFSNGAFLGIGITALLFLCLALIIMKILPKRRTQTETPRPRFSRHSTILDYINVVPTAGPLAQKRNQKATPNSPRTPLPPGAPSPESKKNQKKQYQLPSFPEPKSSTQAPESQESQEELHYATLNFPGVRPRPEARMPKGTQADYAEVKFQSHG

SEQ ID NO: 5712 - protein, 554 aa, Artificial Sequence
  Description of Artificial Sequence: Synthetic Chimeric Antigen Receptor sequence
MALPVTALLLPLALLLHAARPGSGSGAQAAEVQLVESGGGLVQPGRSLRLSCAASGFTFNDYAMHWVRQAPGKGLEWVSTISWNSGSIGYADSVKGRFTISRDNAKKSLYLQMNSLRAEDTALYYCAKDIQYGNYYYGMDVWGQGTTVTVSSGGGGSGGGGSGGGGSEIVLTQSPATLSLSPGERATLSCRASQSVSSYLAWYQQKPGQAPRLLIYDASNRATGIPARFSGSGSGTDFTLTISSLEPEDFAVYYCQQRSNWPITFGQGTRLEIKRSDPASGAGSGSGSAVHKESGTKHSGEAPAVEETVTSSPGTPASPCSLSGIIIGVTVAAVVLIVAVFVCKSLLWKKVLPYLKGICSGGGGDPERVDRSSQRPGAEDNVLNEIVSILQPTQVPEQEMEVQEPAEPTGVNMLSPGESEHLLEPAEAERSQRRRLLVPANEGDPTETLRQCFDDFADLVPFDSWEPLMRKLGLMDNEIKVAKAEAAGHRDTLYTMLIKWVNKTGRDASVHTLLDALETLGERLAKQKIEDHLLSSGKFMYLEGNADSAMSSHG

SEQ ID NO: 5713 - protein, 284 aa, Artificial Sequence
  Description of Artificial Sequence: Synthetic Chimeric Antigen Receptor sequence
MALPVTALLLPLALLLHAARPEVQLQQSGPGLVKPSQTLSLTCAISGDSVLSNSDTWNWIRQSPSRGLEWLGRTYHRSTWYDDYASSVRGRVSINVDTSKNQYSLQLNAVTPEDTGAYYCARDRLQDGNSWSDAFDVWGQGTMVTVSSGGGGSGGGGSGGGGSQSALTQPASVSGSPGQSITISCTGTSSDVGGYNYVSWYQQHPGKAPKLMIYDVSNRPSGVSNRFSGSKSGNTASLTISGLQAEDEADYYCSSYTSSSTPYVFGTGTQLTVLGSHHHHHHHH

SEQ ID NO: 5714 - protein, 485 aa, Artificial Sequence
  Description of Artificial Sequence: Synthetic Chimeric Antigen Receptor sequence
MALPVTALLLPLALLLHAARPEVQLVESGGGLVKPGGSLRLSCVASGFTFSNAWMNWVRQAPGKGLEWVGRIKSKTDGGTADYAAPVKGRFTISRDDSKNTMYLQMNSLKTEDTGVYYCITGATDVWGQGTTVTVSSGGGGSGGGGSGGGGSSYVLTQPPSASGTPGQRVTISCSGSSSNIGSNYVYWYQQLPGTAPKLLIYRNNQRPSGVPDRFSGSKSGTSASLAISGLRSEDEADYYCAAWDDSLSGPVFGGGTKLTVLTTTPAPRPPTPAPTIASQPLSLRPEACRPAAGGAVHTRGLDFACDIYIWAPLAGTCGVLLLSLVITLYCKRGRKKLLYIFKQPFMRPVQTTQEEDGCSCRFPEEEEGGCELRVKFSRSADAPAYKQGQNQLYNELNLGRREEYDVLDKRRGRDPEMGGKPRRKNPQEGLYNELQKDKMAEAYSEIGMKGERRRGKGHDGLYQGLSTATKDTYDALHMQALPPR

SEQ ID NO: 5715 - protein, 485 aa, Artificial Sequence
  Description of Artificial Sequence: Synthetic Chimeric Antigen Receptor sequence
MALPVTALLLPLALLLHAARPQVQLVQSGAEVKKPGASVKVSCKASGYTFTSYYMHWVRQAPGQGLEWMGIINPSGGSTSYAQKFQGRVTMTRDTSTSTVYMELSSLRSEDTAVYYCARGDYYMDVWGKGTTVTVSSGGGGSGGGGSGGGGSQSALTQPASASGSPGQSVTISCTGTSSDVGGYNYVSWYQQHPGKAPKLMIYEVSKRPSGVPDRFSGSKSGNTASLTISGLQAEDEADYYCSSYTSSGTLVFGGGTKLTVLTTTPAPRPPTPAPTIASQPLSLRPEACRPAAGGAVHTRGLDFACDIYIWAPLAGTCGVLLLSLVITLYCKRGRKKLLYIFKQPFMRPVQTTQEEDGCSCRFPEEEEGGCELRVKFSRSADAPAYKQGQNQLYNELNLGRREEYDVLDKRRGRDPEMGGKPRRKNPQEGLYNELQKDKMAEAYSEIGMKGERRRGKGHDGLYQGLSTATKDTYDALHMQALPPR

SEQ ID NO: 5716 - protein, 486 aa, Artificial Sequence
  Description of Artificial Sequence: Synthetic Chimeric Antigen Receptor sequence
MALPVTALLLPLALLLHAARPQVQLVQSGAEVKKPGASVKVSCKASGYTFTSYYMHWVRQAPGQGLEWMGIINPSGGSTSYAQKFQGRVTMTRDTSTSTVYMELSSLRSEDTAVYYCARDLDVSLDIWGQGTMVTVSSGGGGSGGGGSGGGGSQSALTQPASVSGSPGQSITISCSGTSSDVGGYNSVSWYQQYPGKAPKLMIYDVNNRPSGVSSRFSGSKSGNTASLTISGLQAEDEADYYCSSYTSSSTLFFGAGTKVTVLTTTPAPRPPTPAPTIASQPLSLRPEACRPAAGGAVHTRGLDFACDIYIWAPLAGTCGVLLLSLVITLYCKRGRKKLLYIFKQPFMRPVQTTQEEDGCSCRFPEEEEGGCELRVKFSRSADAPAYKQGQNQLYNELNLGRREEYDVLDKRRGRDPEMGGKPRRKNPQEGLYNELQKDKMAEAYSEIGMKGERRRGKGHDGLYQGLSTATKDTYDALHMQALPPR

SEQ ID NO: 5717 - protein, 487 aa, Artificial Sequence
  Description of Artificial Sequence: Synthetic Chimeric Antigen Receptor sequence
MALPVTALLLPLALLLHAARPEVQLVESGAEVKKPGASVKVSCKASGYTFTSYYMHWVRQAPGQGLEWMGIINPSGGSTSYAQKFQGRVTMTRDTSTSTAYMELSSLRSEDTAVYYCAREAGVVAVDYWGQGTLVTVSSGGGGSGGGGSGGGGSQSALTQPASVSGSPGQSITISCTGTSSDVGGYNYVSWYQQHPGKAPKLMIYDVSNRPSGVSNRFSGSKSGNTASLTISGLQAEDEADYYCSSYTSSSTWVFGGGTKLTVLTTTPAPRPPTPAPTIASQPLSLRPEACRPAAGGAVHTRGLDFACDIYIWAPLAGTCGVLLLSLVITLYCKRGRKKLLYIFKQPFMRPVQTTQEEDGCSCRFPEEEEGGCELRVKFSRSADAPAYKQGQNQLYNELNLGRREEYDVLDKRRGRDPEMGGKPRRKNPQEGLYNELQKDKMAEAYSEIGMKGERRRGKGHDGLYQGLSTATKDTYDALHMQALPPR

SEQ ID NO: 5718 - protein, 488 aa, Artificial Sequence
  Description of Artificial Sequence: Synthetic Chimeric Antigen Receptor sequence
MALPVTALLLPLALLLHAARPEVQLVESGAEVKKPGSSVKVSCKASGGTFSSYAISWVRQAPGQGLEWMGGIIPIFGTANYAQKFQGRVTITADESTSTAYMELSSLRSEDTAVYYCARDHKVVRFGYWGQGTLVTVSSGGGGSGGGGSGGGGSHVILTQPPSASASLGASVKLTCTLSSGHSSYAIAWHQQQPEKGPRYLMKVNSDGSLSKGDGIPDRFSGSTSGAERYLTISSLQSEDEADYYCQTWGSGMAIFGGGTKLTVLTTTPAPRPPTPAPTIASQPLSLRPEACRPAAGGAVHTRGLDFACDIYIWAPLAGTCGVLLLSLVITLYCKRGRKKLLYIFKQPFMRPVQTTQEEDGCSCRFPEEEEGGCELRVKFSRSADAPAYKQGQNQLYNELNLGRREEYDVLDKRRGRDPEMGGKPRRKNPQEGLYNELQKDKMAEAYSEIGMKGERRRGKGHDGLYQGLSTATKDTYDALHMQALPPR

SEQ ID NO: 5719 - protein, 488 aa, Artificial Sequence
  Description of Artificial Sequence: Synthetic Chimeric Antigen Receptor sequence
MALPVTALLLPLALLLHAARPQVQLVQSGAEVKKPGASVKVSCKASGYTFTSYYMHWVRQAPGQGLEWMGIINPSGGSTSYAQKFQGRVTMTRDTSISTAYMELSRLRSDDTAVYYCAREMDDSSGPDYWGQGTLVTVSSGGGGSGGGGSGGGGSQSALTQPASVSGSPGQSITISCTGTSSDVGGYNYVSWYQQHPGKAPKLMIYEVSNRPSGVSNRFSGSKSGNTASLTISGLQAEDEADYYCSSYTSSSTLVFGTGTKLTVLTTTPAPRPPTPAPTIASQPLSLRPEACRPAAGGAVHTRGLDFACDIYIWAPLAGTCGVLLLSLVITLYCKRGRKKLLYIFKQPFMRPVQTTQEEDGCSCRFPEEEEGGCELRVKFSRSADAPAYKQGQNQLYNELNLGRREEYDVLDKRRGRDPEMGGKPRRKNPQEGLYNELQKDKMAEAYSEIGMKGERRRGKGHDGLYQGLSTATKDTYDALHMQALPPR

SEQ ID NO: 5720 - protein, 489 aa, Artificial Sequence
  Description of Artificial Sequence: Synthetic Chimeric Antigen Receptor sequence
MALPVTALLLPLALLLHAARPEVQLVESGGGLVQPGRSLRLSCAASGFTFDDYAMHWVRQAPGKGLEWVSGISWNSGSIGYADSVKGRFTISRDNAKNSLYLQMNSLRAEDTALYYCAKDKGGGYYDFWSGSDYWGQGTLVTVSSGGGGSGGGGSGGGGSSSELTQDPAVSVALGQTVRITCQGDSLRSYYASWYQQKPGQAPVLVIYGKNNRPSGIPDRFSGSSSGNTASLTITGAQAEDEADYYCNSRDSSGWVFGGGTKLTVLTTTPAPRPPTPAPTIASQPLSLRPEACRPAAGGAVHTRGLDFACDIYIWAPLAGTCGVLLLSLVITLYCKRGRKKLLYIFKQPFMRPVQTTQEEDGCSCRFPEEEEGGCELRVKFSRSADAPAYKQGQNQLYNELNLGRREEYDVLDKRRGRDPEMGGKPRRKNPQEGLYNELQKDKMAEAYSEIGMKGERRRGKGHDGLYQGLSTATKDTYDALHMQALPPR

SEQ ID NO: 5721 - protein, 489 aa, Artificial Sequence
  Description of Artificial Sequence: Synthetic Chimeric Antigen Receptor sequence
MALPVTALLLPLALLLHAARPQVQLQESGPGLVKPSETLSLTCTVSGGSISSSSYYWGWIRQPPGKGLEWIGSIYYSGSTYYNPSLKSRVTISVDTSKNQFSLKLSSVTAADTAVYYCARGRMDTAMAQIWGQGTMVTVSSGDGGSGGGGSGGGGSNFMLTQPHSVSESPGKTVTIPCTGSSGSFASSYVQWYQQRPGSAPATVIYEDNQRPSGVPDRFSGSVDSSSNSASLTISGLKTEDEAVYYCQSYDGATWVFGGGTKLTVLTTTPAPRPPTPAPTIASQPLSLRPEACRPAAGGAVHTRGLDFACDIYIWAPLAGTCGVLLLSLVITLYCKRGRKKLLYIFKQPFMRPVQTTQEEDGCSCRFPEEEEGGCELRVKFSRSADAPAYKQGQNQLYNELNLGRREEYDVLDKRRGRDPEMGGKPRRKNPQEGLYNELQKDKMAEAYSEIGMKGERRRGKGHDGLYQGLSTATKDTYDALHMQALPPR

SEQ ID NO: 5722 - protein, 489 aa, Artificial Sequence
  Description of Artificial Sequence: Synthetic Chimeric Antigen Receptor sequence
MALPVTALLLPLALLLHAARPQVQLVQSGAEVKKPGASVKVSCKASGYTFTSYYMHWVRQAPGQGLEWMGIINPSGGSTSYAQKFQGRVTMTRDTSTSTVYMELSSLRSEDTAVYYCARGSGSLGDAFDIWGQGTMVTVSSGGGGSGGGGSGGGGSQSALTQPASVSGSPGQSITISCTGSSSDVGGYNYVSWYQQHPGKAPKLMIYEVSNRPSGVSNRFSGSKSGNTASLTISGLQAEDEADYYCSSYTSSSTLVFGTGTKVTVLTTTPAPRPPTPAPTIASQPLSLRPEACRPAAGGAVHTRGLDFACDIYIWAPLAGTCGVLLLSLVITLYCKRGRKKLLYIFKQPFMRPVQTTQEEDGCSCRFPEEEEGGCELRVKFSRSADAPAYKQGQNQLYNELNLGRREEYDVLDKRRGRDPEMGGKPRRKNPQEGLYNELQKDKMAEAYSEIGMKGERRRGKGHDGLYQGLSTATKDTYDALHMQALPPR

SEQ ID NO: 5723 - protein, 490 aa, Artificial Sequence
  Description of Artificial Sequence: Synthetic Chimeric Antigen Receptor sequence
MALPVTALLLPLALLLHAARPEVQLVESGGGLVQPGRSLRLSCAASGFTFDDYAMHWVRQAPGKGLEWVSGISWNSGSIGYADSVKGRFTISRDNAKNSLYLQMNSLRAEDTALYYCAKGLSSWHFHDALDIWGQGTMVTVSSGGGGSGGGGSGGGGSSSELTQDPAVSVALGQTVRITCQGDSLRSYYASWYQQKPGQAPVLVIYGKNNRPSGIPDRFSGSSSGNTASLTITGAQAEDEADYYCNSRDSSGNHLWVFGGGTKLTVLTTTPAPRPPTPAPTIASQPLSLRPEACRPAAGGAVHTRGLDFACDIYIWAPLAGTCGVLLLSLVITLYCKRGRKKLLYIFKQPFMRPVQTTQEEDGCSCRFPEEEEGGCELRVKFSRSADAPAYKQGQNQLYNELNLGRREEYDVLDKRRGRDPEMGGKPRRKNPQEGLYNELQKDKMAEAYSEIGMKGERRRGKGHDGLYQGLSTATKDTYDALHMQALPPR

SEQ ID NO: 5724 - protein, 490 aa, Artificial Sequence
  Description of Artificial Sequence: Synthetic Chimeric Antigen Receptor sequence
MALPVTALLLPLALLLHAARPQVQLVQSGAEVKKPGASVKVSCKASGYTFTSYGISWVRQAPGQGLEWMGWISAYNGNTNYAQKLQGRVTMTTDTSTSTAYMELRSLRSDDTAVYYCASFSSSDSYDYWGQGTLVTVSSGGGGSGGGGSGGGGSGGGGSEIVLTQSPATLSVSPGERATLSCRASQSVTSNLAWYQQKPGQAPRLLIYAASTRATGIPARFSGSGSGTEFTLTISSMQSEDFAVYFCQQYHTWPPLTFGGGTKVEIKTTTPAPRPPTPAPTIASQPLSLRPEACRPAAGGAVHTRGLDFACDIYIWAPLAGTCGVLLLSLVITLYCKRGRKKLLYIFKQPFMRPVQTTQEEDGCSCRFPEEEEGGCELRVKFSRSADAPAYKQGQNQLYNELNLGRREEYDVLDKRRGRDPEMGGKPRRKNPQEGLYNELQKDKMAEAYSEIGMKGERRRGKGHDGLYQGLSTATKDTYDALHMQALPPR

SEQ ID NO: 5725 - protein, 490 aa, Artificial Sequence
  Description of Artificial Sequence: Synthetic Chimeric Antigen Receptor sequence
MALPVTALLLPLALLLHAARPQVQLVQSGAEVKKPGASVKVSCKASGYTFTSYYMHWVRQAPGQGLEWMGIINPSGGSTSYAQKFQGRVTMTRDTSTSTVYMELSSLRAEDTAVYYCARGGYGDYLDAFDIWGQGTTVTVSSGGGGSGGGGSGSGGSQSALTQPASVSGSPGQSITISCTGTSSDVGGYNYVSWYQQHPGKAPKLMIYEVSNRPSGVSNRFSGSKSGNTASLTISGLQAEDEADYYCSSYTSSSTLVFGTGTQLTVLTTTPAPRPPTPAPTIASQPLSLRPEACRPAAGGAVHTRGLDFACDIYIWAPLAGTCGVLLLSLVITLYCKRGRKKLLYIFKQPFMRPVQTTQEEDGCSCRFPEEEEGGCELRVKFSRSADAPAYKQGQNQLYNELNLGRREEYDVLDKRRGRDPEMGGKPRRKNPQEGLYNELQKDKMAEAYSEIGMKGERRRGKGHDGLYQGLSTATKDTYDALHMQALPPR

SEQ ID NO: 5726 - protein, 490 aa, Artificial Sequence
  Description of Artificial Sequence: Synthetic Chimeric Antigen Receptor sequence
MALPVTALLLPLALLLHAARPQVQLVQSGAEVKKPGASVKVSCKASGYTFTSYYMHWVRQAPGQGLEWMGIINPSGGSTSYAQKFQGRVTMTRDTSTSTVYMELSSLRSEDTAVYYCARDDDFWSGSGAFDIWGQGTTVTVSSGGGGSGGGGSGGGGSSSELTQDPAVSVALGQTVRITCQGDSLRSYYASWYQQKPGQAPVLVIYGKNNRPSGIPDRFSGSSSGNTASLTITGAQAEDEADYYCNSRDSSGNHPVVFGGGTKLTVLTTTPAPRPPTPAPTIASQPLSLRPEACRPAAGGAVHTRGLDFACDIYIWAPLAGTCGVLLLSLVITLYCKRGRKKLLYIFKQPFMRPVQTTQEEDGCSCRFPEEEEGGCELRVKFSRSADAPAYKQGQNQLYNELNLGRREEYDVLDKRRGRDPEMGGKPRRKNPQEGLYNELQKDKMAEAYSEIGMKGERRRGKGHDGLYQGLSTATKDTYDALHMQALPPR

SEQ ID NO: 5727 - protein, 490 aa, Artificial Sequence
  Description of Artificial Sequence: Synthetic Chimeric Antigen Receptor sequence
MALPVTALLLPLALLLHAARPQVQLVQSGAEVKKPGASVKVSCKASGYTFTSYYMHWVRQAPGQGLEWMGIINPSGGSTSYAQKFQGRVTMTRDTSTSTVYMELSSLRSEDTAVYYCARDGFGELSGAFDIWGQGTMVTVSSGGGGSGGGGSGGGGSQSALTQPASVSGSPGQSITISCTGTSSDVGGYNYVSWYQQHPGKAPKLMIYDVSNRPSGVSNRFSGSKSGNTASLTISGLQAEDEADYYCSSYASSSTLVFGGGTKVTVLTTTPAPRPPTPAPTIASQPLSLRPEACRPAAGGAVHTRGLDFACDIYIWAPLAGTCGVLLLSLVITLYCKRGRKKLLYIFKQPFMRPVQTTQEEDGCSCRFPEEEEGGCELRVKFSRSADAPAYKQGQNQLYNELNLGRREEYDVLDKRRGRDPEMGGKPRRKNPQEGLYNELQKDKMAEAYSEIGMKGERRRGKGHDGLYQGLSTATKDTYDALHMQALPPR

SEQ ID NO: 5728 - protein, 490 aa, Artificial Sequence
  Description of Artificial Sequence: Synthetic Chimeric Antigen Receptor sequence
MALPVTALLLPLALLLHAARPQVQLVQSGAEVKKPGASVKVSCKASGYTFTSYYMHWVRQAPGQGLEWMGIINPSGGSTSYAQKFQGRVTMTRDTSTSTVYMELSSLRSEDTAVYYCARGSYGDYGDAFDIWGQGTTVTVSSGGGGSGGGGSGSGGSQSALTQPASVSGSPGQSITISCTGTSSDVGGYKYVSWYQQHPGKAPKLMIYDVSNRPSGVSNRFSGSKSGNTASLTISGLQAEDEADYYCSSYTSSSTLVFGGGTKLTVLTTTPAPRPPTPAPTIASQPLSLRPEACRPAAGGAVHTRGLDFACDIYIWAPLAGTCGVLLLSLVITLYCKRGRKKLLYIFKQPFMRPVQTTQEEDGCSCRFPEEEEGGCELRVKFSRSADAPAYKQGQNQLYNELNLGRREEYDVLDKRRGRDPEMGGKPRRKNPQEGLYNELQKDKMAEAYSEIGMKGERRRGKGHDGLYQGLSTATKDTYDALHMQALPPR

SEQ ID NO: 5729 - protein, 491 aa, Artificial Sequence
  Description of Artificial Sequence: Synthetic Chimeric Antigen Receptor sequence
MALPVTALLLPLALLLHAARPEVQLQQSGPGLVKPSLTLSLTCAISGDSVSSNSATWTWIRQSPSRGLEWLGRTYYRSTWYNDYAVSVKSRITINPDTSKNQFSLQLNSVTPEDTAVYYCAREGSGSYYAYWGQGTLVTVSSGGGGSGGGGSGGGGSQSALTQPASVSGSPGQSITISCTGTSSDVGGYNYVSWYQQHPGKAPKLMIYDVSNRPSGVSNRFSGSKSGNTASLTISGLQAEDEADYYCSSYTSSSTLYVFGTGTKVTVLTTTPAPRPPTPAPTIASQPLSLRPEACRPAAGGAVHTRGLDFACDIYIWAPLAGTCGVLLLSLVITLYCKRGRKKLLYIFKQPFMRPVQTTQEEDGCSCRFPEEEEGGCELRVKFSRSADAPAYKQGQNQLYNELNLGRREEYDVLDKRRGRDPEMGGKPRRKNPQEGLYNELQKDKMAEAYSEIGMKGERRRGKGHDGLYQGLSTATKDTYDALHMQALPPR

SEQ ID NO: 5730 - protein, 491 aa, Artificial Sequence
  Description of Artificial Sequence: Synthetic Chimeric Antigen Receptor sequence
MALPVTALLLPLALLLHAARPEVQLVESGAEVKKPGASVKVSCKASGYTFTSYYMHWVRQAPGQGLEWMGIINPSGGSTSYAQKFQGRVTMTRDTSTSTVYMELSSLRSEDTAVYYCARGPIGCSGGSCLDYWGQGTLVTVSSGGGGSGGGGSGGGGSQSALTQPAYVSGSPGQSITISCTGTNSDVGRYNYVSWYQQHPGKAPKLMIYEVSYRPSGVSNRFSGSKSGNTASLTISGLQAEDEADYYCSSYTTSSTLDFGTGTKVTVLTTTPAPRPPTPAPTIASQPLSLRPEACRPAAGGAVHTRGLDFACDIYIWAPLAGTCGVLLLSLVITLYCKRGRKKLLYIFKQPFMRPVQTTQEEDGCSCRFPEEEEGGCELRVKFSRSADAPAYKQGQNQLYNELNLGRREEYDVLDKRRGRDPEMGGKPRRKNPQEGLYNELQKDKMAEAYSEIGMKGERRRGKGHDGLYQGLSTATKDTYDALHMQALPPR

SEQ ID NO: 5731 - protein, 491 aa, Artificial Sequence
  Description of Artificial Sequence: Synthetic Chimeric Antigen Receptor sequence
MALPVTALLLPLALLLHAARPEVQLVESGGGLVKPGGSLRLSCAASGFTFSDYYMSWIRQAPGKGLEWVSYISSSGSTIYYADSVKGRFTISRDNAKNSLYLQMNSLRAEDTAVYYCARDDFWSGSVDYWGQGTLVTVSSGGGGSGGGGSGGGGSGGGGSSYVLTQPPSVSVAPGKTATITCGGTNIGSKNVHWYQQKPGQAPVLAIYYDSDRPSGIPERFSGSNSGNTATLTISRVEAGDEADYFCQVWDSSSDHWVFGGGTKLTVLTTTPAPRPPTPAPTIASQPLSLRPEACRPAAGGAVHTRGLDFACDIYIWAPLAGTCGVLLLSLVITLYCKRGRKKLLYIFKQPFMRPVQTTQEEDGCSCRFPEEEEGGCELRVKFSRSADAPAYKQGQNQLYNELNLGRREEYDVLDKRRGRDPEMGGKPRRKNPQEGLYNELQKDKMAEAYSEIGMKGERRRGKGHDGLYQGLSTATKDTYDALHMQALPPR

SEQ ID NO: 5732 - protein, 491 aa, Artificial Sequence
  Description of Artificial Sequence: Synthetic Chimeric Antigen Receptor sequence
MALPVTALLLPLALLLHAARPEVQLVESGGGLVQPGGSLRLSCAASGFTFSSYAMHWVRQAPGKGLEYVSAISSNGGSTYYANSVKDRFTISRDNSKNTLYLQMGSLRAEDMAVYYCARVHSSGYYHPGPNDYWGQGTLVTVSSGGGGSGGGGSGGGGSSSELTQDPAVSVALGQTVRITCQGDSLRTYYATWYQQKPGQAPVLVFYDENNRPSGIPDRFSGSSSGNTASLTITGTQAEDEADYYCSSRDSSGNPSCVFGGGTKLTVLTTTPAPRPPTPAPTIASQPLSLRPEACRPAAGGAVHTRGLDFACDIYIWAPLAGTCGVLLLSLVITLYCKRGRKKLLYIFKQPFMRPVQTTQEEDGCSCRFPEEEEGGCELRVKFSRSADAPAYKQGQNQLYNELNLGRREEYDVLDKRRGRDPEMGGKPRRKNPQEGLYNELQKDKMAEAYSEIGMKGERRRGKGHDGLYQGLSTATKDTYDALHMQALPPR

SEQ ID NO: 5733 - protein, 491 aa, Artificial Sequence
  Description of Artificial Sequence: Synthetic Chimeric Antigen Receptor sequence
MALPVTALLLPLALLLHAARPEVQLVESGGGLVQPGGSLRLSCAASGFTFSSYAMSWVRQAPGKGLEWVSYISSSSSTIYYADSVKGRFTISRDNAKNSLYLQMNSLRAEDTAVYYCARDGPIRYFDHSKAFDIWGQGTMVTVSSGGGGSGGGGSGGGGSSSELTQDPAVSVALGQTVRITCQGDSLRSYYASWYQQKPGQAPVLVIYGKNNRPSGIPDRFSGSSSGNTASLTITGAQAEDEADYYRNSRDSSGNPYVFGTGTKVTVLTTTPAPRPPTPAPTIASQPLSLRPEACRPAAGGAVHTRGLDFACDIYIWAPLAGTCGVLLLSLVITLYCKRGRKKLLYIFKQPFMRPVQTTQEEDGCSCRFPEEEEGGCELRVKFSRSADAPAYKQGQNQLYNELNLGRREEYDVLDKRRGRDPEMGGKPRRKNPQEGLYNELQKDKMAEAYSEIGMKGERRRGKGHDGLYQGLSTATKDTYDALHMQALPPR

SEQ ID NO: 5734 - protein, 491 aa, Artificial Sequence
  Description of Artificial Sequence: Synthetic Chimeric Antigen Receptor sequence
MALPVTALLLPLALLLHAARPQVQLVQSGAEVKKPGASVKVSCKASGYTFTGYYMHWVRQAPGQGLEWMGWINPNSGGTNYAQKFQGRVTMTRDTSISTAYMELSRLRSDDTAVYYCARDYWGYYGSGTLDYWGQGTLVTVSSGGGGSGGGGSGGGGSQSALTQPGSVSGSPGQSITISCTGTSSDVGGYNYVSWYQQHPGKAPKLIIYDVSSRPSGVSNRFSGSQSGNTASLTISGLQAEDEADYSCSSYAGSNTLVFGTGTKVTVLTTTPAPRPPTPAPTIASQPLSLRPEACRPAAGGAVHTRGLDFACDIYIWAPLAGTCGVLLLSLVITLYCKRGRKKLLYIFKQPFMRPVQTTQEEDGCSCRFPEEEEGGCELRVKFSRSADAPAYKQGQNQLYNELNLGRREEYDVLDKRRGRDPEMGGKPRRKNPQEGLYNELQKDKMAEAYSEIGMKGERRRGKGHDGLYQGLSTATKDTYDALHMQALPPR

SEQ ID NO: 5735 - protein, 491 aa, Artificial Sequence
  Description of Artificial Sequence: Synthetic Chimeric Antigen Receptor sequence
MALPVTALLLPLALLLHAARPQVQLVQSGAEVKKPGASVKVSCKASGYTFTSYYMHWVRQAPGQGLEWMGIINPSGGSTSYAQKFQGRVTMTRDTSTSTVYMELSSLRSEDTAVYYCARDLAAAGNYYYYGMDVWGQGTTVTVSSGGGGSGGGGSGGGGSSSELTQDPAVSVALGQTARITCQGDSLRSYFTSWYHQKPGQAPVLVIYGNNNRPSGIPDRFSGSSSGNTASLTITGAQAEDEGDYYCDSRDSSGDHLVFGGGTKLTVLTTTPAPRPPTPAPTIASQPLSLRPEACRPAAGGAVHTRGLDFACDIYIWAPLAGTCGVLLLSLVITLYCKRGRKKLLYIFKQPFMRPVQTTQEEDGCSCRFPEEEEGGCELRVKFSRSADAPAYKQGQNQLYNELNLGRREEYDVLDKRRGRDPEMGGKPRRKNPQEGLYNELQKDKMAEAYSEIGMKGERRRGKGHDGLYQGLSTATKDTYDALHMQALPPR

SEQ ID NO: 5736 - protein, 492 aa, Artificial Sequence
  Description of Artificial Sequence: Synthetic Chimeric Antigen Receptor sequence
MALPVTALLLPLALLLHAARPQVQLQESGPGLVKPSGTLSLTCAVSGASITSRHWWNWVRHSPGKGLEWIGQIYHSGTTTYNPSLGSRVTISVDKSKNQISLELRSVTAADTATYYCVRDYLELATYYGMDVWGQGTTVTVSSGGGGSGGGGSGGGGSEIVLTQSPLSLPVTPGEPASISCRSSQSLLYSDGYNYLDWYLQKPGQSPQLLIYLGSNRASGVPDRFSGSGSGTDFTLQISGVETEDVGVYYCMQALQTQSFGQGTKLEIKTTTPAPRPPTPAPTIASQPLSLRPEACRPAAGGAVHTRGLDFACDIYIWAPLAGTCGVLLLSLVITLYCKRGRKKLLYIFKQPFMRPVQTTQEEDGCSCRFPEEEEGGCELRVKFSRSADAPAYKQGQNQLYNELNLGRREEYDVLDKRRGRDPEMGGKPRRKNPQEGLYNELQKDKMAEAYSEIGMKGERRRGKGHDGLYQGLSTATKDTYDALHMQALPPR

SEQ ID NO: 5737 - protein, 492 aa, Artificial Sequence
  Description of Artificial Sequence: Synthetic Chimeric Antigen Receptor sequence
MALPVTALLLPLALLLHAARPQVQLVQSGAEVKKPGASVKVSCKASGYTFTSYYMHWVRQAPGQGLEWMGIINPSGGSTSYAQKFQGRVTMTRDTSTSTVYMELSSLRSEDTAVYYCARPEGVSYYDSSVLDYWGQGTLVTVSSGGGGSGGGGSGGGGSQSALTQPASVSGSPGQSITISCTGTSSDVGGYKHVSWYQHHPGKAPKLMIYDVSNRPSGVSNRFSGSKSGNTASLTVSGLQAEDEAHYYCVSYRNFNSLVFGTGTKVTVLTTTPAPRPPTPAPTIASQPLSLRPEACRPAAGGAVHTRGLDFACDIYIWAPLAGTCGVLLLSLVITLYCKRGRKKLLYIFKQPFMRPVQTTQEEDGCSCRFPEEEEGGCELRVKFSRSADAPAYKQGQNQLYNELNLGRREEYDVLDKRRGRDPEMGGKPRRKNPQEGLYNELQKDKMAEAYSEIGMKGERRRGKGHDGLYQGLSTATKDTYDALHMQALPPR

SEQ ID NO: 5738 - protein, 493 aa, Artificial Sequence
  Description of Artificial Sequence: Synthetic Chimeric Antigen Receptor sequence
MALPVTALLLPLALLLHAARPEVQLQQSGPGLVKPSQTLSLTCAISGDSVSSNSAAWNWIRQSPSRGLEWLGRTYYRSKWYNDYAVSVKSRITINPDTSKNQFSLQLNSVTPEDTAVYYCAREESSSGWYEGNWFDPWGQGTLVTVSSGGGGSGGGGSGGGGSSSELTQDPAVSVALGQTVRITCQGDSLRSYYASWYQQKPGQAPVLVIYGKNHRPSGIPDRFSGSSSGDTDSLTITGAQAEDEADYYCHSRDSSGNHLFGGGTKLTVLTTTPAPRPPTPAPTIASQPLSLRPEACRPAAGGAVHTRGLDFACDIYIWAPLAGTCGVLLLSLVITLYCKRGRKKLLYIFKQPFMRPVQTTQEEDGCSCRFPEEEEGGCELRVKFSRSADAPAYKQGQNQLYNELNLGRREEYDVLDKRRGRDPEMGGKPRRKNPQEGLYNELQKDKMAEAYSEIGMKGERRRGKGHDGLYQGLSTATKDTYDALHMQALPPR

SEQ ID NO: 5739 - protein, 494 aa, Artificial Sequence
  Description of Artificial Sequence: Synthetic Chimeric Antigen Receptor sequence
MALPVTALLLPLALLLHAARPQVQLQESGPGLVKPSETLSLTCSVSGGSINSYYWSWIRQAPGKGLEWIAFTSHSGNVKYNPSLTGRVTIAVDTSKNQFYLEVTSVTAADTAVYFCARGLDPLFAYDAFEIWGLGTMVTVSSGGGGSGGGGSGGGGSEIVLTQSPLSLPVTPGEPASISCRSSQSLLHSNGYNYLDWYLQKPGQSPQLLIYLGSNRASGVPDRFSGSGSGTDFTLKISRVEAEDVGVYYCMQVLQTPPLTFGGGTKVDIKRTTTPAPRPPTPAPTIASQPLSLRPEACRPAAGGAVHTRGLDFACDIYIWAPLAGTCGVLLLSLVITLYCKRGRKKLLYIFKQPFMRPVQTTQEEDGCSCRFPEEEEGGCELRVKFSRSADAPAYKQGQNQLYNELNLGRREEYDVLDKRRGRDPEMGGKPRRKNPQEGLYNELQKDKMAEAYSEIGMKGERRRGKGHDGLYQGLSTATKDTYDALHMQALPPR

SEQ ID NO: 5740 - protein, 494 aa, Artificial Sequence
  Description of Artificial Sequence: Synthetic Chimeric Antigen Receptor sequence
MALPVTALLLPLALLLHAARPQVQLVQSGAEVKKPGASVKVSCKASGYTFTSYYMHWVRQAPGQGLEWMGIINPSGGSTSYAQKFQGRVTMTRDTSTSTVYMELSSLRSEDTAVYYCAREDDSSGYTSPFDYWGQGTLVTVSSGGGGSGGGGSGGGGSGGGRSSYELTQPPSVSVAPGETASIACGGHNIRSKNVHWYQQKPGQAPVLVISYDGDRPSGIPERFSGSNLGSTATLTISRVEAGDEADYYCQVWDSDSDHYVFGTGTKVTVLTTTPAPRPPTPAPTIASQPLSLRPEACRPAAGGAVHTRGLDFACDIYIWAPLAGTCGVLLLSLVITLYCKRGRKKLLYIFKQPFMRPVQTTQEEDGCSCRFPEEEEGGCELRVKFSRSADAPAYKQGQNQLYNELNLGRREEYDVLDKRRGRDPEMGGKPRRKNPQEGLYNELQKDKMAEAYSEIGMKGERRRGKGHDGLYQGLSTATKDTYDALHMQALPPR

SEQ ID NO: 5741 - protein, 494 aa, Artificial Sequence
  Description of Artificial Sequence: Synthetic Chimeric Antigen Receptor sequence
MALPVTALLLPLALLLHAARPQVQLVQSGGGVVQPGRSLRLSCAASGFTFSSYAMSWVRQAPGKGLEWVSAISGSGGSTYYADSVKGRFTISRDNSKNTLYLQMNSLRAEDTAVYYCAKEPLFGVVEEDVDYWGQGTLVTVSSGGGGSGGGGSGGGGSDVVMTQSPLSLPVTPGEPASISCRSSQSLLAGNGHNYLDWYLQKPGQSPQLLIYLGSNRASGVPDRFSGSGSGTDFTLKISRVEAEDVGVYYCMQALQNPLTFGGGTKLEIKRTTTPAPRPPTPAPTIASQPLSLRPEACRPAAGGAVHTRGLDFACDIYIWAPLAGTCGVLLLSLVITLYCKRGRKKLLYIFKQPFMRPVQTTQEEDGCSCRFPEEEEGGCELRVKFSRSADAPAYKQGQNQLYNELNLGRREEYDVLDKRRGRDPEMGGKPRRKNPQEGLYNELQKDKMAEAYSEIGMKGERRRGKGHDGLYQGLSTATKDTYDALHMQALPPR

SEQ ID NO: 5742 - protein, 495 aa, Artificial Sequence
  Description of Artificial Sequence: Synthetic Chimeric Antigen Receptor sequence
MALPVTALLLPLALLLHAARPEVQLQQSGPGLVKPSQTLSLTCAISGDSVSSNSAAWNWIRQSPSRGLEWLGRTYYRSKWYNDYAVSVKSRITINPDTSKNQFSLQLNSVTPEDTAVYYCARDLGWIAVAGTFDYWGQGTLVTVSSGGGGSGGGGSGGGGSQSALTQPASVSGSPGQSITISCTGTSSDVGGYNYVSWYQQHPGKAPKLMIYDVSKRPSGVSNRFSGSKSGNTASLTISGLQAEDEADYYCSSYTSSSLNHVFGTGTKVTVLTTTPAPRPPTPAPTIASQPLSLRPEACRPAAGGAVHTRGLDFACDIYIWAPLAGTCGVLLLSLVITLYCKRGRKKLLYIFKQPFMRPVQTTQEEDGCSCRFPEEEEGGCELRVKFSRSADAPAYKQGQNQLYNELNLGRREEYDVLDKRRGRDPEMGGKPRRKNPQEGLYNELQKDKMAEAYSEIGMKGERRRGKGHDGLYQGLSTATKDTYDALHMQALPPR

SEQ ID NO: 5743 - protein, 495 aa, Artificial Sequence
  Description of Artificial Sequence: Synthetic Chimeric Antigen Receptor sequence
MALPVTALLLPLALLLHAARPQVQLVQSGGGLIQPGGSLRLSCAASGFTVSSNYMSWVRQAPGKGLEWVSVIYSGGSTYYADSVKGRFTISRDNSKNTLYLQMNSLRAEDTAVYYCASQSTPYDSSGYYSGDAFDIWGQGTMVTVSSGGGGSGGGGSGGGGSSYVLTQPPSASGTPGQRVTISCSGSSSNIGSNYVYWYQQLPGTAPKLLIYRNNQRPSGVPDRFSGSKSGTSASLAISGLRSEDEADYYCAAWDDSLSGYVFGTGTKLTVLTTTPAPRPPTPAPTIASQPLSLRPEACRPAAGGAVHTRGLDFACDIYIWAPLAGTCGVLLLSLVITLYCKRGRKKLLYIFKQPFMRPVQTTQEEDGCSCRFPEEEEGGCELRVKFSRSADAPAYKQGQNQLYNELNLGRREEYDVLDKRRGRDPEMGGKPRRKNPQEGLYNELQKDKMAEAYSEIGMKGERRRGKGHDGLYQGLSTATKDTYDALHMQALPPR

SEQ ID NO: 5744 - protein, 496 aa, Artificial Sequence
  Description of Artificial Sequence: Synthetic Chimeric Antigen Receptor sequence
MALPVTALLLPLALLLHAARPEVQLVESGAEVKKPGESLKISCKGSGYSFTGSWIGWGRQMPGKGLEWMGIIYPGDSDTRYSPSFQGQVTISADKSISTAYLQWSSLKASDTAMYYCARGFLRGGDCCGALDIWGQGTMVTVSSGGGGSGGGGSGGGGSDIVMTQSPLSLPVTPGEPASISCRSSQSLLHSNGYNYLDWYLQKPGQSPQLLIYLGSNRASGVPDRFSGSGSGTDFTLKISRVEAEDVGVYYCMQALQTPPWTFGQGTKLEIKRTTTPAPRPPTPAPTIASQPLSLRPEACRPAAGGAVHTRGLDFACDIYIWAPLAGTCGVLLLSLVITLYCKRGRKKLLYIFKQPFMRPVQTTQEEDGCSCRFPEEEEGGCELRVKFSRSADAPAYKQGQNQLYNELNLGRREEYDVLDKRRGRDPEMGGKPRRKNPQEGLYNELQKDKMAEAYSEIGMKGERRRGKGHDGLYQGLSTATKDTYDALHMQALPPR

SEQ ID NO: 5745 - protein, 496 aa, Artificial Sequence
  Description of Artificial Sequence: Synthetic Chimeric Antigen Receptor sequence
MALPVTALLLPLALLLHAARPQVQLVQSGAEVKKPGASVKVSCKASGYTFTSYDINWVRQATGQGLEWMGWMNPNSGNTGYAQKFQGRVTMTRNTSISTAYMELSSLRSEDTAVYYCARGDSNYWSYYGMDVWGQGTLVTVSSGGGGSGGGGSGGGGSGGGGSQSVLTQPRSVSGSPGQSVTISCTGTSSDVGGYNYVSWYQQHPGEAPKLIIYDADKRPSGISNRFSSGKSGNTASLTISGLQVEDEADYYCCSYAGGSTWVFGGGTKVTVLTTTPAPRPPTPAPTIASQPLSLRPEACRPAAGGAVHTRGLDFACDIYIWAPLAGTCGVLLLSLVITLYCKRGRKKLLYIFKQPFMRPVQTTQEEDGCSCRFPEEEEGGCELRVKFSRSADAPAYKQGQNQLYNELNLGRREEYDVLDKRRGRDPEMGGKPRRKNPQEGLYNELQKDKMAEAYSEIGMKGERRRGKGHDGLYQGLSTATKDTYDALHMQALPPR

SEQ ID NO: 5746 - protein, 497 aa, Artificial Sequence
  Description of Artificial Sequence: Synthetic Chimeric Antigen Receptor sequence
MALPVTALLLPLALLLHAARPEVQLQQSGPGLVKPSQTLSLTCAISGDSVLSNSDTWNWIRQSPSRGLEWLGRTYHRSTWYDDYASSVRGRVSINVDTSKNQYSLQLNAVTPEDTGVYYCARDRLQDGNSWSDAFDVWGQGTMVTVSSGGGGSGGGGSGGGGSQSALTQPASASGSPGQSVTISCTGTSSDVGGYNYVSWYQQHPGKAPKLMIYDVSNRPSGVSNRFSGSKSGNTASLTISGLQAEDEADYYCSSYTSSSTLYVFGTGTQLTVLTTTPAPRPPTPAPTIASQPLSLRPEACRPAAGGAVHTRGLDFACDIYIWAPLAGTCGVLLLSLVITLYCKRGRKKLLYIFKQPFMRPVQTTQEEDGCSCRFPEEEEGGCELRVKFSRSADAPAYKQGQNQLYNELNLGRREEYDVLDKRRGRDPEMGGKPRRKNPQEGLYNELQKDKMAEAYSEIGMKGERRRGKGHDGLYQGLSTATKDTYDALHMQALPPR

SEQ ID NO: 5747 - protein, 498 aa, Artificial Sequence
  Description of Artificial Sequence: Synthetic Chimeric Antigen Receptor sequence
MALPVTALLLPLALLLHAARPEVQLQQSGPGLVKPSQTLSLTCAISGDSVLSNSDTWNWIRQSPSRGLEWLGRTYHRSTWYDDYASSVRGRVSINVDTSKNQYSLQLNAVTPEDTGVYYCARDRLQDGNSWSDAFDVWGQGTMVTVSSGGGGSGGGGSGGGGSQSALTQPASVSGSPGQSITISCTGTSSDVGGYNYVSWYQQHPGKAPKLMIYDVSNRPSGVSNRFSGSKSGNTASLTISGLQAEDEADYYCSSYTSSSTLVYVFGTGTKVTVLTTTPAPRPPTPAPTIASQPLSLRPEACRPAAGGAVHTRGLDFACDIYIWAPLAGTCGVLLLSLVITLYCKRGRKKLLYIFKQPFMRPVQTTQEEDGCSCRFPEEEEGGCELRVKFSRSADAPAYKQGQNQLYNELNLGRREEYDVLDKRRGRDPEMGGKPRRKNPQEGLYNELQKDKMAEAYSEIGMKGERRRGKGHDGLYQGLSTATKDTYDALHMQALPPR

SEQ ID NO: 5748 - protein, 498 aa, Artificial Sequence
  Description of Artificial Sequence: Synthetic Chimeric Antigen Receptor sequence
MALPVTALLLPLALLLHAARPEVQLQQSGPGLVKPSQTLSLTCAISGDSVSSNSAAWNWIRQSPSRGLEWLGRTYYRSKWYSDYAVSVKSRITINPDTSKNQFSLQLNSVTPEDTAVYYCARDPYDFWSGYPDAFDIWGQGTMVTVSSGGGGSGGGGSGGGGSQSALTQPASVSGSPGQSITISCTGTSSDVGGYNYVSWYQQHPGKAPKVIISEVNNRPSGVSHRFSGSKSGNTASLTISGLQAEDEADYFCSSYTSGRTLYVFGTGSKVTVLGTTTPAPRPPTPAPTIASQPLSLRPEACRPAAGGAVHTRGLDFACDIYIWAPLAGTCGVLLLSLVITLYCKRGRKKLLYIFKQPFMRPVQTTQEEDGCSCRFPEEEEGGCELRVKFSRSADAPAYKQGQNQLYNELNLGRREEYDVLDKRRGRDPEMGGKPRRKNPQEGLYNELQKDKMAEAYSEIGMKGERRRGKGHDGLYQGLSTATKDTYDALHMQALPPR

SEQ ID NO: 5749 - protein, 498 aa, Artificial Sequence
  Description of Artificial Sequence: Synthetic Chimeric Antigen Receptor sequence
MALPVTALLLPLALLLHAARPQVNLRESGPALVKPTQTLTLTCTFSGFSLNTFGMSVSWIRQPPGKALEWLALIDWDDDKYYSTSLRTRLTISKDTAKNQVVLRMTNMDPMDTATYYCARIYGGDRTNTQAPYFFDLWGQGTLVTVSSGGGGSGGGGSGGGGSDVVMTQSPLSLPVTPGEPASISCRSSQSLLHSNGYNYLDWYLQKPGQSPQLLIYLGSNRASGVPDRFSGSGSGTDFTLKISRVEAEDVGVYYCMQALQTPWTFGQGTKLEIKTTTPAPRPPTPAPTIASQPLSLRPEACRPAAGGAVHTRGLDFACDIYIWAPLAGTCGVLLLSLVITLYCKRGRKKLLYIFKQPFMRPVQTTQEEDGCSCRFPEEEEGGCELRVKFSRSADAPAYKQGQNQLYNELNLGRREEYDVLDKRRGRDPEMGGKPRRKNPQEGLYNELQKDKMAEAYSEIGMKGERRRGKGHDGLYQGLSTATKDTYDALHMQALPPR

SEQ ID NO: 5750 - protein, 498 aa, Artificial Sequence
  Description of Artificial Sequence: Synthetic Chimeric Antigen Receptor sequence
MALPVTALLLPLALLLHAARPQVQLVQSGAEVKKPGASVKVSCKASGYTFTSYGISWVRQAPGQGLEWMGWISAYNGNTNYAQKLQGRVTMTTDTSTSTAYMELRSLRSDDTAVYYCARAGLALYSNYVPYYYYGMDVWGQGTTVTVSSGGGGSGGGGSGGGGSNFMLTQPHSVSESPGKTVTISCTRSSGSIASNYVQWYQQRPGSSPTTVIYEDNQRPSGVPDRFSGSIDSSSNSASLTISGLKTEDEADYYCQSYDSSNPWVFGGGTKLTVLTTTPAPRPPTPAPTIASQPLSLRPEACRPAAGGAVHTRGLDFACDIYIWAPLAGTCGVLLLSLVITLYCKRGRKKLLYIFKQPFMRPVQTTQEEDGCSCRFPEEEEGGCELRVKFSRSADAPAYKQGQNQLYNELNLGRREEYDVLDKRRGRDPEMGGKPRRKNPQEGLYNELQKDKMAEAYSEIGMKGERRRGKGHDGLYQGLSTATKDTYDALHMQALPPR

SEQ ID NO: 5751 - protein, 525 aa, Artificial Sequence
  Description of Artificial Sequence: Synthetic Chimeric Antigen Receptor sequence
MALPVTALLLPLALLLHAARPDIQMTQSPSSLSASVGDRVTITCSASSSVSYMNWYQQTPGKAPKRWIYDTSKLASGVPSRFSGSGSGTDYTFTISSLQPEDIATYYCQQWSSNPFTFGQGTKLQIGGGGSGGGGSGGGGSQVQLVQSGGGVVQPGRSLRLSCKASGYTFTRYTMHWVRQAPGKGLEWIGYINPSRGYTNYNQKVKDRFTISRDNSKNTAFLQMDSLRPEDTGVYFCARYYDDHYCLDYWGQGTPVTVSSTTTPAPRPPTPAPTIASQPLSLRPEACRPAAGGAVHTRGLDFACDIYIWAPLAGTCGVLLLSLVITLYCRSKRSRLLHSDYMNMTPRRPGPTRKHYQPYAPPRDFAAYRSKRGRKKLLYIFKQPFMRPVQTTQEEDGCSCRFPEEEEGGCELRVKFSRSADAPAYQQGQNQLYNELNLGRREEYDVLDKRRGRDPEMGGKPQRRKNPQEGLYNELQKDKMAEAYSEIGMKGERRRGKGHDGLYQGLSTATKDTYDALHMQALPPR

SEQ ID NO: 5752 - protein, 711 aa, Artificial Sequence
  Description of Artificial Sequence: Synthetic Chimeric Antigen Receptor sequence
DIQMTQTTSSLSASLGDRVTISCRASQDISKYLNWYQQKPDGTVKLLIYHTSRLHSGVPSRFSGSGSGTDYSLTISNLEQEDIATYFCQQGNTLPYTFGGGTKLEITGGGGSQVQLQQSGPGLVKPSQTLSLTCAISGDSVSSNSAAWNWIRQSPSRGLEWLGRTYYRSKWYNDYAVSVKSRITINPDTSKNQFSLQLNSVTPEDTAVYYCAREVTGDLEDAFDIWGQGTMVTVSSGSTSGSGKPGSGEGSTKGDIQMTQSPSSLSASVGDRVTITCRASQTIWSYLNWYQQRPGKAPNLLIYAASSLQSGVPSRFSGRGSGTDFTLTISSLQAEDFATYYCQQSYSIPQTFGQGTKLEIKGGGGSEVKLQESGPGLVAPSQSLSVTCTVSGVSLPDYGVSWIRQPPRKGLEWLGVIWGSETTYYNSALKSRLTIIKDNSKSQVFLKMNSLQTDDTAIYYCAKHYYYGGSYAMDYWGQGTSVTVSSSGTTTPAPRPPTPAPTIASQPLSLRPEACRPAAGGAVHTRGLDFACDIYIWAPLAGTCGVLLLSLVITLYCKRGRKKLLYIFKQPFMRPVQTTQEEDGCSCRFPEEEEGGCELRVKFSRSADAPAYKQGQNQLYNELNLGRREEYDVLDKRRGRDPEMGGKPRRKNPQEGLYNELQKDKMAEAYSEIGMKGERRRGKGHDGLYQGLSTATKDTYDALHMQALPPR

SEQ ID NO: 5753 - protein, 792 aa, Artificial Sequence [sequence omitted]

SEQ ID NO: 5754 - protein, 727 aa, Artificial Sequence
  Description of Artificial Sequence: Synthetic Chimeric Antigen Receptor sequence
MVLLVTSLLLCELPHPAFLLIPDTEVQLVESGGGLVKPGGSLKLSCAASGFAFSIYDMSWVRQTPEKRLEWVAYISSGGGTYYPDTVKGRFTISRDNAKNTLYLQMSSLKSEDTAMYYCARHSGYGSSYGVLFAYWGQGTLVTVSAGGGGSGGGGSGGGGSDIQMTQTTSSLSASLGDRVTISCRASQDISNYLNWYQQKPDGTVKLLIYYTSILHSGVPSRFSGSGSGTDYSLTISNLEQEDFATYFCQQGNTLPWTFGGGTKLEIKAEPKSCDKTHTCPPCPAPELLGGPSVFLFPPKPKDTLMISRTPEVTCVVVDVSHEDPEVKFNWYVDGVEVHNAKTKPREEQYNSTYRVVSVLTVLHQDWLNGKEYKCKVSNKALPAPIEKTISKAKGQPREPQVYTLPPSRDELTKNQVSLTCLVKGFYPSDIAVEWESNGQPENNYKTTPPVLDSDGSFFLYSKLTVDKSRWQQGNVFSCSVMHEALHNHYTQKSLSLSPGKKDPKAAAIEVMYPPPYLDNEKSNGTIIHVKGKHLCPSPLFPGPSKPFWVLVVVGGVLACYSLLVTVAFIIFWVRSKRSRLLHSDYMNMTPRRPGPTRKHYQPYAPPRDFAAYRSRVKFSRSADAPAYQQGQNQLYNELNLGRREEYDVLDKRRGRDPEMGGKPRRKNPQEGLYNELQKDKMAEAYSEIGMKGERRRGKGHDGLYQGLSTATKDTYDALHMQALPPR

SEQ ID NO: 5755 - protein, 792 aa, Artificial Sequence
  Description of Artificial Sequence: Synthetic Chimeric Antigen Receptor sequence
MVLLVTSLLLCELPHPAFLLIPDTEVQLVESGGGLVKPGGSLKLSCAASGFAFSIYDMSWVRQTPEKRLEWVAYISSGGGTYYPDTVKGRFTISRDNAKNTLYLQMSSLKSEDTAMYYCARHSGYGTHWGVLFAYWGQGTLVTVSAGGGGSGGGGSGGGGSDIQMTQTTSSLSASLGDRVTISCRASQDISNYLNWYQQKPDGTVKLLIYYTSILHSGVPSRFSGSGSGTDYSLTISNLEQEDFATYFCQQGNTLPWTFGGGTKLEIKAEPKSCDKTHTCPPCPAPELLGGPSVFLFPPKPKDTLMISRTPEVTCVVVDVSHEDPEVKFNWYVDGVEVHNAKTKPREEQYNSTYRVVSVLTVLHQDWLNGKEYKCKVSNKALPAPIEKTISKAKGQPREPQVYTLPPSRDELTKNQVSLTCLVKGFYPSDIAVEWESNGQPENNYKTTPPVLDSDGSFFLYSKLTVDKSRWQQGNVFSCSVMHEALHNHYTQKSLSLSPGKKDPKAAAAFVPVFLPAKPTTTPAPRPPTPAPTIASQPLSLRPEACRPAAGGAVHTRGLDFACDIYIWAPLAGTCGVLLLSLVITLYCNHRNRSKRSRLLHSDYMNMTPRRPGPTRKHYQPYAPPRDFAAYRSRFSVVKRGRKKLLYIFKQPFMRPVQTTQEEDGCSCRFPEEEEGGCELRVKFSRSADAPAYQQGQNQLYNELNLGRREEYDVLDKRRGRDPEMGGKPRRKNPQEGLYNELQKDKMAEAYSEIGMKGERRRGKGHDGLYQGLSTATKDTYDALHMQALPPR

SEQ ID NO: 5756 - protein, 511 aa, Artificial Sequence
  Description of Artificial Sequence: Synthetic Chimeric Antigen Receptor sequence
MVLLVTSLLLCELPHPAFLLIPDTEVQLVESGGGLVKPGGSLKLSCAASGFAFSIYDMSWVRQTPEKRLEWVAYISSGGGTYYPDTVKGRFTISRDNAKNTLYLQMSSLKSEDTAMYYCARHSGYGTHWGVLFAYWGQGTLVTVSAGGGGSGGGGSGGGGSDIQMTQTTSSLSASLGDRVTISCRASQDISNYLNWYQQKPDGTVKLLIYYTSILHSGVPSRFSGSGSGTDYSLTISNLEQEDFATYFCQQGNTLPWTFGGGTKLEIKAKTTPPSVYGRVKDPKAAAATTTPAPRPPTPAPTIASQPLSLRPEACRPAAGGAVHTRGLDFACDIYIWAPLAGTCGVLLLSLVITLYCKRGRKKLLYIFKQPFMRPVQTTQEEDGCSCRFPEEEEGGCELRVKFSRSADAPAYKQGQNQLYNELNLGRREEYDVLDKRRGRDPEMGGKPRRKNPQEGLYNELQKDKMAEAYSEIGMKGERRRGKGHDGLYQGLSTATKDTYDALHMQALPPR

SEQ ID NO: 5757 - protein, 571 aa, Artificial Sequence
  Description of Artificial Sequence: Synthetic Chimeric Antigen Receptor sequence
MVLLVTSLLLCELPHPAFLLIPDTEVQLVESGGGLVKPGGSLKLSCAASGFAFSIYDMSWVRQTPEKRLEWVAYISSGGGTYYPDTVKGRFTISRDNAKNTLYLQMSSLKSEDTAMYYCARHSGYGTHWGVLFAYWGQGTLVTVSAGGGGSGGGGSGGGGSDIQMTQTTSSLSASLGDRVTISCRASQDISNYLNWYQQKPDGTVKLLIYYTSILHSGVPSRFSGSGSGTDYSLTISNLEQEDFATYFCQQGNTLPWTFGGGTKLEIKAKTTPPSVYGRVKDPKAAAAFVPVFLPAKPTTTPAPRPPTPAPTIASQPLSLRPEACRPAAGGAVHTRGLDFACDIYIWAPLAGTCGVLLLSLVITLYCNHRNRSKRSRLLHSDYMNMTPRRPGPTRKHYQPYAPPRDFAAYRSRFSVVKRGRKKLLYIFKQPFMRPVQTTQEEDGCSCRFPEEEEGGCELRVKFSRSADAPAYQQGQNQLYNELNLGRREEYDVLDKRRGRDPEMGGKPRRKNPQEGLYNELQKDKMAEAYSEIGMKGERRRGKGHDGLYQGLSTATKDTYDALHMQALPPR

SEQ ID NO: 5758 - protein, 506 aa, Artificial Sequence
  Description of Artificial Sequence: Synthetic Chimeric Antigen Receptor sequence
MVLLVTSLLLCELPHPAFLLIPDTEVQLVESGGGLVKPGGSLKLSCAASGFAFSIYDMSWVRQTPEKRLEWVAYISSGGGTYYPDTVKGRFTISRDNAKNTLYLQMSSLKSEDTAMYYCARHSGYGTHWGVLFAYWGQGTLVTVSAGGGGSGGGGSGGGGSDIQMTQTTSSLSASLGDRVTISCRASQDISNYLNWYQQKPDGTVKLLIYYTSILHSGVPSRFSGSGSGTDYSLTISNLEQEDFATYFCQQGNTLPWTFGGGTKLEIKAKTTPPSVYGRVKDPKAAAIEVMYPPPYLDNEKSNGTIIHVKGKHLCPSPLFPGPSKPFWVLVVVGGVLACYSLLVTVAFIIFWVRSKRSRLLHSDYMNMTPRRPGPTRKHYQPYAPPRDFAAYRSRVKFSRSADAPAYQQGQNQLYNELNLGRREEYDVLDKRRGRDPEMGGKPRRKNPQEGLYNELQKDKMAEAYSEIGMKGERRRGKGHDGLYQGLSTATKDTYDALHMQALPPR

SEQ ID NO: 5759 - protein, 480 aa, Artificial Sequence
  Description of Artificial Sequence: Synthetic Chimeric Antigen Receptor sequence
MLLLVTSLLLCELPHPAFLLIPQVQLQQSGPGLVKPSQTLSLTCAISGDSVSSNSAAWNWIRQSPSRGLEWLGRTYYRSKWYNDYAVSVKSRITINPDTSKNQFSLQLNSVTPEDTAVYYCAREVTGDLEDAFDIWGQGTMVTVSSGGGGSDIQMTQSPSSLSASVGDRVTITCRASQTIWSYLNWYQQRPGKAPNLLIYAASSLQSGVPSRFSGRGSGTDFTLTISSLQAEDFATYYCQQSYSIPQTFGQGTKLEIKAAAIEVMYPPPYLDNEKSNGTIIHVKGKHLCPSPLFPGPSKPFWVLVVVGGVLACYSLLVTVAFIIFWVRSKRSRLLHSDYMNMTPRRPGPTRKHYQPYAPPRDFAAYRSRVKFSRSADAPAYQQGQNQLYNELNLGRREEYDVLDKRRGRDPEMGGKPRRKNPQEGLYNELQKDKMAEAYSEIGMKGERRRGKGHDGLYQGLSTATKDTYDALHMQALPPR

SEQ ID NO: 5760 - protein, 484 aa, Artificial Sequence
  Description of Artificial Sequence: Synthetic Chimeric Antigen Receptor sequence
MLLLVTSLLLCELPHPAFLLIPQVQLQQSGPGLVKPSQTLSLTCAISGDSVSSNSAAWNWIRQSPSRGLEWLGRTYYRSKWYNDYAVSVKSRITINPDTSKNQFSLQLNSVTPEDTAVYYCAREVTGDLEDAFDIWGQGTMVTVSSGGGGSDIQMTQSPSSLSASVGDRVTITCRASQTIWSYLNWYQQRPGKAPNLLIYAASSLQSGVPSRFSGRGSGTDFTLTISSLQAEDFATYYCQQSYSIPQTFGQGTKLEIKAAATTTPAPRPPTPAPTIASQPLSLRPEACRPAAGGAVHTRGLDFACDIYIWAPLAGTCGVLLLSLVITLYCKRGRKKLLYIFKQPFMRPVQTTQEEDGCSCRFPEEEEGGCELRVKFSRSADAPAYKQGQNQLYNELNLGRREEYDVLDKRRGRDPEMGGKPRRKNPQEGLYNELQKDKMAEAYSEIGMKGERRRGKGHDGLYQGLSTATKDTYDALHMQALPPR

SEQ ID NO: 5761 - protein, 544 aa, Artificial Sequence
  Description of Artificial Sequence: Synthetic Chimeric Antigen Receptor sequence
MLLLVTSLLLCELPHPAFLLIPQVQLQQSGPGLVKPSQTLSLTCAISGDSVSSNSAAWNWIRQSPSRGLEWLGRTYYRSKWYNDYAVSVKSRITINPDTSKNQFSLQLNSVTPEDTAVYYCAREVTGDLEDAFDIWGQGTMVTVSSGGGGSDIQMTQSPSSLSASVGDRVTITCRASQTIWSYLNWYQQRPGKAPNLLIYAASSLQSGVPSRFSGRGSGTDFTLTISSLQAEDFATYYCQQSYSIPQTFGQGTKLEIKAAAFVPVFLPAKPTTTPAPRPPTPAPTIASQPLSLRPEACRPAAGGAVHTRGLDFACDIYIWAPLAGTCGVLLLSLVITLYCNHRNRSKRSRLLHSDYMNMTPRRPGPTRKHYQPYAPPRDFAAYRSRFSVVKRGRKKLLYIFKQPFMRPVQTTQEEDGCSCRFPEEEEGGCELRVKFSRSADAPAYQQGQNQLYNELNLGRREEYDVLDKRRGRDPEMGGKPRRKNPQEGLYNELQKDKMAEAYSEIGMKGERRRGKGHDGLYQGLSTATKDTYDALHMQALPPR

SEQ ID NO: 5762 - protein, 729 aa, Artificial Sequence
  Description of Artificial Sequence: Synthetic Chimeric Antigen Receptor sequence
QVQLQQSGPGLVKPSQTLSLTCAISGDSVSSNSAAWNWIRQSPSRGLEWLGRTYYRSKWYNDYAVSVKSRITINPDTSKNQFSLQLNSVTPEDTAVYYCAREVTGDLEDAFDIWGQGTMVTVSSGGGGSDIQMTQSPSSLSASVGDRVTITCRASQTIWSYLNWYQQRPGKAPNLLIYAASSLQSGVPSRFSGRGSGTDFTLTISSLQAEDFATYYCQQSYSIPQTFGQGTKLEIKGGGGSGGGGSGGGGSGGGGSGGGGSDIQMTQTTSSLSASLGDRVTISCRASQDISKYLNWYQQKPDGTVKLLIYHTSRLHSGVPSRFSGSGSGTDYSLTISNLEQEDIATYFCQQGNTLPYTFGGGTKLEITGSTSGSGKPGSGEGSTKGEVKLQESGPGLVAPSQSLSVTCTVSGVSLPDYGVSWIRQPPRKGLEWLGVIWGSETTYYNSALKSRLTIIKDNSKSQVFLKMNSLQTDDTAIYYCAKHYYYGGSYAMDYWGQGTSVTVSSTTTPAPRPPTPAPTIASQPLSLRPEACRPAAGGAVHTRGLDFACDIYIWAPLAGTCGVLLLSLVITLYCKRGRKKLLYIFKQPFMRPVQTTQEEDGCSCRFPEEEEGGCELRVKFSRSADAPAYKQGQNQLYNELNLGRREEYDVLDKRRGRDPEMGGKPRRKNPQEGLYNELQKDKMAEAYSEIGMKGERRRGKGHDGLYQGLSTATKDTYDALHMQALPPR

SEQ ID NO: 5763 - protein, 737 aa, Artificial Sequence
  Description of Artificial Sequence: Synthetic Chimeric Antigen Receptor sequence
EVQLQQSGPGLVKPSQTLSLTCAISGDSVSSNSAAWNWIRQSPSRGLEWLGRTYYRSKWYNDYAVSVKSRITINPDTSKNQFSLQLNSVTPEDTAVYYCARDLGWIAVAGTFDYWGQGTLVTVSSGGGGSGGGGSGGGGSQSALTQPASVSGSPGQSITISCTGTSSDVGGYNYVSWYQQHPGKAPKLMIYDVSKRPSGVSNRFSGSKSGNTASLTISGLQAEDEADYYCSSYTSSSLNHVFGTGTKVTVLTGGGGSGGGGSGGGGSGGGGSEIVMTQSPATLSLSPGERATLSCRASQDISKYLNWYQQKPGQAPRLLIYHTSRLHSGIPARFSGSGSGTDYTLTISSLQPEDFAVYFCQQGNTLPYTFGQGTKLEIKGGGGSGGGGSGGGGSQVQLQESGPGLVKPSETLSLTCTVSGVSLPDYGVSWIRQPPGKGLEWIGVIWGSETTYYQSSLKSRVTISKDNSKNQVSLKLSSVTAADTAVYYCAKHYYYGGSYAMDYWGQGTLVTVSSTTTPAPRPPTPAPTIASQPLSLRPEACRPAAGGAVHTRGLDFACDIYIWAPLAGTCGVLLLSLVITLYCKRGRKKLLYIFKQPFMRPVQTTQEEDGCSCRFPEEEEGGCELRVKFSRSADAPAYKQGQNQLYNELNLGRREEYDVLDKRRGRDPEMGGKPRRKNPQEGLYNELQKDKMAEAYSEIGMKGERRRGKGHDGLYQGLSTATKDTYDALHMQALPPR

SEQ ID NO: 5764 - protein, 703 aa, Artificial Sequence
  Description of Artificial Sequence: Synthetic Chimeric Antigen Receptor sequence
QVQLQQSGAEVKKPGSSVKVSCKASGGTFSSYAISWVRQAPGQGLEWMGGIIPILGIANYAQKFQGRVTITADESTSTAYMELSSLRSEDTAVYYCATGGSGRYALDIWGQGTMVTVSSGGGGSGGGGSGGGGSEIVLTQSPATLSLSPGERATLSCRASQSVSSYLAWYQQKPGQAPRLLIYDASNRATGIPARFSGSGSGTDFTLTISSLEPEDFAVYYCQQRSNWPPSYTFGQGTKLEIKRAEPKSCDKTHTCPPCPAPELLGGPSVFLFPPKPKDTLMISRTPEVTCVVVDVSHEDPEVKFNWYVDGVEVHNAKTKPREEQYNSTYRVVSVLTVLHQDWLNGKEYKCKVSNKALPAPIEKTISKAKGQPREPQVYTLPPSRDELTKNQVSLTCLVKGFYPSDIAVEWESNGQPENNYKTTPPVLDSDGSFFLYSKLTVDKSRWQQGNVFSCSVMHEALHNHYTQKSLSLSPGKKDPKAAAIEVMYPPPYLDNEKSNGTIIHVKGKHLCPSPLFPGPSKPFWVLVVVGGVLACYSLLVTVAFIIFWVRSKRSRLLHSDYMNMTPRRPGPTRKHYQPYAPPRDFAAYRSRVKFSRSADAPAYQQGQNQLYNELNLGRREEYDVLDKRRGRDPEMGGKPRRKNPQEGLYNELQKDKMAEAYSEIGMKGERRRGKGHDGLYQGLSTATKDTYDALHMQALPPR

SEQ ID NO: 5765 - protein, 223 aa, Artificial Sequence
  Description of Artificial Sequence: Synthetic Chimeric Antigen Receptor sequence
TTTPAPRPPTPAPTIASQPLSLRPEACRPAAGGAVHTRGLDFACDIYIWAPLAGTCGVLLLSLVITLYCKRGRKKLLYIFKQPFMRPVQTTQEEDGCSCRFPEEEEGGCELRVKFSRSADAPAYKQGQNQLYNELNLGRREEYDVLDKRRGRDPEMGGKPRRKNPQEGLYNELQKDKMAEAYSEIGMKGERRRGKGHDGLYQGLSTATKDTYDALHMQALPPR

SEQ ID NO: 5766 - protein, 470 aa, Artificial Sequence
  Description of Artificial Sequence: Synthetic Chimeric Antigen Receptor sequence
QVQLQQSGAEVKKPGSSVKVSCKASGGTFSSYAISWVRQAPGQGLEWMGGIIPILGIANYAQKFQGRVTITADESTSTAYMELSSLRSEDTAVYYCARGGAGGSGSYYPLIWGQGTTVTVSSGGGGSGGGGSGGGGSEIVLTQSPATLSLSPGERATLSCGASQSVSSSYLAWYQQKPGQAPRLLIYDASSRATGIPARFSGSGSGTDFTLTISSLEPEDFAVYYCQQRSSWPPTWTFGQGTKLEIKRAAAIEVMYPPPYLDNEKSNGTIIHVKGKHLCPSPLFPGPSKPFWVLVVVGGVLACYSLLVTVAFIIFWVRSKRSRLLHSDYMNMTPRRPGPTRKHYQPYAPPRDFAAYRSRVKFSRSADAPAYQQGQNQLYNELNLGRREEYDVLDKRRGRDPEMGGKPRRKNPQEGLYNELQKDKMAEAYSEIGMKGERRRGKGHDGLYQGLSTATKDTYDALHMQALPPR

SEQ ID NO: 5767 - protein, 705 aa, Artificial Sequence
  Description of Artificial Sequence: Synthetic Chimeric Antigen Receptor sequence
QVQLVQSGAEVKKPGSSVKVSCKASGGTFSSYAISWVRQAPGQGLEWMGGIIPILGTANYAQKFQGRVTITADESTSTAYMELSSLRSEDTAVYYCARWGGGAFDIWGQGTMVTVSSGGGGSGGGGSGGGGSEIVLTQSPGTLSLSPGERATLSCRASQSVGGYLAWYQQKPGQAPRLLIYDASNRATGIPARFSGSGSGTDFTLTISSLEPEDFAVYYCQQRNNWPPMYTFGQGTKLEIKRAEPKSCDKTHTCPPCPAPELLGGPSVFLFPPKPKDTLMISRTPEVTCVVVDVSHEDPEVKFNWYVDGVEVHNAKTKPREEQYNSTYRVVSVLTVLHQDWLNGKEYKCKVSNKALPAPIEKTISKAKGQPREPQVYTLPPSRDELTKNQVSLTCLVKGFYPSDIAVEWESNGQPENNYKTTPPVLDSDGSFFLYSKLTVDKSRWQQGNVFSCSVMHEALHNHYTQKSLSLSPGKKDPKAAATTTPAPRPPTPAPTIASQPLSLRPEACRPAAGGAVHTRGLDFACDIYIWAPLAGTCGVLLLSLVITLYCKRGRKKLLYIFKQPFMRPVQTTQEEDGCSCRFPEEEEGGCELRVKFSRSADAPAYKQGQNQLYNELNLGRREEYDVLDKRRGRDPEMGGKPRRKNPQEGLYNELQKDKMAEAYSEIGMKGERRRGKGHDGLYQGLSTATKDTYDALHMQALPPR

SEQ ID NO: 5768 - protein, 707 aa, Artificial Sequence
  Description of Artificial Sequence: Synthetic Chimeric Antigen Receptor sequence
QVQLQQSGAEVKKPGSSVKVSCKASGGTFSSYAISWVRQAPGQGLEWMGGIIPILGIANYAQKFQGRVTITADESTSTAYMELSSLRSEDTAVYYCATGGSGRYALDIWGQGTMVTVSSGGGGSGGGGSGGGGSEIVLTQSPATLSLSPGERATLSCRASQSVSSYLAWYQQKPGQAPRLLIYDASNRATGIPARFSGSGSGTDFTLTISSLEPEDFAVYYCQQRSNWPPSYTFGQGTKLEIKRAEPKSCDKTHTCPPCPAPELLGGPSVFLFPPKPKDTLMISRTPEVTCVVVDVSHEDPEVKFNWYVDGVEVHNAKTKPREEQYNSTYRVVSVLTVLHQDWLNGKEYKCKVSNKALPAPIEKTISKAKGQPREPQVYTLPPSRDELTKNQVSLTCLVKGFYPSDIAVEWESNGQPENNYKTTPPVLDSDGSFFLYSKLTVDKSRWQQGNVFSCSVMHEALHNHYTQKSLSLSPGKKDPKAAATTTPAPRPPTPAPTIASQPLSLRPEACRPAAGGAVHTRGLDFACDIYIWAPLAGTCGVLLLSLVITLYCKRGRKKLLYIFKQPFMRPVQTTQEEDGCSCRFPEEEEGGCELRVKFSRSADAPAYKQGQNQLYNELNLGRREEYDVLDKRRGRDPEMGGKPRRKNPQEGLYNELQKDKMAEAYSEIGMKGERRRGKGHDGLYQGLSTATKDTYDALHMQALPPR

SEQ ID NO: 5769 - protein, 711 aa, Artificial Sequence
  Description of Artificial Sequence: Synthetic Chimeric Antigen Receptor sequence
QVQLQQSGAEVKKPGSSVKVSCKASGGTFSSYAISWVRQAPGQGLEWMGGIIPILGIANYAQKFQGRVTITADESTSTAYMELSSLRSEDTAVYYCARGGAGGSGSYYPLIWGQGTTVTVSSGGGGSGGGGSGGGGSEIVLTQSPATLSLSPGERATLSCGASQSVSSSYLAWYQQKPGQAPRLLIYDASSRATGIPARFSGSGSGTDFTLTISSLEPEDFAVYYCQQRSSWPPTWTFGQGTKLEIKRAEPKSCDKTHTCPPCPAPELLGGPSVFLFPPKPKDTLMISRTPEVTCVVVDVSHEDPEVKFNWYVDGVEVHNAKTKPREEQYNSTYRVVSVLTVLHQDWLNGKEYKCKVSNKALPAPIEKTISKAKGQPREPQVYTLPPSRDELTKNQVSLTCLVKGFYPSDIAVEWESNGQPENNYKTTPPVLDSDGSFFLYSKLTVDKSRWQQGNVFSCSVMHEALHNHYTQKSLSLSPGKKDPKAAATTTPAPRPPTPAPTIASQPLSLRPEACRPAAGGAVHTRGLDFACDIYIWAPLAGTCGVLLLSLVITLYCKRGRKKLLYIFKQPFMRPVQTTQEEDGCSCRFPEEEEGGCELRVKFSRSADAPAYKQGQNQLYNELNLGRREEYDVLDKRRGRDPEMGGKPRRKNPQEGLYNELQKDKMAEAYSEIGMKGERRRGKGHDGLYQGLSTATKDTYDALHMQALPPR

SEQ ID NO: 5770 - protein, 765 aa, Artificial Sequence
  Description of Artificial Sequence: Synthetic Chimeric Antigen Receptor sequence
QVQLVQSGAEVKKPGSSVKVSCKASGGTFSSYAISWVRQAPGQGLEWMGGIIPILGTANYAQKFQGRVTITADESTSTAYMELSSLRSEDTAVYYCARWGGGAFDIWGQGTMVTVSSGGGGSGGGGSGGGGSEIVLTQSPGTLSLSPGERATLSCRASQSVGGYLAWYQQKPGQAPRLLIYDASNRATGIPARFSGSGSGTDFTLTISSLEPEDFAVYYCQQRNNWPPMYTFGQGTKLEIKRAEPKSCDKTHTCPPCPAPELLGGPSVFLFPPKPKDTLMISRTPEVTCVVVDVSHEDPEVKFNWYVDGVEVHNAKTKPREEQYNSTYRVVSVLTVLHQDWLNGKEYKCKVSNKALPAPIEKTISKAKGQPREPQVYTLPPSRDELTKNQVSLTCLVKGFYPSDIAVEWESNGQPENNYKTTPPVLDSDGSFFLYSKLTVDKSRWQQGNVFSCSVMHEALHNHYTQKSLSLSPGKKDPKAAAFVPVFLPAKPTTTPAPRPPTPAPTIASQPLSLRPEACRPAAGGAVHTRGLDFACDIYIWAPLAGTCGVLLLSLVITLYCNHRNRSKRSRLLHSDYMNMTPRRPGPTRKHYQPYAPPRDFAAYRSRFSVVKRGRKKLLYIFKQPFMRPVQTTQEEDGCSCRFPEEEEGGCELRVKFSRSADAPAYQQGQNQLYNELNLGRREEYDVLDKRRGRDPEMGGKPRRKNPQEGLYNELQKDKMAEAYSEIGMKGERRRGKGHDGLYQGLSTATKDTYDALHMQALPPR

SEQ ID NO: 5771 - protein, 767 aa, Artificial Sequence
  Description of Artificial Sequence: Synthetic Chimeric Antigen Receptor sequence
QVQLQQSGAEVKKPGSSVKVSCKASGGTFSSYAISWVRQAPGQGLEWMGGIIPILGIANYAQKFQGRVTITADESTSTAYMELSSLRSEDTAVYYCATGGSGRYALDIWGQGTMVTVSSGGGGSGGGGSGGGGSEIVLTQSPATLSLSPGERATLSCRASQSVSSYLAWYQQKPGQAPRLLIYDASNRATGIPARFSGSGSGTDFTLTISSLEPEDFAVYYCQQRSNWPPSYTFGQGTKLEIKRAEPKSCDKTHTCPPCPAPELLGGPSVFLFPPKPKDTLMISRTPEVTCVVVDVSHEDPEVKFNWYVDGVEVHNAKTKPREEQYNSTYRVVSVLTVLHQDWLNGKEYKCKVSNKALPAPIEKTISKAKGQPREPQVYTLPPSRDELTKNQVSLTCLVKGFYPSDIAVEWESNGQPENNYKTTPPVLDSDGSFFLYSKLTVDKSRWQQGNVFSCSVMHEALHNHYTQKSLSLSPGKKDPKAAAFVPVFLPAKPTTTPAPRPPTPAPTIASQPLSLRPEACRPAAGGAVHTRGLDFACDIYIWAPLAGTCGVLLLSLVITLYCNHRNRSKRSRLLHSDYMNMTPRRPGPTRKHYQPYAPPRDFAAYRSRFSVVKRGRKKLLYIFKQPFMRPVQTTQEEDGCSCRFPEEEEGGCELRVKFSRSADAPAYQQGQNQLYNELNLGRREEYDVLDKRRGRDPEMGGKPRRKNPQEGLYNELQKDKMAEAYSEIGMKGERRRGKGHDGLYQGLSTATKDTYDALHMQALPPR

SEQ ID NO: 5772 - protein, 771 aa, Artificial Sequence
  Description of Artificial Sequence: Synthetic Chimeric Antigen Receptor sequence
QVQLQQSGAEVKKPGSSVKVSCKASGGTFSSYAISWVRQAPGQGLEWMGGIIPILGIANYAQKFQGRVTITADESTSTAYMELSSLRSEDTAVYYCARGGAGGSGSYYPLIWGQGTTVTVSSGGGGSGGGGSGGGGSEIVLTQSPATLSLSPGERATLSCGASQSVSSSYLAWYQQKPGQAPRLLIYDASSRATGIPARFSGSGSGTDFTLTISSLEPEDFAVYYCQQRSSWPPTWTFGQGTKLEIKRAEPKSCDKTHTCPPCPAPELLGGPSVFLFPPKPKDTLMISRTPEVTCVVVDVSHEDPEVKFNWYVDGVEVHNAKTKPREEQYNSTYRVVSVLTVLHQDWLNGKEYKCKVSNKALPAPIEKTISKAKGQPREPQVYTLPPSRDELTKNQVSLTCLVKGFYPSDIAVEWESNGQPENNYKTTPPVLDSDGSFFLYSKLTVDKSRWQQGNVFSCSVMHEALHNHYTQKSLSLSPGKKDPKAAAFVPVFLPAKPTTTPAPRPPTPAPTIASQPLSLRPEACRPAAGGAVHTRGLDFACDIYIWAPLAGTCGVLLLSLVITLYCNHRNRSKRSRLLHSDYMNMTPRRPGPTRKHYQPYAPPRDFAAYRSRFSVVKRGRKKLLYIFKQPFMRPVQTTQEEDGCSCRFPEEEEGGCELRVKFSRSADAPAYQQGQNQLYNELNLGRREEYDVLDKRRGRDPEMGGKPRRKNPQEGLYNELQKDKMAEAYSEIGMKGERRRGKGHDGLYQGLSTATKDTYDALHMQALPPR

SEQ ID NO: 5773 - protein, 906 aa, Artificial Sequence
  Description of Artificial Sequence: Synthetic Chimeric Antigen Receptor sequence
QVQLQQWGAGLLKPSETLSLTCAVYGGSFSAYYWSWIRQPPGKGLEWIGDINHGGGTNYNPSLKSRVTISVDTSKNQFSLKLNSVTAADTAVYYCASLTAYWGQGSLVTVSSGSTSGSGKPGSSEGSTKGDIQMTQSPTSLSASVGDRVTITCRASQGISSWLTWYQQKPEKAPKSLIYAASSLQSGVPSRFSGSGSGTDFTLTISSLQPEDFATYYCQQYDSYPITFGQGTRLEIKGSTSGSGKPGSSEGSTKGFWVLVVVGGVLACYSLLVTVAFIIFWVKRGRKKLLYIFKQPFMRPVQTTQEEDGCSCRFPEEEEGGCELQRRKYRSNKGESPVEPAEPCHYSCPREEEGSTIPIQEDYRKPEPACSPGSTSGSGKPGSSEGSTKGRVKFSRSADAPAYKQGQNQLYNELNLGRREEYDVLDKRRGRDPEMGGKPRRKNPQEGLYNELQKDKMAEAYSEIGMKGERRRGKGHDGLYQGLSTATKDTYDALHMQALPPRGSTSGSGKPGSSEGSTKGVGALESLRGNADLAYILSMEPCGHCLIINNVNFCRESGLRTRTGSNIDCEKLRRRFSSLHFMVEVKGDLTAKKMVLALLELAQQDHGALDCCVVVILSHGCQASHLQFPGAVYGTDGCPVSVEKIVNIFNGTSCPSLGGKPKLFFIQACGGEQKDHGFEVASTSPEDESPGSNPEPDATPFQEGLRTFDQLDAISSLPTPSDIFVSYSTFPGFVSWRDPKSGSWYVETLDDIFEQWAHSEDLQSLLLRVANAVSVKGIYKQMPGCFNFLRKKLFFKTSMGVQVETISPGDGRTFPKRGQTCVVHYTGMLEDGKKVDSSRDRNKPFKFMLGKQEVIRGWEEGVAQMSVGQRAKLTISPDYAYGATGHPGIIPPHATLVFDVELLKLE

SEQ ID NO: 5774 - protein, 470 aa, Artificial Sequence; identical to SEQ ID NO: 5766
  Description of Artificial Sequence: Synthetic Chimeric Antigen Receptor sequence

SEQ ID NO: 5775 - protein, 474 aa, Artificial Sequence
  Description of Artificial Sequence: Synthetic Chimeric Antigen Receptor sequence
QVQLQQSGAEVKKPGSSVKVSCKASGGTFSSYAISWVRQAPGQGLEWMGGIIPILGIANYAQKFQGRVTITADESTSTAYMELSSLRSEDTAVYYCARGGAGGSGSYYPLIWGQGTTVTVSSGGGGSGGGGSGGGGSEIVLTQSPATLSLSPGERATLSCGASQSVSSSYLAWYQQKPGQAPRLLIYDASSRATGIPARFSGSGSGTDFTLTISSLEPEDFAVYYCQQRSSWPPTWTFGQGTKLEIKRAAATTTPAPRPPTPAPTIASQPLSLRPEACRPAAGGAVHTRGLDFACDIYIWAPLAGTCGVLLLSLVITLYCKRGRKKLLYIFKQPFMRPVQTTQEEDGCSCRFPEEEEGGCELRVKFSRSADAPAYKQGQNQLYNELNLGRREEYDVLDKRRGRDPEMGGKPRRKNPQEGLYNELQKDKMAEAYSEIGMKGERRRGKGHDGLYQGLSTATKDTYDALHMQALPPR

SEQ ID NO: 5776 - protein, 534 aa, Artificial Sequence
  Description of Artificial Sequence: Synthetic Chimeric Antigen Receptor sequence
QVQLQQSGAEVKKPGSSVKVSCKASGGTFSSYAISWVRQAPGQGLEWMGGIIPILGIANYAQKFQGRVTITADESTSTAYMELSSLRSEDTAVYYCARGGAGGSGSYYPLIWGQGTTVTVSSGGGGSGGGGSGGGGSEIVLTQSPATLSLSPGERATLSCGASQSVSSSYLAWYQQKPGQAPRLLIYDASSRATGIPARFSGSGSGTDFTLTISSLEPEDFAVYYCQQRSSWPPTWTFGQGTKLEIKRAAAFVPVFLPAKPTTTPAPRPPTPAPTIASQPLSLRPEACRPAAGGAVHTRGLDFACDIYIWAPLAGTCGVLLLSLVITLYCNHRNRSKRSRLLHSDYMNMTPRRPGPTRKHYQPYAPPRDFAAYRSRFSVVKRGRKKLLYIFKQPFMRPVQTTQEEDGCSCRFPEEEEGGCELRVKFSRSADAPAYQQGQNQLYNELNLGRREEYDVLDKRRGRDPEMGGKPRRKNPQEGLYNELQKDKMAEAYSEIGMKGERRRGKGHDGLYQGLSTATKDTYDALHMQALPPR

SEQ ID NO: 5777 - protein, 714 aa, Artificial Sequence
  Description of Artificial Sequence: Synthetic Chimeric Antigen Receptor sequence
QVQLQQSGAEVKKPGSSVKVSCKASGGTFSSYAISWVRQAPGQGLEWMGGIIPILGIANYAQKFQGRVTITADESTSTAYMELSSLRSEDTAVYYCARGGAGGSGSYYPLIWGQGTTVTVSSGGGGSGGGGSGGGGSEIVLTQSPATLSLSPGERATLSCGASQSVSSSYLAWYQQKPGQAPRLLIYDASSRATGIPARFSGSGSGTDFTLTISSLEPEDFAVYYCQQRSSWPPTWTFGQGTKLEIKRAEPKSCDKTHTCPPCPAPELLGGPSVFLFPPKPKDTLMISRTPEVTCVVVDVSHEDPEVKFNWYVDGVEVHNAKTKPREEQYNSTYRVVSVLTVLHQDWLNGKEYKCKVSNKALPAPIEKTISKAKGQPREPQVYTLPPSRDELTKNQVSLTCLVKGFYPSDIAVEWESNGQPENNYKTTPPVLDSDGSFFLYSKLTVDKSRWQQGNVFSCSVMHEALHNHYTQKSLSLSPGKKDPKAAAIEGAAAAIEVMYPPPYLDNEKSNGTIIHVKGKHLCPSPLFPGPSKPFWVLVVVGGVLACYSLLVTVAFIIFWVRSKRSRLLHSDYMNMTPRRPGPTRKHYQPYAPPRDFAAYRSRVKFSRSADAPAYQQGQNQLYNELNLGRREEYDVLDKRRGRDPEMGGKPRRKNPQEGLYNELQKDKMAEAYSEIGMKGERRRGKGHDGLYQGLSTATKDTYDALHMQALPPR

SEQ ID NO: 5778 - protein, 464 aa, Artificial Sequence
  Description of Artificial Sequence: Synthetic Chimeric Antigen Receptor sequence
QVQLVQSGAEVKKPGSSVKVSCKASGGTFSSYAISWVRQAPGQGLEWMGGIIPILGTANYAQKFQGRVTITADESTSTAYMELSSLRSEDTAVYYCARWGGGAFDIWGQGTMVTVSSGGGGSGGGGSGGGGSEIVLTQSPGTLSLSPGERATLSCRASQSVGGYLAWYQQKPGQAPRLLIYDASNRATGIPARFSGSGSGTDFTLTISSLEPEDFAVYYCQQRNNWPPMYTFGQGTKLEIKRAAAIEVMYPPPYLDNEKSNGTIIHVKGKHLCPSPLFPGPSKPFWVLVVVGGVLACYSLLVTVAFIIFWVRSKRSRLLHSDYMNMTPRRPGPTRKHYQPYAPPRDFAAYRSRVKFSRSADAPAYQQGQNQLYNELNLGRREEYDVLDKRRGRDPEMGGKPRRKNPQEGLYNELQKDKMAEAYSEIGMKGERRRGKGHDGLYQGLSTATKDTYDALHMQALPPR

SEQ ID NO: 5779 - protein, 468 aa, Artificial Sequence
  Description of Artificial Sequence: Synthetic Chimeric Antigen Receptor sequence
QVQLVQSGAEVKKPGSSVKVSCKASGGTFSSYAISWVRQAPGQGLEWMGGIIPILGTANYAQKFQGRVTITADESTSTAYMELSSLRSEDTAVYYCARWGGGAFDIWGQGTMVTVSSGGGGSGGGGSGGGGSEIVLTQSPGTLSLSPGERATLSCRASQSVGGYLAWYQQKPGQAPRLLIYDASNRATGIPARFSGSGSGTDFTLTISSLEPEDFAVYYCQQRNNWPPMYTFGQGTKLEIKRAAATTTPAPRPPTPAPTIASQPLSLRPEACRPAAGGAVHTRGLDFACDIYIWAPLAGTCGVLLLSLVITLYCKRGRKKLLYIFKQPFMRPVQTTQEEDGCSCRFPEEEEGGCELRVKFSRSADAPAYKQGQNQLYNELNLGRREEYDVLDKRRGRDPEMGGKPRRKNPQEGLYNELQKDKMAEAYSEIGMKGERRRGKGHDGLYQGLSTATKDTYDALHMQALPPR

SEQ ID NO: 5780 - protein, 528 aa, Artificial Sequence
  Description of Artificial Sequence: Synthetic Chimeric Antigen Receptor sequence
QVQLVQSGAEVKKPGSSVKVSCKASGGTFSSYAISWVRQAPGQGLEWMGGIIPILGTANYAQKFQGRVTITADESTSTAYMELSSLRSEDTAVYYCARWGGGAFDIWGQGTMVTVSSGGGGSGGGGSGGGGSEIVLTQSPGTLSLSPGERATLSCRASQSVGGYLAWYQQKPGQAPRLLIYDASNRATGIPARFSGSGSGTDFTLTISSLEPEDFAVYYCQQRNNWPPMYTFGQGTKLEIKRAAAFVPVFLPAKPTTTPAPRPPTPAPTIASQPLSLRPEACRPAAGGAVHTRGLDFACDIYIWAPLAGTCGVLLLSLVITLYCNHRNRSKRSRLLHSDYMNMTPRRPGPTRKHYQPYAPPRDFAAYRSRFSVVKRGRKKLLYIFKQPFMRPVQTTQEEDGCSCRFPEEEEGGCELRVKFSRSADAPAYQQGQNQLYNELNLGRREEYDVLDKRRGRDPEMGGKPRRKNPQEGLYNELQKDKMAEAYSEIGMKGERRRGKGHDGLYQGLSTATKDTYDALHMQALPPR

SEQ ID NO: 5781 - protein, 701 aa, Artificial Sequence
  Description of Artificial Sequence: Synthetic Chimeric Antigen Receptor sequence
QVQLVQSGAEVKKPGSSVKVSCKASGGTFSSYAISWVRQAPGQGLEWMGGIIPILGTANYAQKFQGRVTITADESTSTAYMELSSLRSEDTAVYYCARWGGGAFDIWGQGTMVTVSSGGGGSGGGGSGGGGSEIVLTQSPGTLSLSPGERATLSCRASQSVGGYLAWYQQKPGQAPRLLIYDASNRATGIPARFSGSGSGTDFTLTISSLEPEDFAVYYCQQRNNWPPMYTFGQGTKLEIKRAEPKSCDKTHTCPPCPAPELLGGPSVFLFPPKPKDTLMISRTPEVTCVVVDVSHEDPEVKFNWYVDGVEVHNAKTKPREEQYNSTYRVVSVLTVLHQDWLNGKEYKCKVSNKALPAPIEKTISKAKGQPREPQVYTLPPSRDELTKNQVSLTCLVKGFYPSDIAVEWESNGQPENNYKTTPPVLDSDGSFFLYSKLTVDKSRWQQGNVFSCSVMHEALHNHYTQKSLSLSPGKKDPKAAAIEVMYPPPYLDNEKSNGTIIHVKGKHLCPSPLFPGPSKPFWVLVVVGGVLACYSLLVTVAFIIFWVRSKRSRLLHSDYMNMTPRRPGPTRKHYQPYAPPRDFAAYRSRVKFSRSADAPAYQQGQNQLYNELNLGRREEYDVLDKRRGRDPEMGGKPRRKNPQEGLYNELQKDKMAEAYSEIGMKGERRRGKGHDGLYQGLSTATKDTYDALHMQALPPR

SEQ ID NO: 5782 - protein, 466 aa, Artificial Sequence
  Description of Artificial Sequence: Synthetic Chimeric Antigen Receptor sequence
QVQLQQSGAEVKKPGSSVKVSCKASGGTFSSYAISWVRQAPGQGLEWMGGIIPILGIANYAQKFQGRVTITADESTSTAYMELSSLRSEDTAVYYCATGGSGRYALDIWGQGTMVTVSSGGGGSGGGGSGGGGSEIVLTQSPATLSLSPGERATLSCRASQSVSSYLAWYQQKPGQAPRLLIYDASNRATGIPARFSGSGSGTDFTLTISSLEPEDFAVYYCQQRSNWPPSYTFGQGTKLEIKRAAAIEVMYPPPYLDNEKSNGTIIHVKGKHLCPSPLFPGPSKPFWVLVVVGGVLACYSLLVTVAFIIFWVRSKRSRLLHSDYMNMTPRRPGPTRKHYQPYAPPRDFAAYRSRVKFSRSADAPAYQQGQNQLYNELNLGRREEYDVLDKRRGRDPEMGGKPRRKNPQEGLYNELQKDKMAEAYSEIGMKGERRRGKGHDGLYQGLSTATKDTYDALHMQALPPR

SEQ ID NO: 5783 - protein, 470 aa, Artificial Sequence
  Description of Artificial Sequence: Synthetic Chimeric Antigen Receptor sequence
QVQLQQSGAEVKKPGSSVKVSCKASGGTFSSYAISWVRQAPGQGLEWMGGIIPILGIANYAQKFQGRVTITADESTSTAYMELSSLRSEDTAVYYCATGGSGRYALDIWGQGTMVTVSSGGGGSGGGGSGGGGSEIVLTQSPATLSLSPGERATLSCRASQSVSSYLAWYQQKPGQAPRLLIYDASNRATGIPARFSGSGSGTDFTLTISSLEPEDFAVYYCQQRSNWPPSYTFGQGTKLEIKRAAATTTPAPRPPTPAPTIASQPLSLRPEACRPAAGGAVHTRGLDFACDIYIWAPLAGTCGVLLLSLVITLYCKRGRKKLLYIFKQPFMRPVQTTQEEDGCSCRFPEEEEGGCELRVKFSRSADAPAYKQGQNQLYNELNLGRREEYDVLDKRRGRDPEMGGKPRRKNPQEGLYNELQKDKMAEAYSEIGMKGERRRGKGHDGLYQGLSTATKDTYDALHMQALPPR

SEQ ID NO: 5784 - protein, 530 aa, Artificial Sequence
  Description of Artificial Sequence: Synthetic Chimeric Antigen Receptor sequence
QVQLQQSGAEVKKPGSSVKVSCKASGGTFSSYAISWVRQAPGQGLEWMGGIIPILGIANYAQKFQGRVTITADESTSTAYMELSSLRSEDTAVYYCATGGSGRYALDIWGQGTMVTVSSGGGGSGGGGSGGGGSEIVLTQSPATLSLSPGERATLSCRASQSVSSYLAWYQQKPGQAPRLLIYDASNRATGIPARFSGSGSGTDFTLTISSLEPEDFAVYYCQQRSNWPPSYTFGQGTKLEIKRAAAFVPVFLPAKPTTTPAPRPPTPAPTIASQPLSLRPEACRPAAGGAVHTRGLDFACDIYIWAPLAGTCGVLLLSLVITLYCNHRNRSKRSRLLHSDYMNMTPRRPGPTRKHYQPYAPPRDFAAYRSRFSVVKRGRKKLLYIFKQPFMRPVQTTQEEDGCSCRFPEEEEGGCELRVKFSRSADAPAYQQGQNQLYNELNLGRREEYDVLDKRRGRDPEMGGKPRRKNPQEGLYNELQKDKMAEAYSEIGMKGERRRGKGHDGLYQGLSTATKDTYDALHMQALPPR

SEQ ID NO: 5785 - protein, 496 aa, Artificial Sequence
  Description of Artificial Sequence: Synthetic Chimeric Antigen Receptor sequence
MVATLLVTSLLLCELPHPAFLLIPDTEVQLVESGGGLVQPGGSLRLSCAASGFTFSSFGMHWVRQAPGKGLEWVAYISSDSSAIYYADTVKGRFTISRDNAKNSLYLQMNSLRDEDTAVYYCGRGRENIYYGSRLDYWGQGTTVTVSSGGGGSGGGGSGGGGSDIQLTQSPSFLSASVGDRVTITCKASQNVDTNVAWYQQKPGKAPKALIYSASYRYSGVPSRFSGSGSGTDFTLTISSLQPEDFATYYCQQYNNYPFTFGQGTKLEIKAAATTTPAPRPPTPAPTIASQPLSLRPEACRPAAGGAVHTRGLDFACDIYIWAPLAGTCGVLLLSLVITLYCKRGRKKLLYIFKQPFMRPVQTTQEEDGCSCRFPEEEEGGCELRVKFSRSADAPAYKQGQNQLYNELNLGRREEYDVLDKRRGRDPEMGGKPRRKNPQEGLYNELQKDKMAEAYSEIGMKGERRRGKGHDGLYQGLSTATKDTYDALHMQALPPR

SEQ ID NO: 5786 - protein, 978 aa, Artificial Sequence
  Description of Artificial Sequence: Synthetic Chimeric Antigen Receptor sequence
MDFQVQIFSFLLISASVIMSRMAQVQLQQSGAELARPGASVKMSCKASGYTFTTYTIHWVRRRPGHDLEWIGYINPSSGCSDYNQNFKGKTTLTADKSSNTAYMQLNSLTSEDSAVYYCARRADYGNYEYTWFAYWGQGTTVTVSSSGGGSGGGGSGGGGSVIELTQSPKFMSTSVGDRVNVTYKASQNVGTNVAWFQQKPGQSPKVLIYSASYRYSGVPDRFTGSGSGTDFTLTISNVQSEDLAEYFCQQYHTYPLTFGGGTKLEIKRAAAGGGGSGGGGSGGGGSGGGGSGGGGSGGGGSGGGGSGGGGSVDMAQVQLQESGGGLVQPGGSLKLSCAASGFTFSSYGMSWVRQTPDKRLELVATINSNGGSTYYPDSVKGRFTISRDNAKNTLYLQMSSLKSEDTAMYYCARDRDGYDEGFDYWGQGTTVTVSSGGGGSGGGGSGGGGSDIELTQSPSIMSASPGEKVTMTCSASSSVSYMHWYQQKSGTSPKRWIYDTSKLASGVPARFSGSGSGTSYSLTISSMEAEDAATYYCQQWSSNPPTLGRRTQLQLKRADPAEPKSPDKTHTCPPCPAPPVAGPSVFLFPPKPKDTLMIARTPEVTCVVVDVSHEDPEVKFNWYVDGVEVHNAKTKPREEQYNSTYRVVSVLTVLHQDWLNGKEYKCKVSNKALPAPIEKTISKAKGQPREPQVYTLPPSRDELTKNQVSLTCLVKGFYPSDIAVEWESNGQPENNYKTTPPVLDSDGSFFLYSKLTVDKSRWQQGNVFSCSVMHEALHNHYTQKSLSLSPGKKDPKFWVLVVVGGVLACYSLLVTVAFIIFWVRSKRSRLLHSDYMNMTPRRPGPTRKHYQAYAAARDFAAYRSLRVKFSRSADAPAYQQGQNQLYNELNLGRREEYDVLDKRRGRDPEMGGKPRRKNPQEGLYNELQKDKMAEAYSEIGMKGERRRGKGHDGLYQGLSTATKDTYDALHMQALPPR

SEQ ID NO: 5787 - protein, 252 aa, Artificial Sequence; identical to SEQ ID NO: 4199
  Description of Artificial Sequence: Synthetic Chimeric Antigen Receptor sequence

SEQ ID NO: 5788 - protein, 494 aa, Artificial Sequence
  Description of Artificial Sequence: Synthetic Chimeric Antigen Receptor sequence
MALPVTALLLPLALLLHAARPQVQLVQSGAEVKKPGESLKISCKGSGYSFTSYWIGWVRQMPGKGLEWMGIIYPGDSDTRYSPSFQGQVTISADKSISTAYLQWSSLKASDTAMYYCARLGGSLPDYGMDVWGQGTMVTVSSASGGGGSGGGGSGGGGSEIVLTQSPLSLPVTPGEPASISCRSSQSLLHSNGYNYLDWYLQKPGQSPQLLIYLGSNRASGVPDRFSGSGSGTDFTLKISRVEAEDVGVYYCMQALQTLITFGQGTKVDIKTTTPAPRPPTPAPTIASQPLSLRPEACRPAAGGAVHTRGLDFACDIYIWAPLAGTCGVLLLSLVITLYCKRGRKKLLYIFKQPFMRPVQTTQEEDGCSCRFPEEEEGGCELRVKFSRSADAPAYKQGQNQLYNELNLGRREEYDVLDKRRGRDPEMGGKPRRKNPQEGLYNELQKDKMAEAYSEIGMKGERRRGKGHDGLYQGLSTATKDTYDALHMQALPPR

SEQ ID NO: 5789 - protein, 527 aa, Artificial Sequence
  Description of Artificial Sequence: Synthetic Chimeric Antigen Receptor sequence
GSATMAADSQTPWLLTFSLLCLLWPQEAGALPLLHESGAEVAKPGASVKMSCKASGYTFTTYWMHWIKQRPGQGLEWIGYINPSTGYTDYNQNFKDKATLTADKSSRTAYMQLSSLTSEDSTVYYCTRRGPSYGNHGAWFPYWGQGTLVTVSAVSSGGGGSGGGGSGGGGSTNIVMTQSPRSMSMSVGERVTLSCKASENVDTYVSWYQQKPEQSPKLLIYGASNRYTGVPDRFTGSGSATDFTLTISSVQAEDLADYHCGQSYRYPPTFGGGTKLEITRLSNSIMYFSHFVPVFLPAKPTTTPAPRPPTPAPTIASQPLSLRPEACRPAAGGAVHTRGLDFACDIYIWAPLAGTCGVLLLSLVITLYCRSKRGRKKLLYIFKQPFMRPVQTTQEEDGCSCRFPEEEEGGCELEFRVKFSRSADAPAYQQGQNQLYNELNLGRREEYDVLDKRRGRDPEMGGKPRRKNPQEGLYNELQKDKMAEAYSEIGMKGERRRGKGHDGLYQGLSTATKDTYDALHMQALPPR

SEQ ID NO: 5790 - protein, 442 aa, Artificial Sequence
  Description of Artificial Sequence: Synthetic Chimeric Antigen Receptor sequence
PLALLLHAARPEVQLLESGGGLVQPGGSLRLSCAVSGFTFNSFAMSWVRQAPGKGLEWVSAISGSGGGTYYADSVKGRFTISRDNSKNTLYLQMNSLRAEDTAVYFCAKDKILWFGEPVFDYWGQGTLVTVSSASGGGGSGGGGSGGGGSEIVLTQSPATLSLSPGERATLSCRASQSVSSYLAWYQQKPGQAPRLLIYDASNRATGIPARFSGSGSGTDFTLTISSLEPEDFAVYYCQQRSNWPPTFGQGTKVEIKGLAVSTISSFFPPGYQIYIWAPLAGTCGVLLLSLVITLYCKRGRKKLLYIFKQPFMRPVQTTQEEDGCSCRFPEEEEGGCELRVKFSRSADAPAYQQGQNQLYNELNLGRREEYDVLDKRRGRDPEMGGKPRRKNPQEGLYNELQKDKMAEAYSEIGMKGERRRGKGHDGLYQGLSTATKDTYDA

SEQ ID NO: 5791 - protein, 455 aa, Artificial Sequence
  Description of Artificial Sequence: Synthetic Chimeric Antigen Receptor sequence
MALPVTALLLPLALLLHAARPQVQLQQSGPELVRPGTFVKISCKASGYTFTNYDINWVNQRPGQGLEWIGWIYPGDGSTKYNEKFKAKATLTADKSSSTAYLQLNNLTSENSAVYFCASGYEDAMDYWGQGTSVTVSSGGGGSGGGGSGGGGSDIKMTQSPSSMYASLGERVIINCKASQDINSYLSWFQQKPGKSPKTLIYRANRLVDGVPSRFSGSGSGQDYSLTISSLEYEDMGIYYCLQYDEFPLTFGAGTKLELKRGLAVSTISSFFPPGYQIYIWAPLAGTCGVLLLSLVITLYCKRGRKKLLYIFKQPFMRPVQTTQEEDGCSCRFPEEEEGGCELRVKFSRSADAPAYQQGQNQLYNELNLGRREEYDVLDKRRGRDPEMGGKPRRKNPQEGLYNELQKDKMAEAYSEIGMKGERRRGKGHDGLYQGLSTATKDTYDALHMQALPPR

SEQ ID NO: 5792 - protein, 457 aa, Artificial Sequence
  Description of Artificial Sequence: Synthetic Chimeric Antigen Receptor sequence
MALPVTALLLPLALLLHAARPEVQLQQSGPELVKPGASVKISCKASGYTFTDYNMHWVKQSHGKSLEWIGYIYPYNGGTGYNQKFKSKATLTVDNSSSTAYMDVRSLTSEDSAVYYCARGRPAMDYWGQGTSVTVSSGGGGSGGGGSGGGGSDIVLTQSPASLAVSLGQRATISCRASESVDNYGISFMNWFQQKPGQPPKLLIYAASNQGSGVPARFSGSGSGTDFSLNIHPMEEDDTAMYFCQQSKEVPWTFGGGTKLEIKGLAVSTISSFFPPGYQIYIWAPLAGTCGVLLLSLVITLYCKRGRKKLLYIFKQPFMRPVQTTQEEDGCSCRFPEEEEGGCELRVKFSRSADAPAYQQGQNQLYNELNLGRREEYDVLDKRRGRDPEMGGKPRRKNPQEGLYNELQKDKMAEAYSEIGMKGERRRGKGHDGLYQGLSTATKDTYDALHMQALPPR

SEQ ID NO: 5793 - protein, 458 aa, Artificial Sequence
  Description of Artificial Sequence: Synthetic Chimeric Antigen Receptor sequence
MALPVTALLLPLALLLHAARPQVQLQQSGPELVRPGTFVKISCKASGYTFTNYDINWVNQRPGQGLEWIGWIYPGDGSTKYNEKFKAKATLTADKSSSTAYLQLNNLTSENSAVYFCASGYEDAMDYWGQGTSVTVSSGGGGSGGGGSGGGGSDIKMTQSPSSMYASLGERVIINCKASQDINSYLSWFQQKPGKSPKTLIYRANRLVDGVPSRFSGSGSGQDYSLTISSLEYEDMGIYYCLQYDEFPLTFGAGTKLELKRGLAVSTISSFFPPGYQIISFFLALTSTALLFLLFFLTLRFSVVKRGRKKLLYIFKQPFMRPVQTTQEEDGCSCRFPEEEEGGCELRVKFSRSADAPAYQQGQNQLYNELNLGRREEYDVLDKRRGRDPEMGGKPRRKNPQEGLYNELQKDKMAEAYSEIGMKGERRRGKGHDGLYQGLSTATKDTYDALHMQALPPR

SEQ ID NO: 5794 - protein, 460 aa, Artificial Sequence
  Description of Artificial Sequence: Synthetic Chimeric Antigen Receptor sequence
MALPVTALLLPLALLLHAARPEVQLQQSGPELVKPGASVKISCKASGYTFTDYNMHWVKQSHGKSLEWIGYIYPYNGGTGYNQKFKSKATLTVDNSSSTAYMDVRSLTSEDSAVYYCARGRPAMDYWGQGTSVTVSSGGGGSGGGGSGGGGSDIVLTQSPASLAVSLGQRATISCRASESVDNYGISFMNWFQQKPGQPPKLLIYAASNQGSGVPARFSGSGSGTDFSLNIHPMEEDDTAMYFCQQSKEVPWTFGGGTKLEIKGLAVSTISSFFPPGYQIISFFLALTSTALLFLLFFLTLRFSVVKRGRKKLLYIFKQPFMRPVQTTQEEDGCSCRFPEEEEGGCELRVKFSRSADAPAYQQGQNQLYNELNLGRREEYDVLDKRRGRDPEMGGKPRRKNPQEGLYNELQKDKMAEAYSEIGMKGERRRGKGHDGLYQGLSTATKDTYDALHMQALPPR

SEQ ID NO: 5795 - protein, 461 aa, Artificial Sequence
  Description of Artificial Sequence: Synthetic Chimeric Antigen Receptor sequence
MALPVTALLLPLALLLHAARPQVQLQQPGAEVVKPGASVKMSCKASGYTFTSYYIHWIKQTPGQGLEWVGVIYPGNDDISYNQKFKGKATLTADKSSTTAYMQLSSLTSEDSAVYYCAREVRLRYFDVWGAGTTVTVSSGGGGSGGGGSGGGGSNIMLTQSPSSLAVSAGEKVTMSCKSSQSVFFSSSQKNYLAWYQQIPGQSPKLLIYWASTRESGVPDRFTGSGSGTDFTLTISSVQSEDLAIYYCHQYLSSRTFGGGTKLEIKRGLAVSTISSFFPPGYQIYIWAPLAGTCGVLLLSLVITLYCKRGRKKLLYIFKQPFMRPVQTTQEEDGCSCRFPEEEEGGCELRVKFSRSADAPAYQQGQNQLYNELNLGRREEYDVLDKRRGRDPEMGGKPRRKNPQEGLYNELQKDKMAEAYSEIGMKGERRRGKGHDGLYQGLSTATKDTYDALHMQALPPR

SEQ ID NO: 5796 - protein, 462 aa, Artificial Sequence
  Description of Artificial Sequence: Synthetic Chimeric Antigen Receptor sequence
MALPVTALLLPLALLLHAARPQAYLQQSGAELVRSGASVKMSCKASGYTFTSYNLHWVKQTPGQGLEWIGYIYPGNGGTNYNQKFKGKATLTADTSSSTAYMQISSLTSEDSAVYFCARGGIYYYGSSLDYWGQGTTLTVSSGGGGSGGGGSGGGGSNIVLTQSPASLAVSLGQRATISCRASESVDNYGTTFMYWYQQKPGQPPKLLIYLASNLESGVPARFSGSGSGTDFTLTIDPVEADDAATYYCQQNKEDPWTFGGGTKLEIKGLAVSTISSFFPPGYQIYIWAPLAGTCGVLLLSLVITLYCKRGRKKLLYIFKQPFMRPVQTTQEEDGCSCRFPEEEEGGCELRVKFSRSADAPAYQQGQNQLYNELNLGRREEYDVLDKRRGRDPEMGGKPRRKNPQEGLYNELQKDKMAEAYSEIGMKGERRRGKGHDGLYQGLSTATKDTYDALHMQALPPR

SEQ ID NO: 5797 - protein, 464 aa, Artificial Sequence
  Description of Artificial Sequence: Synthetic Chimeric Antigen Receptor sequence
MALPVTALLLPLALLLHAARPQVQLQQPGAEVVKPGASVKMSCKASGYTFTSYYIHWIKQTPGQGLEWVGVIYPGNDDISYNQKFKGKATLTADKSSTTAYMQLSSLTSEDSAVYYCAREVRLRYFDVWGAGTTVTVSSGGGGSGGGGSGGGGSNIMLTQSPSSLAVSAGEKVTMSCKSSQSVFFSSSQKNYLAWYQQIPGQSPKLLIYWASTRESGVPDRFTGSGSGTDFTLTISSVQSEDLAIYYCHQYLSSRTFGGGTKLEIKRGLAVSTISSFFPPGYQIISFFLALTSTALLFLLFFLTLRFSVVKRGRKKLLYIFKQPFMRPVQTTQEEDGCSCRFPEEEEGGCELRVKFSRSADAPAYQQGQNQLYNELNLGRREEYDVLDKRRGRDPEMGGKPRRKNPQEGLYNELQKDKMAEAYSEIGMKGERRRGKGHDGLYQGLSTATKDTYDALHMQALPPR

SEQ ID NO: 5798 - protein, 465 aa, Artificial Sequence
  Description of Artificial Sequence: Synthetic Chimeric Antigen Receptor sequence
MALPVTALLLPLALLLHAARPEVKLQESGPELVKPGASVKMSCKASGYKFTDYVVHWLKQKPGQGLEWIGYINPYNDGTKYNEKFKGKATLTSDKSSSTAYMEVSSLTSEDSAVYYCARDYRYEVYGMDYWGQGTSVTVSSGGGGSGGGGSGGGGSDIVLTQSPTIMSASPGERVTMTCTASSSVNYIHWYQQKSGDSPLRWIFDTSKVASGVPARFSGSGSGTSYSLTISTMEAEDAATYYCQQWRSYPLTFGDGTRLELKRADAAPTVSGLAVSTISSFFPPGYQIYIWAPLAGTCGVLLLSLVITLYCKRGRKKLLYIFKQPFMRPVQTTQEEDGCSCRFPEEEEGGCELRVKFSRSADAPAYQQGQNQLYNELNLGRREEYDVLDKRRGRDPEMGGKPRRKNPQEGLYNELQKDKMAEAYSEIGMKGERRRGKGHDGLYQGLSTATKDTYDALHMQALPPR

SEQ ID NO: 5799 - protein, 468 aa, Artificial Sequence
  Description of Artificial Sequence: Synthetic Chimeric Antigen Receptor sequence
MALPVTALLLPLALLLHAARPEVKLQESGPELVKPGASVKMSCKASGYKFTDYVVHWLKQKPGQGLEWIGYINPYNDGTKYNEKFKGKATLTSDKSSSTAYMEVSSLTSEDSAVYYCARDYRYEVYGMDYWGQGTSVTVSSGGGGSGGGGSGGGGSDIVLTQSPTIMSASPGERVTMTCTASSSVNYIHWYQQKSGDSPLRWIFDTSKVASGVPARFSGSGSGTSYSLTISTMEAEDAATYYCQQWRSYPLTFGDGTRLELKRADAAPTVSGLAVSTISSFFPPGYQIISFFLALTSTALLFLLFFLTLRFSVVKRGRKKLLYIFKQPFMRPVQTTQEEDGCSCRFPEEEEGGCELRVKFSRSADAPAYQQGQNQLYNELNLGRREEYDVLDKRRGRDPEMGGKPRRKNPQEGLYNELQKDKMAEAYSEIGMKGERRRGKGHDGLYQGLSTATKDTYDALHMQALPPR

SEQ ID NO: 5800 - protein, 484 aa, Artificial Sequence
  Description of Artificial Sequence: Synthetic Chimeric Antigen Receptor sequence
MALPVTALLLPLALLLHAARPQVQLQQSGPELVRPGTFVKISCKASGYTFTNYDINWVNQRPGQGLEWIGWIYPGDGSTKYNEKFKAKATLTADKSSSTAYLQLNNLTSENSAVYFCASGYEDAMDYWGQGTSVTVSSGGGGSGGGGSGGGGSDIKMTQSPSSMYASLGERVIINCKASQDINSYLSWFQQKPGKSPKTLIYRANRLVDGVPSRFSGSGSGQDYSLTISSLEYEDMGIYYCLQYDEFPLTFGAGTKLELKRTTTPAPRPPTPAPTIASQPLSLRPEACRPAAGGAVHTRGLDFACDIYIWAPLAGTCGVLLLSLVITLYCKRGRKKLLYIFKQPFMRPVQTTQEEDGCSCRFPEEEEGGCELRVKFSRSADAPAYQQGQNQLYNELNLGRREEYDVLDKRRGRDPEMGGKPRRKNPQEGLYNELQKDKMAEAYSEIGMKGERRRGKGHDGLYQGLSTATKDTYDALHMQALPPR

SEQ ID NO: 5801 - protein, 484 aa, Artificial Sequence
  Description of Artificial Sequence: Synthetic Chimeric Antigen Receptor sequence
MALPVTALLLPLALLLHAARPQVQLVQSGGDLAQPGRSLRLSCAASGFTFDDYAMHWVRQAPGKGLEWVAVIWPDGGQKYYGDSVKGRFTVSRDNPKNTLYLQMNSLRAEDTAIYYCVRHFNAWDYWGQGTLVTVSSASGGGGSGGGGSGGGGSDIQLTQSPSSLSAYVGGRVTITCQASQGISQFLNWFQQKPGKAPKLLISDASNLEPGVPSRFSGSGSGTDFTFTITNLQPEDIATYYCQQYDDLPLTFGGGTKVEIKTTTPAPRPPTPAPTIASQPLSLRPEACRPAAGGAVHTRGLDFACDIYIWAPLAGTCGVLLLSLVITLYCKRGRKKLLYIFKQPFMRPVQTTQEEDGCSCRFPEEEEGGCELRVKFSRSADAPAYKQGQNQLYNELNLGRREEYDVLDKRRGRDPEMGGKPRRKNPQEGLYNELQKDKMAEAYSEIGMKGERRRGKGHDGLYQGLSTATKDTYDALHMQALPPR

SEQ ID NO: 5802 - protein, 486 aa, Artificial Sequence
  Description of Artificial Sequence: Synthetic Chimeric Antigen Receptor sequence
MALPVTALLLPLALLLHAARPEVQLQQSGPELVKPGASVKISCKASGYTFTDYNMHWVKQSHGKSLEWIGYIYPYNGGTGYNQKFKSKATLTVDNSSSTAYMDVRSLTSEDSAVYYCARGRPAMDYWGQGTSVTVSSGGGGSGGGGSGGGGSDIVLTQSPASLAVSLGQRATISCRASESVDNYGISFMNWFQQKPGQPPKLLIYAASNQGSGVPARFSGSGSGTDFSLNIHPMEEDDTAMYFCQQSKEVPWTFGGGTKLEIKTTTPAPRPPTPAPTIASQPLSLRPEACRPAAGGAVHTRGLDFACDIYIWAPLAGTCGVLLLSLVITLYCKRGRKKLLYIFKQPFMRPVQTTQEEDGCSCRFPEEEEGGCELRVKFSRSADAPAYQQGQNQLYNELNLGRREEYDVLDKRRGRDPEMGGKPRRKNPQEGLYNELQKDKMAEAYSEIGMKGERRRGKGHDGLYQGLSTATKDTYDALHMQALPPR

SEQ ID NO: 5803 - protein, 487 aa, Artificial Sequence
  Description of Artificial Sequence: Synthetic Chimeric Antigen Receptor sequence
MALPVTALLLPLALLLHAARPQVQLQQSGPELVRPGTFVKISCKASGYTFTNYDINWVNQRPGQGLEWIGWIYPGDGSTKYNEKFKAKATLTADKSSSTAYLQLNNLTSENSAVYFCASGYEDAMDYWGQGTSVTVSSGGGGSGGGGSGGGGSDIKMTQSPSSMYASLGERVIINCKASQDINSYLSWFQQKPGKSPKTLIYRANRLVDGVPSRFSGSGSGQDYSLTISSLEYEDMGIYYCLQYDEFPLTFGAGTKLELKRTTTPAPRPPTPAPTIASQPLSLRPEACRPAAGGAVHTRGLDFACDIISFFLALTSTALLFLLFFLTLRFSVVKRGRKKLLYIFKQPFMRPVQTTQEEDGCSCRFPEEEEGGCELRVKFSRSADAPAYQQGQNQLYNELNLGRREEYDVLDKRRGRDPEMGGKPRRKNPQEGLYNELQKDKMAEAYSEIGMKGERRRGKGHDGLYQGLSTATKDTYDALHMQALPPR

SEQ ID NO: 5804 - protein, 488 aa, Artificial Sequence
  Description of Artificial Sequence: Synthetic Chimeric Antigen Receptor sequence
MALPVTALLLPLALLLHAARPQVQLVQSGAEVKKPGESLKISCKGSGYSFTNYWIGWVRQMPGKGLEWMGIIYPGDSDTRYSPSFQGQVTISADKSISTAYLQWSSLKASDTAMYYCARHGPSSWGEFDYWGQGTLVTVSSASGGGGSGGGGSGGGGSDIRLTQSPSSLSASVGDRVTITCRASQSISSYLNWYQQKPGKAPKLLIYAASSLQSGVPSRFSGSGSGTDFTLTISSLQPEDFATYYCQQSYSTPLTFGGGTKVDIKTTTPAPRPPTPAPTIASQPLSLRPEACRPAAGGAVHTRGLDFACDIYIWAPLAGTCGVLLLSLVITLYCKRGRKKLLYIFKQPFMRPVQTTQEEDGCSCRFPEEEEGGCELRVKFSRSADAPAYKQGQNQLYNELNLGRREEYDVLDKRRGRDPEMGGKPRRKNPQEGLYNELQKDKMAEAYSEIGMKGERRRGKGHDGLYQGLSTATKDTYDALHMQALPPR

SEQ ID NO: 5805 - protein, 489 aa, Artificial Sequence
  Description of Artificial Sequence: Synthetic Chimeric Antigen Receptor sequence
MALPVTALLLPLALLLHAARPEVQLQQSGPELVKPGASVKISCKASGYTFTDYNMHWVKQSHGKSLEWIGYIYPYNGGTGYNQKFKSKATLTVDNSSSTAYMDVRSLTSEDSAVYYCARGRPAMDYWGQGTSVTVSSGGGGSGGGGSGGGGSDIVLTQSPASLAVSLGQRATISCRASESVDNYGISFMNWFQQKPGQPPKLLIYAASNQGSGVPARFSGSGSGTDFSLNIHPMEEDDTAMYFCQQSKEVPWTFGGGTKLEIKTTTPAPRPPTPAPTIASQPLSLRPEACRPAAGGAVHTRGLDFACDIISFFLALTSTALLFLLFFLTLRFSVVKRGRKKLLYIFKQPFMRPVQTTQEEDGCSCRFPEEEEGGCELRVKFSRSADAPAYQQGQNQLYNELNLGRREEYDVLDKRRGRDPEMGGKPRRKNPQEGLYNELQKDKMAEAYSEIGMKGERRRGKGHDGLYQGLSTATKDTYDALHMQALPPR

SEQ ID NO: 5806 - protein, 489 aa, Artificial Sequence
  Description of Artificial Sequence: Synthetic Chimeric Antigen Receptor sequence
MALPVTALLLPLALLLHAARPEVQLVESGGGLVQPGGSLRLSCAASGFTFSSYAMSWVRQAPGKGLEWVSAISGSGGSTYYADSVKGRFTISRDNSKNTLYLQMNSLRAEDTAVYYCAKETDYYGSGTFDYWGQGTLVTVSSASGGGGSGGGGSGGGGSDIQMTQSPSSLSASVGDRVTISCRASQGIGIYLAWYQQRSGKPPQLLIHGASTLQSGVPSRFSGSGSGTDFTLTISSLQPEDFASYWCQQSNNFPPTFGQGTKVEIKTTTPAPRPPTPAPTIASQPLSLRPEACRPAAGGAVHTRGLDFACDIYIWAPLAGTCGVLLLSLVITLYCKRGRKKLLYIFKQPFMRPVQTTQEEDGCSCRFPEEEEGGCELRVKFSRSADAPAYKQGQNQLYNELNLGRREEYDVLDKRRGRDPEMGGKPRRKNPQEGLYNELQKDKMAEAYSEIGMKGERRRGKGHDGLYQGLSTATKDTYDALHMQALPPR

SEQ ID NO: 5807 - protein, 489 aa, Artificial Sequence
  Description of Artificial Sequence: Synthetic Chimeric Antigen Receptor sequence
MALPVTALLLPLALLLHAARPQVQLVQSGAEVKKPGASVRVSCKASGYMFTDFFIHWVRQAPGQGLEWMGWINPNSGVTKYAQKFQGRVTMTRNTSISTAYMELSSLRSEDTAVYYCATWYSSGWYGIANIWGQGTMVTVSSASGGGGSGGGGSGGGGSDIQLTQSPSSLSASVGDRVTITCQASHDISNYLHWYQQKPGKAPKLLIYDASNLETGVPSRFTGSGSGTDFTLTIRSLQPEDVAAYYCQQSDDLPHTFGQGTKVDIKTTTPAPRPPTPAPTIASQPLSLRPEACRPAAGGAVHTRGLDFACDIYIWAPLAGTCGVLLLSLVITLYCKRGRKKLLYIFKQPFMRPVQTTQEEDGCSCRFPEEEEGGCELRVKFSRSADAPAYKQGQNQLYNELNLGRREEYDVLDKRRGRDPEMGGKPRRKNPQEGLYNELQKDKMAEAYSEIGMKGERRRGKGHDGLYQGLSTATKDTYDALHMQALPPR

SEQ ID NO: 5808 - protein, 490 aa, Artificial Sequence
  Description of Artificial Sequence: Synthetic Chimeric Antigen Receptor sequence
MALPVTALLLPLALLLHAARPQVQLQQPGAEVVKPGASVKMSCKASGYTFTSYYIHWIKQTPGQGLEWVGVIYPGNDDISYNQKFKGKATLTADKSSTTAYMQLSSLTSEDSAVYYCAREVRLRYFDVWGAGTTVTVSSGGGGSGGGGSGGGGSNIMLTQSPSSLAVSAGEKVTMSCKSSQSVFFSSSQKNYLAWYQQIPGQSPKLLIYWASTRESGVPDRFTGSGSGTDFTLTISSVQSEDLAIYYCHQYLSSRTFGGGTKLEIKRTTTPAPRPPTPAPTIASQPLSLRPEACRPAAGGAVHTRGLDFACDIYIWAPLAGTCGVLLLSLVITLYCKRGRKKLLYIFKQPFMRPVQTTQEEDGCSCRFPEEEEGGCELRVKFSRSADAPAYQQGQNQLYNELNLGRREEYDVLDKRRGRDPEMGGKPRRKNPQEGLYNELQKDKMAEAYSEIGMKGERRRGKGHDGLYQGLSTATKDTYDALHMQALPPR

SEQ ID NO: 5809 - protein, 492 aa, Artificial Sequence
  Description of Artificial Sequence: Synthetic Chimeric Antigen Receptor sequence
MALPVTALLLPLALLLHAARPQVQLVQSGGGVVQPGKSLRLSCAASGFTFSIFAMHWVRQAPGKGLEWVATISYDGSNAFYADSVEGRFTISRDNSKDSLYLQMDSLRPEDTAVYYCVKAGDGGYDVFDSWGQGTLVTVSSASGGGGSGGGGSGGGGSEIVMTQSPLSLPVTPGEPASISCRSSQSLLHSNGYNYLDWYLQKPGQSPQLLIYLGSNRASGVPDRFSGSGSGTDFTLKISRVEAEDVGVYYCMQALQTPTFGPGTKVDIKTTTPAPRPPTPAPTIASQPLSLRPEACRPAAGGAVHTRGLDFACDIYIWAPLAGTCGVLLLSLVITLYCKRGRKKLLYIFKQPFMRPVQTTQEEDGCSCRFPEEEEGGCELRVKFSRSADAPAYKQGQNQLYNELNLGRREEYDVLDKRRGRDPEMGGKPRRKNPQEGLYNELQKDKMAEAYSEIGMKGERRRGKGHDGLYQGLSTATKDTYDALHMQALPPR

SEQ ID NO: 5810 - protein, 493 aa, Artificial Sequence
  Description of Artificial Sequence: Synthetic Chimeric Antigen Receptor sequence
MALPVTALLLPLALLLHAARPQVQLQQPGAEVVKPGASVKMSCKASGYTFTSYYIHWIKQTPGQGLEWVGVIYPGNDDISYNQKFKGKATLTADKSSTTAYMQLSSLTSEDSAVYYCAREVRLRYFDVWGAGTTVTVSSGGGGSGGGGSGGGGSNIMLTQSPSSLAVSAGEKVTMSCKSSQSVFFSSSQKNYLAWYQQIPGQSPKLLIYWASTRESGVPDRFTGSGSGTDFTLTISSVQSEDLAIYYCHQYLSSRTFGGGTKLEIKRTTTPAPRPPTPAPTIASQPLSLRPEACRPAAGGAVHTRGLDFACDIISFFLALTSTALLFLLFFLTLRFSVVKRGRKKLLYIFKQPFMRPVQTTQEEDGCSCRFPEEEEGGCELRVKFSRSADAPAYQQGQNQLYNELNLGRREEYDVLDKRRGRDPEMGGKPRRKNPQEGLYNELQKDKMAEAYSEIGMKGERRRGKGHDGLYQGLSTATKDTYDALHMQALPPR

SEQ ID NO: 5811 - protein, 493 aa, Artificial Sequence
  Description of Artificial Sequence: Synthetic Chimeric Antigen Receptor sequence
MALPVTALLLPLALLLHAARPQVQLVQSGGGLVQPGGSLRLSCAASGFTFSSYAMSWVRQAPGKGLEWVSAISGSGGSTYYADSVKGRFTISRDNSKNTLYLQMNSLRAEDTAVYYCAKEDTIRGPNYYYYGMDVWGQGTTVTVSSASGGGGSGGGGSGGGGSETTLTQSPSSVSASVGDRVSITCRASQDIDTWLAWYQLKPGKAPKLLMYAASNLQGGVPSRFSGSGSGTDFILTISSLQPEDFATYYCQQASIFPPTFGGGTKVDIKTTTPAPRPPTPAPTIASQPLSLRPEACRPAAGGAVHTRGLDFACDIYIWAPLAGTCGVLLLSLVITLYCKRGRKKLLYIFKQPFMRPVQTTQEEDGCSCRFPEEEEGGCELRVKFSRSADAPAYKQGQNQLYNELNLGRREEYDVLDKRRGRDPEMGGKPRRKNPQEGLYNELQKDKMAEAYSEIGMKGERRRGKGHDGLYQGLSTATKDTYDALHMQALPPR

SEQ ID NO: 5812 - protein, 494 aa, Artificial Sequence
  Description of Artificial Sequence: Synthetic Chimeric Antigen Receptor sequence
MALPVTALLLPLALLLHAARPEVKLQESGPELVKPGASVKMSCKASGYKFTDYVVHWLKQKPGQGLEWIGYINPYNDGTKYNEKFKGKATLTSDKSSSTAYMEVSSLTSEDSAVYYCARDYRYEVYGMDYWGQGTSVTVSSGGGGSGGGGSGGGGSDIVLTQSPTIMSASPGERVTMTCTASSSVNYIHWYQQKSGDSPLRWIFDTSKVASGVPARFSGSGSGTSYSLTISTMEAEDAATYYCQQWRSYPLTFGDGTRLELKRADAAPTVSTTTPAPRPPTPAPTIASQPLSLRPEACRPAAGGAVHTRGLDFACDIYIWAPLAGTCGVLLLSLVITLYCKRGRKKLLYIFKQPFMRPVQTTQEEDGCSCRFPEEEEGGCELRVKFSRSADAPAYQQGQNQLYNELNLGRREEYDVLDKRRGRDPEMGGKPRRKNPQEGLYNELQKDKMAEAYSEIGMKGERRRGKGHDGLYQGLSTATKDTYDALHMQALPPR

SEQ ID NO: 5813 - protein, 494 aa, Artificial Sequence
  Description of Artificial Sequence: Synthetic Chimeric Antigen Receptor sequence
MALPVTALLLPLALLLHAARPQVQLVQSGAEVKKPGESLKISCKGSGYSFTSYWIGWVRQMPGKGLEWMGIIYPGDSDTRYSPSFQGQVTISADKSITTAYLQWSSLRASDSAMYYCARGGYSDYDYYFDFWGQGTLVTVSSASGGGGSGGGGSGGGGSEIVMTQSPLSLPVTPGEPASISCRSSQSLLHSNGYNYLDWYLQKPGQSPQLLIYLGSNRASGVPDRFSGSGSGTDFTLKISRVEAEDVGVYYCMQALQTPFTFGGGTKVEIKTTTPAPRPPTPAPTIASQPLSLRPEACRPAAGGAVHTRGLDFACDIYIWAPLAGTCGVLLLSLVITLYCKRGRKKLLYIFKQPFMRPVQTTQEEDGCSCRFPEEEEGGCELRVKFSRSADAPAYKQGQNQLYNELNLGRREEYDVLDKRRGRDPEMGGKPRRKNPQEGLYNELQKDKMAEAYSEIGMKGERRRGKGHDGLYQGLSTATKDTYDALHMQALPPR

SEQ ID NO: 5814 - protein, 495 aa, Artificial Sequence
  Description of Artificial Sequence: Synthetic Chimeric Antigen Receptor sequence
MALPVTALLLPLALLLHAARPQVQLVQSGAEVKKPGASVRVSCKASGYIFTNYYVHWVRQAPGQGLEWMGIISPSGGSPTYAQRLQGRVTMTRDLSTSTVYMELSSLTSEDTAVYFCARESRLRGNRLGLQSSIFDHWGQGTLVTVSSASGGGGSGGGGSGGGGSDIRMTQSPPSLSASVGDRVTIPCQASQDINNHLNWYQQKPGKAPQLLIYDTSNLEIGVPSRFSGSGSGTDFTLTISSLQPEDIATYYCQQYENLPLTFGGGTKVEIKTTTPAPRPPTPAPTIASQPLSLRPEACRPAAGGAVHTRGLDFACDIYIWAPLAGTCGVLLLSLVITLYCKRGRKKLLYIFKQPFMRPVQTTQEEDGCSCRFPEEEEGGCELRVKFSRSADAPAYKQGQNQLYNELNLGRREEYDVLDKRRGRDPEMGGKPRRKNPQEGLYNELQKDKMAEAYSEIGMKGERRRGKGHDGLYQGLSTATKDTYDALHMQALPPR

SEQ ID NO: 5815 - protein, 497 aa, Artificial Sequence
  Description of Artificial Sequence: Synthetic Chimeric Antigen Receptor sequence
MALPVTALLLPLALLLHAARPEVKLQESGPELVKPGASVKMSCKASGYKFTDYVVHWLKQKPGQGLEWIGYINPYNDGTKYNEKFKGKATLTSDKSSSTAYMEVSSLTSEDSAVYYCARDYRYEVYGMDYWGQGTSVTVSSGGGGSGGGGSGGGGSDIVLTQSPTIMSASPGERVTMTCTASSSVNYIHWYQQKSGDSPLRWIFDTSKVASGVPARFSGSGSGTSYSLTISTMEAEDAATYYCQQWRSYPLTFGDGTRLELKRADAAPTVSTTTPAPRPPTPAPTIASQPLSLRPEACRPAAGGAVHTRGLDFACDIISFFLALTSTALLFLLFFLTLRFSVVKRGRKKLLYIFKQPFMRPVQTTQEEDGCSCRFPEEEEGGCELRVKFSRSADAPAYQQGQNQLYNELNLGRREEYDVLDKRRGRDPEMGGKPRRKNPQEGLYNELQKDKMAEAYSEIGMKGERRRGKGHDGLYQGLSTATKDTYDALHMQALPPR

SEQ ID NO: 5816 - protein, 652 aa, Artificial Sequence
  Description of Artificial Sequence: Synthetic Chimeric Antigen Receptor sequence
QVQLQQSGPELVRPGTFVKISCKASGYTFTNYDINWVNQRPGQGLEWIGWIYPGDGSTKYNEKFKAKATLTADKSSSTAYLQLNNLTSENSAVYFCASGYEDAMDYWGQGTSVTVSSGGGGSGGGGSGGGGSDIKMTQSPSSMYASLGERVIINCKASQDINSYLSWFQQKPGKSPKTLIYRANRLVDGVPSRFSGSGSGQDYSLTISSLEYEDMGIYYCLQYDEFPLTFGAGTKLELKREPKSPDKTHTCPPCPAPPVAGPSVFLFPPKPKDTLMIARTPEVTCVVVDVSHEDPEVKFNWYVDGVEVHNAKTKPREEQYNSTYRVVSVLTVLHQDWLNGKEYKCKVSNKALPAPIEKTISKAKGQPREPQVYTLPPSRDELTKNQVSLTCLVKGFYPSDIAVEWESNGQPENNYKTTPPVLDSDGSFFLYSKLTVDKSRWQQGNVFSCSVMHEALHNHYTQKSLSLSPGKIISFFLALTSTALLFLLFFLTLRFSVVKRGRKKLLYIFKQPFMRPVQTTQEEDGCSCRFPEEEEGGCELRVKFSRSADAPAYQQGQNQLYNELNLGRREEYDVLDKRRGRDPEMGGKPRRKNPQEGLYNELQKDKMAEAYSEIGMKGERRRGKGHDGLYQGLSTATKDTYDALHMQALPPR

SEQ ID NO: 5817 - protein, 670 aa, Artificial Sequence
  Description of Artificial Sequence: Synthetic Chimeric Antigen Receptor sequence
MALPVTALLLPLALLLHAARPQVQLQQSGPELVRPGTFVKISCKASGYTFTNYDINWVNQRPGQGLEWIGWIYPGDGSTKYNEKFKAKATLTADKSSSTAYLQLNNLTSENSAVYFCASGYEDAMDYWGQGTSVTVSSGGGGSGGGGSGGGGSDIKMTQSPSSMYASLGERVIINCKASQDINSYLSWFQQKPGKSPKTLIYRANRLVDGVPSRFSGSGSGQDYSLTISSLEYEDMGIYYCLQYDEFPLTFGAGTKLELKREPKSPDKTHTCPPCPAPPVAGPSVFLFPPKPKDTLMIARTPEVTCVVVDVSHEDPEVKFNWYVDGVEVHNAKTKPREEQYNSTYRVVSVLTVLHQDWLNGKEYKCKVSNKALPAPIEKTISKAKGQPREPQVYTLPPSRDELTKNQVSLTCLVKGFYPSDIAVEWESNGQPENNYKTTPPVLDSDGSFFLYSKLTVDKSRWQQGNVFSCSVMHEALHNHYTQKSLSLSPGKIYIWAPLAGTCGVLLLSLVITLYCKRGRKKLLYIFKQPFMRPVQTTQEEDGCSCRFPEEEEGGCELRVKFSRSADAPAYQQGQNQLYNELNLGRREEYDVLDKRRGRDPEMGGKPRRKNPQEGLYNELQKDKMAEAYSEIGMKGERRRGKGHDGLYQGLSTATKDTYDALHMQALPPR

SEQ ID NO: 5818 - protein, 672 aa, Artificial Sequence
  Description of Artificial Sequence: Synthetic Chimeric Antigen Receptor sequence
MALPVTALLLPLALLLHAARPEVQLQQSGPELVKPGASVKISCKASGYTFTDYNMHWVKQSHGKSLEWIGYIYPYNGGTGYNQKFKSKATLTVDNSSSTAYMDVRSLTSEDSAVYYCARGRPAMDYWGQGTSVTVSSGGGGSGGGGSGGGGSDIVLTQSPASLAVSLGQRATISCRASESVDNYGISFMNWFQQKPGQPPKLLIYAASNQGSGVPARFSGSGSGTDFSLNIHPMEEDDTAMYFCQQSKEVPWTFGGGTKLEIKEPKSPDKTHTCPPCPAPPVAGPSVFLFPPKPKDTLMIARTPEVTCVVVDVSHEDPEVKFNWYVDGVEVHNAKTKPREEQYNSTYRVVSVLTVLHQDWLNGKEYKCKVSNKALPAPIEKTISKAKGQPREPQVYTLPPSRDELTKNQVSLTCLVKGFYPSDIAVEWESNGQPENNYKTTPPVLDSDGSFFLYSKLTVDKSRWQQGNVFSCSVMHEALHNHYTQKSLSLSPGKIYIWAPLAGTCGVLLLSLVITLYCKRGRKKLLYIFKQPFMRPVQTTQEEDGCSCRFPEEEEGGCELRVKFSRSADAPAYQQGQNQLYNELNLGRREEYDVLDKRRGRDPEMGGKPRRKNPQEGLYNELQKDKMAEAYSEIGMKGERRRGKGHDGLYQGLSTATKDTYDALHMQALPPR

SEQ ID NO: 5819 - protein, 673 aa, Artificial Sequence
  Description of Artificial Sequence: Synthetic Chimeric Antigen Receptor sequence
MALPVTALLLPLALLLHAARPQVQLQQSGPELVRPGTFVKISCKASGYTFTNYDINWVNQRPGQGLEWIGWIYPGDGSTKYNEKFKAKATLTADKSSSTAYLQLNNLTSENSAVYFCASGYEDAMDYWGQGTSVTVSSGGGGSGGGGSGGGGSDIKMTQSPSSMYASLGERVIINCKASQDINSYLSWFQQKPGKSPKTLIYRANRLVDGVPSRFSGSGSGQDYSLTISSLEYEDMGIYYCLQYDEFPLTFGAGTKLELKREPKSPDKTHTCPPCPAPPVAGPSVFLFPPKPKDTLMIARTPEVTCVVVDVSHEDPEVKFNWYVDGVEVHNAKTKPREEQYNSTYRVVSVLTVLHQDWLNGKEYKCKVSNKALPAPIEKTISKAKGQPREPQVYTLPPSRDELTKNQVSLTCLVKGFYPSDIAVEWESNGQPENNYKTTPPVLDSDGSFFLYSKLTVDKSRWQQGNVFSCSVMHEALHNHYTQKSLSLSPGKIISFFLALTSTALLFLLFFLTLRFSVVKRGRKKLLYIFKQPFMRPVQTTQEEDGCSCRFPEEEEGGCELRVKFSRSADAPAYQQGQNQLYNELNLGRREEYDVLDKRRGRDPEMGGKPRRKNPQEGLYNELQKDKMAEAYSEIGMKGERRRGKGHDGLYQGLSTATKDTYDALHMQALPPR

SEQ ID NO: 5820 - protein, 675 aa, Artificial Sequence
  Description of Artificial Sequence: Synthetic Chimeric Antigen Receptor sequence
MALPVTALLLPLALLLHAARPEVQLQQSGPELVKPGASVKISCKASGYTFTDYNMHWVKQSHGKSLEWIGYIYPYNGGTGYNQKFKSKATLTVDNSSSTAYMDVRSLTSEDSAVYYCARGRPAMDYWGQGTSVTVSSGGGGSGGGGSGGGGSDIVLTQSPASLAVSLGQRATISCRASESVDNYGISFMNWFQQKPGQPPKLLIYAASNQGSGVPARFSGSGSGTDFSLNIHPMEEDDTAMYFCQQSKEVPWTFGGGTKLEIKEPKSPDKTHTCPPCPAPPVAGPSVFLFPPKPKDTLMIARTPEVTCVVVDVSHEDPEVKFNWYVDGVEVHNAKTKPREEQYNSTYRVVSVLTVLHQDWLNGKEYKCKVSNKALPAPIEKTISKAKGQPREPQVYTLPPSRDELTKNQVSLTCLVKGFYPSDIAVEWESNGQPENNYKTTPPVLDSDGSFFLYSKLTVDKSRWQQGNVFSCSVMHEALHNHYTQKSLSLSPGKIISFFLALTSTALLFLLFFLTLRFSVVKRGRKKLLYIFKQPFMRPVQTTQEEDGCSCRFPEEEEGGCELRVKFSRSADAPAYQQGQNQLYNELNLGRREEYDVLDKRRGRDPEMGGKPRRKNPQEGLYNELQKDKMAEAYSEIGMKGERRRGKGHDGLYQGLSTATKDTYDALHMQALPPR

SEQ ID NO: 5821 - protein, 676 aa, Artificial Sequence
  Description of Artificial Sequence: Synthetic Chimeric Antigen Receptor sequence
MALPVTALLLPLALLLHAARPQVQLQQPGAEVVKPGASVKMSCKASGYTFTSYYIHWIKQTPGQGLEWVGVIYPGNDDISYNQKFKGKATLTADKSSTTAYMQLSSLTSEDSAVYYCAREVRLRYFDVWGAGTTVTVSSGGGGSGGGGSGGGGSNIMLTQSPSSLAVSAGEKVTMSCKSSQSVFFSSSQKNYLAWYQQIPGQSPKLLIYWASTRESGVPDRFTGSGSGTDFTLTISSVQSEDLAIYYCHQYLSSRTFGGGTKLEIKREPKSPDKTHTCPPCPAPPVAGPSVFLFPPKPKDTLMIARTPEVTCVVVDVSHEDPEVKFNWYVDGVEVHNAKTKPREEQYNSTYRVVSVLTVLHQDWLNGKEYKCKVSNKALPAPIEKTISKAKGQPREPQVYTLPPSRDELTKNQVSLTCLVKGFYPSDIAVEWESNGQPENNYKTTPPVLDSDGSFFLYSKLTVDKSRWQQGNVFSCSVMHEALHNHYTQKSLSLSPGKIYIWAPLAGTCGVLLLSLVITLYCKRGRKKLLYIFKQPFMRPVQTTQEEDGCSCRFPEEEEGGCELRVKFSRSADAPAYQQGQNQLYNELNLGRREEYDVLDKRRGRDPEMGGKPRRKNPQEGLYNELQKDKMAEAYSEIGMKGERRRGKGHDGLYQGLSTATKDTYDALHMQALPPR

SEQ ID NO: 5822 - protein, 679 aa, Artificial Sequence
  Description of Artificial Sequence: Synthetic Chimeric Antigen Receptor sequence
MALPVTALLLPLALLLHAARPQVQLQQPGAEVVKPGASVKMSCKASGYTFTSYYIHWIKQTPGQGLEWVGVIYPGNDDISYNQKFKGKATLTADKSSTTAYMQLSSLTSEDSAVYYCAREVRLRYFDVWGAGTTVTVSSGGGGSGGGGSGGGGSNIMLTQSPSSLAVSAGEKVTMSCKSSQSVFFSSSQKNYLAWYQQIPGQSPKLLIYWASTRESGVPDRFTGSGSGTDFTLTISSVQSEDLAIYYCHQYLSSRTFGGGTKLEIKREPKSPDKTHTCPPCPAPPVAGPSVFLFPPKPKDTLMIARTPEVTCVVVDVSHEDPEVKFNWYVDGVEVHNAKTKPREEQYNSTYRVVSVLTVLHQDWLNGKEYKCKVSNKALPAPIEKTISKAKGQPREPQVYTLPPSRDELTKNQVSLTCLVKGFYPSDIAVEWESNGQPENNYKTTPPVLDSDGSFFLYSKLTVDKSRWQQGNVFSCSVMHEALHNHYTQKSLSLSPGKIISFFLALTSTALLFLLFFLTLRFSVVKRGRKKLLYIFKQPFMRPVQTTQEEDGCSCRFPEEEEGGCELRVKFSRSADAPAYQQGQNQLYNELNLGRREEYDVLDKRRGRDPEMGGKPRRKNPQEGLYNELQKDKMAEAYSEIGMKGERRRGKGHDGLYQGLSTATKDTYDALHMQALPPR

SEQ ID NO: 5823 - protein, 680 aa, Artificial Sequence
  Description of Artificial Sequence: Synthetic Chimeric Antigen Receptor sequence
MALPVTALLLPLALLLHAARPEVKLQESGPELVKPGASVKMSCKASGYKFTDYVVHWLKQKPGQGLEWIGYINPYNDGTKYNEKFKGKATLTSDKSSSTAYMEVSSLTSEDSAVYYCARDYRYEVYGMDYWGQGTSVTVSSGGGGSGGGGSGGGGSDIVLTQSPTIMSASPGERVTMTCTASSSVNYIHWYQQKSGDSPLRWIFDTSKVASGVPARFSGSGSGTSYSLTISTMEAEDAATYYCQQWRSYPLTFGDGTRLELKRADAAPTVSEPKSPDKTHTCPPCPAPPVAGPSVFLFPPKPKDTLMIARTPEVTCVVVDVSHEDPEVKFNWYVDGVEVHNAKTKPREEQYNSTYRVVSVLTVLHQDWLNGKEYKCKVSNKALPAPIEKTISKAKGQPREPQVYTLPPSRDELTKNQVSLTCLVKGFYPSDIAVEWESNGQPENNYKTTPPVLDSDGSFFLYSKLTVDKSRWQQGNVFSCSVMHEALHNHYTQKSLSLSPGKIYIWAPLAGTCGVLLLSLVITLYCKRGRKKLLYIFKQPFMRPVQTTQEEDGCSCRFPEEEEGGCELRVKFSRSADAPAYQQGQNQLYNELNLGRREEYDVLDKRRGRDPEMGGKPRRKNPQEGLYNELQKDKMAEAYSEIGMKGERRRGKGHDGLYQGLSTATKDTYDALHMQALPPR

SEQ ID NO: 5824 - protein, 683 aa, Artificial Sequence
  Description of Artificial Sequence: Synthetic Chimeric Antigen Receptor sequence
MALPVTALLLPLALLLHAARPEVKLQESGPELVKPGASVKMSCKASGYKFTDYVVHWLKQKPGQGLEWIGYINPYNDGTKYNEKFKGKATLTSDKSSSTAYMEVSSLTSEDSAVYYCARDYRYEVYGMDYWGQGTSVTVSSGGGGSGGGGSGGGGSDIVLTQSPTIMSASPGERVTMTCTASSSVNYIHWYQQKSGDSPLRWIFDTSKVASGVPARFSGSGSGTSYSLTISTMEAEDAATYYCQQWRSYPLTFGDGTRLELKRADAAPTVSEPKSPDKTHTCPPCPAPPVAGPSVFLFPPKPKDTLMIARTPEVTCVVVDVSHEDPEVKFNWYVDGVEVHNAKTKPREEQYNSTYRVVSVLTVLHQDWLNGKEYKCKVSNKALPAPIEKTISKAKGQPREPQVYTLPPSRDELTKNQVSLTCLVKGFYPSDIAVEWESNGQPENNYKTTPPVLDSDGSFFLYSKLTVDKSRWQQGNVFSCSVMHEALHNHYTQKSLSLSPGKIISFFLALTSTALLFLLFFLTLRFSVVKRGRKKLLYIFKQPFMRPVQTTQEEDGCSCRFPEEEEGGCELRVKFSRSADAPAYQQGQNQLYNELNLGRREEYDVLDKRRGRDPEMGGKPRRKNPQEGLYNELQKDKMAEAYSEIGMKGERRRGKGHDGLYQGLSTATKDTYDALHMQALPPR

SEQ ID NO: 5825 - protein, 464 aa, Artificial Sequence
  Description of Artificial Sequence: Synthetic Chimeric Antigen Receptor sequence
MALPVTALLLPLALLLHAARPQIQLVQSGPELKKPGETVKISCKASGYTFTKYGMNWVKQTPGKGLKWMGWINTNSGEPTYAEEFKGRFAFSLETSASTAYLQINNLKNEDTATYFCARGAYYRYDGEVSYYAMDYWGQGTSVTVSSGGGGSGGGGSGGGGSQIILTQSPAIMSASLGERVTMTCTATSSLSSSYLHWYQQKPGSSPKLWIYSTSHLASGVPARFSGGGSGTSYSLTISSMEAEDAATYYCHQYHLSPYTFGGGTKLEIKGLAVSTISSFFPPGYQIYIWAPLAGTCGVLLLSLVITLYCKRGRKKLLYIFKQPFMRPVQTTQEEDGCSCRFPEEEEGGCELRVKFSRSADAPAYQQGQNQLYNELNLGRREEYDVLDKRRGRDPEMGGKPRRKNPQEGLYNELQKDKMAEAYSEIGMKGERRRGKGHDGLYQGLSTATKDTYDALHMQALPPR

SEQ ID NO: 5826 - protein, 471 aa, Artificial Sequence
  Description of Artificial Sequence: Synthetic Chimeric Antigen Receptor sequence
PLALLLHAARPEVQLLESGGGLVQPGGSLRLSCAVSGFTFNSFAMSWVRQAPGKGLEWVSAISGSGGGTYYADSVKGRFTISRDNSKNTLYLQMNSLRAEDTAVYFCAKDKILWFGEPVFDYWGQGTLVTVSSASGGGGSGGGGSGGGGSEIVLTQSPATLSLSPGERATLSCRASQSVSSYLAWYQQKPGQAPRLLIYDASNRATGIPARFSGSGSGTDFTLTISSLEPEDFAVYYCQQRSNWPPTFGQGTKVEIKTTTPAPRPPTPAPTIASQPLSLRPEACRPAAGGAVHTRGLDFACDIYIWAPLAGTCGVLLLSLVITLYCKRGRKKLLYIFKQPFMRPVQTTQEEDGCSCRFPEEEEGGCELRVKFSRSADAPAYQQGQNQLYNELNLGRREEYDVLDKRRGRDPEMGGKPRRKNPQEGLYNELQKDKMAEAYSEIGMKGERRRGKGHDGLYQGLSTATKDTYDA

SEQ ID NO: 5827 - protein, 472 aa, Artificial Sequence
  Description of Artificial Sequence: Synthetic Chimeric Antigen Receptor sequence
MALPVTALLLPLALLLHAARPPLALLLHAARPEVQLQQSGAELVRPGASVKLSCTASGFNIKDSLIHWVKQRPEQGLEWIGWIDPEDDKTKYAPKFQDKATLTADTSSNTAYLQLSTLTSEDTAIYYCVSRYINYYFAYWGQGTTLTVSSGGGGSGGGGSGGGGSDIVMTQSPSSLTVTAGEKVTMSCKSSQSLLHSGNQRNYLTWYQQKPGQPPKLLIYWASTRESGVPDRFTGSGSGTDFTLTISSVQAEDLAVYYCQNDYDYPYTFGGGTKLEIKGLAVSTISSFFPPGYQIYIWAPLAGTCGVLLLSLVITLYCKRGRKKLLYIFKQPFMRPVQTTQEEDGCSCRFPEEEEGGCELRVKFSRSADAPAYQQGQNQLYNELNLGRREEYDVLDKRRGRDPEMGGKPRRKNPQEGLYNELQKDKMAEAYSEIGMKGERRRGKGHDGLYQGLSTATKDTYDALHMQALPPR

SEQ ID NO: 5828 - protein, 488 aa, Artificial Sequence
  Description of Artificial Sequence: Synthetic Chimeric Antigen Receptor sequence
MALPVTALLLPLALLLHAARPQIQLVQSGPEVKKPGETVKISCKASGYTFTNYGMNWVKQAPGKGLKWMGINTYTGEPTYADAFKGRFAFSLETSASTAYLQINNLKNEDTATYFCARDYGDYGMDYWGQGTSVTVSSGGGGSGGGGSGGGGSDIVLTQSPASLAVSLGQRATISCRASKSVSTSGYSFMHWYQQKPGQPPKLLIYLASNLESGVPARFSGSGSGTDFTLNIHPVEEEDAATYYCQHSREVPWTFGGGTKLEIKRTTTPAPRPPTPAPTIASQPLSLRPEACRPAAGGAVHTRGLDFACDIYIWAPLAGTCGVLLLSLVITLYCKRGRKKLLYIFKQPFMRPVQTTQEEDGCSCRFPEEEEGGCELRVKFSRSADAPAYQQGQNQLYNELNLGRREEYDVLDKRRGRDPEMGGKPRRKNPQEGLYNELQKDKMAEAYSEIGMKGERRRGKGHDGLYQGLSTATKDTYDALHMQALPPR

SEQ ID NO: 5829 - protein, 490 aa, Artificial Sequence
  Description of Artificial Sequence: Synthetic Chimeric Antigen Receptor sequence
MALPVTALLLPLALLLHAARPEVQLQQSGAELVRPGASVKLSCTASGFNIKDSLIHWVKQRPEQGLEWIGWIDPEDDKTKYAPKFQDKATLTADTSSNTAYLQLSTLTSEDTAIYYCVSRYINYYFAYWGQGTTLTVSSGGGGSGGGGSGGGGSDIVMTQSPSSLTVTAGEKVTMSCKSSQSLLHSGNQRNYLTWYQQKPGQPPKLLIYWASTRESGVPDRFTGSGSGTDFTLTISSVQAEDLAVYYCQNDYDYPYTFGGGTKLEIKTTTPAPRPPTPAPTIASQPLSLRPEACRPAAGGAVHTRGLDFACDIYIWAPLAGTCGVLLLSLVITLYCKRGRKKLLYIFKQPFMRPVQTTQEEDGCSCRFPEEEEGGCELRVKFSRSADAPAYQQGQNQLYNELNLGRREEYDVLDKRRGRDPEMGGKPRRKNPQEGLYNELQKDKMAEAYSEIGMKGERRRGKGHDGLYQGLSTATKDTYDALHMQALPPR

SEQ ID NO: 5830 - protein, 491 aa, Artificial Sequence
  Description of Artificial Sequence: Synthetic Chimeric Antigen Receptor sequence
MALPVTALLLPLALLLHAARPQAYLQQSGAELVRSGASVKMSCKASGYTFTSYNLHWVKQTPGQGLEWIGYIYPGNGGTNYNQKFKGKATLTADTSSSTAYMQISSLTSEDSAVYFCARGGIYYYGSSLDYWGQGTTLTVSSGGGGSGGGGSGGGGSNIVLTQSPASLAVSLGQRATISCRASESVDNYGTTFMYWYQQKPGQPPKLLIYLASNLESGVPARFSGSGSGTDFTLTIDPVEADDAATYYCQQNKEDPWTFGGGTKLEIKTTTPAPRPPTPAPTIASQPLSLRPEACRPAAGGAVHTRGLDFACDIYIWAPLAGTCGVLLLSLVITLYCKRGRKKLLYIFKQPFMRPVQTTQEEDGCSCRFPEEEEGGCELRVKFSRSADAPAYQQGQNQLYNELNLGRREEYDVLDKRRGRDPEMGGKPRRKNPQEGLYNELQKDKMAEAYSEIGMKGERRRGKGHDGLYQGLSTATKDTYDALHMQALPPR

SEQ ID NO: 5831 - protein, 493 aa, Artificial Sequence
  Description of Artificial Sequence: Synthetic Chimeric Antigen Receptor sequence
MALPVTALLLPLALLLHAARPQIQLVQSGPELKKPGETVKISCKASGYTFTKYGMNWVKQTPGKGLKWMGWINTNSGEPTYAEEFKGRFAFSLETSASTAYLQINNLKNEDTATYFCARGAYYRYDGEVSYYAMDYWGQGTSVTVSSGGGGSGGGGSGGGGSQIILTQSPAIMSASLGERVTMTCTATSSLSSSYLHWYQQKPGSSPKLWIYSTSHLASGVPARFSGGGSGTSYSLTISSMEAEDAATYYCHQYHLSPYTFGGGTKLEIKTTTPAPRPPTPAPTIASQPLSLRPEACRPAAGGAVHTRGLDFACDIYIWAPLAGTCGVLLLSLVITLYCKRGRKKLLYIFKQPFMRPVQTTQEEDGCSCRFPEEEEGGCELRVKFSRSADAPAYQQGQNQLYNELNLGRREEYDVLDKRRGRDPEMGGKPRRKNPQEGLYNELQKDKMAEAYSEIGMKGERRRGKGHDGLYQGLSTATKDTYDALHMQALPPR

SEQ ID NO: 5832 - protein, 535 aa, Artificial Sequence
  Description of Artificial Sequence: Synthetic Chimeric Antigen Receptor sequence
MALPVTALLLPLALLLHAARPDIVMTQSPDSLAVSLGERVTMNCKSSQSLLYSTNQKNYLAWYQQKPGQSPKLLIYWASTRESGVPDRFSGSGSGTDFTLTISSVQAEDVAVYYCQQYYSYRTFGGGTKLEIKGGGGSGGGGSGGGGSQVQLQQSGPEVVKPGASVKMSCKASGYTFTSYVIHWVRQKPGQGLDWIGYINPYNDGTDYDEKFKGKATLTSDTSTSTAYMELSSLRSEDTAVYYCAREKDNYATGAWFAYWGQGTLVTVSSTTTPAPRPPTPAPTIASQPLSLRPEACRPAAGGAVHTRGLDFACDIYIWAPLAGTCGVLLLSLVITLYCRSKRSRLLHSDYMNMTPRRPGPTRKHYQPYAPPRDFAAYRSKRGRKKLLYIFKQPFMRPVQTTQEEDGCSCRFPEEEEGGCELRVKFSRSADAPAYQQGQNQLYNELNLGRREEYDVLDKRRGRDPEMGGKPQRRKNPQEGLYNELQKDKMAEAYSEIGMKGERRRGKGHDGLYQGLSTATKDTYDALHMQALPPR

SEQ ID NO: 5833 - protein, 657 aa, Artificial Sequence [sequence omitted]

SEQ ID NO: 5834 - protein, 676 aa, Artificial Sequence
  Description of Artificial Sequence: Synthetic Chimeric Antigen Receptor sequence
MALPVTALLLPLALLLHAARPEVQLQQSGAELVRPGASVKLSCTASGFNIKDSLIHWVKQRPEQGLEWIGWIDPEDDKTKYAPKFQDKATLTADTSSNTAYLQLSTLTSEDTAIYYCVSRYINYYFAYWGQGTTLTVSSGGGGSGGGGSGGGGSDIVMTQSPSSLTVTAGEKVTMSCKSSQSLLHSGNQRNYLTWYQQKPGQPPKLLIYWASTRESGVPDRFTGSGSGTDFTLTISSVQAEDLAVYYCQNDYDYPYTFGGGTKLEIKEPKSPDKTHTCPPCPAPPVAGPSVFLFPPKPKDTLMIARTPEVTCVVVDVSHEDPEVKFNWYVDGVEVHNAKTKPREEQYNSTYRVVSVLTVLHQDWLNGKEYKCKVSNKALPAPIEKTISKAKGQPREPQVYTLPPSRDELTKNQVSLTCLVKGFYPSDIAVEWESNGQPENNYKTTPPVLDSDGSFFLYSKLTVDKSRWQQGNVFSCSVMHEALHNHYTQKSLSLSPGKIYIWAPLAGTCGVLLLSLVITLYCKRGRKKLLYIFKQPFMRPVQTTQEEDGCSCRFPEEEEGGCELRVKFSRSADAPAYQQGQNQLYNELNLGRREEYDVLDKRRGRDPEMGGKPRRKNPQEGLYNELQKDKMAEAYSEIGMKGERRRGKGHDGLYQGLSTATKDTYDALHMQALPPR

SEQ ID NO: 5835 - protein, 677 aa, Artificial Sequence
  Description of Artificial Sequence: Synthetic Chimeric Antigen Receptor sequence
MALPVTALLLPLALLLHAARPQAYLQQSGAELVRSGASVKMSCKASGYTFTSYNLHWVKQTPGQGLEWIGYIYPGNGGTNYNQKFKGKATLTADTSSSTAYMQISSLTSEDSAVYFCARGGIYYYGSSLDYWGQGTTLTVSSGGGGSGGGGSGGGGSNIVLTQSPASLAVSLGQRATISCRASESVDNYGTTFMYWYQQKPGQPPKLLIYLASNLESGVPARFSGSGSGTDFTLTIDPVEADDAATYYCQQNKEDPWTFGGGTKLEIKEPKSPDKTHTCPPCPAPPVAGPSVFLFPPKPKDTLMIARTPEVTCVVVDVSHEDPEVKFNWYVDGVEVHNAKTKPREEQYNSTYRVVSVLTVLHQDWLNGKEYKCKVSNKALPAPIEKTISKAKGQPREPQVYTLPPSRDELTKNQVSLTCLVKGFYPSDIAVEWESNGQPENNYKTTPPVLDSDGSFFLYSKLTVDKSRWQQGNVFSCSVMHEALHNHYTQKSLSLSPGKIYIWAPLAGTCGVLLLSLVITLYCKRGRKKLLYIFKQPFMRPVQTTQEEDGCSCRFPEEEEGGCELRVKFSRSADAPAYQQGQNQLYNELNLGRREEYDVLDKRRGRDPEMGGKPRRKNPQEGLYNELQKDKMAEAYSEIGMKGERRRGKGHDGLYQGLSTATKDTYDALHMQALPPR

SEQ ID NO: 5836 - protein, 679 aa, Artificial Sequence
  Description of Artificial Sequence: Synthetic Chimeric Antigen Receptor sequence
MALPVTALLLPLALLLHAARPQIQLVQSGPELKKPGETVKISCKASGYTFTKYGMNWVKQTPGKGLKWMGWINTNSGEPTYAEEFKGRFAFSLETSASTAYLQINNLKNEDTATYFCARGAYYRYDGEVSYYAMDYWGQGTSVTVSSGGGGSGGGGSGGGGSQIILTQSPAIMSASLGERVTMTCTATSSLSSSYLHWYQQKPGSSPKLWIYSTSHLASGVPARFSGGGSGTSYSLTISSMEAEDAATYYCHQYHLSPYTFGGGTKLEIKEPKSPDKTHTCPPCPAPPVAGPSVFLFPPKPKDTLMIARTPEVTCVVVDVSHEDPEVKFNWYVDGVEVHNAKTKPREEQYNSTYRVVSVLTVLHQDWLNGKEYKCKVSNKALPAPIEKTISKAKGQPREPQVYTLPPSRDELTKNQVSLTCLVKGFYPSDIAVEWESNGQPENNYKTTPPVLDSDGSFFLYSKLTVDKSRWQQGNVFSCSVMHEALHNHYTQKSLSLSPGKIYIWAPLAGTCGVLLLSLVITLYCKRGRKKLLYIFKQPFMRPVQTTQEEDGCSCRFPEEEEGGCELRVKFSRSADAPAYQQGQNQLYNELNLGRREEYDVLDKRRGRDPEMGGKPRRKNPQEGLYNELQKDKMAEAYSEIGMKGERRRGKGHDGLYQGLSTATKDTYDALHMQALPPR

SEQ ID NO: 5837 - protein, 536 aa, Artificial Sequence
  Description of Artificial Sequence: Synthetic Chimeric Antigen Receptor sequence
MALPVTALLLPLALLLHAARPDIVMTQSPDSLAVSLGERATINCRASKSVSTSGYSYIYWYQQKPGQPPKLLIYLASILESGVPDRFSGSGSGTDFTLTISSLQAEDVAVYYCQHSRELPWTFGQGTKVEIKGGGGSGGGGSGGGGSEEQLVESGGGLVKPGGSLRLSCAASGFSFSDCRMYWLRQAPGKGLEWIGVISVKSENYGANYAESVRGRFTISRDDSKNTVYLQMNSLKTEDTAVYYCSASYYRYDVGAWFAYWGQGTLVTVSSTTTPAPRPPTPAPTIASQPLSLRPEACRPAAGGAVHTRGLDFACDIYIWAPLAGTCGVLLLSLVITLYCRSKRSRLLHSDYMNMTPRRPGPTRKHYQPYAPPRDFAAYRSKRGRKKLLYIFKQPFMRPVQTTQEEDGCSCRFPEEEEGGCELRVKFSRSADAPAYQQGQNQLYNELNLGRREEYDVLDKRRGRDPEMGGKPQRRKNPQEGLYNELQKDKMAEAYSEIGMKGERRRGKGHDGLYQGLSTATKDTYDALHMQALPPR

SEQ ID NO: 5838 - protein, 692 aa, Artificial Sequence
  Description of Artificial Sequence: Synthetic Chimeric Antigen Receptor sequence
MVRGVPFRHLLLVLQLALLPAATQGKKVVLGKKGDTVELTCTASQKKSIQFHWKNSNQIKILGNQGSFLTKGPSKLNDRADSRRSLWDQGNFPLIIKNLKIEDSDTYICEVEDQKEEVQLLVFGLTANSDTHLLQGQSLTLTLESPPGSSPSVQCRSPRGKNIQGGKTLSVSQLELQDSGTWTCTVLQNQKKVEFKIDIVVLAFQKASGGGGSGGGGSQVQLLESGAEVKKPGSSVKVSCKASGDTFIRYSFTWVRQAPGQGLEWMGRIITILDVAHYAPHLQGRVTITADKSTSTVYLELRNLRSDDTAVYFCAGVYEGEADEGEYDNNGFLKHWGQGTLVTVTSGGGGSGGGGSGGGGSELELTQSPATLSVSPGERATLSCRASESVSSDLAWYQQKPGQAPRLLIYGASTRATGVPARFSGSGSGAEFTLTISSLQSEDFAVYYCQQYNNWPPRYTFGQGTRLEIKAAAIEVMYPPPYLDNEKSNGTIIHVKGKHLCPSPLFPGPSKPFWVLVVVGGVLACYSLLVTVAFIIFWVRSKRSRLLHSDYMNMTPRRPGPTRKHYQPYAPPRDFAAYRSRVKFSRSADAPAYQQGQNQLYNELNLGRREEYDVLDKRRGRDPEMGGKPRRKNPQEGLYNELQKDKMAEAYSEIGMKGERRRGKGHDGLYQGLSTATKDTYDALHMQALPPR

SEQ ID NO: 5839 - protein, 717 aa, Artificial Sequence [sequence omitted]

SEQ ID NO: 5840 - protein, 669 aa, Artificial Sequence
  Description of Artificial Sequence: Synthetic Chimeric Antigen Receptor sequence
MEAPAQLLFLLLLWLPDTTGEIVLTQSPATLSLSPGERATLSCSASSSINYIYWLQQKPGQAPRILIYLTSNLASGVPARFSGSGSGTDFTLTISSLEPEDFAVYYCLQWSSNPLTFGGGTKVEIKRGGGGSGGGGSGGGGSGGGGSEVQLVESGGGLVKPGGSLRLSCAASGFTFSSYDMSWVRQAPGKGLEWVSTISSGGSYTYYLDSIKGRFTISRDNAKNSLYLQMNSLRAEDTAVYYCARQGLDYWGRGTLVTVSSGDPKEACPTGLYTHSGECCKACNLGEGVAQPCGANQTVCEPCLDSVTFSDVVSATEPCKPCTECVGLQSMSAPCVEADDAVCRCAYGYYQDETTGRCEACRVCEAGSGLVFSCQDKQNTVCEECPDGTYSDEANHVDPCLPCTVCEDTERQLRECTRWADAECEEIPGRWITRSTPPEGSDSTAPSTQEPEAPPEQDLIASTVAGVVTTVMGSSQPVVTRGTTDNPKFWVLVVVGGVLACYSLLVTVAFIIFWVRSKRSRLLHSDYMNMTPRRPGPTRKHYQPYAPPRDFAAYRSRVKFSRSADAPAYQQGQNQLYNELNLGRREEYDVLDKRRGRDPEMGGKPQRRKNPQEGLYNELQKDKMAEAYSEIGMKGERRRGKGHDGLYQGLSTATKDTYDALHMQALPPR

SEQ ID NO: 5841 - protein, 251 aa, Artificial Sequence
  Description of Artificial Sequence: Synthetic Chimeric Antigen Receptor sequence
MEAPAQLLFLLLLWLPDTTGEIVLTQSPATLSLSPGERATLSCSASSSINYIYWLQQKPGQAPRILIYLTSNLASGVPARFSGSGSGTDFTLTISSLEPEDFAVYYCLQWSSNPLTFGGGTKVEIKRGGGGSGGGGSEVQLVESGGGLVKPGGSLRLSCAASGFTFSSYDMSWVRQAPGKGLEWVSTISSGGSYTYYLDSIKGRFTISRDNAKNSLYLQMNSLRAEDTAVYYCARQGLDYWGRGTLVTVSS

SEQ ID NO: 5842 - protein, 576 aa, Artificial Sequence
  Description of Artificial Sequence: Synthetic Chimeric Antigen Receptor sequence
MEAPAQLLFLLLLWLPDTTGEIVLTQSPATLSLSPGERATLSCSASSSINYIYWLQQKPGQAPRILIYLTSNLASGVPARFSGSGSGTDFTLTISSLEPEDFAVYYCLQWSSNPLTFGGGTKVEIKRGGGGSGGGGSEVQLVESGGGLVKPGGSLRLSCAASGFTFSSYDMSWVRQAPGKGLEWVSTISSGGSYTYYLDSIKGRFTISRDNAKNSLYLQMNSLRAEDTAVYYCARQGLDYWGRGTLVTVSSGDPKEACPTGLYTHSGECCKACNLGEGVAQPCGANQTVCEPCLDSVTFSDVVSATEPCKPCTECVGLQSMSAPCVEADDAVCRCAYGYYQDETTGRCEACRVCEAGSGLVFSCQDKQNTVCEECPDGTYSDEAARAADAECEEPKFWVLVVVGGVLACYSLLVTVAFIIFWVRSKRSRLLHSDYMNMTPRRPGPTRKHYQPYAPPRDFAAYRSRVKFSRSADAPAYQQGQNQLYNELNLGRREEYDVLDKRRGRDPEMGGKPRRKNPQEGLYNELQKDKMAEAYSEIGMKGERRRGKGHDGLYQGLSTATKDTYDALHMQALPPR

SEQ ID NO: 5843 - protein, 586 aa, Artificial Sequence
  Description of Artificial Sequence: Synthetic Chimeric Antigen Receptor sequence
MEAPAQLLFLLLLWLPDTTGEIVLTQSPATLSLSPGERATLSCSASSSINYIYWLQQKPGQAPRILIYLTSNLASGVPARFSGSGSGTDFTLTISSLEPEDFAVYYCLQWSSNPLTFGGGTKVEIKRGGGGSGGGGSGGGGSGGGGSEVQLVESGGGLVKPGGSLRLSCAASGFTFSSYDMSWVRQAPGKGLEWVSTISSGGSYTYYLDSIKGRFTISRDNAKNSLYLQMNSLRAEDTAVYYCARQGLDYWGRGTLVTVSSGDPKEACPTGLYTHSGECCKACNLGEGVAQPCGANQTVCEPCLDSVTFSDVVSATEPCKPCTECVGLQSMSAPCVEADDAVCRCAYGYYQDETTGRCEACRVCEAGSGLVFSCQDKQNTVCEECPDGTYSDEAARAADAECEEPKFWVLVVVGGVLACYSLLVTVAFIIFWVRSKRSRLLHSDYMNMTPRRPGPTRKHYQPYAPPRDFAAYRSRVKFSRSADAPAYQQGQNQLYNELNLGRREEYDVLDKRRGRDPEMGGKPRRKNPQEGLYNELQKDKMAEAYSEIGMKGERRRGKGHDGLYQGLSTATKDTYDALHMQALPPR

SEQ ID NO: 5844 - protein, 587 aa, Artificial Sequence
  Description of Artificial Sequence: Synthetic Chimeric Antigen Receptor sequence
MEAPAQLLFLLLLWLPDTTGEIVLTQSPATLSLSPGERATLSCSASSSINYIYWLQQKPGQAPRILIYLTSNLASGVPARFSGSGSGTDFTLTISSLEPEDFAVYYCLQWSSNPLTFGGGTKVEIKRGGGGSGGGGSGGGGSGGGGSEVQLVESGGGLVKPGGSLRLSCAASGFTFSSYDMSWVRQAPGKGLEWVSTISSGGSYTYYLDSIKGRFTISRDNAKNSLYLQMNSLRAEDTAVYYCARQGLDYWGRGTLVTVSSGDPKEACPTGLYTHSGECCKACNLGEGVAQPCGANQTVCEPCLDSVTFSDVVSATEPCKPCTECVGLQSMSAPCVEADDAVCRCAYGYYQDETTGRCEACRVCEAGSGLVFSCQDKQNTVCEECPDGTYSDEAARAADAECEEPKFWVLVVVGGVLACYSLLVTVAFIIFWVRSKRSRLLHSDYMNMTPRRPGPTRKHYQPYAPPRDFAAYRSRVKFSRSADAPAYQQGQNQLYNELNLGRREEYDVLDKRRGRDPEMGGKPQRRKNPQEGLYNELQKDKMAEAYSEIGMKGERRRGKGHDGLYQGLSTATKDTYDALHMQALPPR

SEQ ID NO: 5845 - protein, 598 aa, Artificial Sequence
  Description of Artificial Sequence: Synthetic Chimeric Antigen Receptor sequence
MEAPAQLLFLLLLWLPDTTGEIVLTQSPATLSLSPGERATLSCSASSSINYIYWLQQKPGQAPRILIYLTSNLASGVPARFSGSGSGTDFTLTISSLEPEDFAVYYCLQWSSNPLTFGGGTKVEIKRGGGGSGGGGSEVQLVESGGGLVKPGGSLRLSCAASGFTFSSYDMSWVRQAPGKGLEWVSTISSGGSYTYYLDSIKGRFTISRDNAKNSLYLQMNSLRAEDTAVYYCARQGLDYWGRGTLVTVSSGDPKEACPTGLYTHSGECCKACNLGEGVAQPCGANQTVCEPCLDSVTFSDVVSATEPCKPCTECVGLQSMSAPCVEADDAVCRCAYGYYQDETTGRCEACRVCEAGSGLVFSCQDKQNTVCEECPDGTYSDEANHVDPCLPCTVCEDTERQLRECTRWADAECEEPKFWVLVVVGGVLACYSLLVTVAFIIFWVRSKRSRLLHSDYMNMTPRRPGPTRKHYQPYAPPRDFAAYRSRVKFSRSADAPAYQQGQNQLYNELNLGRREEYDVLDKRRGRDPEMGGKPRRKNPQEGLYNELQKDKMAEAYSEIGMKGERRRGKGHDGLYQGLSTATKDTYDALHMQALPPR

SEQ ID NO: 5846 - protein, 608 aa, Artificial Sequence
  Description of Artificial Sequence: Synthetic Chimeric Antigen Receptor sequence
MEAPAQLLFLLLLWLPDTTGEIVLTQSPATLSLSPGERATLSCSASSSINYIYWLQQKPGQAPRILIYLTSNLASGVPARFSGSGSGTDFTLTISSLEPEDFAVYYCLQWSSNPLTFGGGTKVEIKRGGGGSGGGGSGGGGSGGGGSEVQLVESGGGLVKPGGSLRLSCAASGFTFSSYDMSWVRQAPGKGLEWVSTISSGGSYTYYLDSIKGRFTISRDNAKNSLYLQMNSLRAEDTAVYYCARQGLDYWGRGTLVTVSSGDPKEACPTGLYTHSGECCKACNLGEGVAQPCGANQTVCEPCLDSVTFSDVVSATEPCKPCTECVGLQSMSAPCVEADDAVCRCAYGYYQDETTGRCEACRVCEAGSGLVFSCQDKQNTVCEECPDGTYSDEANHVDPCLPCTVCEDTERQLRECTRWADAECEEPKFWVLVVVGGVLACYSLLVTVAFIIFWVRSKRSRLLHSDYMNMTPRRPGPTRKHYQPYAPPRDFAAYRSRVKFSRSADAPAYQQGQNQLYNELNLGRREEYDVLDKRRGRDPEMGGKPRRKNPQEGLYNELQKDKMAEAYSEIGMKGERRRGKGHDGLYQGLSTATKDTYDALHMQALPPR

SEQ ID NO: 5847 - protein, 609 aa, Artificial Sequence
  Description of Artificial Sequence: Synthetic Chimeric Antigen Receptor sequence
MEAPAQLLFLLLLWLPDTTGEIVLTQSPATLSLSPGERATLSCSASSSINYIYWLQQKPGQAPRILIYLTSNLASGVPARFSGSGSGTDFTLTISSLEPEDFAVYYCLQWSSNPLTFGGGTKVEIKRGGGGSGGGGSGGGGSGGGGSEVQLVESGGGLVKPGGSLRLSCAASGFTFSSYDMSWVRQAPGKGLEWVSTISSGGSYTYYLDSIKGRFTISRDNAKNSLYLQMNSLRAEDTAVYYCARQGLDYWGRGTLVTVSSGDPKEACPTGLYTHSGECCKACNLGEGVAQPCGANQTVCEPCLDSVTFSDVVSATEPCKPCTECVGLQSMSAPCVEADDAVCRCAYGYYQDETTGRCEACRVCEAGSGLVFSCQDKQNTVCEECPDGTYSDEANHVDPCLPCTVCEDTERQLRECTRWADAECEEPKFWVLVVVGGVLACYSLLVTVAFIIFWVRSKRSRLLHSDYMNMTPRRPGPTRKHYQPYAPPRDFAAYRSRVKFSRSADAPAYQQGQNQLYNELNLGRREEYDVLDKRRGRDPEMGGKPQRRKNPQEGLYNELQKDKMAEAYSEIGMKGERRRGKGHDGLYQGLSTATKDTYDALHMQALPPR

SEQ ID NO: 5848 - protein, 636 aa, Artificial Sequence
  Description of Artificial Sequence: Synthetic Chimeric Antigen Receptor sequence
MEAPAQLLFLLLLWLPDTTGEIVLTQSPATLSLSPGERATLSCSASSSINYIYWLQQKPGQAPRILIYLTSNLASGVPARFSGSGSGTDFTLTISSLEPEDFAVYYCLQWSSNPLTFGGGTKVEIKRGGGGSGGGGSEVQLVESGGGLVKPGGSLRLSCAASGFTFSSYDMSWVRQAPGKGLEWVSTISSGGSYTYYLDSIKGRFTISRDNAKNSLYLQMNSLRAEDTAVYYCARQGLDYWGRGTLVTVSSGDPKEACPTGLYTHSGECCKACNLGEGVAQPCGANQTVCEPCLDSVTFSDVVSATEPCKPCTECVGLQSMSAPCVEADDAVCRCAYGYYQDETTGRCEACRVCEAGSGLVFSCQDKQNTVCEECPDGTYSDEAARAADAECEEIPGRWITRSTPPEGSDSTAPSTQEPEAPPEQDLIASTVAGVVTTVMGSSQPVVTRGTTDNPKFWVLVVVGGVLACYSLLVTVAFIIFWVRSKRSRLLHSDYMNMTPRRPGPTRKHYQPYAPPRDFAAYRSRVKFSRSADAPAYQQGQNQLYNELNLGRREEYDVLDKRRGRDPEMGGKPRRKNPQEGLYNELQKDKMAEAYSEIGMKGERRRGKGHDGLYQGLSTATKDTYDALHMQALPPR

SEQ ID NO: 5849 - protein, 646 aa, Artificial Sequence
  Description of Artificial Sequence: Synthetic Chimeric Antigen Receptor sequence
MEAPAQLLFLLLLWLPDTTGEIVLTQSPATLSLSPGERATLSCSASSSINYIYWLQQKPGQAPRILIYLTSNLASGVPARFSGSGSGTDFTLTISSLEPEDFAVYYCLQWSSNPLTFGGGTKVEIKRGGGGSGGGGSGGGGSGGGGSEVQLVESGGGLVKPGGSLRLSCAASGFTFSSYDMSWVRQAPGKGLEWVSTISSGGSYTYYLDSIKGRFTISRDNAKNSLYLQMNSLRAEDTAVYYCARQGLDYWGRGTLVTVSSGDPKEACPTGLYTHSGECCKACNLGEGVAQPCGANQTVCEPCLDSVTFSDVVSATEPCKPCTECVGLQSMSAPCVEADDAVCRCAYGYYQDETTGRCEACRVCEAGSGLVFSCQDKQNTVCEECPDGTYSDEAARAADAECEEIPGRWITRSTPPEGSDSTAPSTQEPEAPPEQDLIASTVAGVVTTVMGSSQPVVTRGTTDNPKFWVLVVVGGVLACYSLLVTVAFIIFWVRSKRSRLLHSDYMNMTPRRPGPTRKHYQPYAPPRDFAAYRSRVKFSRSADAPAYQQGQNQLYNELNLGRREEYDVLDKRRGRDPEMGGKPRRKNPQEGLYNELQKDKMAEAYSEIGMKGERRRGKGHDGLYQGLSTATKDTYDALHMQALPPR

SEQ ID NO: 5850 - protein, 647 aa, Artificial Sequence
  Description of Artificial Sequence: Synthetic Chimeric Antigen Receptor sequence
MEAPAQLLFLLLLWLPDTTGEIVLTQSPATLSLSPGERATLSCSASSSINYIYWLQQKPGQAPRILIYLTSNLASGVPARFSGSGSGTDFTLTISSLEPEDFAVYYCLQWSSNPLTFGGGTKVEIKRGGGGSGGGGSGGGGSGGGGSEVQLVESGGGLVKPGGSLRLSCAASGFTFSSYDMSWVRQAPGKGLEWVSTISSGGSYTYYLDSIKGRFTISRDNAKNSLYLQMNSLRAEDTAVYYCARQGLDYWGRGTLVTVSSGDPKEACPTGLYTHSGECCKACNLGEGVAQPCGANQTVCEPCLDSVTFSDVVSATEPCKPCTECVGLQSMSAPCVEADDAVCRCAYGYYQDETTGRCEACRVCEAGSGLVFSCQDKQNTVCEECPDGTYSDEAARAADAECEEIPGRWITRSTPPEGSDSTAPSTQEPEAPPEQDLIASTVAGVVTTVMGSSQPVVTRGTTDNPKFWVLVVVGGVLACYSLLVTVAFIIFWVRSKRSRLLHSDYMNMTPRRPGPTRKHYQPYAPPRDFAAYRSRVKFSRSADAPAYQQGQNQLYNELNLGRREEYDVLDKRRGRDPEMGGKPQRRKNPQEGLYNELQKDKMAEAYSEIGMKGERRRGKGHDGLYQGLSTATKDTYDALHMQALPPR

SEQ ID NO: 5851 - protein, 658 aa, Artificial Sequence
  Description of Artificial Sequence: Synthetic Chimeric Antigen Receptor sequence
MEAPAQLLFLLLLWLPDTTGEIVLTQSPATLSLSPGERATLSCSASSSINYIYWLQQKPGQAPRILIYLTSNLASGVPARFSGSGSGTDFTLTISSLEPEDFAVYYCLQWSSNPLTFGGGTKVEIKRGGGGSGGGGSEVQLVESGGGLVKPGGSLRLSCAASGFTFSSYDMSWVRQAPGKGLEWVSTISSGGSYTYYLDSIKGRFTISRDNAKNSLYLQMNSLRAEDTAVYYCARQGLDYWGRGTLVTVSSGDPKEACPTGLYTHSGECCKACNLGEGVAQPCGANQTVCEPCLDSVTFSDVVSATEPCKPCTECVGLQSMSAPCVEADDAVCRCAYGYYQDETTGRCEACRVCEAGSGLVFSCQDKQNTVCEECPDGTYSDEANHVDPCLPCTVCEDTERQLRECTRWADAECEEIPGRWITRSTPPEGSDSTAPSTQEPEAPPEQDLIASTVAGVVTTVMGSSQPVVTRGTTDNPKFWVLVVVGGVLACYSLLVTVAFIIFWVRSKRSRLLHSDYMNMTPRRPGPTRKHYQPYAPPRDFAAYRSRVKFSRSADAPAYQQGQNQLYNELNLGRREEYDVLDKRRGRDPEMGGKPRRKNPQEGLYNELQKDKMAEAYSEIGMKGERRRGKGHDGLYQGLSTATKDTYDALHMQALPPR

SEQ ID NO: 5852 - protein, 668 aa, Artificial Sequence
  Description of Artificial Sequence: Synthetic Chimeric Antigen Receptor sequence
MEAPAQLLFLLLLWLPDTTGEIVLTQSPATLSLSPGERATLSCSASSSINYIYWLQQKPGQAPRILIYLTSNLASGVPARFSGSGSGTDFTLTISSLEPEDFAVYYCLQWSSNPLTFGGGTKVEIKRGGGGSGGGGSGGGGSGGGGSEVQLVESGGGLVKPGGSLRLSCAASGFTFSSYDMSWVRQAPGKGLEWVSTISSGGSYTYYLDSIKGRFTISRDNAKNSLYLQMNSLRAEDTAVYYCARQGLDYWGRGTLVTVSSGDPKEACPTGLYTHSGECCKACNLGEGVAQPCGANQTVCEPCLDSVTFSDVVSATEPCKPCTECVGLQSMSAPCVEADDAVCRCAYGYYQDETTGRCEACRVCEAGSGLVFSCQDKQNTVCEECPDGTYSDEANHVDPCLPCTVCEDTERQLRECTRWADAECEEIPGRWITRSTPPEGSDSTAPSTQEPEAPPEQDLIASTVAGVVTTVMGSSQPVVTRGTTDNPKFWVLVVVGGVLACYSLLVTVAFIIFWVRSKRSRLLHSDYMNMTPRRPGPTRKHYQPYAPPRDFAAYRSRVKFSRSADAPAYQQGQNQLYNELNLGRREEYDVLDKRRGRDPEMGGKPRRKNPQEGLYNELQKDKMAEAYSEIGMKGERRRGKGHDGLYQGLSTATKDTYDALHMQALPPR

SEQ ID NO: 5853 - protein, 708 aa, Artificial Sequence [sequence omitted]

SEQ ID NO: 5854 - protein, 526 aa, Artificial Sequence
  Description of Artificial Sequence: Synthetic Chimeric Antigen Receptor sequence
MALPVTALLLPLALLLHAARPDIQVTQSPSSLSASLGERISLTCRTSQDISNYLNWFQQKPDGTFKRLIYATSSLDSGVPKRFSGSGSGSDYSLTISSLESEDFADYYCLQYASYPFTFGSGTKLEIKGGGGSGGGGSGGGGSEVQLQESGPGLVKPSQTLSLTCSVTGYSITSGYYWHWIRQFPGNKLQWMGYISYSGFTNYKTSLINRISITHDTSENQFFLNLNSVTTEDTATYYCAGDRTGSWFAYWGQGTLVTVSATTTPAPRPPTPAPTIASQPLSLRPEACRPAAGGAVHTRGLDFACDIYIWAPLAGTCGVLLLSLVITLYCRSKRSRLLHSDYMNMTPRRPGPTRKHYQPYAPPRDFAAYRSKRGRKKLLYIFKQPFMRPVQTTQEEDGCSCRFPEEEEGGCELRVKFSRSADAPAYQQGQNQLYNELNLGRREEYDVLDKRRGRDPEMGGKPQRRKNPQEGLYNELQKDKMAEAYSEIGMKGERRRGKGHDGLYQGLSTATKDTYDALHMQALPPR

SEQ ID NO: 5855 - protein, 529 aa, Artificial Sequence
  Description of Artificial Sequence: Synthetic Chimeric Antigen Receptor sequence
MALPVTALLLPLALLLHAARPDIQMTQSPSSLSASVGDRVTITCKASQNIDKYLNWYQQKPGKAPKLLIYNTNNLQTGVPSRFSGSGSGTDFTFTISSLQPEDIATYYCLQHISRPRTFGQGTKVEIKGGGGSGGGGSGGGGSQVQLQESGPGLVRPSQTLSLTCTVSGFTFTDFYMNWVRQPPGRGLEWIGFIRDKAKGYTTEYNPSVKGRVTMLVDTSKNQFSLRLSSVTAADTAVYYCAREGHTAAPFDYWGQGSLVTVSSTTTPAPRPPTPAPTIASQPLSLRPEACRPAAGGAVHTRGLDFACDIYIWAPLAGTCGVLLLSLVITLYCRSKRSRLLHSDYMNMTPRRPGPTRKHYQPYAPPRDFAAYRSKRGRKKLLYIFKQPFMRPVQTTQEEDGCSCRFPEEEEGGCELRVKFSRSADAPAYQQGQNQLYNELNLGRREEYDVLDKRRGRDPEMGGKPQRRKNPQEGLYNELQKDKMAEAYSEIGMKGERRRGKGHDGLYQGLSTATKDTYDALHMQALPPR

SEQ ID NO: 5856 - protein, 686 aa, Artificial Sequence
  Description of Artificial Sequence: Synthetic Chimeric Antigen Receptor sequence
MEFGLSWLFLVAILKGVQCIDAMGNIQLVQSGPELKKPGETVKISCKASGYTFTNYGMNWVKQAPGKGLRWMGWINTHTGEPTYADDFKGRFAFSLETSASTAYLQINNLKNEDTATYFCTRRGYDWYFDVWGAGTTVTVSSGGGGSGGGGSGGGGSDIKMTQSPSSMYASLGERVTITCKASQDINSYLSWFHHKPGKSPKTLIYRANRLVDGVPSRFSGSGSGQDYSLTISSLDYEDMGIYYCQQYDESPWTFGGGTKLEMKGSGDPAEPKSPDKTHTCPPCPAPELLGGPSVFLFPPKPKDTLMISRTPEVTCVVVDVSHEDPEVKFNWYVDGVEVHNAKTKPREEQYNSTYRVVSVLTVLHQDWLNGKEYKCKVSNKALPAPIEKTISKAKGQPREPQVYTLPPSRDELTKNQVSLTCLVKGFYPSDIAVEWESNGQPENNYKTTPPVLDSDGSFFLYSKLTVDKSRWQQGNVFSCSVMHEALHNHYTQKSLSLSPGKKDPKFWVLVVVGGVLACYSLLVTVAFIIFWVRSKRSRLLHSDYMNMTPRRPGPTRKHYQPYAPPRDFAAYRSRVKFSRSADAPAYQQGQNQLYNELNLGRREEYDVLDKRRGRDPEMGGKPRRKNPQEGLYNELQKDKMAEAYSEIGMKGERRRGKGHDGLYQGLSTATKDTYDALHMQALPPR

SEQ ID NO: 5857 - protein, 540 aa, Artificial Sequence
  Description of Artificial Sequence: Synthetic Chimeric Antigen Receptor sequence
MALPVTALLLPLALLLHAARPGAQPAMAAYKDIQMTQTTSSLSASLGDRVTISCSASQGISNYLNWYQQKPDGTNKLLIYYTSSLHSGVPSRFSGSGSGTDYSLHSNLEPEDIATYYCQQYSKLPYTFGGGTKLEIKRGGGGSGGGGSGGGGSGGGGSEVQLVESGGGLVKPGGSLKLSCAASGLTFSSYAMSWNRQTPEKRLEWVASISSGGFTYYPDSNKGRFTISRDNARNILYLQMSSLRSEDTAMYYCARDEVRGYLDVWGAGTTVTVSSTTTPAPRPPTPAPTIASQPLSLRPEACRPAAGGAVHTRGLDFACDIYIWAPLAGTCGVLLLSLVITLYCRSKRSRLLHSDYMNMTPRRPGPTRKHYQPYAPPRDFAAYRSKRGRKKLLYIFKQPFMRPVQTTQEEDGCSCRFPEEEEGGCELRVKFSRSADAPAYQQGQNQLYNELNLGRREEYDVLDKRRGRDPEMGGKPQRRKNPQEGLYNELQKDKMAEAYSEIGMKGERRRGKGHDGLYQGLSTATKDTYDALHMQALPPR

SEQ ID NO: 5858 - protein, 244 aa, Artificial Sequence
  Description of Artificial Sequence: Synthetic Chimeric Antigen Receptor sequence
GVHSQVQLQESGPGLVRPSQTLSLTCTVSGFTISSGYSWHWVRQPPGRGLEWIGYIQYSGITNYNPSLKSRVTMLVDTSKNQFSLRLSSVTAADTAVYYCAREDYDYHWYFDVWGQGTTVTVSSGGGGSGGGGSGGGGSDIQLTQSPSSLSASVGDRVTITCSTSSSVSYMHWYQQKPGKAPKLLIYSTSNLASGVPSRFSGSGSGTDFTFTISSLQPEDIATYYCHQWSSYPTFGQGTKVEIK

SEQ ID NO: 5859 - protein, 459 aa, Artificial Sequence
  Description of Artificial Sequence: Synthetic Chimeric Antigen Receptor sequence
MALPVTALLLPLALLLHAARPQVQLVESGGGVVQPGRSLRLSCAASGFTFSSYGMHWVRQAPGKGLEWVAVIWYDGSDKYFADSVKGRFTISRDNSKNTLYLQMNSLRAEDTAVYYCARDGIAGARYVYFDYWGQGTLVTVSSGGGGSGGGGSGGGGSDIQMTQSPSSLSASVGDRVTITCRASQGISNYLAWFQQKPGKAPKSLIYAASSLQGGVPSKFSGSGSGTDFTLTISSLQPEDFATYYCQQYYNYPFTFGPGTTVDIKGLAVSTISSFFPPGYQIYIWAPLAGTCGVLLLSLVITLYCKRGRKKLLYIFKQPFMRPVQTTQEEDGCSCRFPEEEEGGCELRVKFSRSADAPAYQQGQNQLYNELNLGRREEYDVLDKRRGRDPEMGGKPRRKNPQEGLYNELQKDKMAEAYSEIGMKGERRRGKGHDGLYQGLSTATKDTYDALHMQALPPR

SEQ ID NO: 5860 - protein, 464 aa, Artificial Sequence
  Description of Artificial Sequence: Synthetic Chimeric Antigen Receptor sequence
MALPVTALLLPLALLLHAARPQVQLVESGGGVVQPGRSLRLSCAASGFTFSNYGIHWVRQAPGKGLEWVAVIWYDGSNKYYADSVKGRFTISRDNSKNTLYLQMNSLRAEDTAVYYCARDGGYSGYDSGFDYWGQGTLVTVSSGGGGSGGGGSGGGGSDIVMTQSPLSLPVTPGEPASISCRSSQSLLNSNGYNYLDWYLQKPGQSPQFLIYLGSYRASGVPDRFSGSGSGTDFTLRISRVEAEDVGVYYCIQTLQTPFTFGPGTKVDIKGLAVSTISSFFPPGYQIYIWAPLAGTCGVLLLSLVITLYCKRGRKKLLYIFKQPFMRPVQTTQEEDGCSCRFPEEEEGGCELRVKFSRSADAPAYQQGQNQLYNELNLGRREEYDVLDKRRGRDPEMGGKPRRKNPQEGLYNELQKDKMAEAYSEIGMKGERRRGKGHDGLYQGLSTATKDTYDALHMQALPPR

SEQ ID NO: 5861 - protein, 493 aa, Artificial Sequence
  Description of Artificial Sequence: Synthetic Chimeric Antigen Receptor sequence
MALPVTALLLPLALLLHAARPQVQLVESGGGVVQPGRSLRLSCAASGFTFSNYGIHWVRQAPGKGLEWVAVIWYDGSNKYYADSVKGRFTISRDNSKNTLYLQMNSLRAEDTAVYYCARDGGYSGYDSGFDYWGQGTLVTVSSGGGGSGGGGSGGGGSDIVMTQSPLSLPVTPGEPASISCRSSQSLLNSNGYNYLDWYLQKPGQSPQFLIYLGSYRASGVPDRFSGSGSGTDFTLRISRVEAEDVGVYYCIQTLQTPFTFGPGTKVDIKTTTPAPRPPTPAPTIASQPLSLRPEACRPAAGGAVHTRGLDFACDIYIWAPLAGTCGVLLLSLVITLYCKRGRKKLLYIFKQPFMRPVQTTQEEDGCSCRFPEEEEGGCELRVKFSRSADAPAYQQGQNQLYNELNLGRREEYDVLDKRRGRDPEMGGKPRRKNPQEGLYNELQKDKMAEAYSEIGMKGERRRGKGHDGLYQGLSTATKDTYDALHMQALPPR

SEQ ID NO: 5862 - protein, 488 aa, Artificial Sequence
  Description of Artificial Sequence: Synthetic Chimeric Antigen Receptor sequence
MALPVTALLLPLALLLHAARPQVQLVESGGGVVQPGRSLRLSCAASGFTFSSYGMHWVRQAPGKGLEWVAVIWYDGSDKYFADSVKGRFTISRDNSKNTLYLQMNSLRAEDTAVYYCARDGIAGARYVYFDYWGQGTLVTVSSGGGGSGGGGSGGGGSDIQMTQSPSSLSASVGDRVTITCRASQGISNYLAWFQQKPGKAPKSLIYAASSLQGGVPSKFSGSGSGTDFTLTISSLQPEDFATYYCQQYYNYPFTFGPGTTVDIKTTTPAPRPPTPAPTIASQPLSLRPEACRPAAGGAVHTRGLDFACDIYIWAPLAGTCGVLLLSLVITLYCKRGRKKLLYIFKQPFMRPVQTTQEEDGCSCRFPEEEEGGCELRVKFSRSADAPAYQQGQNQLYNELNLGRREEYDVLDKRRGRDPEMGGKPRRKNPQEGLYNELQKDKMAEAYSEIGMKGERRRGKGHDGLYQGLSTATKDTYDALHMQALPPR

SEQ ID NO: 5863 - protein, 584 aa, Artificial Sequence
  Description of Artificial Sequence: Synthetic Chimeric Antigen Receptor sequence
MALPVTALLLPLALLLHAARPQVQLVESGGGVVQPGRSLRLSCAASGFTFSNYGIHWVRQAPGKGLEWVAVIWYDGSNKYYADSVKGRFTISRDNSKNTLYLQMNSLRAEDTAVYYCARDGGYSGYDSGFDYWGQGTLVTVSSGGGGSGGGGSGGGGSDIVMTQSPLSLPVTPGEPASISCRSSQSLLNSNGYNYLDWYLQKPGQSPQFLIYLGSYRASGVPDRFSGSGSGTDFTLRISRVEAEDVGVYYCIQTLQTPFTFGPGTKVDIKEPKSPDKTHTCPPCPAPPVAGPSVFLFPPKPKDTLMIARTPEVTCVVVDVSHEDPEVKFNWYVDGVEVHNAKTKPREEQYNSTYRVVSVLTVLHQDWLNGKEYKCKVSNKALPAPIEKTISKAKGQPREPQVYTLPPSRDELTKNQVSLTCLVKGFYPSDIAVEWESNGQPENNYKTTPPVLDSDGSFFLYSKLTVDKSRWQQGNVFSCSVMHEALHNHYTQKSLSLSPGKIYIWAPLAGTCGVLLLSLVITLYCKRGRKKLLYIFKQPFMRPVQTTQEEDGCSCRFPEEEEGGCELRVKFSRSADAPAYQQGQ

SEQ ID NO: 5864 - protein, 674 aa, Artificial Sequence
  Description of Artificial Sequence: Synthetic Chimeric Antigen Receptor sequence
MALPVTALLLPLALLLHAARPQIQLVQSGPEVKKPGETVKISCKASGYTFTNYGMNWVKQAPGKGLKWMGINTYTGEPTYADAFKGRFAFSLETSASTAYLQINNLKNEDTATYFCARDYGDYGMDYWGQGTSVTVSSGGGGSGGGGSGGGGSDIVLTQSPASLAVSLGQRATISCRASKSVSTSGYSFMHWYQQKPGQPPKLLIYLASNLESGVPARFSGSGSGTDFTLNIHPVEEEDAATYYCQHSREVPWTFGGGTKLEIKREPKSPDKTHTCPPCPAPPVAGPSVFLFPPKPKDTLMIARTPEVTCVVVDVSHEDPEVKFNWYVDGVEVHNAKTKPREEQYNSTYRVVSVLTVLHQDWLNGKEYKCKVSNKALPAPIEKTISKAKGQPREPQVYTLPPSRDELTKNQVSLTCLVKGFYPSDIAVEWESNGQPENNYKTTPPVLDSDGSFFLYSKLTVDKSRWQQGNVFSCSVMHEALHNHYTQKSLSLSPGKIYIWAPLAGTCGVLLLSLVITLYCKRGRKKLLYIFKQPFMRPVQTTQEEDGCSCRFPEEEEGGCELRVKFSRSADAPAYQQGQNQLYNELNLGRREEYDVLDKRRGRDPEMGGKPRRKNPQEGLYNELQKDKMAEAYSEIGMKGERRRGKGHDGLYQGLSTATKDTYDALHMQALPPR

SEQ ID NO: 5865 - protein, 674 aa, Artificial Sequence
  Description of Artificial Sequence: Synthetic Chimeric Antigen Receptor sequence
MALPVTALLLPLALLLHAARPQVQLVESGGGVVQPGRSLRLSCAASGFTFSSYGMHWVRQAPGKGLEWVAVIWYDGSDKYFADSVKGRFTISRDNSKNTLYLQMNSLRAEDTAVYYCARDGIAGARYVYFDYWGQGTLVTVSSGGGGSGGGGSGGGGSDIQMTQSPSSLSASVGDRVTITCRASQGISNYLAWFQQKPGKAPKSLIYAASSLQGGVPSKFSGSGSGTDFTLTISSLQPEDFATYYCQQYYNYPFTFGPGTTVDIKEPKSPDKTHTCPPCPAPPVAGPSVFLFPPKPKDTLMIARTPEVTCVVVDVSHEDPEVKFNWYVDGVEVHNAKTKPREEQYNSTYRVVSVLTVLHQDWLNGKEYKCKVSNKALPAPIEKTISKAKGQPREPQVYTLPPSRDELTKNQVSLTCLVKGFYPSDIAVEWESNGQPENNYKTTPPVLDSDGSFFLYSKLTVDKSRWQQGNVFSCSVMHEALHNHYTQKSLSLSPGKIYIWAPLAGTCGVLLLSLVITLYCKRGRKKLLYIFKQPFMRPVQTTQEEDGCSCRFPEEEEGGCELRVKFSRSADAPAYQQGQNQLYNELNLGRREEYDVLDKRRGRDPEMGGKPRRKNPQEGLYNELQKDKMAEAYSEIGMKGERRRGKGHDGLYQGLSTATKDTYDALHMQALPPR

SEQ ID NO: 5866 - protein, 741 aa, Artificial Sequence
  Description of Artificial Sequence: Synthetic Chimeric Antigen Receptor sequence
AQLEKELQALEKENAQLEWELQALEKELAQSGGGGSADAPAYQQGQNQLYNELNLGRREEYDVLDKRRGRDPEMGGKPRRKNPQEGLYNELQKDKMAEAYSEIGMKGERRRGKGHDGLYQGLSTATKDTYDALHMQALPPRRAEGRGSLLTCGDVEENPGPMAVPTQVLGLLLLWLTDARCDIQMTQSPSSLSASVGDRVTITCRASEDIYFNLVWYQQKPGKAPKLLIYDTNRLADGVPSRFSGSGSGTQYTLTISSLQPEDFATYYCQHYKNYPLTFGQGTKLEIKRSGGGGSGGGGSGGGGSRSEVQLVESGGGLVQPGGSLRLSCAASGFTLSNYGMHWIRQAPGKGLEWVSSISLNGGSTYYRDSVKGRFTISRDNAKSTLYLQMNSLRAEDTAVYYCAAQDAYTGGYFDYWGQGTLVTVSSMPCPAPPVAGPSVFLFPPKPKDTLMIARTPEVTCVVVDVSHEDPEVKFNWYVDGVEVHNAKTKPREEQYNSTYRVVSVLTVLHQDWLNGKEYKCKVSNKALPAPIEKTISKAKPCPAPPVAGPSVFLFPPKPKDTLMIARTPEVTCVVVDVSHEDPEVKFNWYVDGVEVHNAKTKPREEQYNSTYRVVSVLTVLHQDWLNGKEYKCKVSNKALPAPIEKTISKAKMALIVLGGVAGLLLFIGLGIFFMALIVLGGVAGLLLFIGLGIFFCVRCRHRRRSGGGGSAQLEKKLQALKKKNAQLKWKLQALKKKLAQ

SEQ ID NO: 5867 - protein, 455 aa, Artificial Sequence
  Description of Artificial Sequence: Synthetic Chimeric Antigen Receptor sequence
MALPVTALLLPLALLLHAARPQVQLQESGPGLVKPSETLSLTCVVSGGSISSSNWWSWVRQPPGKGLEWIGEIYHSGSPNYNPSLKSRVTISVDKSKNQFSLKLSSVTAADTAVYYCARSSSGGFFDYWGQGTLVTVSSGGGGSGGGGSGGGGSDIQMTQSPSSLSASVGDRVTITCRASQSISSYLNWYQQKPGKAPKLLIYAASSLQSGVPSRFSGSGSGTDFTLTISSLQPEDFATYYCQQSYSTPPTFGQGTKVEIKGLAVSTISSFFPPGYQIYIWAPLAGTCGVLLLSLVITLYCKRGRKKLLYIFKQPFMRPVQTTQEEDGCSCRFPEEEEGGCELRVKFSRSADAPAYQQGQNQLYNELNLGRREEYDVLDKRRGRDPEMGGKPRRKNPQEGLYNELQKDKMAEAYSEIGMKGERRRGKGHDGLYQGLSTATKDTYDALHMQALPPR

SEQ ID NO: 5868 - protein, 719 aa, Artificial Sequence
  Description of Artificial Sequence: Synthetic Chimeric Antigen Receptor sequence
MAPAMESPTLLCVALLFFAPDGVLAMNIFLLSVLLALLPNVFTARVDQTPRTATKETGESLTINCVLRDTSCAFSSTGWYRTKLGSTNEQSISIGGRYVETVNKGSKSFSLRISDLRVEDSGTYKCQAYVIATMAPLCYASYSWNEKGAGTVLTVKPGVQPSPPVISLLYSATEEQRGNGFVQLICLISGYYFFIPLLVVILFAVDTGLFISTQQQVTFLLKIKRTRKGFRLLNPHPKPNPKNNRAEGRGSLLTCGDVEENPGPMDTESNRRANLALPQEPSSVPAFEVLEISPQEVSSGRLLKSASSPPLHTWLTVLKKEQEFLGVTQILTAMICLCFGTVVCSVLDISHIEGDIFSSFKAGYPFWGAIFFSISGMLSIISERRNATYLVRGSLGANTASSIAGGTGITILIINLKKSLAYIHIHSCQKFFETKCFMASFSTEIVVMMLFLTILGLGSAVSLTICGAGEELKGNKVPEKRGRKKLLYIFKQPFMRPVQTTQEEDGCSCRFPEEEEGGCELGSGVKQTLNFDLLKLAGDVESNPGPMIPAVVLLLLLLVEQAAALGEPQLCYILDAILFLYGIVLTLLYCRLKIQVRKAAITSYEKSRVKFSRSADAPAYQQGQNQLYNELNLGRREEYDVLDKRRGRDPEMGGKPRRKNPQEGLYNELQKDKMAEAYSEIGMKGERRRGKGHDGLYQGLSTATKDTYDALHMQALPPR

SEQ ID NO: 5869 - protein, 513 aa, Artificial Sequence
  Description of Artificial Sequence: Synthetic Chimeric Antigen Receptor sequence
MSVPTQVLGLLLLWLTGARCDIQMTQSPASLSASVGDTVTITCRASENIYSYLAWYQQKQGKSPQLLVYNAKALSEGVPSRFSGSGSGTQFSLRINSLQPEDFGDYYCQHHYNSPYTFGGGTKLEIKGSTSGSGKSSEGKGQIQLVQSGPELKKPGETVKISCKASGYSFTNDGINWVKQAPGKGFKYMGWINTITGEPTYTEDFKGRFAFSLETSASTAYLQINNLKDEDTATFFCAKGTGTSAYWGQGTLVTVSATSLSNSIMYFSHFVPVFLPAKPTTTPAPRPPTPAPTIASQPLSLRPEACRPAAGGAVHTRGLDSRFWVLVVVGGVLACYSLLVTVAFIIFWVRLRVKFSRSADAPAYQQGQNQLYNELNLGRREEYDVLDKRRGRDPEMGGKPQRRKNPQEGLYNELQKDKMAEAYSEIGMKGERRRGKGHDGLYQGLSTATKDTYDALHMQALPPRRSQCMWPRETQLLLEVPPSTEDARSCQFPEEERGERSAEEKGRLGDLWV

SEQ ID NO: 5870 - protein, 553 aa, Artificial Sequence
  Description of Artificial Sequence: Synthetic Chimeric Antigen Receptor sequence
MSVPTQVLGLLLLWLTGARCDIQMTQSPASLSASVGDTVTITCRASENIYSYLAWYQQKQGKSPQLLVYNAKALSEGVPSRFSGSGSGTQFSLRINSLQPEDFGDYYCQHHYNSPYTFGGGTKLEIKGSTSGSGKSSEGKGQIQLVQSGPELKKPGETVKISCKASGYSFTNDGINWVKQAPGKGFKYMGWINTITGEPTYTEDFKGRFAFSLETSASTAYLQINNLKDEDTATFFCAKGTGTSAYWGQGTLVTVSATSLSNSIMYFSHFVPVFLPAKPTTTPAPRPPTPAPTIASQPLSLRPEACRPAAGGAVHTRGLDSRFWVLVVVGGVLACYSLLVTVAFIIFWVRLRVKFSRSADAPAYQQGQNQLYNELNLGRREEYDVLDKRRGRDPEMGGKPQRRKNPQEGLYNELQKDKMAEAYSEIGMKGERRRGKGHDGLYQGLSTATKDTYDALHMQALPPRRSQCMWPRETQLLLEVPPSTEDARSCQFPEEERGERSAEEKGRLGDLWVSKRSRLLHSDYMNMTPRRPGPTRKHYQPYAPPRDFAAYRS

SEQ ID NO: 5871 - protein, 793 aa, Artificial Sequence
  Description of Artificial Sequence: Synthetic Chimeric Antigen Receptor sequence
MVSKGEELFTGVVPILVELDGDVNGHKFSVSGEGEGDATYGKLTLKFICTTGKLPVPWPTLVTTLTYGVQCFSRYPDHMKQHDFFKSAMPEGYVQERTIFFKDDGNYKTRAEVKFEGDTLVNRIELKGIDFKEDGNILGHKLEYNYNSHNVYIMADKQKNGIKVNFKIRHNIEDGSVQLADHYQQNTPIGDGPVLLPDNHYLSTQSALSKDPNEKRDHMVLLEFVTAAGITLGMDELYKSGVKQTLNFDLLKLAGDVESNPGPMALPVTALLLPLALLLHAARPDIQMTQSPASLSASVGETVTITCRASENIDSYLAWYQQKQGKSPQLLVYASTLLVDGVPSRFSGSRSGTQFSLKINSLQSEDVARYYCQHYYSIPYTFGSGTKLEIKGGGGSGGGGSGGGGSEVKLVESGGGLVKPGGSLKLSCAASGFTFNSYTMSWVRQTPAKRLEWVVTISSGGGRTYYPDSVKGRFTISRDNARNTLYLQMSSLRSEDTAMYYCIRGDYRYDGFAYWGQGTVVTVSTTTTPAPRPPTPAPTIASQPLSLRPEACRPAAGGAVHTRGLDFACDFWVLVVVGGVLACYSLLVTVAFIIFWVRSKRSRLLHSDYMNMTPRRPGPTRKHYQPYAPPRDFAAYRSKRGRKKLLYIFKQPFMRPVQTTQEEDGCSCRFPEEEEGGCELRVKFSRSADAPAYQQGQNQLYNELNLGRREEYDVLDKRRGRDPEMGGKPQRRKNPQEGLYNELQKDKMAEAYSEIGMKGERRRGKGHDGLYQGLSTATKDTYDALHMQALPPR

SEQ ID NO: 5872 - protein, 918 aa, Artificial Sequence
  Description of Artificial Sequence: Synthetic Chimeric Antigen Receptor sequence
MAPAMESPTLLCVALLFFAPDGVLAMNIFLLSVLLALLPNVFTARVDQTPRTATKETGESLTINCVLRDTSCAFSSTGWYRTKLGSTNEQSISIGGRYVETVNKGSKSFSLRISDLRVEDSGTYKCQAYVIATMAPLCYASYSWNEKGAGTVLTVKEPKSPDKTHTCPPCPAPPVAGPSVFLFPPKPKDTLMIARTPEVTCVVVDVSHEDPEVKFNWYVDGVEVHNAKTKPREEQYNSTYRVVSVLTVLHQDWLNGKEYKCKVSNKALPAPIEKTISKAKGQPREPQVYTLPPSRDELTKNQVSLTCLVKGFYPSDIAVEWESNGQPENNYKTTPPVLDSDGSFFLYSKLTVDKSRWQQGNVFSCSVMHEALHNHYTQKSLSLSPGKKDPKFFIPLLVVILFAVDTGLFISTQQQVTFLLKIKRTRKGFRLLNPHPKPNPKNNRAEGRGSLLTCGDVEENPGPMDTESNRRANLALPQEPSSVPAFEVLEISPQEVSSGRLLKSASSPPLHTWLTVLKKEQEFLGVTQILTAMICLCFGTVVCSVLDISHIEGDIFSSFKAGYPFWGAIFFSISGMLSIISERRNATYLVRGSLGANTASSIAGGTGITILIINLKKSLAYIHIHSCQKFFETKCFMASFSTEIVVMMLFLTILGLGSAVSLTICGAGEELKGNKVPEKRGRKKLLYIFKQPFMRPVQTTQEEDGCSCRFPEEEEGGCELGSGVKQTLNFDLLKLAGDVESNPGPMIPAVVLLLLLLVEQAAALGEPQLCYILDAILFLYGIVLTLLYCRLKIQVRKAAITSYEKSRVKFSRSADAPAYQQGQNQLYNELNLGRREEYDVLDKRRGRDPEMGGKPRRKNPQEGLYNELQKDKMAEAYSEIGMKGERRRGKGHDGLYQGLSTATKDTYDALHMQALPPR

SEQ ID NO: 5873 - protein, 728 aa, Artificial Sequence
  Description of Artificial Sequence: Synthetic Chimeric Antigen Receptor sequence
MAPAMESPTLLCVALLFFAPDGVLAMNIFLLSVLLALLPNVFTARVDQTPRTATKETGESLTINCVLRDTSCAFSSTGWYRTKLGSTNEQSISIGGRYVETVNKGSKSFSLRISDLRVEDSGTYKCQAYVIATMAPLCYASYSWNEKGAGTVLTVKTTTPAPRPPTPAPTIASQPLSLRPEACRPAAGGAVHTRGLDFACDFFIPLLVVILFAVDTGLFISTQQQVTFLLKIKRTRKGFRLLNPHPKPNPKNNRAEGRGSLLTCGDVEENPGPMDTESNRRANLALPQEPSSVPAFEVLEISPQEVSSGRLLKSASSPPLHTWLTVLKKEQEFLGVTQILTAMICLCFGTVVCSVLDISHIEGDIFSSFKAGYPFWGAIFFSISGMLSIISERRNATYLVRGSLGANTASSIAGGTGITILIINLKKSLAYIHIHSCQKFFETKCFMASFSTEIVVMMLFLTILGLGSAVSLTICGAGEELKGNKVPEKRGRKKLLYIFKQPFMRPVQTTQEEDGCSCRFPEEEEGGCELGSGVKQTLNFDLLKLAGDVESNPGPMIPAVVLLLLLLVEQAAALGEPQLCYILDAILFLYGIVLTLLYCRLKIQVRKAAITSYEKSRVKFSRSADAPAYQQGQNQLYNELNLGRREEYDVLDKRRGRDPEMGGKPRRKNPQEGLYNELQKDKMAEAYSEIGMKGERRRGKGHDGLYQGLSTATKDTYDALHMQALPPR

SEQ ID NO: 5874 - protein, 370 aa, Artificial Sequence
  Description of Artificial Sequence: Synthetic Chimeric Antigen Receptor sequence
MAPAMESPTLLCVALLFFAPDGVLAMNIFLLSVLLALLPNVFTARVDQTPRTATKETGESLTINCVLRDTSCAFSSTGWYRTKLGSTNEQSISIGGRYVETVNKGSKSFSLRISDLRVEDSGTYKCQAYVIATMAPLCYASYSWNEKGAGTVLTVKPGVQPSPPVISLLYSATEEQRGNGFVQLICLISGYYIYIWAPLAGTCGVLLLSLVITLYCKRGRKKLLYIFKQPFMRPVQTTQEEDGCSCRFPEEEEGGCELRVKFSRSADAPAYQQGQNQLYNELNLGRREEYDVLDKRRGRDPEMGGKPRRKNPQEGLYNELQKDKMAEAYSEIGMKGERRRGKGHDGLYQGLSTATKDTYDALHMQALPPR

SEQ ID NO: 5875 - protein, 569 aa, Artificial Sequence
  Description of Artificial Sequence: Synthetic Chimeric Antigen Receptor sequence
MAPAMESPTLLCVALLFFAPDGVLAMNIFLLSVLLALLPNVFTARVDQTPRTATKETGESLTINCVLRDTSCAFSSTGWYRTKLGSTNEQSISIGGRYVETVNKGSKSFSLRISDLRVEDSGTYKCQAYVIATMAPLCYASYSWNEKGAGTVLTVKEPKSPDKTHTCPPCPAPPVAGPSVFLFPPKPKDTLMIARTPEVTCVVVDVSHEDPEVKFNWYVDGVEVHNAKTKPREEQYNSTYRVVSVLTVLHQDWLNGKEYKCKVSNKALPAPIEKTISKAKGQPREPQVYTLPPSRDELTKNQVSLTCLVKGFYPSDIAVEWESNGQPENNYKTTPPVLDSDGSFFLYSKLTVDKSRWQQGNVFSCSVMHEALHNHYTQKSLSLSPGKKDPKIYIWAPLAGTCGVLLLSLVITLYCKRGRKKLLYIFKQPFMRPVQTTQEEDGCSCRFPEEEEGGCELRVKFSRSADAPAYQQGQNQLYNELNLGRREEYDVLDKRRGRDPEMGGKPRRKNPQEGLYNELQKDKMAEAYSEIGMKGERRRGKGHDGLYQGLSTATKDTYDALHMQALPPR

SEQ ID NO: 5876 - protein, 379 aa, Artificial Sequence
  Description of Artificial Sequence: Synthetic Chimeric Antigen Receptor sequence
MAPAMESPTLLCVALLFFAPDGVLAMNIFLLSVLLALLPNVFTARVDQTPRTATKETGESLTINCVLRDTSCAFSSTGWYRTKLGSTNEQSISIGGRYVETVNKGSKSFSLRISDLRVEDSGTYKCQAYVIATMAPLCYASYSWNEKGAGTVLTVKTTTPAPRPPTPAPTIASQPLSLRPEACRPAAGGAVHTRGLDFACDIYIWAPLAGTCGVLLLSLVITLYCKRGRKKLLYIFKQPFMRPVQTTQEEDGCSCRFPEEEEGGCELRVKFSRSADAPAYQQGQNQLYNELNLGRREEYDVLDKRRGRDPEMGGKPRRKNPQEGLYNELQKDKMAEAYSEIGMKGERRRGKGHDGLYQGLSTATKDTYDALHMQALPPR

SEQ ID NO: 5877 - protein, 743 aa, Artificial Sequence
  Description of Artificial Sequence: Synthetic Chimeric Antigen Receptor sequence
VQIEYLAKQIVDNAIQQASGGGGSADAPAYQQGQNQLYNELNLGRREEYDVLDKRRGRDPEMGGKPRRKNPQEGLYNELQKDKMAEAYSEIGMKGERRRGKGHDGLYQGLSTATKDTYDALHMQALPPRRAEGRGSLLTCGDVEENPGPMAVPTQVLGLLLLWLTDARCDIQMTQSPSSLSASVGDRVTITCRASEDIYFNLVWYQQKPGKAPKLLIYDTNRLADGVPSRFSGSGSGTQYTLTISSLQPEDFATYYCQHYKNYPLTFGQGTKLEIKRSGGGGSGGGGSGGGGSRSEVQLVESGGGLVQPGGSLRLSCAASGFTLSNYGMHWIRQAPGKGLEWVSSISLNGGSTYYRDSVKGRFTISRDNAKSTLYLQMNSLRAEDTAVYYCAAQDAYTGGYFDYWGQGTLVTVSSMPCPAPPVAGPSVFLFPPKPKDTLMIARTPEVTCVVVDVSHEDPEVKFNWYVDGVEVHNAKTKPREEQYNSTYRVVSVLTVLHQDWLNGKEYKCKVSNKALPAPIEKTISKAKPCPAPPVAGPSVFLFPPKPKDTLMIARTPEVTCVVVDVSHEDPEVKFNWYVDGVEVHNAKTKPREEQYNSTYRVVSVLTVLHQDWLNGKEYKCKVSNKALPAPIEKTISKAKMALIVLGGVAGLLLFIGLGIFFMALIVLGGVAGLLLFIGLGIFFCVRCRHRRRSGGGGSSHIQIPPGLTELLQGYTVEVLRQQPPDLVEFAVEYFTRLREARA

SEQ ID NO: 5878 - protein, 493 aa, Artificial Sequence
  Description of Artificial Sequence: Synthetic Chimeric Antigen Receptor sequence
MALPVTALLLPLALLLHAARPEVQLVQSGAEVKKPGASVKMSCKASGYTFTSYFIHWVRQAPGQGLEWIGFINPYNDGSKYAQKFQGRATLTSDKSTSTVYMELSSLRSEDTAVYYCTRDDGYYGYAMDYWGQGTLVTVSSASGGGGSGGGGSGGGGSDIQMTQSPSSLSASVGDRVTLTCRATQELSGYLSWLQQKPGKAIKRLIYAASTLDSGVPSRFSGNRAGTDYTLTISSLQPEDFATYYCLQYAIYPYTFGQGTKLEIKRTRTTTPAPRPPTPAPTIASQPLSLRPEACRPAAGGAVHTRGLDFACDIYIWAPLAGTCGVLLLSLVITLYCKRGRKKLLYIFKQPFMRPVQTTQEEDGCSCRFPEEEEGGCELSARVKFSRSADAPAYKQGQNQLYNELNLGRREEYDVLDKRRGRDPEMGGKPRRKNPQEGLYNELQKDKMAEAYSEIGMKGERRRGKGHDGLYQGLSTATKDTYDALHMQALPPR

SEQ ID NO: 5879 - protein, 704 aa, Artificial Sequence
  Description of Artificial Sequence: Synthetic Chimeric Antigen Receptor sequence
MVSKGEELFTGVVPILVELDGDVNGHKFSVSGEGEGDATYGKLTLKFICTTGKLPVPWPTLVTTLTYGVQCFSRYPDHMKQHDFFKSAMPEGYVQERTIFFKDDGNYKTRAEVKFEGDTLVNRIELKGIDFKEDGNILGHKLEYNYNSHNVYIMADKQKNGIKVNFKIRHNIEDGSVQLADHYQQNTPIGDGPVLLPDNHYLSTQSALSKDPNEKRDHMVLLEFVTAAGITLGMDELYKSGVKQTLNFDLLKLAGDVESNPGPMALPVTALLLPLALLLHAARPEVKLVESGGGLVKPGGSLKLSCAASGFTFNSYTMSWVRQTPAKRLEWVVTISSGGGRTYYPDSVKGRFTISRDNARNTLYLQMSSLRSEDTAMYYCIRGDYRYDGFAYWGQGTVVTVSTGGGGSGGGGSGGGGSDIQMTQSPASLSASVGETVTITCRASENIDSYLAWYQQKQGKSPQLLVYASTLLVDGVPSRFSGSRSGTQFSLKINSLQSEDVARYYCQHYYSIPYTFGSGTKLEIKTTTPAPRPPTPAPTIASQPLSLRPEACRPAAGGAVHTRGLDFACDIYIWAPLAGTCGVLLLSLVITRVKFSRSADAPAYQQGQNQLYNELNLGRREEYDVLDKRRGRDPEMGGKPQRRKNPQEGLYNELQKDKMAEAYSEIGMKGERRRGKGHDGLYQGLSTATKDTYDALHMQALPPR

SEQ ID NO: 5880 - protein, 793 aa, Artificial Sequence
  Description of Artificial Sequence: Synthetic Chimeric Antigen Receptor sequence
MVSKGEELFTGVVPILVELDGDVNGHKFSVSGEGEGDATYGKLTLKFICTTGKLPVPWPTLVTTLTYGVQCFSRYPDHMKQHDFFKSAMPEGYVQERTIFFKDDGNYKTRAEVKFEGDTLVNRIELKGIDFKEDGNILGHKLEYNYNSHNVYIMADKQKNGIKVNFKIRHNIEDGSVQLADHYQQNTPIGDGPVLLPDNHYLSTQSALSKDPNEKRDHMVLLEFVTAAGITLGMDELYKSGVKQTLNFDLLKLAGDVESNPGPMALPVTALLLPLALLLHAARPEVKLVESGGGLVKPGGSLKLSCAASGFTFNSYTMSWVRQTPAKRLEWVVTISSGGGRTYYPDSVKGRFTISRDNARNTLYLQMSSLRSEDTAMYYCIRGDYRYDGFAYWGQGTVVTVSTGGGGSGGGGSGGGGSDIQMTQSPASLSASVGETVTITCRASENIDSYLAWYQQKQGKSPQLLVYASTLLVDGVPSRFSGSRSGTQFSLKINSLQSEDVARYYCQHYYSIPYTFGSGTKLEIKTTTPAPRPPTPAPTIASQPLSLRPEACRPAAGGAVHTRGLDFACDFWVLVVVGGVLACYSLLVTVAFIIFWVRSKRSRLLHSDYMNMTPRRPGPTRKHYQPYAPPRDFAAYRSKRGRKKLLYIFKQPFMRPVQTTQEEDGCSCRFPEEEEGGCELRVKFSRSADAPAYQQGQNQLYNELNLGRREEYDVLDKRRGRDPEMGGKPQRRKNPQEGLYNELQKDKMAEAYSEIGMKGERRRGKGHDGLYQGLSTATKDTYDALHMQALPPR

SEQ ID NO: 5881 - protein, 453 aa, Artificial Sequence
  Description of Artificial Sequence: Synthetic Chimeric Antigen Receptor sequence
MALPVTALLLPLALLLHAARPEVQLLESGGGLVQPGGSLRLSCAASGFTFSSYAMNWVRQAPGKGLEWVSAISDSGGSRWYADSVKGRFTISRDNSKNTLYLQMNSLRAEDTAVYYCTRYWPMDIWGQGTLVTVSSGGGGSGGGGSGGGGSEIVLTQSPGTLSLSPGERATLSCRASVRVSSTYLAWYQQKPGQAPRLLMYDASIRATGIPDRFSGSGSGTDFTLTISRLEPEDFAVYYCQQYMKWPLTFGQGTKVEIKGLAVSTISSFFPPGYQIYIWAPLAGTCGVLLLSLVITLYCKRGRKKLLYIFKQPFMRPVQTTQEEDGCSCRFPEEEEGGCELRVKFSRSADAPAYQQGQNQLYNELNLGRREEYDVLDKRRGRDPEMGGKPRRKNPQEGLYNELQKDKMAEAYSEIGMKGERRRGKGHDGLYQGLSTATKDTYDALHMQALPPR

SEQ ID NO: 5882 - protein, 455 aa, Artificial Sequence
  Description of Artificial Sequence: Synthetic Chimeric Antigen Receptor sequence
MALPVTALLLPLALLLHAARPQVQLQESGPGLVKPSETLSLTCVVSGGSISSSNWWSWVRQPPGKGLEWIGEIYHSGSPNYNPSLKSRVTISVDKSKNQFSLKLSSVTAADTAVYYCARQTTAGSFDYWGQGTLVTVSSGGGGSGGGGSGGGGSDIQMTQSPSSLSASVGDRVTITCRASQSISSYLNWYQQKPGKAPKLLIYAASSLQSGVPSRFSGSGSGTDFTLTISSLQPEDFATYYCQQSYSTPPTFGQGTKVEIKGLAVSTISSFFPPGYQIYIWAPLAGTCGVLLLSLVITLYCKRGRKKLLYIFKQPFMRPVQTTQEEDGCSCRFPEEEEGGCELRVKFSRSADAPAYQQGQNQLYNELNLGRREEYDVLDKRRGRDPEMGGKPRRKNPQEGLYNELQKDKMAEAYSEIGMKGERRRGKGHDGLYQGLSTATKDTYDALHMQALPPR

SEQ ID NO: 5883 - protein, 456 aa, Artificial Sequence
  Description of Artificial Sequence: Synthetic Chimeric Antigen Receptor sequence
MALPVTALLLPLALLLHAARPQVQLQQPGAELVKPGTSVKLSCKASGYTFTRYWMHWVKQRPGQGLEWIGMIHPSSGSTSYNEKVKNKATLTVDRSSTTAYMQLSSLTSEDSAVYYCARDGDYYYGTGDYWGQGTTLTVSSGGGGSGGGGSGGGGSQIVLSQSPAILSASPGEKVTMTCRASSSINYMHWYQQKPGSSPKPWIFATSNLASGVPSRFSGSGSGTSYSLTISRVEAEDAATYYCQQWRSDRALTFGAGTKLELGLAVSTISSFFPPGYQIYIWAPLAGTCGVLLLSLVITLYCKRGRKKLLYIFKQPFMRPVQTTQEEDGCSCRFPEEEEGGCELRVKFSRSADAPAYQQGQNQLYNELNLGRREEYDVLDKRRGRDPEMGGKPRRKNPQEGLYNELQKDKMAEAYSEIGMKGERRRGKGHDGLYQGLSTATKDTYDALHMQALPPR

SEQ ID NO: 5884 - protein, 457 aa, Artificial Sequence
  Description of Artificial Sequence: Synthetic Chimeric Antigen Receptor sequence
MALPVTALLLPLALLLHAARPEVQLQQSGAELVRPGASVKLSCTASGFNIKDDYIHWVKQRPEQGLEWIGWIDPEKGDTAYASKFQDKATITSDTSSNTAYLQLSSLTSEDTAVYYCTLTGRFDYWGQGTTLTVSSGGGGSGGGGSGGGGSDIVMSQSPSSLAVSVGEKVTMSCKSSQSLLYSSNQKNNLAWYQQKPGQSPKLLIYWASTRESGVPDRFTGSGSGTDFTLTISSVQAEDLAVYYCQQYYSYRTFGGGTKLEIKGLAVSTISSFFPPGYQIYIWAPLAGTCGVLLLSLVITLYCKRGRKKLLYIFKQPFMRPVQTTQEEDGCSCRFPEEEEGGCELRVKFSRSADAPAYQQGQNQLYNELNLGRREEYDVLDKRRGRDPEMGGKPRRKNPQEGLYNELQKDKMAEAYSEIGMKGERRRGKGHDGLYQGLSTATKDTYDALHMQALPPR

SEQ ID NO: 5885 - protein, 457 aa, Artificial Sequence
  Description of Artificial Sequence: Synthetic Chimeric Antigen Receptor sequence
MALPVTALLLPLALLLHAARPEVQLQQSGPELVKPGASVKMSCKASGYIFTSYVMYWVKQKPGQGLEWIGYINPYNDGTKYNEKFKGKATLTSDKSSSTAYMELSSLTSEDSAVYYSCCARYYDYDYYFDYWGQGTTLTVSSGGGGSGGGGSGGGGSDIQMTQSPSSLSASLGGKVTITCKASQDINKYIAWYQHKPGKGPRLLIHYTSTLQPGIPSRFSGSGSGRDYSFSISNLEPEDIATYYCLQYDYLWTFGGGTKLEIKGLAVSTISSFFPPGYQIYIWAPLAGTCGVLLLSLVITLYCKRGRKKLLYIFKQPFMRPVQTTQEEDGCSCRFPEEEEGGCELRVKFSRSADAPAYQQGQNQLYNELNLGRREEYDVLDKRRGRDPEMGGKPRRKNPQEGLYNELQKDKMAEAYSEIGMKGERRRGKGHDGLYQGLSTATKDTYDALHMQALPPR

SEQ ID NO: 5886 - protein, 458 aa, Artificial Sequence
  Description of Artificial Sequence: Synthetic Chimeric Antigen Receptor sequence
MALPVTALLLPLALLLHAARPEVQLQQSGPELVKPGASVKMSCKASGYTFTSYFIHWVKQKPGQGLEWIGFINPYNDGSKYNEKFKGKATLTSDKSSSTAYMELSSLTSEDSAVYYCTRDDGYYGYAMDYWGQGTSVTVSSGGGGSGGGGSGGGGSDIQMTQSPSSLSASLGERVSLTCRATQELSGYLSWLQQKPDGTIKRLIYAASTLDSGVPKRFSGNRSGSDYSLTISSLESEDFADYYCLQYAIYPYTFGGGTKLEIKRGLAVSTISSFFPPGYQIYIWAPLAGTCGVLLLSLVITLYCKRGRKKLLYIFKQPFMRPVQTTQEEDGCSCRFPEEEEGGCELRVKFSRSADAPAYQQGQNQLYNELNLGRREEYDVLDKRRGRDPEMGGKPRRKNPQEGLYNELQKDKMAEAYSEIGMKGERRRGKGHDGLYQGLSTATKDTYDALHMQALPPR

SEQ ID NO: 5887 - protein, 458 aa, Artificial Sequence
  Description of Artificial Sequence: Synthetic Chimeric Antigen Receptor sequence
MALPVTALLLPLALLLHAARPEVQLRQSGPELVKPGASVKMSCKASGYTFTSYFMHWVKQKPGQGLEWIGFINPYNDGTKYNEKFKGKATLTSDKSSSTAYMELNSLTSEDSAVYYCTRDDGYYDYAMDYWGQGTSVTVSSGGGGSGGGGSGGGGSDIQMTQSPSSLSASLGERVSLTCRASQEISVYLSWLQQKPDGTIKRLIYAASTLDSGVPERFSGSRSGSDYSLTISSLESEDFADYYCLQYASYPYTFGGGTKLEIKRGLAVSTISSFFPPGYQIYIWAPLAGTCGVLLLSLVITLYCKRGRKKLLYIFKQPFMRPVQTTQEEDGCSCRFPEEEEGGCELRVKFSRSADAPAYQQGQNQLYNELNLGRREEYDVLDKRRGRDPEMGGKPRRKNPQEGLYNELQKDKMAEAYSEIGMKGERRRGKGHDGLYQGLSTATKDTYDALHMQALPPR

SEQ ID NO: 5888 - protein, 458 aa, Artificial Sequence
  Description of Artificial Sequence: Synthetic Chimeric Antigen Receptor sequence
MALPVTALLLPLALLLHAARPQVQLQESGPGLVKPSETLSLTCVVSGGSISSSNWWSWVRQPPGKGLEWIGEIYHSGSPNYNPSLKSRVTISVDKSKNQFSLKLSSVTAADTAVYYCARQTTAGSFDYWGQGTLVTVSSGGGGSGGGGSGGGGSDIQMTQSPSSLSASVGDRVTITCRASQSISSYLNWYQQKPGKAPKLLIYAASSLQSGVPSRFSGSGSGTDFTLTISSLQPEDFATYYCQQSYSTPPTFGQGTKVEIKGLAVSTISSFFPPGYQIISFFLALTSTALLFLLFFLTLRFSVVKRGRKKLLYIFKQPFMRPVQTTQEEDGCSCRFPEEEEGGCELRVKFSRSADAPAYQQGQNQLYNELNLGRREEYDVLDKRRGRDPEMGGKPRRKNPQEGLYNELQKDKMAEAYSEIGMKGERRRGKGHDGLYQGLSTATKDTYDALHMQALPPR

SEQ ID NO: 5889 - protein, 458 aa, Artificial Sequence
  Description of Artificial Sequence: Synthetic Chimeric Antigen Receptor sequence
MALPVTALLLPLALLLHAARPQVQLQESGPGLVKPSETLSLTCVVSGGSISSSNWWSWVRQPPGKGLEWIGEIYHSGSPNYNPSLKSRVTISVDKSKNQFSLKLSSVTAADTAVYYCARSSSGGFFDYWGQGTLVTVSSGGGGSGGGGSGGGGSDIQMTQSPSSLSASVGDRVTITCRASQSISSYLNWYQQKPGKAPKLLIYAASSLQSGVPSRFSGSGSGTDFTLTISSLQPEDFATYYCQQSYSTPPTFGQGTKVEIKGLAVSTISSFFPPGYQIISFFLALTSTALLFLLFFLTLRFSVVKRGRKKLLYIFKQPFMRPVQTTQEEDGCSCRFPEEEEGGCELRVKFSRSADAPAYQQGQNQLYNELNLGRREEYDVLDKRRGRDPEMGGKPRRKNPQEGLYNELQKDKMAEAYSEIGMKGERRRGKGHDGLYQGLSTATKDTYDALHMQALPPR

SEQ ID NO: 5890 - protein, 459 aa, Artificial Sequence
  Description of Artificial Sequence: Synthetic Chimeric Antigen Receptor sequence
MALPVTALLLPLALLLHAARPEVQLQQSGPELVKPGASMKISCKASGYSFTGYTMNWVKQSHEKNLEWIGPINPYNDGTIYNPNFKGKATLTVDKASSTAYMELLSLTSDDPAVYYSCCARTDDYDDYTMDYWGQGTSVTVSSGGGGSGGGGSGGGGSEIQMTQTPSSLSASLGDRVTISCRASHDISNYLNWYQQKPDGTLKLLIYYTSRLHSGVPSRFSGSGSGTDYSLTISNLEQEDIATYFCQQGKTLLWTFGGGTKLEIKGLAVSTISSFFPPGYQIYIWAPLAGTCGVLLLSLVITLYCKRGRKKLLYIFKQPFMRPVQTTQEEDGCSCRFPEEEEGGCELRVKFSRSADAPAYQQGQNQLYNELNLGRREEYDVLDKRRGRDPEMGGKPRRKNPQEGLYNELQKDKMAEAYSEIGMKGERRRGKGHDGLYQGLSTATKDTYDALHMQALPPR

SEQ ID NO: 5891 - protein, 459 aa, Artificial Sequence
  Description of Artificial Sequence: Synthetic Chimeric Antigen Receptor sequence
MALPVTALLLPLALLLHAARPQVQLQQPGAELVKPGTSVKLSCKASGYTFTRYWMHWVKQRPGQGLEWIGMIHPSSGSTSYNEKVKNKATLTVDRSSTTAYMQLSSLTSEDSAVYYCARDGDYYYGTGDYWGQGTTLTVSSGGGGSGGGGSGGGGSQIVLSQSPAILSASPGEKVTMTCRASSSINYMHWYQQKPGSSPKPWIFATSNLASGVPSRFSGSGSGTSYSLTISRVEAEDAATYYCQQWRSDRALTFGAGTKLELGLAVSTISSFFPPGYQIISFFLALTSTALLFLLFFLTLRFSVVKRGRKKLLYIFKQPFMRPVQTTQEEDGCSCRFPEEEEGGCELRVKFSRSADAPAYQQGQNQLYNELNLGRREEYDVLDKRRGRDPEMGGKPRRKNPQEGLYNELQKDKMAEAYSEIGMKGERRRGKGHDGLYQGLSTATKDTYDALHMQALPPR

SEQ ID NO: 5892 - protein, 460 aa, Artificial Sequence
  Description of Artificial Sequence: Synthetic Chimeric Antigen Receptor sequence
MALPVTALLLPLALLLHAARPDIQLQESGPGLVKPSQSLSLTCSVTGYSITSAYYWNWIRQFPGNKLEWMGYISYDGRNNYNPSLKNRISITRDTSKNQFFLKLNSVTTEDTATYYCAKEGDYDVGNYYAMDYWGQGTSVTVSSGGGGSGGGGSGGGGSENVLTQSPAIMSASPGEKVTMTCRASSNVISSYVHWYQQRSGASPKLWIYSTSNLASGVPARFSGSGSGTSYSLTISSVEAEDAATYYCQQYSGYPLTFGAGTKLELGLAVSTISSFFPPGYQIYIWAPLAGTCGVLLLSLVITLYCKRGRKKLLYIFKQPFMRPVQTTQEEDGCSCRFPEEEEGGCELRVKFSRSADAPAYQQGQNQLYNELNLGRREEYDVLDKRRGRDPEMGGKPRRKNPQEGLYNELQKDKMAEAYSEIGMKGERRRGKGHDGLYQGLSTATKDTYDALHMQALPPR

SEQ ID NO: 5893 - protein, 460 aa, Artificial Sequence
  Description of Artificial Sequence: Synthetic Chimeric Antigen Receptor sequence
MALPVTALLLPLALLLHAARPEVQLQQSGAELVRPGASVKLSCTASGFNIKDDYIHWVKQRPEQGLEWIGWIDPEKGDTAYASKFQDKATITSDTSSNTAYLQLSSLTSEDTAVYYCTLTGRFDYWGQGTTLTVSSGGGGSGGGGSGGGGSDIVMSQSPSSLAVSVGEKVTMSCKSSQSLLYSSNQKNNLAWYQQKPGQSPKLLIYWASTRESGVPDRFTGSGSGTDFTLTISSVQAEDLAVYYCQQYYSYRTFGGGTKLEIKGLAVSTISSFFPPGYQIISFFLALTSTALLFLLFFLTLRFSVVKRGRKKLLYIFKQPFMRPVQTTQEEDGCSCRFPEEEEGGCELRVKFSRSADAPAYQQGQNQLYNELNLGRREEYDVLDKRRGRDPEMGGKPRRKNPQEGLYNELQKDKMAEAYSEIGMKGERRRGKGHDGLYQGLSTATKDTYDALHMQALPPR

SEQ ID NO: 5894 - protein, 460 aa, Artificial Sequence
  Description of Artificial Sequence: Synthetic Chimeric Antigen Receptor sequence
MALPVTALLLPLALLLHAARPEVQLQQSGPELVKPGASVKMSCKASGYIFTSYVMYWVKQKPGQGLEWIGYINPYNDGTKYNEKFKGKATLTSDKSSSTAYMELSSLTSEDSAVYYSCCARYYDYDYYFDYWGQGTTLTVSSGGGGSGGGGSGGGGSDIQMTQSPSSLSASLGGKVTITCKASQDINKYIAWYQHKPGKGPRLLIHYTSTLQPGIPSRFSGSGSGRDYSFSISNLEPEDIATYYCLQYDYLWTFGGGTKLEIKGLAVSTISSFFPPGYQIISFFLALTSTALLFLLFFLTLRFSVVKRGRKKLLYIFKQPFMRPVQTTQEEDGCSCRFPEEEEGGCELRVKFSRSADAPAYQQGQNQLYNELNLGRREEYDVLDKRRGRDPEMGGKPRRKNPQEGLYNELQKDKMAEAYSEIGMKGERRRGKGHDGLYQGLSTATKDTYDALHMQALPPR

SEQ ID NO: 5895 - protein, 461 aa, Artificial Sequence
  Description of Artificial Sequence: Synthetic Chimeric Antigen Receptor sequence
MALPVTALLLPLALLLHAARPEVQLQQSGPELVKPGASVKMSCKASGYTFTSYFIHWVKQKPGQGLEWIGFINPYNDGSKYNEKFKGKATLTSDKSSSTAYMELSSLTSEDSAVYYCTRDDGYYGYAMDYWGQGTSVTVSSGGGGSGGGGSGGGGSDIQMTQSPSSLSASLGERVSLTCRATQELSGYLSWLQQKPDGTIKRLIYAASTLDSGVPKRFSGNRSGSDYSLTISSLESEDFADYYCLQYAIYPYTFGGGTKLEIKRGLAVSTISSFFPPGYQIISFFLALTSTALLFLLFFLTLRFSVVKRGRKKLLYIFKQPFMRPVQTTQEEDGCSCRFPEEEEGGCELRVKFSRSADAPAYQQGQNQLYNELNLGRREEYDVLDKRRGRDPEMGGKPRRKNPQEGLYNELQKDKMAEAYSEIGMKGERRRGKGHDGLYQGLSTATKDTYDALHMQALPPR

SEQ ID NO: 5896 - protein, 461 aa, Artificial Sequence
  Description of Artificial Sequence: Synthetic Chimeric Antigen Receptor sequence
MALPVTALLLPLALLLHAARPEVQLRQSGPELVKPGASVKMSCKASGYTFTSYFMHWVKQKPGQGLEWIGFINPYNDGTKYNEKFKGKATLTSDKSSSTAYMELNSLTSEDSAVYYCTRDDGYYDYAMDYWGQGTSVTVSSGGGGSGGGGSGGGGSDIQMTQSPSSLSASLGERVSLTCRASQEISVYLSWLQQKPDGTIKRLIYAASTLDSGVPERFSGSRSGSDYSLTISSLESEDFADYYCLQYASYPYTFGGGTKLEIKRGLAVSTISSFFPPGYQIISFFLALTSTALLFLLFFLTLRFSVVKRGRKKLLYIFKQPFMRPVQTTQEEDGCSCRFPEEEEGGCELRVKFSRSADAPAYQQGQNQLYNELNLGRREEYDVLDKRRGRDPEMGGKPRRKNPQEGLYNELQKDKMAEAYSEIGMKGERRRGKGHDGLYQGLSTATKDTYDALHMQALPPR

SEQ ID NO: 5897 - protein, 461 aa, Artificial Sequence
  Description of Artificial Sequence: Synthetic Chimeric Antigen Receptor sequence
MALPVTALLLPLALLLHAARPQVQLQQPGAELVKPGASMKMSCKASGYTFPSSNIHWLKQTPGQGLEWIGVIYPGNGDTSYNQKFKDKATLTTDKSSSTAYMQLSSLTSEDSAIYFSCCARVYNWHFDVWGAGTTVTVSSGGGGSGGGGSGGGGSNIVLTQSPASLAVSLGQRATISCRASESVDGYGDIFMLWYQQKPGQPPKLLIYFASNLESGVPARFSGSGSRTDFTLTIDPVEADDAATYYCQQNNEDPYTFGGGTKLEIKRGLAVSTISSFFPPGYQIYIWAPLAGTCGVLLLSLVITLYCKRGRKKLLYIFKQPFMRPVQTTQEEDGCSCRFPEEEEGGCELRVKFSRSADAPAYQQGQNQLYNELNLGRREEYDVLDKRRGRDPEMGGKPRRKNPQEGLYNELQKDKMAEAYSEIGMKGERRRGKGHDGLYQGLSTATKDTYDALHMQALPPR

SEQ ID NO: 5898 - protein, 462 aa, Artificial Sequence
  Description of Artificial Sequence: Synthetic Chimeric Antigen Receptor sequence
MALPVTALLLPLALLLHAARPEVQLQQSGPELVKPGASMKISCKASGYSFTGYTMNWVKQSHEKNLEWIGPINPYNDGTIYNPNFKGKATLTVDKASSTAYMELLSLTSDDPAVYYSCCARTDDYDDYTMDYWGQGTSVTVSSGGGGSGGGGSGGGGSEIQMTQTPSSLSASLGDRVTISCRASHDISNYLNWYQQKPDGTLKLLIYYTSRLHSGVPSRFSGSGSGTDYSLTISNLEQEDIATYFCQQGKTLLWTFGGGTKLEIKGLAVSTISSFFPPGYQIISFFLALTSTALLFLLFFLTLRFSVVKRGRKKLLYIFKQPFMRPVQTTQEEDGCSCRFPEEEEGGCELRVKFSRSADAPAYQQGQNQLYNELNLGRREEYDVLDKRRGRDPEMGGKPRRKNPQEGLYNELQKDKMAEAYSEIGMKGERRRGKGHDGLYQGLSTATKDTYDALHMQALPPR

SEQ ID NO: 5899 - protein, 463 aa, Artificial Sequence
  Description of Artificial Sequence: Synthetic Chimeric Antigen Receptor sequence
MALPVTALLLPLALLLHAARPDIQLQESGPGLVKPSQSLSLTCSVTGYSITSAYYWNWIRQFPGNKLEWMGYISYDGRNNYNPSLKNRISITRDTSKNQFFLKLNSVTTEDTATYYCAKEGDYDVGNYYAMDYWGQGTSVTVSSGGGGSGGGGSGGGGSENVLTQSPAIMSASPGEKVTMTCRASSNVISSYVHWYQQRSGASPKLWIYSTSNLASGVPARFSGSGSGTSYSLTISSVEAEDAATYYCQQYSGYPLTFGAGTKLELGLAVSTISSFFPPGYQIISFFLALTSTALLFLLFFLTLRFSVVKRGRKKLLYIFKQPFMRPVQTTQEEDGCSCRFPEEEEGGCELRVKFSRSADAPAYQQGQNQLYNELNLGRREEYDVLDKRRGRDPEMGGKPRRKNPQEGLYNELQKDKMAEAYSEIGMKGERRRGKGHDGLYQGLSTATKDTYDALHMQALPPR

SEQ ID NO: 5900 - protein, 463 aa, Artificial Sequence
  Description of Artificial Sequence: Synthetic Chimeric Antigen Receptor sequence
MALPVTALLLPLALLLHAARPEVQLQQSGPELVKPGASVKMSCKASGYTFTSYVMHWVKQKPGQGLEWIGYINPYNDGTKYNEKFKGKATLTSDTSSSTAYMELNSLTSEDSAVYFSCCARPIYFDNDYFDYWGQGTTLKVSSGGGGSGGGGSGGGGSTIVLTQSPASLAVSLGQRATISCRASESVDSYGNSFMHWYQQKPGQPPKLLIYLASNLESGVPARFSGSGSRTDFTLTIDPVEADDAATYYCQQNNYDPWTFGGGTKLEIKGLAVSTISSFFPPGYQIYIWAPLAGTCGVLLLSLVITLYCKRGRKKLLYIFKQPFMRPVQTTQEEDGCSCRFPEEEEGGCELRVKFSRSADAPAYQQGQNQLYNELNLGRREEYDVLDKRRGRDPEMGGKPRRKNPQEGLYNELQKDKMAEAYSEIGMKGERRRGKGHDGLYQGLSTATKDTYDALHMQALPPR

SEQ ID NO: 5901 - protein, 464 aa, Artificial Sequence
  Description of Artificial Sequence: Synthetic Chimeric Antigen Receptor sequence
MALPVTALLLPLALLLHAARPQVQLQQPGAELVKPGASMKMSCKASGYTFPSSNIHWLKQTPGQGLEWIGVIYPGNGDTSYNQKFKDKATLTTDKSSSTAYMQLSSLTSEDSAIYFSCCARVYNWHFDVWGAGTTVTVSSGGGGSGGGGSGGGGSNIVLTQSPASLAVSLGQRATISCRASESVDGYGDIFMLWYQQKPGQPPKLLIYFASNLESGVPARFSGSGSRTDFTLTIDPVEADDAATYYCQQNNEDPYTFGGGTKLEIKRGLAVSTISSFFPPGYQIISFFLALTSTALLFLLFFLTLRFSVVKRGRKKLLYIFKQPFMRPVQTTQEEDGCSCRFPEEEEGGCELRVKFSRSADAPAYQQGQNQLYNELNLGRREEYDVLDKRRGRDPEMGGKPRRKNPQEGLYNELQKDKMAEAYSEIGMKGERRRGKGHDGLYQGLSTATKDTYDALHMQALPPR

SEQ ID NO: 5902 - protein, 464 aa, Artificial Sequence
  Description of Artificial Sequence: Synthetic Chimeric Antigen Receptor sequence
MALPVTALLLPLALLLHAARPQVQLQQPGAELVKPGASVKLSCKASGYTFTRYWMHWVKQRPGQGLEWIGNIDPSDTETHYNQQFKDKATLTVDKSSSTAYMQLSSLTSEDSAVYYCAIYYGNPSYYAMDYWGQGTSVTVSSGGGGSGGGGSGGGGSDIVMTQSPSSLTVTAGEKVTMSCKSSQNLLNSGNQKKYLNWYQQKPGQPPKLLIYWASTRESGVPDRFTGSGSGTDFTLTISSVQAEDLAVYFCQNDYSYPFTFGAGTKLELKGLAVSTISSFFPPGYQIYIWAPLAGTCGVLLLSLVITLYCKRGRKKLLYIFKQPFMRPVQTTQEEDGCSCRFPEEEEGGCELRVKFSRSADAPAYQQGQNQLYNELNLGRREEYDVLDKRRGRDPEMGGKPRRKNPQEGLYNELQKDKMAEAYSEIGMKGERRRGKGHDGLYQGLSTATKDTYDALHMQALPPR

SEQ ID NO: 5903 - protein, 466 aa, Artificial Sequence
  Description of Artificial Sequence: Synthetic Chimeric Antigen Receptor sequence
MALPVTALLLPLALLLHAARPEVQLQQSGPELVKPGASVKMSCKASGYTFTSYVMHWVKQKPGQGLEWIGYINPYNDGTKYNEKFKGKATLTSDTSSSTAYMELNSLTSEDSAVYFSCCARPIYFDNDYFDYWGQGTTLKVSSGGGGSGGGGSGGGGSTIVLTQSPASLAVSLGQRATISCRASESVDSYGNSFMHWYQQKPGQPPKLLIYLASNLESGVPARFSGSGSRTDFTLTIDPVEADDAATYYCQQNNYDPWTFGGGTKLEIKGLAVSTISSFFPPGYQIISFFLALTSTALLFLLFFLTLRFSVVKRGRKKLLYIFKQPFMRPVQTTQEEDGCSCRFPEEEEGGCELRVKFSRSADAPAYQQGQNQLYNELNLGRREEYDVLDKRRGRDPEMGGKPRRKNPQEGLYNELQKDKMAEAYSEIGMKGERRRGKGHDGLYQGLSTATKDTYDALHMQALPPR

SEQ ID NO: 5904 - protein, 467 aa, Artificial Sequence
  Description of Artificial Sequence: Synthetic Chimeric Antigen Receptor sequence
MALPVTALLLPLALLLHAARPQVQLQQPGAELVKPGASVKLSCKASGYTFTRYWMHWVKQRPGQGLEWIGNIDPSDTETHYNQQFKDKATLTVDKSSSTAYMQLSSLTSEDSAVYYCAIYYGNPSYYAMDYWGQGTSVTVSSGGGGSGGGGSGGGGSDIVMTQSPSSLTVTAGEKVTMSCKSSQNLLNSGNQKKYLNWYQQKPGQPPKLLIYWASTRESGVPDRFTGSGSGTDFTLTISSVQAEDLAVYFCQNDYSYPFTFGAGTKLELKGLAVSTISSFFPPGYQIISFFLALTSTALLFLLFFLTLRFSVVKRGRKKLLYIFKQPFMRPVQTTQEEDGCSCRFPEEEEGGCELRVKFSRSADAPAYQQGQNQLYNELNLGRREEYDVLDKRRGRDPEMGGKPRRKNPQEGLYNELQKDKMAEAYSEIGMKGERRRGKGHDGLYQGLSTATKDTYDALHMQALPPR

SEQ ID NO: 5905 - protein, 483 aa, Artificial Sequence
  Description of Artificial Sequence: Synthetic Chimeric Antigen Receptor sequence
MALPVTALLLPLALLLHAARPQVNLRESGGGLVQPGGSLRLSCAASGFTFSSYEMNWVRQAPGKGLEWVSYISSSGSTIYYADSVKGRFTISRDNAKNSLYLQMNSLRAEDTAVYYCAREALGSSWEWGQGTTVTVSSGGGGSGGGGSGGGGSDIQMTQSPSSLSASVGDRVTITCQASQDISNYLNWYQQKPGKAPKLLIYDASNLETGVPSRFSGSGSGTDFTFTISSLQPEDIATYYCQQYDNLPLTFGGGTKLEIKTTTPAPRPPTPAPTIASQPLSLRPEACRPAAGGAVHTRGLDFACDIYIWAPLAGTCGVLLLSLVITLYCKRGRKKLLYIFKQPFMRPVQTTQEEDGCSCRFPEEEEGGCELRVKFSRSADAPAYKQGQNQLYNELNLGRREEYDVLDKRRGRDPEMGGKPRRKNPQEGLYNELQKDKMAEAYSEIGMKGERRRGKGHDGLYQGLSTATKDTYDALHMQALPPR

SEQ ID NO: 5906 - protein, 483 aa, Artificial Sequence
  Description of Artificial Sequence: Synthetic Chimeric Antigen Receptor sequence
MALPVTALLLPLALLLHAARPQVQLVESGGGLVQPGGSLRLSCAASGFTFSSYWMSWVRQAPGKGLEWVANINEDGSAKFYVDSVKGRFTISRDNAKNSLYLQMNSLRAEDTAVYFCARDLRSGRYWGQGTLVTVSSGGGGSGGGGSGGGGSEIVLTQSPGTLSLSPGGRATLSCRASQSISGSFLAWYQQKPGQAPRLLIYGASSRATGIPDRFSGSGSGTDFTLTISRLEPEDFAVYYCQQYGSSPPTFGLGTKLEIKTTTPAPRPPTPAPTIASQPLSLRPEACRPAAGGAVHTRGLDFACDIYIWAPLAGTCGVLLLSLVITLYCKRGRKKLLYIFKQPFMRPVQTTQEEDGCSCRFPEEEEGGCELRVKFSRSADAPAYKQGQNQLYNELNLGRREEYDVLDKRRGRDPEMGGKPRRKNPQEGLYNELQKDKMAEAYSEIGMKGERRRGKGHDGLYQGLSTATKDTYDALHMQALPPR

SEQ ID NO: 5907 - protein, 484 aa, Artificial Sequence
  Description of Artificial Sequence: Synthetic Chimeric Antigen Receptor sequence
MALPVTALLLPLALLLHAARPQVQLQESGPGLVKPSETLSLTCVVSGGSISSSNWWSWVRQPPGKGLEWIGEIYHSGSPNYNPSLKSRVTISVDKSKNQFSLKLSSVTAADTAVYYCARQTTAGSFDYWGQGTLVTVSSGGGGSGGGGSGGGGSDIQMTQSPSSLSASVGDRVTITCRASQSISSYLNWYQQKPGKAPKLLIYAASSLQSGVPSRFSGSGSGTDFTLTISSLQPEDFATYYCQQSYSTPPTFGQGTKVEIKTTTPAPRPPTPAPTIASQPLSLRPEACRPAAGGAVHTRGLDFACDIYIWAPLAGTCGVLLLSLVITLYCKRGRKKLLYIFKQPFMRPVQTTQEEDGCSCRFPEEEEGGCELRVKFSRSADAPAYQQGQNQLYNELNLGRREEYDVLDKRRGRDPEMGGKPRRKNPQEGLYNELQKDKMAEAYSEIGMKGERRRGKGHDGLYQGLSTATKDTYDALHMQALPPR

SEQ ID NO: 5908 - protein, 484 aa, Artificial Sequence
  Description of Artificial Sequence: Synthetic Chimeric Antigen Receptor sequence
MALPVTALLLPLALLLHAARPQVQLQESGPGLVKPSETLSLTCVVSGGSISSSNWWSWVRQPPGKGLEWIGEIYHSGSPNYNPSLKSRVTISVDKSKNQFSLKLSSVTAADTAVYYCARSSSGGFFDYWGQGTLVTVSSGGGGSGGGGSGGGGSDIQMTQSPSSLSASVGDRVTITCRASQSISSYLNWYQQKPGKAPKLLIYAASSLQSGVPSRFSGSGSGTDFTLTISSLQPEDFATYYCQQSYSTPPTFGQGTKVEIKTTTPAPRPPTPAPTIASQPLSLRPEACRPAAGGAVHTRGLDFACDIYIWAPLAGTCGVLLLSLVITLYCKRGRKKLLYIFKQPFMRPVQTTQEEDGCSCRFPEEEEGGCELRVKFSRSADAPAYQQGQNQLYNELNLGRREEYDVLDKRRGRDPEMGGKPRRKNPQEGLYNELQKDKMAEAYSEIGMKGERRRGKGHDGLYQGLSTATKDTYDALHMQALPPR

SEQ ID NO: 5909 - protein, 485 aa, Artificial Sequence
  Description of Artificial Sequence: Synthetic Chimeric Antigen Receptor sequence
MALPVTALLLPLALLLHAARPQVQLQQPGAELVKPGTSVKLSCKASGYTFTRYWMHWVKQRPGQGLEWIGMIHPSSGSTSYNEKVKNKATLTVDRSSTTAYMQLSSLTSEDSAVYYCARDGDYYYGTGDYWGQGTTLTVSSGGGGSGGGGSGGGGSQIVLSQSPAILSASPGEKVTMTCRASSSINYMHWYQQKPGSSPKPWIFATSNLASGVPSRFSGSGSGTSYSLTISRVEAEDAATYYCQQWRSDRALTFGAGTKLELTTTPAPRPPTPAPTIASQPLSLRPEACRPAAGGAVHTRGLDFACDIYIWAPLAGTCGVLLLSLVITLYCKRGRKKLLYIFKQPFMRPVQTTQEEDGCSCRFPEEEEGGCELRVKFSRSADAPAYQQGQNQLYNELNLGRREEYDVLDKRRGRDPEMGGKPRRKNPQEGLYNELQKDKMAEAYSEIGMKGERRRGKGHDGLYQGLSTATKDTYDALHMQALPPR

SEQ ID NO: 5910 - protein, 486 aa, Artificial Sequence
  Description of Artificial Sequence: Synthetic Chimeric Antigen Receptor sequence
MALPVTALLLPLALLLHAARPEVQLQQSGAELVRPGASVKLSCTASGFNIKDDYIHWVKQRPEQGLEWIGWIDPEKGDTAYASKFQDKATITSDTSSNTAYLQLSSLTSEDTAVYYCTLTGRFDYWGQGTTLTVSSGGGGSGGGGSGGGGSDIVMSQSPSSLAVSVGEKVTMSCKSSQSLLYSSNQKNNLAWYQQKPGQSPKLLIYWASTRESGVPDRFTGSGSGTDFTLTISSVQAEDLAVYYCQQYYSYRTFGGGTKLEIKTTTPAPRPPTPAPTIASQPLSLRPEACRPAAGGAVHTRGLDFACDIYIWAPLAGTCGVLLLSLVITLYCKRGRKKLLYIFKQPFMRPVQTTQEEDGCSCRFPEEEEGGCELRVKFSRSADAPAYQQGQNQLYNELNLGRREEYDVLDKRRGRDPEMGGKPRRKNPQEGLYNELQKDKMAEAYSEIGMKGERRRGKGHDGLYQGLSTATKDTYDALHMQALPPR

SEQ ID NO: 5911 - protein, 486 aa, Artificial Sequence
  Description of Artificial Sequence: Synthetic Chimeric Antigen Receptor sequence
MALPVTALLLPLALLLHAARPEVQLQQSGPELVKPGASVKMSCKASGYIFTSYVMYWVKQKPGQGLEWIGYINPYNDGTKYNEKFKGKATLTSDKSSSTAYMELSSLTSEDSAVYYSCCARYYDYDYYFDYWGQGTTLTVSSGGGGSGGGGSGGGGSDIQMTQSPSSLSASLGGKVTITCKASQDINKYIAWYQHKPGKGPRLLIHYTSTLQPGIPSRFSGSGSGRDYSFSISNLEPEDIATYYCLQYDYLWTFGGGTKLEIKTTTPAPRPPTPAPTIASQPLSLRPEACRPAAGGAVHTRGLDFACDIYIWAPLAGTCGVLLLSLVITLYCKRGRKKLLYIFKQPFMRPVQTTQEEDGCSCRFPEEEEGGCELRVKFSRSADAPAYQQGQNQLYNELNLGRREEYDVLDKRRGRDPEMGGKPRRKNPQEGLYNELQKDKMAEAYSEIGMKGERRRGKGHDGLYQGLSTATKDTYDALHMQALPPR

SEQ ID NO: 5912 - protein, 487 aa, Artificial Sequence
  Description of Artificial Sequence: Synthetic Chimeric Antigen Receptor sequence
MALPVTALLLPLALLLHAARPEVQLQQSGPELVKPGASVKMSCKASGYTFTSYFIHWVKQKPGQGLEWIGFINPYNDGSKYNEKFKGKATLTSDKSSSTAYMELSSLTSEDSAVYYCTRDDGYYGYAMDYWGQGTSVTVSSGGGGSGGGGSGGGGSDIQMTQSPSSLSASLGERVSLTCRATQELSGYLSWLQQKPDGTIKRLIYAASTLDSGVPKRFSGNRSGSDYSLTISSLESEDFADYYCLQYAIYPYTFGGGTKLEIKRTTTPAPRPPTPAPTIASQPLSLRPEACRPAAGGAVHTRGLDFACDIYIWAPLAGTCGVLLLSLVITLYCKRGRKKLLYIFKQPFMRPVQTTQEEDGCSCRFPEEEEGGCELRVKFSRSADAPAYQQGQNQLYNELNLGRREEYDVLDKRRGRDPEMGGKPRRKNPQEGLYNELQKDKMAEAYSEIGMKGERRRGKGHDGLYQGLSTATKDTYDALHMQALPPR

SEQ ID NO: 5913 - protein, 487 aa, Artificial Sequence
  Description of Artificial Sequence: Synthetic Chimeric Antigen Receptor sequence
MALPVTALLLPLALLLHAARPEVQLRQSGPELVKPGASVKMSCKASGYTFTSYFMHWVKQKPGQGLEWIGFINPYNDGTKYNEKFKGKATLTSDKSSSTAYMELNSLTSEDSAVYYCTRDDGYYDYAMDYWGQGTSVTVSSGGGGSGGGGSGGGGSDIQMTQSPSSLSASLGERVSLTCRASQEISVYLSWLQQKPDGTIKRLIYAASTLDSGVPERFSGSRSGSDYSLTISSLESEDFADYYCLQYASYPYTFGGGTKLEIKRTTTPAPRPPTPAPTIASQPLSLRPEACRPAAGGAVHTRGLDFACDIYIWAPLAGTCGVLLLSLVITLYCKRGRKKLLYIFKQPFMRPVQTTQEEDGCSCRFPEEEEGGCELRVKFSRSADAPAYQQGQNQLYNELNLGRREEYDVLDKRRGRDPEMGGKPRRKNPQEGLYNELQKDKMAEAYSEIGMKGERRRGKGHDGLYQGLSTATKDTYDALHMQALPPR

SEQ ID NO: 5914 - protein, 487 aa, Artificial Sequence
  Description of Artificial Sequence: Synthetic Chimeric Antigen Receptor sequence
MALPVTALLLPLALLLHAARPQVQLQESGPGLVKPSETLSLTCVVSGGSISSSNWWSWVRQPPGKGLEWIGEIYHSGSPNYNPSLKSRVTISVDKSKNQFSLKLSSVTAADTAVYYCARQTTAGSFDYWGQGTLVTVSSGGGGSGGGGSGGGGSDIQMTQSPSSLSASVGDRVTITCRASQSISSYLNWYQQKPGKAPKLLIYAASSLQSGVPSRFSGSGSGTDFTLTISSLQPEDFATYYCQQSYSTPPTFGQGTKVEIKTTTPAPRPPTPAPTIASQPLSLRPEACRPAAGGAVHTRGLDFACDIISFFLALTSTALLFLLFFLTLRFSVVKRGRKKLLYIFKQPFMRPVQTTQEEDGCSCRFPEEEEGGCELRVKFSRSADAPAYQQGQNQLYNELNLGRREEYDVLDKRRGRDPEMGGKPRRKNPQEGLYNELQKDKMAEAYSEIGMKGERRRGKGHDGLYQGLSTATKDTYDALHMQALPPR

SEQ ID NO: 5915 - protein, 487 aa, Artificial Sequence
  Description of Artificial Sequence: Synthetic Chimeric Antigen Receptor sequence
MALPVTALLLPLALLLHAARPQVQLQESGPGLVKPSETLSLTCVVSGGSISSSNWWSWVRQPPGKGLEWIGEIYHSGSPNYNPSLKSRVTISVDKSKNQFSLKLSSVTAADTAVYYCARSSSGGFFDYWGQGTLVTVSSGGGGSGGGGSGGGGSDIQMTQSPSSLSASVGDRVTITCRASQSISSYLNWYQQKPGKAPKLLIYAASSLQSGVPSRFSGSGSGTDFTLTISSLQPEDFATYYCQQSYSTPPTFGQGTKVEIKTTTPAPRPPTPAPTIASQPLSLRPEACRPAAGGAVHTRGLDFACDIISFFLALTSTALLFLLFFLTLRFSVVKRGRKKLLYIFKQPFMRPVQTTQEEDGCSCRFPEEEEGGCELRVKFSRSADAPAYQQGQNQLYNELNLGRREEYDVLDKRRGRDPEMGGKPRRKNPQEGLYNELQKDKMAEAYSEIGMKGERRRGKGHDGLYQGLSTATKDTYDALHMQALPPR

SEQ ID NO: 5916 - protein, 488 aa, Artificial Sequence
  Description of Artificial Sequence: Synthetic Chimeric Antigen Receptor sequence
MALPVTALLLPLALLLHAARPEVQLQQSGPELVKPGASMKISCKASGYSFTGYTMNWVKQSHEKNLEWIGPINPYNDGTIYNPNFKGKATLTVDKASSTAYMELLSLTSDDPAVYYSCCARTDDYDDYTMDYWGQGTSVTVSSGGGGSGGGGSGGGGSEIQMTQTPSSLSASLGDRVTISCRASHDISNYLNWYQQKPDGTLKLLIYYTSRLHSGVPSRFSGSGSGTDYSLTISNLEQEDIATYFCQQGKTLLWTFGGGTKLEIKTTTPAPRPPTPAPTIASQPLSLRPEACRPAAGGAVHTRGLDFACDIYIWAPLAGTCGVLLLSLVITLYCKRGRKKLLYIFKQPFMRPVQTTQEEDGCSCRFPEEEEGGCELRVKFSRSADAPAYQQGQNQLYNELNLGRREEYDVLDKRRGRDPEMGGKPRRKNPQEGLYNELQKDKMAEAYSEIGMKGERRRGKGHDGLYQGLSTATKDTYDALHMQALPPR

SEQ ID NO: 5917 - protein, 488 aa, Artificial Sequence
  Description of Artificial Sequence: Synthetic Chimeric Antigen Receptor sequence
MALPVTALLLPLALLLHAARPQVQLQQPGAELVKPGTSVKLSCKASGYTFTRYWMHWVKQRPGQGLEWIGMIHPSSGSTSYNEKVKNKATLTVDRSSTTAYMQLSSLTSEDSAVYYCARDGDYYYGTGDYWGQGTTLTVSSGGGGSGGGGSGGGGSQIVLSQSPAILSASPGEKVTMTCRASSSINYMHWYQQKPGSSPKPWIFATSNLASGVPSRFSGSGSGTSYSLTISRVEAEDAATYYCQQWRSDRALTFGAGTKLELTTTPAPRPPTPAPTIASQPLSLRPEACRPAAGGAVHTRGLDFACDIISFFLALTSTALLFLLFFLTLRFSVVKRGRKKLLYIFKQPFMRPVQTTQEEDGCSCRFPEEEEGGCELRVKFSRSADAPAYQQGQNQLYNELNLGRREEYDVLDKRRGRDPEMGGKPRRKNPQEGLYNELQKDKMAEAYSEIGMKGERRRGKGHDGLYQGLSTATKDTYDALHMQALPPR

SEQ ID NO: 5918 - protein, 489 aa, Artificial Sequence
  Description of Artificial Sequence: Synthetic Chimeric Antigen Receptor sequence
MALPVTALLLPLALLLHAARPDIQLQESGPGLVKPSQSLSLTCSVTGYSITSAYYWNWIRQFPGNKLEWMGYISYDGRNNYNPSLKNRISITRDTSKNQFFLKLNSVTTEDTATYYCAKEGDYDVGNYYAMDYWGQGTSVTVSSGGGGSGGGGSGGGGSENVLTQSPAIMSASPGEKVTMTCRASSNVISSYVHWYQQRSGASPKLWIYSTSNLASGVPARFSGSGSGTSYSLTISSVEAEDAATYYCQQYSGYPLTFGAGTKLELTTTPAPRPPTPAPTIASQPLSLRPEACRPAAGGAVHTRGLDFACDIYIWAPLAGTCGVLLLSLVITLYCKRGRKKLLYIFKQPFMRPVQTTQEEDGCSCRFPEEEEGGCELRVKFSRSADAPAYQQGQNQLYNELNLGRREEYDVLDKRRGRDPEMGGKPRRKNPQEGLYNELQKDKMAEAYSEIGMKGERRRGKGHDGLYQGLSTATKDTYDALHMQALPPR

SEQ ID NO: 5919 - protein, 489 aa, Artificial Sequence
  Description of Artificial Sequence: Synthetic Chimeric Antigen Receptor sequence
MALPVTALLLPLALLLHAARPEVQLQQSGAELVRPGASVKLSCTASGFNIKDDYIHWVKQRPEQGLEWIGWIDPEKGDTAYASKFQDKATITSDTSSNTAYLQLSSLTSEDTAVYYCTLTGRFDYWGQGTTLTVSSGGGGSGGGGSGGGGSDIVMSQSPSSLAVSVGEKVTMSCKSSQSLLYSSNQKNNLAWYQQKPGQSPKLLIYWASTRESGVPDRFTGSGSGTDFTLTISSVQAEDLAVYYCQQYYSYRTFGGGTKLEIKTTTPAPRPPTPAPTIASQPLSLRPEACRPAAGGAVHTRGLDFACDIISFFLALTSTALLFLLFFLTLRFSVVKRGRKKLLYIFKQPFMRPVQTTQEEDGCSCRFPEEEEGGCELRVKFSRSADAPAYQQGQNQLYNELNLGRREEYDVLDKRRGRDPEMGGKPRRKNPQEGLYNELQKDKMAEAYSEIGMKGERRRGKGHDGLYQGLSTATKDTYDALHMQALPPR

SEQ ID NO: 5920 - protein, 489 aa, Artificial Sequence
  Description of Artificial Sequence: Synthetic Chimeric Antigen Receptor sequence
MALPVTALLLPLALLLHAARPEVQLQQSGPELVKPGASVKMSCKASGYIFTSYVMYWVKQKPGQGLEWIGYINPYNDGTKYNEKFKGKATLTSDKSSSTAYMELSSLTSEDSAVYYSCCARYYDYDYYFDYWGQGTTLTVSSGGGGSGGGGSGGGGSDIQMTQSPSSLSASLGGKVTITCKASQDINKYIAWYQHKPGKGPRLLIHYTSTLQPGIPSRFSGSGSGRDYSFSISNLEPEDIATYYCLQYDYLWTFGGGTKLEIKTTTPAPRPPTPAPTIASQPLSLRPEACRPAAGGAVHTRGLDFACDIISFFLALTSTALLFLLFFLTLRFSVVKRGRKKLLYIFKQPFMRPVQTTQEEDGCSCRFPEEEEGGCELRVKFSRSADAPAYQQGQNQLYNELNLGRREEYDVLDKRRGRDPEMGGKPRRKNPQEGLYNELQKDKMAEAYSEIGMKGERRRGKGHDGLYQGLSTATKDTYDALHMQALPPR

SEQ ID NO: 5921 - protein, 489 aa, Artificial Sequence
  Description of Artificial Sequence: Synthetic Chimeric Antigen Receptor sequence
MALPVTALLLPLALLLHAARPEVQLQQSGPGLVRPSETLSLTCTVSGGPVRSGSHYWNWIRQPPGRGLEWIGYIYYSGSTNYNPSLENRVTISIDTSNNHFSLKLSSVTAADTALYFCARGTATFDWNFPFDSWGQGTLVTVSSGGGGSGGGGSGSGGSDIQMTQSPSSLSASIGDRVTITCRASQSISSYLNWYQQKPGKAPKLLIYAASSLQSGVPSRFSGSGSGTDFTLTISSLQPEDFATYYCQQSYSTPWTFGQGTKLEIKTTTPAPRPPTPAPTIASQPLSLRPEACRPAAGGAVHTRGLDFACDIYIWAPLAGTCGVLLLSLVITLYCKRGRKKLLYIFKQPFMRPVQTTQEEDGCSCRFPEEEEGGCELRVKFSRSADAPAYKQGQNQLYNELNLGRREEYDVLDKRRGRDPEMGGKPRRKNPQEGLYNELQKDKMAEAYSEIGMKGERRRGKGHDGLYQGLSTATKDTYDALHMQALPPR

SEQ ID NO: 5922 - protein, 489 aa, Artificial Sequence
  Description of Artificial Sequence: Synthetic Chimeric Antigen Receptor sequence
MALPVTALLLPLALLLHAARPEVQLVESGGGLVQPGGSLRLSCAASGFTFSSYEMNWVRQAPGKGLEWVSYISSSGSTIYYADSVKGRFTISRDNAKNSLYLQMNSLRAEDTAVYYCARDPYSSSWHDAFDIWGQGTMVTVSSGGGGSGGGGSGGGGSEIVLTQSPGTLSLSPGERATLSCRASQSVSSSYLAWYQQKPGQAPRLLIYGASSRATGIPDRFSGSGSGTDFTLTISRLEPEDFAVYYCQQYGSSPLTFGGGTKVDIKTTTPAPRPPTPAPTIASQPLSLRPEACRPAAGGAVHTRGLDFACDIYIWAPLAGTCGVLLLSLVITLYCKRGRKKLLYIFKQPFMRPVQTTQEEDGCSCRFPEEEEGGCELRVKFSRSADAPAYKQGQNQLYNELNLGRREEYDVLDKRRGRDPEMGGKPRRKNPQEGLYNELQKDKMAEAYSEIGMKGERRRGKGHDGLYQGLSTATKDTYDALHMQALPPR

SEQ ID NO: 5923 - protein, 489 aa, Artificial Sequence
  Description of Artificial Sequence: Synthetic Chimeric Antigen Receptor sequence
MALPVTALLLPLALLLHAARPEVQLVESGGGVVQPGGSLRLSCAASGFTFDDYAMHWVRQAPGKGLEWVSLISGDGGSTYYADSVKGRFTISRDNSKNTLYLQMNSLRVEDTAVYYCARVFDSYYMDVWGKGTTVTVSSGGGGSGGGGSGSGGSEIVLTQSPLSLPVTPGQPASISCRSSQSLVYTDGNTYLNWFQQRPGQSPRRLIYKVSNRDSGVPDRFSGSGSDTDFTLKISRVEAEDVGIYYCMQGTHWSFTFGQGTRLEIKTTTPAPRPPTPAPTIASQPLSLRPEACRPAAGGAVHTRGLDFACDIYIWAPLAGTCGVLLLSLVITLYCKRGRKKLLYIFKQPFMRPVQTTQEEDGCSCRFPEEEEGGCELRVKFSRSADAPAYKQGQNQLYNELNLGRREEYDVLDKRRGRDPEMGGKPRRKNPQEGLYNELQKDKMAEAYSEIGMKGERRRGKGHDGLYQGLSTATKDTYDALHMQALPPR

SEQ ID NO: 5924 - protein, 490 aa, Artificial Sequence
  Description of Artificial Sequence: Synthetic Chimeric Antigen Receptor sequence
MALPVTALLLPLALLLHAARPEVQLQQSGPELVKPGASVKMSCKASGYTFTSYFIHWVKQKPGQGLEWIGFINPYNDGSKYNEKFKGKATLTSDKSSSTAYMELSSLTSEDSAVYYCTRDDGYYGYAMDYWGQGTSVTVSSGGGGSGGGGSGGGGSDIQMTQSPSSLSASLGERVSLTCRATQELSGYLSWLQQKPDGTIKRLIYAASTLDSGVPKRFSGNRSGSDYSLTISSLESEDFADYYCLQYAIYPYTFGGGTKLEIKRTTTPAPRPPTPAPTIASQPLSLRPEACRPAAGGAVHTRGLDFACDIISFFLALTSTALLFLLFFLTLRFSVVKRGRKKLLYIFKQPFMRPVQTTQEEDGCSCRFPEEEEGGCELRVKFSRSADAPAYQQGQNQLYNELNLGRREEYDVLDKRRGRDPEMGGKPRRKNPQEGLYNELQKDKMAEAYSEIGMKGERRRGKGHDGLYQGLSTATKDTYDALHMQALPPR

SEQ ID NO: 5925 - protein, 490 aa, Artificial Sequence
  Description of Artificial Sequence: Synthetic Chimeric Antigen Receptor sequence
MALPVTALLLPLALLLHAARPEVQLRQSGPELVKPGASVKMSCKASGYTFTSYFMHWVKQKPGQGLEWIGFINPYNDGTKYNEKFKGKATLTSDKSSSTAYMELNSLTSEDSAVYYCTRDDGYYDYAMDYWGQGTSVTVSSGGGGSGGGGSGGGGSDIQMTQSPSSLSASLGERVSLTCRASQEISVYLSWLQQKPDGTIKRLIYAASTLDSGVPERFSGSRSGSDYSLTISSLESEDFADYYCLQYASYPYTFGGGTKLEIKRTTTPAPRPPTPAPTIASQPLSLRPEACRPAAGGAVHTRGLDFACDIISFFLALTSTALLFLLFFLTLRFSVVKRGRKKLLYIFKQPFMRPVQTTQEEDGCSCRFPEEEEGGCELRVKFSRSADAPAYQQGQNQLYNELNLGRREEYDVLDKRRGRDPEMGGKPRRKNPQEGLYNELQKDKMAEAYSEIGMKGERRRGKGHDGLYQGLSTATKDTYDALHMQALPPR

SEQ ID NO: 5926 - protein, 490 aa, Artificial Sequence
  Description of Artificial Sequence: Synthetic Chimeric Antigen Receptor sequence
MALPVTALLLPLALLLHAARPEVQLVQSGGGVVRSGRSLRLSCAASGFTFNSYGLHWVRQAPGKGLEWVALIEYDGSNKYYGDSVKGRFTISRDKSKSTLYLQMDNLRAEDTAVYYCAREGNEDLAFDIWGQGTLVTVSSGGGGSGGGGSGGGGSGGGGSEIVLTQSPSSLSASVGDRVTITCQASQFIKKNLNWYQHKPGKAPKLLIYDASSLQTGVPSRFSGNRSGTTFSFTISSLQPEDVATYYCQQHDNLPLTFGGGTKVEIKTTTPAPRPPTPAPTIASQPLSLRPEACRPAAGGAVHTRGLDFACDIYIWAPLAGTCGVLLLSLVITLYCKRGRKKLLYIFKQPFMRPVQTTQEEDGCSCRFPEEEEGGCELRVKFSRSADAPAYKQGQNQLYNELNLGRREEYDVLDKRRGRDPEMGGKPRRKNPQEGLYNELQKDKMAEAYSEIGMKGERRRGKGHDGLYQGLSTATKDTYDALHMQALPPR

SEQ ID NO: 5927 - protein, 490 aa, Artificial Sequence
  Description of Artificial Sequence: Synthetic Chimeric Antigen Receptor sequence
MALPVTALLLPLALLLHAARPQVQLQQPGAELVKPGASMKMSCKASGYTFPSSNIHWLKQTPGQGLEWIGVIYPGNGDTSYNQKFKDKATLTTDKSSSTAYMQLSSLTSEDSAIYFSCCARVYNWHFDVWGAGTTVTVSSGGGGSGGGGSGGGGSNIVLTQSPASLAVSLGQRATISCRASESVDGYGDIFMLWYQQKPGQPPKLLIYFASNLESGVPARFSGSGSRTDFTLTIDPVEADDAATYYCQQNNEDPYTFGGGTKLEIKRTTTPAPRPPTPAPTIASQPLSLRPEACRPAAGGAVHTRGLDFACDIYIWAPLAGTCGVLLLSLVITLYCKRGRKKLLYIFKQPFMRPVQTTQEEDGCSCRFPEEEEGGCELRVKFSRSADAPAYQQGQNQLYNELNLGRREEYDVLDKRRGRDPEMGGKPRRKNPQEGLYNELQKDKMAEAYSEIGMKGERRRGKGHDGLYQGLSTATKDTYDALHMQALPPR

SEQ ID NO: 5928 - protein, 490 aa, Artificial Sequence
  Description of Artificial Sequence: Synthetic Chimeric Antigen Receptor sequence
MALPVTALLLPLALLLHAARPQVQLVQSGAEVKEPGASVKVSCKAPANTFSDHVMHWVRQAPGQRFEWMGYIHAANGGTHYSQKFQDRVTITRDTSANTVYMDLSSLRSEDTAVYYCARGGYNSDAFDIWGQGTMVTVSSGGGGSGGGGSGGGGSGGGGSDIVMTQSPSSVSASVGDRVTITCRASQDISSWLAWYQQKPGKAPKLLIYAASSLQSGVPSRFNGSGSGTDFTLTISSLQPEDFATYYCQQSYSTPLTFGGGTKVEIKTTTPAPRPPTPAPTIASQPLSLRPEACRPAAGGAVHTRGLDFACDIYIWAPLAGTCGVLLLSLVITLYCKRGRKKLLYIFKQPFMRPVQTTQEEDGCSCRFPEEEEGGCELRVKFSRSADAPAYKQGQNQLYNELNLGRREEYDVLDKRRGRDPEMGGKPRRKNPQEGLYNELQKDKMAEAYSEIGMKGERRRGKGHDGLYQGLSTATKDTYDALHMQALPPR

SEQ ID NO: 5929 - protein, 491 aa, Artificial Sequence
  Description of Artificial Sequence: Synthetic Chimeric Antigen Receptor sequence
MALPVTALLLPLALLLHAARPEVQLQQSGAEVKKPGSSVKVSCKASGGTFSSYAISWVRQAPGQGLEWMGGIIPIFGTANYAQKFQGRVTITADESTSTAYMELSSLRSEDTAVYYCARDLEMATIMGGYWGQGTLVTVSSGGGGSGGGGSGGGGSQSALTQPASVSGSPGQSITISCTGTSSDVGGYNYVSWYQQHPGKAPKLMIYDVSNRPSGVSNRFSGSKSGNTASLTISGLQAEDEADYYCSSYTSSSTLDVVFGGGTKLTVLTTTPAPRPPTPAPTIASQPLSLRPEACRPAAGGAVHTRGLDFACDIYIWAPLAGTCGVLLLSLVITLYCKRGRKKLLYIFKQPFMRPVQTTQEEDGCSCRFPEEEEGGCELRVKFSRSADAPAYKQGQNQLYNELNLGRREEYDVLDKRRGRDPEMGGKPRRKNPQEGLYNELQKDKMAEAYSEIGMKGERRRGKGHDGLYQGLSTATKDTYDALHMQALPPR

SEQ ID NO: 5930 - protein, 491 aa, Artificial Sequence
  Description of Artificial Sequence: Synthetic Chimeric Antigen Receptor sequence
MALPVTALLLPLALLLHAARPEVQLQQSGPELVKPGASMKISCKASGYSFTGYTMNWVKQSHEKNLEWIGPINPYNDGTIYNPNFKGKATLTVDKASSTAYMELLSLTSDDPAVYYSCCARTDDYDDYTMDYWGQGTSVTVSSGGGGSGGGGSGGGGSEIQMTQTPSSLSASLGDRVTISCRASHDISNYLNWYQQKPDGTLKLLIYYTSRLHSGVPSRFSGSGSGTDYSLTISNLEQEDIATYFCQQGKTLLWTFGGGTKLEIKTTTPAPRPPTPAPTIASQPLSLRPEACRPAAGGAVHTRGLDFACDIISFFLALTSTALLFLLFFLTLRFSVVKRGRKKLLYIFKQPFMRPVQTTQEEDGCSCRFPEEEEGGCELRVKFSRSADAPAYQQGQNQLYNELNLGRREEYDVLDKRRGRDPEMGGKPRRKNPQEGLYNELQKDKMAEAYSEIGMKGERRRGKGHDGLYQGLSTATKDTYDALHMQALPPR

SEQ ID NO: 5931 - protein, 491 aa, Artificial Sequence
  Description of Artificial Sequence: Synthetic Chimeric Antigen Receptor sequence
MALPVTALLLPLALLLHAARPQVQLQESGPGLVKPSETLSLTCTVSGGSISSSSYYWGWIRQPPGKGLEWIGSIYYSGSTYYNPSLKSRVSISVDTSKNQFSLKLKYVTAADTAVYYCATPGTYYDFLSGYYPFYWGQGTLVTVSSGGGGSGGGGSGGGGSDIVMTQSPSSLSASVGDRVTITCRASQGISSYLAWYQQKPGKAPKLLIYAASTLQSGVPSRFSGSGSGTDFTLTISSLQPEDFATYYCQQLNSYPYTFGQGTKLEIKTTTPAPRPPTPAPTIASQPLSLRPEACRPAAGGAVHTRGLDFACDIYIWAPLAGTCGVLLLSLVITLYCKRGRKKLLYIFKQPFMRPVQTTQEEDGCSCRFPEEEEGGCELRVKFSRSADAPAYKQGQNQLYNELNLGRREEYDVLDKRRGRDPEMGGKPRRKNPQEGLYNELQKDKMAEAYSEIGMKGERRRGKGHDGLYQGLSTATKDTYDALHMQALPPR

SEQ ID NO: 5932 - protein, 491 aa, Artificial Sequence
  Description of Artificial Sequence: Synthetic Chimeric Antigen Receptor sequence
MALPVTALLLPLALLLHAARPQVQLVQSGAEVKKSGASVKVSCKASGYPFTGYYIQWVRQAPGQGLEWMGWIDPNSGNTGYAQKFQGRVTMTRNTSISTAYMELSSLRSEDTAVYYCASDSYGYYYGMDVWGQGTLVTVSSGGGGSGGGGSGGGGSGGGGSDIQMTQSPSSLSASVGDRVTFTCRASQGISSALAWYQQKPGKPPKLLIYDASSLESGVPSRFSGSGSGTDFTLTISSLQPEDFATYYCQQFNNYPLTFGGGTKVEIKTTTPAPRPPTPAPTIASQPLSLRPEACRPAAGGAVHTRGLDFACDIYIWAPLAGTCGVLLLSLVITLYCKRGRKKLLYIFKQPFMRPVQTTQEEDGCSCRFPEEEEGGCELRVKFSRSADAPAYKQGQNQLYNELNLGRREEYDVLDKRRGRDPEMGGKPRRKNPQEGLYNELQKDKMAEAYSEIGMKGERRRGKGHDGLYQGLSTATKDTYDALHMQALPPR

SEQ ID NO: 5933 - protein, 492 aa, Artificial Sequence
  Description of Artificial Sequence: Synthetic Chimeric Antigen Receptor sequence
MALPVTALLLPLALLLHAARPDIQLQESGPGLVKPSQSLSLTCSVTGYSITSAYYWNWIRQFPGNKLEWMGYISYDGRNNYNPSLKNRISITRDTSKNQFFLKLNSVTTEDTATYYCAKEGDYDVGNYYAMDYWGQGTSVTVSSGGGGSGGGGSGGGGSENVLTQSPAIMSASPGEKVTMTCRASSNVISSYVHWYQQRSGASPKLWIYSTSNLASGVPARFSGSGSGTSYSLTISSVEAEDAATYYCQQYSGYPLTFGAGTKLELTTTPAPRPPTPAPTIASQPLSLRPEACRPAAGGAVHTRGLDFACDIISFFLALTSTALLFLLFFLTLRFSVVKRGRKKLLYIFKQPFMRPVQTTQEEDGCSCRFPEEEEGGCELRVKFSRSADAPAYQQGQNQLYNELNLGRREEYDVLDKRRGRDPEMGGKPRRKNPQEGLYNELQKDKMAEAYSEIGMKGERRRGKGHDGLYQGLSTATKDTYDALHMQALPPR

SEQ ID NO: 5934 - protein, 492 aa, Artificial Sequence
  Description of Artificial Sequence: Synthetic Chimeric Antigen Receptor sequence
MALPVTALLLPLALLLHAARPEVQLQQSGPELVKPGASVKMSCKASGYTFTSYVMHWVKQKPGQGLEWIGYINPYNDGTKYNEKFKGKATLTSDTSSSTAYMELNSLTSEDSAVYFSCCARPIYFDNDYFDYWGQGTTLKVSSGGGGSGGGGSGGGGSTIVLTQSPASLAVSLGQRATISCRASESVDSYGNSFMHWYQQKPGQPPKLLIYLASNLESGVPARFSGSGSRTDFTLTIDPVEADDAATYYCQQNNYDPWTFGGGTKLEIKTTTPAPRPPTPAPTIASQPLSLRPEACRPAAGGAVHTRGLDFACDIYIWAPLAGTCGVLLLSLVITLYCKRGRKKLLYIFKQPFMRPVQTTQEEDGCSCRFPEEEEGGCELRVKFSRSADAPAYQQGQNQLYNELNLGRREEYDVLDKRRGRDPEMGGKPRRKNPQEGLYNELQKDKMAEAYSEIGMKGERRRGKGHDGLYQGLSTATKDTYDALHMQALPPR

SEQ ID NO: 5935 - protein, 492 aa, Artificial Sequence
  Description of Artificial Sequence: Synthetic Chimeric Antigen Receptor sequence
MALPVTALLLPLALLLHAARPQVQLVQSGGGLVQPGGSLRLSCAASGFTFSSYSMNWVRQAPGKGLEWVSYISSSSSTIYYADSVKGRFTISRDNAKNSLYLQMNSLRAEDTAVYYCARDLSVRAIDAFDIWGQGTMVTVSSGGGGSGGGGSGGGGSGGGGSDIVLTQSPSSLSASVGDRVTITCQASQDISNYLNWYQQKPGKAPKLLIYDASNLETGVPSRFSGSGSGTDFTFTISSLQPEDFATYYCQQAYSTPFTFGPGTKVEIKTTTPAPRPPTPAPTIASQPLSLRPEACRPAAGGAVHTRGLDFACDIYIWAPLAGTCGVLLLSLVITLYCKRGRKKLLYIFKQPFMRPVQTTQEEDGCSCRFPEEEEGGCELRVKFSRSADAPAYKQGQNQLYNELNLGRREEYDVLDKRRGRDPEMGGKPRRKNPQEGLYNELQKDKMAEAYSEIGMKGERRRGKGHDGLYQGLSTATKDTYDALHMQALPPR

SEQ ID NO: 5936 - protein, 493 aa, Artificial Sequence
  Description of Artificial Sequence: Synthetic Chimeric Antigen Receptor sequence
MALPVTALLLPLALLLHAARPQVQLQESGAGLLKPSETLSLTCAVYGGSFSGYYWSWIRQPPGKGLEWVGEINHSGSTNYNPSLKSRVTISVDTSKNQFSLKLSSVTAADTAVYYCARGSGLVVYAIRVGSGWFDYWGQGTLVTVSSGGGGSGGGDSGGGGSDIQMTQSPSSLSASVGDRVTITCRASQSISSYLNWYQQKPGKAPKLLMYAASSLQSGVPSRFSGSGSGTDFTLTISSLQPEDFATYYCQQSYSTPPWTFGQGTKVDIKTTTPAPRPPTPAPTIASQPLSLRPEACRPAAGGAVHTRGLDFACDIYIWAPLAGTCGVLLLSLVITLYCKRGRKKLLYIFKQPFMRPVQTTQEEDGCSCRFPEEEEGGCELRVKFSRSADAPAYKQGQNQLYNELNLGRREEYDVLDKRRGRDPEMGGKPRRKNPQEGLYNELQKDKMAEAYSEIGMKGERRRGKGHDGLYQGLSTATKDTYDALHMQALPPR

SEQ ID NO: 5937 - protein, 493 aa, Artificial Sequence
  Description of Artificial Sequence: Synthetic Chimeric Antigen Receptor sequence
MALPVTALLLPLALLLHAARPQVQLQQPGAELVKPGASMKMSCKASGYTFPSSNIHWLKQTPGQGLEWIGVIYPGNGDTSYNQKFKDKATLTTDKSSSTAYMQLSSLTSEDSAIYFSCCARVYNWHFDVWGAGTTVTVSSGGGGSGGGGSGGGGSNIVLTQSPASLAVSLGQRATISCRASESVDGYGDIFMLWYQQKPGQPPKLLIYFASNLESGVPARFSGSGSRTDFTLTIDPVEADDAATYYCQQNNEDPYTFGGGTKLEIKRTTTPAPRPPTPAPTIASQPLSLRPEACRPAAGGAVHTRGLDFACDIISFFLALTSTALLFLLFFLTLRFSVVKRGRKKLLYIFKQPFMRPVQTTQEEDGCSCRFPEEEEGGCELRVKFSRSADAPAYQQGQNQLYNELNLGRREEYDVLDKRRGRDPEMGGKPRRKNPQEGLYNELQKDKMAEAYSEIGMKGERRRGKGHDGLYQGLSTATKDTYDALHMQALPPR

SEQ ID NO: 5938 - protein, 493 aa, Artificial Sequence
  Description of Artificial Sequence: Synthetic Chimeric Antigen Receptor sequence
MALPVTALLLPLALLLHAARPQVQLQQPGAELVKPGASVKLSCKASGYTFTRYWMHWVKQRPGQGLEWIGNIDPSDTETHYNQQFKDKATLTVDKSSSTAYMQLSSLTSEDSAVYYCAIYYGNPSYYAMDYWGQGTSVTVSSGGGGSGGGGSGGGGSDIVMTQSPSSLTVTAGEKVTMSCKSSQNLLNSGNQKKYLNWYQQKPGQPPKLLIYWASTRESGVPDRFTGSGSGTDFTLTISSVQAEDLAVYFCQNDYSYPFTFGAGTKLELKTTTPAPRPPTPAPTIASQPLSLRPEACRPAAGGAVHTRGLDFACDIYIWAPLAGTCGVLLLSLVITLYCKRGRKKLLYIFKQPFMRPVQTTQEEDGCSCRFPEEEEGGCELRVKFSRSADAPAYQQGQNQLYNELNLGRREEYDVLDKRRGRDPEMGGKPRRKNPQEGLYNELQKDKMAEAYSEIGMKGERRRGKGHDGLYQGLSTATKDTYDALHMQALPPR

SEQ ID NO: 5939 - protein, 495 aa, Artificial Sequence
  Description of Artificial Sequence: Synthetic Chimeric Antigen Receptor sequence
MALPVTALLLPLALLLHAARPEVQLQQSGPELVKPGASVKMSCKASGYTFTSYVMHWVKQKPGQGLEWIGYINPYNDGTKYNEKFKGKATLTSDTSSSTAYMELNSLTSEDSAVYFSCCARPIYFDNDYFDYWGQGTTLKVSSGGGGSGGGGSGGGGSTIVLTQSPASLAVSLGQRATISCRASESVDSYGNSFMHWYQQKPGQPPKLLIYLASNLESGVPARFSGSGSRTDFTLTIDPVEADDAATYYCQQNNYDPWTFGGGTKLEIKTTTPAPRPPTPAPTIASQPLSLRPEACRPAAGGAVHTRGLDFACDIISFFLALTSTALLFLLFFLTLRFSVVKRGRKKLLYIFKQPFMRPVQTTQEEDGCSCRFPEEEEGGCELRVKFSRSADAPAYQQGQNQLYNELNLGRREEYDVLDKRRGRDPEMGGKPRRKNPQEGLYNELQKDKMAEAYSEIGMKGERRRGKGHDGLYQGLSTATKDTYDALHMQALPPR

SEQ ID NO: 5940 - protein, 496 aa, Artificial Sequence
  Description of Artificial Sequence: Synthetic Chimeric Antigen Receptor sequence
MALPVTALLLPLALLLHAARPQVQLQQPGAELVKPGASVKLSCKASGYTFTRYWMHWVKQRPGQGLEWIGNIDPSDTETHYNQQFKDKATLTVDKSSSTAYMQLSSLTSEDSAVYYCAIYYGNPSYYAMDYWGQGTSVTVSSGGGGSGGGGSGGGGSDIVMTQSPSSLTVTAGEKVTMSCKSSQNLLNSGNQKKYLNWYQQKPGQPPKLLIYWASTRESGVPDRFTGSGSGTDFTLTISSVQAEDLAVYFCQNDYSYPFTFGAGTKLELKTTTPAPRPPTPAPTIASQPLSLRPEACRPAAGGAVHTRGLDFACDIISFFLALTSTALLFLLFFLTLRFSVVKRGRKKLLYIFKQPFMRPVQTTQEEDGCSCRFPEEEEGGCELRVKFSRSADAPAYQQGQNQLYNELNLGRREEYDVLDKRRGRDPEMGGKPRRKNPQEGLYNELQKDKMAEAYSEIGMKGERRRGKGHDGLYQGLSTATKDTYDALHMQALPPR

SEQ ID NO: 5941 - protein, 499 aa, Artificial Sequence
  Description of Artificial Sequence: Synthetic Chimeric Antigen Receptor sequence
MALPVTALLLPLALLLHAARPEVQLVESGGGLVKPGGSLRLSCAASGFTFSSYSMNWVRQAPGKGLEWVSSISSSSSYIYYADSVKGRFTISRDNAKNSLYLQMNSLRAEDTAVYYCARDPSSSGSYYMEDSYYYGMDVWGQGTTVTVSSGGGGSGGGGSGGGGSNFMLTQPHSVSESPGKTVTISCTGSSGSIASNYVQWYQQRPGSAPTTVIYEDNQRPSGVPDRFSGSIDSSSNSASLTISGLKTEDEADYYCQSYDSSNQVVFGGGTKLTVLTTTPAPRPPTPAPTIASQPLSLRPEACRPAAGGAVHTRGLDFACDIYIWAPLAGTCGVLLLSLVITLYCKRGRKKLLYIFKQPFMRPVQTTQEEDGCSCRFPEEEEGGCELRVKFSRSADAPAYKQGQNQLYNELNLGRREEYDVLDKRRGRDPEMGGKPRRKNPQEGLYNELQKDKMAEAYSEIGMKGERRRGKGHDGLYQGLSTATKDTYDALHMQALPPR

SEQ ID NO: 5942 - protein, 499 aa, Artificial Sequence
  Description of Artificial Sequence: Synthetic Chimeric Antigen Receptor sequence
MALPVTALLLPLALLLHAARPQVQLVESGGGLVQPGGSLRLSCAASGFNVSSNYMTWVRQAPGKGLEWVSVIYSGGATYYGDSVKGRFTVSRDNSKNTVYLQMNRLTAEDTAVYYCARDRLYCGNNCYLYYYYGMDVWGQGTLVTVSSGGGGSGGGGSGGGGSGGGGSDIQVTQSPSSLSASVGDRVTITCRASQSISSYLNWYQQKPGKAPKLLIYAASSLQSGVPSRFSGSGSGTDFTLTISSLQPEDFATYYCQQSYSTPPLTFGQGTKVEIKTTTPAPRPPTPAPTIASQPLSLRPEACRPAAGGAVHTRGLDFACDIYIWAPLAGTCGVLLLSLVITLYCKRGRKKLLYIFKQPFMRPVQTTQEEDGCSCRFPEEEEGGCELRVKFSRSADAPAYKQGQNQLYNELNLGRREEYDVLDKRRGRDPEMGGKPRRKNPQEGLYNELQKDKMAEAYSEIGMKGERRRGKGHDGLYQGLSTATKDTYDALHMQALPPR

SEQ ID NO: 5943 - protein, 670 aa, Artificial Sequence
  Description of Artificial Sequence: Synthetic Chimeric Antigen Receptor sequence
MALPVTALLLPLALLLHAARPQVQLQESGPGLVKPSETLSLTCVVSGGSISSSNWWSWVRQPPGKGLEWIGEIYHSGSPNYNPSLKSRVTISVDKSKNQFSLKLSSVTAADTAVYYCARQTTAGSFDYWGQGTLVTVSSGGGGSGGGGSGGGGSDIQMTQSPSSLSASVGDRVTITCRASQSISSYLNWYQQKPGKAPKLLIYAASSLQSGVPSRFSGSGSGTDFTLTISSLQPEDFATYYCQQSYSTPPTFGQGTKVEIKEPKSPDKTHTCPPCPAPPVAGPSVFLFPPKPKDTLMIARTPEVTCVVVDVSHEDPEVKFNWYVDGVEVHNAKTKPREEQYNSTYRVVSVLTVLHQDWLNGKEYKCKVSNKALPAPIEKTISKAKGQPREPQVYTLPPSRDELTKNQVSLTCLVKGFYPSDIAVEWESNGQPENNYKTTPPVLDSDGSFFLYSKLTVDKSRWQQGNVFSCSVMHEALHNHYTQKSLSLSPGKIYIWAPLAGTCGVLLLSLVITLYCKRGRKKLLYIFKQPFMRPVQTTQEEDGCSCRFPEEEEGGCELRVKFSRSADAPAYQQGQNQLYNELNLGRREEYDVLDKRRGRDPEMGGKPRRKNPQEGLYNELQKDKMAEAYSEIGMKGERRRGKGHDGLYQGLSTATKDTYDALHMQALPPR

SEQ ID NO: 5944 - protein, 670 aa, Artificial Sequence
  Description of Artificial Sequence: Synthetic Chimeric Antigen Receptor sequence
MALPVTALLLPLALLLHAARPQVQLQESGPGLVKPSETLSLTCVVSGGSISSSNWWSWVRQPPGKGLEWIGEIYHSGSPNYNPSLKSRVTISVDKSKNQFSLKLSSVTAADTAVYYCARSSSGGFFDYWGQGTLVTVSSGGGGSGGGGSGGGGSDIQMTQSPSSLSASVGDRVTITCRASQSISSYLNWYQQKPGKAPKLLIYAASSLQSGVPSRFSGSGSGTDFTLTISSLQPEDFATYYCQQSYSTPPTFGQGTKVEIKEPKSPDKTHTCPPCPAPPVAGPSVFLFPPKPKDTLMIARTPEVTCVVVDVSHEDPEVKFNWYVDGVEVHNAKTKPREEQYNSTYRVVSVLTVLHQDWLNGKEYKCKVSNKALPAPIEKTISKAKGQPREPQVYTLPPSRDELTKNQVSLTCLVKGFYPSDIAVEWESNGQPENNYKTTPPVLDSDGSFFLYSKLTVDKSRWQQGNVFSCSVMHEALHNHYTQKSLSLSPGKIYIWAPLAGTCGVLLLSLVITLYCKRGRKKLLYIFKQPFMRPVQTTQEEDGCSCRFPEEEEGGCELRVKFSRSADAPAYQQGQNQLYNELNLGRREEYDVLDKRRGRDPEMGGKPRRKNPQEGLYNELQKDKMAEAYSEIGMKGERRRGKGHDGLYQGLSTATKDTYDALHMQALPPR

SEQ ID NO: 5945 - protein, 671 aa, Artificial Sequence
  Description of Artificial Sequence: Synthetic Chimeric Antigen Receptor sequence
MALPVTALLLPLALLLHAARPQVQLQQPGAELVKPGTSVKLSCKASGYTFTRYWMHWVKQRPGQGLEWIGMIHPSSGSTSYNEKVKNKATLTVDRSSTTAYMQLSSLTSEDSAVYYCARDGDYYYGTGDYWGQGTTLTVSSGGGGSGGGGSGGGGSQIVLSQSPAILSASPGEKVTMTCRASSSINYMHWYQQKPGSSPKPWIFATSNLASGVPSRFSGSGSGTSYSLTISRVEAEDAATYYCQQWRSDRALTFGAGTKLELEPKSPDKTHTCPPCPAPPVAGPSVFLFPPKPKDTLMIARTPEVTCVVVDVSHEDPEVKFNWYVDGVEVHNAKTKPREEQYNSTYRVVSVLTVLHQDWLNGKEYKCKVSNKALPAPIEKTISKAKGQPREPQVYTLPPSRDELTKNQVSLTCLVKGFYPSDIAVEWESNGQPENNYKTTPPVLDSDGSFFLYSKLTVDKSRWQQGNVFSCSVMHEALHNHYTQKSLSLSPGKIYIWAPLAGTCGVLLLSLVITLYCKRGRKKLLYIFKQPFMRPVQTTQEEDGCSCRFPEEEEGGCELRVKFSRSADAPAYQQGQNQLYNELNLGRREEYDVLDKRRGRDPEMGGKPRRKNPQEGLYNELQKDKMAEAYSEIGMKGERRRGKGHDGLYQGLSTATKDTYDALHMQALPPR

SEQ ID NO: 5946 - protein, 672 aa, Artificial Sequence
  Description of Artificial Sequence: Synthetic Chimeric Antigen Receptor sequence
MALPVTALLLPLALLLHAARPEVQLQQSGAELVRPGASVKLSCTASGFNIKDDYIHWVKQRPEQGLEWIGWIDPEKGDTAYASKFQDKATITSDTSSNTAYLQLSSLTSEDTAVYYCTLTGRFDYWGQGTTLTVSSGGGGSGGGGSGGGGSDIVMSQSPSSLAVSVGEKVTMSCKSSQSLLYSSNQKNNLAWYQQKPGQSPKLLIYWASTRESGVPDRFTGSGSGTDFTLTISSVQAEDLAVYYCQQYYSYRTFGGGTKLEIKEPKSPDKTHTCPPCPAPPVAGPSVFLFPPKPKDTLMIARTPEVTCVVVDVSHEDPEVKFNWYVDGVEVHNAKTKPREEQYNSTYRVVSVLTVLHQDWLNGKEYKCKVSNKALPAPIEKTISKAKGQPREPQVYTLPPSRDELTKNQVSLTCLVKGFYPSDIAVEWESNGQPENNYKTTPPVLDSDGSFFLYSKLTVDKSRWQQGNVFSCSVMHEALHNHYTQKSLSLSPGKIYIWAPLAGTCGVLLLSLVITLYCKRGRKKLLYIFKQPFMRPVQTTQEEDGCSCRFPEEEEGGCELRVKFSRSADAPAYQQGQNQLYNELNLGRREEYDVLDKRRGRDPEMGGKPRRKNPQEGLYNELQKDKMAEAYSEIGMKGERRRGKGHDGLYQGLSTATKDTYDALHMQALPPR

SEQ ID NO: 5947 - protein, 672 aa, Artificial Sequence
  Description of Artificial Sequence: Synthetic Chimeric Antigen Receptor sequence
MALPVTALLLPLALLLHAARPEVQLQQSGPELVKPGASVKMSCKASGYIFTSYVMYWVKQKPGQGLEWIGYINPYNDGTKYNEKFKGKATLTSDKSSSTAYMELSSLTSEDSAVYYSCCARYYDYDYYFDYWGQGTTLTVSSGGGGSGGGGSGGGGSDIQMTQSPSSLSASLGGKVTITCKASQDINKYIAWYQHKPGKGPRLLIHYTSTLQPGIPSRFSGSGSGRDYSFSISNLEPEDIATYYCLQYDYLWTFGGGTKLEIKEPKSPDKTHTCPPCPAPPVAGPSVFLFPPKPKDTLMIARTPEVTCVVVDVSHEDPEVKFNWYVDGVEVHNAKTKPREEQYNSTYRVVSVLTVLHQDWLNGKEYKCKVSNKALPAPIEKTISKAKGQPREPQVYTLPPSRDELTKNQVSLTCLVKGFYPSDIAVEWESNGQPENNYKTTPPVLDSDGSFFLYSKLTVDKSRWQQGNVFSCSVMHEALHNHYTQKSLSLSPGKIYIWAPLAGTCGVLLLSLVITLYCKRGRKKLLYIFKQPFMRPVQTTQEEDGCSCRFPEEEEGGCELRVKFSRSADAPAYQQGQNQLYNELNLGRREEYDVLDKRRGRDPEMGGKPRRKNPQEGLYNELQKDKMAEAYSEIGMKGERRRGKGHDGLYQGLSTATKDTYDALHMQALPPR

SEQ ID NO: 5948 - protein, 673 aa, Artificial Sequence
  Description of Artificial Sequence: Synthetic Chimeric Antigen Receptor sequence
MALPVTALLLPLALLLHAARPEVQLQQSGPELVKPGASVKMSCKASGYTFTSYFIHWVKQKPGQGLEWIGFINPYNDGSKYNEKFKGKATLTSDKSSSTAYMELSSLTSEDSAVYYCTRDDGYYGYAMDYWGQGTSVTVSSGGGGSGGGGSGGGGSDIQMTQSPSSLSASLGERVSLTCRATQELSGYLSWLQQKPDGTIKRLIYAASTLDSGVPKRFSGNRSGSDYSLTISSLESEDFADYYCLQYAIYPYTFGGGTKLEIKREPKSPDKTHTCPPCPAPPVAGPSVFLFPPKPKDTLMIARTPEVTCVVVDVSHEDPEVKFNWYVDGVEVHNAKTKPREEQYNSTYRVVSVLTVLHQDWLNGKEYKCKVSNKALPAPIEKTISKAKGQPREPQVYTLPPSRDELTKNQVSLTCLVKGFYPSDIAVEWESNGQPENNYKTTPPVLDSDGSFFLYSKLTVDKSRWQQGNVFSCSVMHEALHNHYTQKSLSLSPGKIYIWAPLAGTCGVLLLSLVITLYCKRGRKKLLYIFKQPFMRPVQTTQEEDGCSCRFPEEEEGGCELRVKFSRSADAPAYQQGQNQLYNELNLGRREEYDVLDKRRGRDPEMGGKPRRKNPQEGLYNELQKDKMAEAYSEIGMKGERRRGKGHDGLYQGLSTATKDTYDALHMQALPPR

SEQ ID NO: 5949 - protein, 673 aa, Artificial Sequence
  Description of Artificial Sequence: Synthetic Chimeric Antigen Receptor sequence
MALPVTALLLPLALLLHAARPEVQLRQSGPELVKPGASVKMSCKASGYTFTSYFMHWVKQKPGQGLEWIGFINPYNDGTKYNEKFKGKATLTSDKSSSTAYMELNSLTSEDSAVYYCTRDDGYYDYAMDYWGQGTSVTVSSGGGGSGGGGSGGGGSDIQMTQSPSSLSASLGERVSLTCRASQEISVYLSWLQQKPDGTIKRLIYAASTLDSGVPERFSGSRSGSDYSLTISSLESEDFADYYCLQYASYPYTFGGGTKLEIKREPKSPDKTHTCPPCPAPPVAGPSVFLFPPKPKDTLMIARTPEVTCVVVDVSHEDPEVKFNWYVDGVEVHNAKTKPREEQYNSTYRVVSVLTVLHQDWLNGKEYKCKVSNKALPAPIEKTISKAKGQPREPQVYTLPPSRDELTKNQVSLTCLVKGFYPSDIAVEWESNGQPENNYKTTPPVLDSDGSFFLYSKLTVDKSRWQQGNVFSCSVMHEALHNHYTQKSLSLSPGKIYIWAPLAGTCGVLLLSLVITLYCKRGRKKLLYIFKQPFMRPVQTTQEEDGCSCRFPEEEEGGCELRVKFSRSADAPAYQQGQNQLYNELNLGRREEYDVLDKRRGRDPEMGGKPRRKNPQEGLYNELQKDKMAEAYSEIGMKGERRRGKGHDGLYQGLSTATKDTYDALHMQALPPR

SEQ ID NO: 5950 - protein, 673 aa, Artificial Sequence
  Description of Artificial Sequence: Synthetic Chimeric Antigen Receptor sequence
MALPVTALLLPLALLLHAARPQVQLQESGPGLVKPSETLSLTCVVSGGSISSSNWWSWVRQPPGKGLEWIGEIYHSGSPNYNPSLKSRVTISVDKSKNQFSLKLSSVTAADTAVYYCARQTTAGSFDYWGQGTLVTVSSGGGGSGGGGSGGGGSDIQMTQSPSSLSASVGDRVTITCRASQSISSYLNWYQQKPGKAPKLLIYAASSLQSGVPSRFSGSGSGTDFTLTISSLQPEDFATYYCQQSYSTPPTFGQGTKVEIKEPKSPDKTHTCPPCPAPPVAGPSVFLFPPKPKDTLMIARTPEVTCVVVDVSHEDPEVKFNWYVDGVEVHNAKTKPREEQYNSTYRVVSVLTVLHQDWLNGKEYKCKVSNKALPAPIEKTISKAKGQPREPQVYTLPPSRDELTKNQVSLTCLVKGFYPSDIAVEWESNGQPENNYKTTPPVLDSDGSFFLYSKLTVDKSRWQQGNVFSCSVMHEALHNHYTQKSLSLSPGKIISFFLALTSTALLFLLFFLTLRFSVVKRGRKKLLYIFKQPFMRPVQTTQEEDGCSCRFPEEEEGGCELRVKFSRSADAPAYQQGQNQLYNELNLGRREEYDVLDKRRGRDPEMGGKPRRKNPQEGLYNELQKDKMAEAYSEIGMKGERRRGKGHDGLYQGLSTATKDTYDALHMQALPPR

SEQ ID NO: 5951 - protein, 673 aa, Artificial Sequence
  Description of Artificial Sequence: Synthetic Chimeric Antigen Receptor sequence
MALPVTALLLPLALLLHAARPQVQLQESGPGLVKPSETLSLTCVVSGGSISSSNWWSWVRQPPGKGLEWIGEIYHSGSPNYNPSLKSRVTISVDKSKNQFSLKLSSVTAADTAVYYCARSSSGGFFDYWGQGTLVTVSSGGGGSGGGGSGGGGSDIQMTQSPSSLSASVGDRVTITCRASQSISSYLNWYQQKPGKAPKLLIYAASSLQSGVPSRFSGSGSGTDFTLTISSLQPEDFATYYCQQSYSTPPTFGQGTKVEIKEPKSPDKTHTCPPCPAPPVAGPSVFLFPPKPKDTLMIARTPEVTCVVVDVSHEDPEVKFNWYVDGVEVHNAKTKPREEQYNSTYRVVSVLTVLHQDWLNGKEYKCKVSNKALPAPIEKTISKAKGQPREPQVYTLPPSRDELTKNQVSLTCLVKGFYPSDIAVEWESNGQPENNYKTTPPVLDSDGSFFLYSKLTVDKSRWQQGNVFSCSVMHEALHNHYTQKSLSLSPGKIISFFLALTSTALLFLLFFLTLRFSVVKRGRKKLLYIFKQPFMRPVQTTQEEDGCSCRFPEEEEGGCELRVKFSRSADAPAYQQGQNQLYNELNLGRREEYDVLDKRRGRDPEMGGKPRRKNPQEGLYNELQKDKMAEAYSEIGMKGERRRGKGHDGLYQGLSTATKDTYDALHMQALPPR

SEQ ID NO: 5952 - protein, 674 aa, Artificial Sequence
  Description of Artificial Sequence: Synthetic Chimeric Antigen Receptor sequence
MALPVTALLLPLALLLHAARPEVQLQQSGPELVKPGASMKISCKASGYSFTGYTMNWVKQSHEKNLEWIGPINPYNDGTIYNPNFKGKATLTVDKASSTAYMELLSLTSDDPAVYYSCCARTDDYDDYTMDYWGQGTSVTVSSGGGGSGGGGSGGGGSEIQMTQTPSSLSASLGDRVTISCRASHDISNYLNWYQQKPDGTLKLLIYYTSRLHSGVPSRFSGSGSGTDYSLTISNLEQEDIATYFCQQGKTLLWTFGGGTKLEIKEPKSPDKTHTCPPCPAPPVAGPSVFLFPPKPKDTLMIARTPEVTCVVVDVSHEDPEVKFNWYVDGVEVHNAKTKPREEQYNSTYRVVSVLTVLHQDWLNGKEYKCKVSNKALPAPIEKTISKAKGQPREPQVYTLPPSRDELTKNQVSLTCLVKGFYPSDIAVEWESNGQPENNYKTTPPVLDSDGSFFLYSKLTVDKSRWQQGNVFSCSVMHEALHNHYTQKSLSLSPGKIYIWAPLAGTCGVLLLSLVITLYCKRGRKKLLYIFKQPFMRPVQTTQEEDGCSCRFPEEEEGGCELRVKFSRSADAPAYQQGQNQLYNELNLGRREEYDVLDKRRGRDPEMGGKPRRKNPQEGLYNELQKDKMAEAYSEIGMKGERRRGKGHDGLYQGLSTATKDTYDALHMQALPPR

SEQ ID NO: 5953 - protein, 674 aa, Artificial Sequence
  Description of Artificial Sequence: Synthetic Chimeric Antigen Receptor sequence
MALPVTALLLPLALLLHAARPQVQLQQPGAELVKPGTSVKLSCKASGYTFTRYWMHWVKQRPGQGLEWIGMIHPSSGSTSYNEKVKNKATLTVDRSSTTAYMQLSSLTSEDSAVYYCARDGDYYYGTGDYWGQGTTLTVSSGGGGSGGGGSGGGGSQIVLSQSPAILSASPGEKVTMTCRASSSINYMHWYQQKPGSSPKPWIFATSNLASGVPSRFSGSGSGTSYSLTISRVEAEDAATYYCQQWRSDRALTFGAGTKLELEPKSPDKTHTCPPCPAPPVAGPSVFLFPPKPKDTLMIARTPEVTCVVVDVSHEDPEVKFNWYVDGVEVHNAKTKPREEQYNSTYRVVSVLTVLHQDWLNGKEYKCKVSNKALPAPIEKTISKAKGQPREPQVYTLPPSRDELTKNQVSLTCLVKGFYPSDIAVEWESNGQPENNYKTTPPVLDSDGSFFLYSKLTVDKSRWQQGNVFSCSVMHEALHNHYTQKSLSLSPGKIISFFLALTSTALLFLLFFLTLRFSVVKRGRKKLLYIFKQPFMRPVQTTQEEDGCSCRFPEEEEGGCELRVKFSRSADAPAYQQGQNQLYNELNLGRREEYDVLDKRRGRDPEMGGKPRRKNPQEGLYNELQKDKMAEAYSEIGMKGERRRGKGHDGLYQGLSTATKDTYDALHMQALPPR

SEQ ID NO: 5954 - protein, 675 aa, Artificial Sequence
  Description of Artificial Sequence: Synthetic Chimeric Antigen Receptor sequence
MALPVTALLLPLALLLHAARPDIQLQESGPGLVKPSQSLSLTCSVTGYSITSAYYWNWIRQFPGNKLEWMGYISYDGRNNYNPSLKNRISITRDTSKNQFFLKLNSVTTEDTATYYCAKEGDYDVGNYYAMDYWGQGTSVTVSSGGGGSGGGGSGGGGSENVLTQSPAIMSASPGEKVTMTCRASSNVISSYVHWYQQRSGASPKLWIYSTSNLASGVPARFSGSGSGTSYSLTISSVEAEDAATYYCQQYSGYPLTFGAGTKLELEPKSPDKTHTCPPCPAPPVAGPSVFLFPPKPKDTLMIARTPEVTCVVVDVSHEDPEVKFNWYVDGVEVHNAKTKPREEQYNSTYRVVSVLTVLHQDWLNGKEYKCKVSNKALPAPIEKTISKAKGQPREPQVYTLPPSRDELTKNQVSLTCLVKGFYPSDIAVEWESNGQPENNYKTTPPVLDSDGSFFLYSKLTVDKSRWQQGNVFSCSVMHEALHNHYTQKSLSLSPGKIYIWAPLAGTCGVLLLSLVITLYCKRGRKKLLYIFKQPFMRPVQTTQEEDGCSCRFPEEEEGGCELRVKFSRSADAPAYQQGQNQLYNELNLGRREEYDVLDKRRGRDPEMGGKPRRKNPQEGLYNELQKDKMAEAYSEIGMKGERRRGKGHDGLYQGLSTATKDTYDALHMQALPPR

SEQ ID NO: 5955 - protein, 675 aa, Artificial Sequence
  Description of Artificial Sequence: Synthetic Chimeric Antigen Receptor sequence
MALPVTALLLPLALLLHAARPEVQLQQSGAELVRPGASVKLSCTASGFNIKDDYIHWVKQRPEQGLEWIGWIDPEKGDTAYASKFQDKATITSDTSSNTAYLQLSSLTSEDTAVYYCTLTGRFDYWGQGTTLTVSSGGGGSGGGGSGGGGSDIVMSQSPSSLAVSVGEKVTMSCKSSQSLLYSSNQKNNLAWYQQKPGQSPKLLIYWASTRESGVPDRFTGSGSGTDFTLTISSVQAEDLAVYYCQQYYSYRTFGGGTKLEIKEPKSPDKTHTCPPCPAPPVAGPSVFLFPPKPKDTLMIARTPEVTCVVVDVSHEDPEVKFNWYVDGVEVHNAKTKPREEQYNSTYRVVSVLTVLHQDWLNGKEYKCKVSNKALPAPIEKTISKAKGQPREPQVYTLPPSRDELTKNQVSLTCLVKGFYPSDIAVEWESNGQPENNYKTTPPVLDSDGSFFLYSKLTVDKSRWQQGNVFSCSVMHEALHNHYTQKSLSLSPGKIISFFLALTSTALLFLLFFLTLRFSVVKRGRKKLLYIFKQPFMRPVQTTQEEDGCSCRFPEEEEGGCELRVKFSRSADAPAYQQGQNQLYNELNLGRREEYDVLDKRRGRDPEMGGKPRRKNPQEGLYNELQKDKMAEAYSEIGMKGERRRGKGHDGLYQGLSTATKDTYDALHMQALPPR

SEQ ID NO: 5956 - protein, 675 aa, Artificial Sequence
  Description of Artificial Sequence: Synthetic Chimeric Antigen Receptor sequence
MALPVTALLLPLALLLHAARPEVQLQQSGPELVKPGASVKMSCKASGYIFTSYVMYWVKQKPGQGLEWIGYINPYNDGTKYNEKFKGKATLTSDKSSSTAYMELSSLTSEDSAVYYSCCARYYDYDYYFDYWGQGTTLTVSSGGGGSGGGGSGGGGSDIQMTQSPSSLSASLGGKVTITCKASQDINKYIAWYQHKPGKGPRLLIHYTSTLQPGIPSRFSGSGSGRDYSFSISNLEPEDIATYYCLQYDYLWTFGGGTKLEIKEPKSPDKTHTCPPCPAPPVAGPSVFLFPPKPKDTLMIARTPEVTCVVVDVSHEDPEVKFNWYVDGVEVHNAKTKPREEQYNSTYRVVSVLTVLHQDWLNGKEYKCKVSNKALPAPIEKTISKAKGQPREPQVYTLPPSRDELTKNQVSLTCLVKGFYPSDIAVEWESNGQPENNYKTTPPVLDSDGSFFLYSKLTVDKSRWQQGNVFSCSVMHEALHNHYTQKSLSLSPGKIISFFLALTSTALLFLLFFLTLRFSVVKRGRKKLLYIFKQPFMRPVQTTQEEDGCSCRFPEEEEGGCELRVKFSRSADAPAYQQGQNQLYNELNLGRREEYDVLDKRRGRDPEMGGKPRRKNPQEGLYNELQKDKMAEAYSEIGMKGERRRGKGHDGLYQGLSTATKDTYDALHMQALPPR

SEQ ID NO: 5957 - protein, 676 aa, Artificial Sequence
  Description of Artificial Sequence: Synthetic Chimeric Antigen Receptor sequence
MALPVTALLLPLALLLHAARPEVQLQQSGPELVKPGASVKMSCKASGYTFTSYFIHWVKQKPGQGLEWIGFINPYNDGSKYNEKFKGKATLTSDKSSSTAYMELSSLTSEDSAVYYCTRDDGYYGYAMDYWGQGTSVTVSSGGGGSGGGGSGGGGSDIQMTQSPSSLSASLGERVSLTCRATQELSGYLSWLQQKPDGTIKRLIYAASTLDSGVPKRFSGNRSGSDYSLTISSLESEDFADYYCLQYAIYPYTFGGGTKLEIKREPKSPDKTHTCPPCPAPPVAGPSVFLFPPKPKDTLMIARTPEVTCVVVDVSHEDPEVKFNWYVDGVEVHNAKTKPREEQYNSTYRVVSVLTVLHQDWLNGKEYKCKVSNKALPAPIEKTISKAKGQPREPQVYTLPPSRDELTKNQVSLTCLVKGFYPSDIAVEWESNGQPENNYKTTPPVLDSDGSFFLYSKLTVDKSRWQQGNVFSCSVMHEALHNHYTQKSLSLSPGKIISFFLALTSTALLFLLFFLTLRFSVVKRGRKKLLYIFKQPFMRPVQTTQEEDGCSCRFPEEEEGGCELRVKFSRSADAPAYQQGQNQLYNELNLGRREEYDVLDKRRGRDPEMGGKPRRKNPQEGLYNELQKDKMAEAYSEIGMKGERRRGKGHDGLYQGLSTATKDTYDALHMQALPPR

SEQ ID NO: 5958 - protein, 676 aa, Artificial Sequence
  Description of Artificial Sequence: Synthetic Chimeric Antigen Receptor sequence
MALPVTALLLPLALLLHAARPEVQLRQSGPELVKPGASVKMSCKASGYTFTSYFMHWVKQKPGQGLEWIGFINPYNDGTKYNEKFKGKATLTSDKSSSTAYMELNSLTSEDSAVYYCTRDDGYYDYAMDYWGQGTSVTVSSGGGGSGGGGSGGGGSDIQMTQSPSSLSASLGERVSLTCRASQEISVYLSWLQQKPDGTIKRLIYAASTLDSGVPERFSGSRSGSDYSLTISSLESEDFADYYCLQYASYPYTFGGGTKLEIKREPKSPDKTHTCPPCPAPPVAGPSVFLFPPKPKDTLMIARTPEVTCVVVDVSHEDPEVKFNWYVDGVEVHNAKTKPREEQYNSTYRVVSVLTVLHQDWLNGKEYKCKVSNKALPAPIEKTISKAKGQPREPQVYTLPPSRDELTKNQVSLTCLVKGFYPSDIAVEWESNGQPENNYKTTPPVLDSDGSFFLYSKLTVDKSRWQQGNVFSCSVMHEALHNHYTQKSLSLSPGKIISFFLALTSTALLFLLFFLTLRFSVVKRGRKKLLYIFKQPFMRPVQTTQEEDGCSCRFPEEEEGGCELRVKFSRSADAPAYQQGQNQLYNELNLGRREEYDVLDKRRGRDPEMGGKPRRKNPQEGLYNELQKDKMAEAYSEIGMKGERRRGKGHDGLYQGLSTATKDTYDALHMQALPPR

SEQ ID NO: 5959 - protein, 676 aa, Artificial Sequence
  Description of Artificial Sequence: Synthetic Chimeric Antigen Receptor sequence
MALPVTALLLPLALLLHAARPQVQLQQPGAELVKPGASMKMSCKASGYTFPSSNIHWLKQTPGQGLEWIGVIYPGNGDTSYNQKFKDKATLTTDKSSSTAYMQLSSLTSEDSAIYFSCCARVYNWHFDVWGAGTTVTVSSGGGGSGGGGSGGGGSNIVLTQSPASLAVSLGQRATISCRASESVDGYGDIFMLWYQQKPGQPPKLLIYFASNLESGVPARFSGSGSRTDFTLTIDPVEADDAATYYCQQNNEDPYTFGGGTKLEIKREPKSPDKTHTCPPCPAPPVAGPSVFLFPPKPKDTLMIARTPEVTCVVVDVSHEDPEVKFNWYVDGVEVHNAKTKPREEQYNSTYRVVSVLTVLHQDWLNGKEYKCKVSNKALPAPIEKTISKAKGQPREPQVYTLPPSRDELTKNQVSLTCLVKGFYPSDIAVEWESNGQPENNYKTTPPVLDSDGSFFLYSKLTVDKSRWQQGNVFSCSVMHEALHNHYTQKSLSLSPGKIYIWAPLAGTCGVLLLSLVITLYCKRGRKKLLYIFKQPFMRPVQTTQEEDGCSCRFPEEEEGGCELRVKFSRSADAPAYQQGQNQLYNELNLGRREEYDVLDKRRGRDPEMGGKPRRKNPQEGLYNELQKDKMAEAYSEIGMKGERRRGKGHDGLYQGLSTATKDTYDALHMQALPPR

SEQ ID NO: 5960 - protein, 677 aa, Artificial Sequence
  Description of Artificial Sequence: Synthetic Chimeric Antigen Receptor sequence
MALPVTALLLPLALLLHAARPEVQLQQSGPELVKPGASMKISCKASGYSFTGYTMNWVKQSHEKNLEWIGPINPYNDGTIYNPNFKGKATLTVDKASSTAYMELLSLTSDDPAVYYSCCARTDDYDDYTMDYWGQGTSVTVSSGGGGSGGGGSGGGGSEIQMTQTPSSLSASLGDRVTISCRASHDISNYLNWYQQKPDGTLKLLIYYTSRLHSGVPSRFSGSGSGTDYSLTISNLEQEDIATYFCQQGKTLLWTFGGGTKLEIKEPKSPDKTHTCPPCPAPPVAGPSVFLFPPKPKDTLMIARTPEVTCVVVDVSHEDPEVKFNWYVDGVEVHNAKTKPREEQYNSTYRVVSVLTVLHQDWLNGKEYKCKVSNKALPAPIEKTISKAKGQPREPQVYTLPPSRDELTKNQVSLTCLVKGFYPSDIAVEWESNGQPENNYKTTPPVLDSDGSFFLYSKLTVDKSRWQQGNVFSCSVMHEALHNHYTQKSLSLSPGKIISFFLALTSTALLFLLFFLTLRFSVVKRGRKKLLYIFKQPFMRPVQTTQEEDGCSCRFPEEEEGGCELRVKFSRSADAPAYQQGQNQLYNELNLGRREEYDVLDKRRGRDPEMGGKPRRKNPQEGLYNELQKDKMAEAYSEIGMKGERRRGKGHDGLYQGLSTATKDTYDALHMQALPPR

SEQ ID NO: 5961 - protein, 678 aa, Artificial Sequence
  Description of Artificial Sequence: Synthetic Chimeric Antigen Receptor sequence
MALPVTALLLPLALLLHAARPDIQLQESGPGLVKPSQSLSLTCSVTGYSITSAYYWNWIRQFPGNKLEWMGYISYDGRNNYNPSLKNRISITRDTSKNQFFLKLNSVTTEDTATYYCAKEGDYDVGNYYAMDYWGQGTSVTVSSGGGGSGGGGSGGGGSENVLTQSPAIMSASPGEKVTMTCRASSNVISSYVHWYQQRSGASPKLWIYSTSNLASGVPARFSGSGSGTSYSLTISSVEAEDAATYYCQQYSGYPLTFGAGTKLELEPKSPDKTHTCPPCPAPPVAGPSVFLFPPKPKDTLMIARTPEVTCVVVDVSHEDPEVKFNWYVDGVEVHNAKTKPREEQYNSTYRVVSVLTVLHQDWLNGKEYKCKVSNKALPAPIEKTISKAKGQPREPQVYTLPPSRDELTKNQVSLTCLVKGFYPSDIAVEWESNGQPENNYKTTPPVLDSDGSFFLYSKLTVDKSRWQQGNVFSCSVMHEALHNHYTQKSLSLSPGKIISFFLALTSTALLFLLFFLTLRFSVVKRGRKKLLYIFKQPFMRPVQTTQEEDGCSCRFPEEEEGGCELRVKFSRSADAPAYQQGQNQLYNELNLGRREEYDVLDKRRGRDPEMGGKPRRKNPQEGLYNELQKDKMAEAYSEIGMKGERRRGKGHDGLYQGLSTATKDTYDALHMQALPPR

SEQ ID NO: 5962 - protein, 678 aa, Artificial Sequence
  Description of Artificial Sequence: Synthetic Chimeric Antigen Receptor sequence
MALPVTALLLPLALLLHAARPEVQLQQSGPELVKPGASVKMSCKASGYTFTSYVMHWVKQKPGQGLEWIGYINPYNDGTKYNEKFKGKATLTSDTSSSTAYMELNSLTSEDSAVYFSCCARPIYFDNDYFDYWGQGTTLKVSSGGGGSGGGGSGGGGSTIVLTQSPASLAVSLGQRATISCRASESVDSYGNSFMHWYQQKPGQPPKLLIYLASNLESGVPARFSGSGSRTDFTLTIDPVEADDAATYYCQQNNYDPWTFGGGTKLEIKEPKSPDKTHTCPPCPAPPVAGPSVFLFPPKPKDTLMIARTPEVTCVVVDVSHEDPEVKFNWYVDGVEVHNAKTKPREEQYNSTYRVVSVLTVLHQDWLNGKEYKCKVSNKALPAPIEKTISKAKGQPREPQVYTLPPSRDELTKNQVSLTCLVKGFYPSDIAVEWESNGQPENNYKTTPPVLDSDGSFFLYSKLTVDKSRWQQGNVFSCSVMHEALHNHYTQKSLSLSPGKIYIWAPLAGTCGVLLLSLVITLYCKRGRKKLLYIFKQPFMRPVQTTQEEDGCSCRFPEEEEGGCELRVKFSRSADAPAYQQGQNQLYNELNLGRREEYDVLDKRRGRDPEMGGKPRRKNPQEGLYNELQKDKMAEAYSEIGMKGERRRGKGHDGLYQGLSTATKDTYDALHMQALPPR

SEQ ID NO: 5963 - protein, 679 aa, Artificial Sequence
  Description of Artificial Sequence: Synthetic Chimeric Antigen Receptor sequence
MALPVTALLLPLALLLHAARPQVQLQQPGAELVKPGASMKMSCKASGYTFPSSNIHWLKQTPGQGLEWIGVIYPGNGDTSYNQKFKDKATLTTDKSSSTAYMQLSSLTSEDSAIYFSCCARVYNWHFDVWGAGTTVTVSSGGGGSGGGGSGGGGSNIVLTQSPASLAVSLGQRATISCRASESVDGYGDIFMLWYQQKPGQPPKLLIYFASNLESGVPARFSGSGSRTDFTLTIDPVEADDAATYYCQQNNEDPYTFGGGTKLEIKREPKSPDKTHTCPPCPAPPVAGPSVFLFPPKPKDTLMIARTPEVTCVVVDVSHEDPEVKFNWYVDGVEVHNAKTKPREEQYNSTYRVVSVLTVLHQDWLNGKEYKCKVSNKALPAPIEKTISKAKGQPREPQVYTLPPSRDELTKNQVSLTCLVKGFYPSDIAVEWESNGQPENNYKTTPPVLDSDGSFFLYSKLTVDKSRWQQGNVFSCSVMHEALHNHYTQKSLSLSPGKIISFFLALTSTALLFLLFFLTLRFSVVKRGRKKLLYIFKQPFMRPVQTTQEEDGCSCRFPEEEEGGCELRVKFSRSADAPAYQQGQNQLYNELNLGRREEYDVLDKRRGRDPEMGGKPRRKNPQEGLYNELQKDKMAEAYSEIGMKGERRRGKGHDGLYQGLSTATKDTYDALHMQALPPR

SEQ ID NO: 5964 - protein, 679 aa, Artificial Sequence
  Description of Artificial Sequence: Synthetic Chimeric Antigen Receptor sequence
MALPVTALLLPLALLLHAARPQVQLQQPGAELVKPGASVKLSCKASGYTFTRYWMHWVKQRPGQGLEWIGNIDPSDTETHYNQQFKDKATLTVDKSSSTAYMQLSSLTSEDSAVYYCAIYYGNPSYYAMDYWGQGTSVTVSSGGGGSGGGGSGGGGSDIVMTQSPSSLTVTAGEKVTMSCKSSQNLLNSGNQKKYLNWYQQKPGQPPKLLIYWASTRESGVPDRFTGSGSGTDFTLTISSVQAEDLAVYFCQNDYSYPFTFGAGTKLELKEPKSPDKTHTCPPCPAPPVAGPSVFLFPPKPKDTLMIARTPEVTCVVVDVSHEDPEVKFNWYVDGVEVHNAKTKPREEQYNSTYRVVSVLTVLHQDWLNGKEYKCKVSNKALPAPIEKTISKAKGQPREPQVYTLPPSRDELTKNQVSLTCLVKGFYPSDIAVEWESNGQPENNYKTTPPVLDSDGSFFLYSKLTVDKSRWQQGNVFSCSVMHEALHNHYTQKSLSLSPGKIYIWAPLAGTCGVLLLSLVITLYCKRGRKKLLYIFKQPFMRPVQTTQEEDGCSCRFPEEEEGGCELRVKFSRSADAPAYQQGQNQLYNELNLGRREEYDVLDKRRGRDPEMGGKPRRKNPQEGLYNELQKDKMAEAYSEIGMKGERRRGKGHDGLYQGLSTATKDTYDALHMQALPPR

SEQ ID NO: 5965 - protein, 681 aa, Artificial Sequence
  Description of Artificial Sequence: Synthetic Chimeric Antigen Receptor sequence
MALPVTALLLPLALLLHAARPEVQLQQSGPELVKPGASVKMSCKASGYTFTSYVMHWVKQKPGQGLEWIGYINPYNDGTKYNEKFKGKATLTSDTSSSTAYMELNSLTSEDSAVYFSCCARPIYFDNDYFDYWGQGTTLKVSSGGGGSGGGGSGGGGSTIVLTQSPASLAVSLGQRATISCRASESVDSYGNSFMHWYQQKPGQPPKLLIYLASNLESGVPARFSGSGSRTDFTLTIDPVEADDAATYYCQQNNYDPWTFGGGTKLEIKEPKSPDKTHTCPPCPAPPVAGPSVFLFPPKPKDTLMIARTPEVTCVVVDVSHEDPEVKFNWYVDGVEVHNAKTKPREEQYNSTYRVVSVLTVLHQDWLNGKEYKCKVSNKALPAPIEKTISKAKGQPREPQVYTLPPSRDELTKNQVSLTCLVKGFYPSDIAVEWESNGQPENNYKTTPPVLDSDGSFFLYSKLTVDKSRWQQGNVFSCSVMHEALHNHYTQKSLSLSPGKIISFFLALTSTALLFLLFFLTLRFSVVKRGRKKLLYIFKQPFMRPVQTTQEEDGCSCRFPEEEEGGCELRVKFSRSADAPAYQQGQNQLYNELNLGRREEYDVLDKRRGRDPEMGGKPRRKNPQEGLYNELQKDKMAEAYSEIGMKGERRRGKGHDGLYQGLSTATKDTYDALHMQALPPR

SEQ ID NO: 5966 - protein, 682 aa, Artificial Sequence
  Description of Artificial Sequence: Synthetic Chimeric Antigen Receptor sequence
MALPVTALLLPLALLLHAARPQVQLQQPGAELVKPGASVKLSCKASGYTFTRYWMHWVKQRPGQGLEWIGNIDPSDTETHYNQQFKDKATLTVDKSSSTAYMQLSSLTSEDSAVYYCAIYYGNPSYYAMDYWGQGTSVTVSSGGGGSGGGGSGGGGSDIVMTQSPSSLTVTAGEKVTMSCKSSQNLLNSGNQKKYLNWYQQKPGQPPKLLIYWASTRESGVPDRFTGSGSGTDFTLTISSVQAEDLAVYFCQNDYSYPFTFGAGTKLELKEPKSPDKTHTCPPCPAPPVAGPSVFLFPPKPKDTLMIARTPEVTCVVVDVSHEDPEVKFNWYVDGVEVHNAKTKPREEQYNSTYRVVSVLTVLHQDWLNGKEYKCKVSNKALPAPIEKTISKAKGQPREPQVYTLPPSRDELTKNQVSLTCLVKGFYPSDIAVEWESNGQPENNYKTTPPVLDSDGSFFLYSKLTVDKSRWQQGNVFSCSVMHEALHNHYTQKSLSLSPGKIISFFLALTSTALLFLLFFLTLRFSVVKRGRKKLLYIFKQPFMRPVQTTQEEDGCSCRFPEEEEGGCELRVKFSRSADAPAYQQGQNQLYNELNLGRREEYDVLDKRRGRDPEMGGKPRRKNPQEGLYNELQKDKMAEAYSEIGMKGERRRGKGHDGLYQGLSTATKDTYDALHMQALPPR

SEQ ID NO: 5967 - protein, 535 aa, Artificial Sequence
  Description of Artificial Sequence: Synthetic Chimeric Antigen Receptor sequence
MALPVTALLLPLALLLHAARPGSEIQLQQSGAELVKPGASVKLSCTGSGFNIEDYYIHWVKQRTEQGLEWIGRIDPENDETKYGPIFQGRATITADTSSNTVYLQLSSLTSEDTAVYYCAFRGGVYWGPGTTLTVSSGGGGSGGGGSGGGGSHMDVVMTQSPLTLSVAIGQSASISCKSSQSLLDSDGKTYLNWLLQRPGQSPKRLISLVSKLDSGVPDRFTGSGSGTDFTLRISRVEAEDLGIYYCWQGTHFPGTFGGGTKLEIKASTTTPAPRPPTPAPTIASQPLSLRPEACRPAAGGAVHTRGLDFACDFWVLVVVGGVLACYSLLVTVAFIIFWVRSKRSRLLHSDYMNMTPRRPGPTRKHYQPYAPPRDFAAYRSKRGRKKLLYIFKQPFMRPVQTTQEEDGCSCRFPEEEEGGCELRVKFSRSADAPAYKQGQNQLYNELNLGRREEYDVLDKRRGRDPEMGGKPRRKNPQEGLYNELQKDKMAEAYSEIGMKGERRRGKGHDGLYQGLSTATKDTYDALHMQALPPR

SEQ ID NO: 5968 - protein, 482 aa, Artificial Sequence
  Description of Artificial Sequence: Synthetic Chimeric Antigen Receptor sequence
MALPVTALLLPLALLLHAARPEVQLLESGGGLVQPGGSLRLSCAASGFTFSSYAMNWVRQAPGKGLEWVSAISDSGGSRWYADSVKGRFTISRDNSKNTLYLQMNSLRAEDTAVYYCTRYWPMDIWGQGTLVTVSSGGGGSGGGGSGGGGSEIVLTQSPGTLSLSPGERATLSCRASVRVSSTYLAWYQQKPGQAPRLLMYDASIRATGIPDRFSGSGSGTDFTLTISRLEPEDFAVYYCQQYMKWPLTFGQGTKVEIKTTTPAPRPPTPAPTIASQPLSLRPEACRPAAGGAVHTRGLDFACDIYIWAPLAGTCGVLLLSLVITLYCKRGRKKLLYIFKQPFMRPVQTTQEEDGCSCRFPEEEEGGCELRVKFSRSADAPAYQQGQNQLYNELNLGRREEYDVLDKRRGRDPEMGGKPRRKNPQEGLYNELQKDKMAEAYSEIGMKGERRRGKGHDGLYQGLSTATKDTYDALHMQALPPR

SEQ ID NO: 5969 - protein, 668 aa, Artificial Sequence
  Description of Artificial Sequence: Synthetic Chimeric Antigen Receptor sequence
MALPVTALLLPLALLLHAARPEVQLLESGGGLVQPGGSLRLSCAASGFTFSSYAMNWVRQAPGKGLEWVSAISDSGGSRWYADSVKGRFTISRDNSKNTLYLQMNSLRAEDTAVYYCTRYWPMDIWGQGTLVTVSSGGGGSGGGGSGGGGSEIVLTQSPGTLSLSPGERATLSCRASVRVSSTYLAWYQQKPGQAPRLLMYDASIRATGIPDRFSGSGSGTDFTLTISRLEPEDFAVYYCQQYMKWPLTFGQGTKVEIKEPKSPDKTHTCPPCPAPPVAGPSVFLFPPKPKDTLMIARTPEVTCVVVDVSHEDPEVKFNWYVDGVEVHNAKTKPREEQYNSTYRVVSVLTVLHQDWLNGKEYKCKVSNKALPAPIEKTISKAKGQPREPQVYTLPPSRDELTKNQVSLTCLVKGFYPSDIAVEWESNGQPENNYKTTPPVLDSDGSFFLYSKLTVDKSRWQQGNVFSCSVMHEALHNHYTQKSLSLSPGKIYIWAPLAGTCGVLLLSLVITLYCKRGRKKLLYIFKQPFMRPVQTTQEEDGCSCRFPEEEEGGCELRVKFSRSADAPAYQQGQNQLYNELNLGRREEYDVLDKRRGRDPEMGGKPRRKNPQEGLYNELQKDKMAEAYSEIGMKGERRRGKGHDGLYQGLSTATKDTYDALHMQALPPR

SEQ ID NO: 5970 - protein, 487 aa, Artificial Sequence
  Description of Artificial Sequence: Synthetic Chimeric Antigen Receptor sequence
MALPVTALLLPLALLLHAARPQVQLQQSGAELARPGASVKLSCKASGYTFTSYWMQWVKQRPGQGLEWIGAIYPGDGDTRYTQKFKGKATLTADKSSSTAYMQLSSLASEDSAVYYCARGKVYYGSNPFAYWGQGTLVTVSAGGGGSGGGGSGGGGSDIQMTQSSSYLSVSLGGRVTITCKASDHINNWLAWYQQKPGNAPRLLISGATSLETGVPSRFSGSGSGKDYTLSITSLQTEDVATYYCQQYWSTPWTFGGGTKLEIKTTTPAPRPPTPAPTIASQPLSLRPEACRPAAGGAVHTRGLDFACDIYIWAPLAGTCGVLLLSLVITLYCKRGRKKLLYIFKQPFMRPVQTTQEEDGCSCRFPEEEEGGCELRVKFSRSADAPAYQQGQNQLYNELNLGRREEYDVLDKRRGRDPEMGGKPRRKNPQEGLYNELQKDKMAEAYSEIGMKGERRRGKGHDGLYQGLSTATKDTYDALHMQALPPR

SEQ ID NO: 5971 - protein, 432 aa, Artificial Sequence
  Description of Artificial Sequence: Synthetic Chimeric Antigen Receptor sequence
MALPVTALLLPLALLLHAARPEVKLLESGGGLVQPGGSLKLSCAASGFDFSRYWMSWVRQAPGKGLEWIGEINPDSSTINYTPSLKDKFIISRDNAKNTLYLQMSKVRSEDTALYYCARPDGNYWYFDVWGAGTTVTVSSGGGGSGGGGSGGGGSDIVMTQSHKFMSTSVGDRVSITCKASQDVGIAVAWYQQKPGQSPKLLIYWASTRHTGVPDRFTGSGSGTDFTLTISNVQSEDLADYFCQQYSSYPYTFGGGTKLEIKGLAVSTISSFFPPGYQKRGRKKLLYIFKQPFMRPVQTTQEEDGCSCRFPEEEEGGCELRVKFSRSADAPAYQQGQNQLYNELNLGRREEYDVLDKRRGRDPEMGGKPRRKNPQEGLYNELQKDKMAEAYSEIGMKGERRRGKGHDGLYQGLSTATKDTYDALHMQALPPR

SEQ ID NO: 5972 - protein, 433 aa, Artificial Sequence
  Description of Artificial Sequence: Synthetic Chimeric Antigen Receptor sequence
MALPVTALLLPLALLLHAARPQVQLQQPGAELVRPGASVKLSCKASGYSFTTYWMNWVKQRPGQGLEWIGMIHPSDSETRLNQKFKDKATLTVDKSSSTAYMQLSSPTSEDSAVYYCARSTMIATRAMDYWGQGTSVTVSSGGGGSGGGGSGGGGSDIVMTQSQKSMSTSVGDRVSITCKASQDVITGVAWYQQKPGQSPKLLIYSASYRYTGVPDRFTGSGSGTDFTFTISNVQAEDLAVYYCQQHYSTPLTFGAGTKLELKGLAVSTISSFFPPGYQKRGRKKLLYIFKQPFMRPVQTTQEEDGCSCRFPEEEEGGCELRVKFSRSADAPAYQQGQNQLYNELNLGRREEYDVLDKRRGRDPEMGGKPRRKNPQEGLYNELQKDKMAEAYSEIGMKGERRRGKGHDGLYQGLSTATKDTYDALHMQALPPR

SEQ ID NO: 5973 - protein, 433 aa, Artificial Sequence
  Description of Artificial Sequence: Synthetic Chimeric Antigen Receptor sequence
MALPVTALLLPLALLLHAARPQVQLQQSGPELVKPGASVKISCKASGYAFSSSWMNWVKQRPGQGLEWIGRIYPGDGDTKYNGKFKGKATLTADKSSSTAYMQLSSLTSVDSAVYFCARSTMIATGAMDYWGQGTSVTVSSGGGGSGGGGSGGGGSETTVTQSPASLSMAIGEKVTIRCITSTDIDDDMNWYQQKPGEPPKLLISEGNTLRPGVPSRFSSSGYGTDFVFTIENMLSEDVADYYCLQSDNLPLTFGGGTKLEIKGLAVSTISSFFPPGYQKRGRKKLLYIFKQPFMRPVQTTQEEDGCSCRFPEEEEGGCELRVKFSRSADAPAYQQGQNQLYNELNLGRREEYDVLDKRRGRDPEMGGKPRRKNPQEGLYNELQKDKMAEAYSEIGMKGERRRGKGHDGLYQGLSTATKDTYDALHMQALPPR

SEQ ID NO: 5974 - protein, 434 aa, Artificial Sequence
  Description of Artificial Sequence: Synthetic Chimeric Antigen Receptor sequence
MALPVTALLLPLALLLHAARPQVQLQQSGAELARPGASVKLSCKASGYTFTSYWMQWVKQRPGQGLEWIGAIYPGDGDTRYTQKFKGKATLTADKSSSTAYMQLSSLASEDSAVYYCARGKVYYGSNPFAYWGQGTLVTVSAGGGGSGGGGSGGGGSDIQMTQSSSYLSVSLGGRVTITCKASDHINNWLAWYQQKPGNAPRLLISGATSLETGVPSRFSGSGSGKDYTLSITSLQTEDVATYYCQQYWSTPWTFGGGTKLEIKGLAVSTISSFFPPGYQKRGRKKLLYIFKQPFMRPVQTTQEEDGCSCRFPEEEEGGCELRVKFSRSADAPAYQQGQNQLYNELNLGRREEYDVLDKRRGRDPEMGGKPRRKNPQEGLYNELQKDKMAEAYSEIGMKGERRRGKGHDGLYQGLSTATKDTYDALHMQALPPR

SEQ ID NO: 5975 - protein, 434 aa, Artificial Sequence
  Description of Artificial Sequence: Synthetic Chimeric Antigen Receptor sequence
MALPVTALLLPLALLLHAARPQVQLQQSGPELVKPGASVKISCKASGYAFSSSWMNWVKQRPGQGLEWIGRIYPGDGDTKYNGKFKGKATLTADKSSSTAYMQLSSLTSVDSAVYFCARSTMIATGAMDYWGQGTSVTVSSGGGGSGGGGSGGGGSDIVMTQSHKFMSTSVGDRVSITCKASQDVSTAVAWYQQKPGQSPKLLIYSASYRYTGVPDRFTGSGSGTDFTFTISSVQAEDLAVYYCQQHYSTPPYTFGGGTKLEIKGLAVSTISSFFPPGYQKRGRKKLLYIFKQPFMRPVQTTQEEDGCSCRFPEEEEGGCELRVKFSRSADAPAYQQGQNQLYNELNLGRREEYDVLDKRRGRDPEMGGKPRRKNPQEGLYNELQKDKMAEAYSEIGMKGERRRGKGHDGLYQGLSTATKDTYDALHMQALPPR

SEQ ID NO: 5976 - protein, 459 aa, Artificial Sequence
  Description of Artificial Sequence: Synthetic Chimeric Antigen Receptor sequence
MGWSSIILFLVATATGVHSQVQLQQPGAELVRPGASVKLSCKASGYSFTTYWMNWVKQRPGQGLEWIGMIHPSDSETRLNQKFKDKATLTVDKSSSTAYMQLSSPTSEDSAVYYCARSTMIATRAMDYWGQGTSVTVSGGGGSGGGGSGGGGSDIVMTQSQKSMSTSVGDRVSITCKASQDVITGVAWYQQKPGQSPKLLIYSASYRYTGVPDRFTGSGSGTDFTFTISNVQAEDLAVYYCQQHYSTPLTFGAGTKLELKLEPKSCDKTHTCPPCPDPKFWVLVVVGGVLACYSLLVTVAFIIFWVRSKRSRLLHSDYMNMTPRRPGPTRKHYQPYAPPRDFAAYRSRVKFSRSADAPAYQQGQNQLYNELNLGRREEYDVLDKRRGRDPEMGGKPRRKNPQEGLYNELQKDKMAEAYSEIGMKGERRRGKGHDGLYQGLSTATKDTYDALHMQALPPR

SEQ ID NO: 5977 - protein, 485 aa, Artificial Sequence
  Description of Artificial Sequence: Synthetic Chimeric Antigen Receptor sequence
MALPVTALLLPLALLLHAARPEVKLLESGGGLVQPGGSLKLSCAASGFDFSRYWMSWVRQAPGKGLEWIGEINPDSSTINYTPSLKDKFIISRDNAKNTLYLQMSKVRSEDTALYYCARPDGNYWYFDVWGAGTTVTVSSGGGGSGGGGSGGGGSDIVMTQSHKFMSTSVGDRVSITCKASQDVGIAVAWYQQKPGQSPKLLIYWASTRHTGVPDRFTGSGSGTDFTLTISNVQSEDLADYFCQQYSSYPYTFGGGTKLEIKTTTPAPRPPTPAPTIASQPLSLRPEACRPAAGGAVHTRGLDFACDIYIWAPLAGTCGVLLLSLVITLYCKRGRKKLLYIFKQPFMRPVQTTQEEDGCSCRFPEEEEGGCELRVKFSRSADAPAYQQGQNQLYNELNLGRREEYDVLDKRRGRDPEMGGKPRRKNPQEGLYNELQKDKMAEAYSEIGMKGERRRGKGHDGLYQGLSTATKDTYDALHMQALPPR

SEQ ID NO: 5978 - protein, 486 aa, Artificial Sequence
  Description of Artificial Sequence: Synthetic Chimeric Antigen Receptor sequence
MALPVTALLLPLALLLHAARPQVQLQQPGAELVRPGASVKLSCKASGYSFTTYWMNWVKQRPGQGLEWIGMIHPSDSETRLNQKFKDKATLTVDKSSSTAYMQLSSPTSEDSAVYYCARSTMIATRAMDYWGQGTSVTVSSGGGGSGGGGSGGGGSDIVMTQSQKSMSTSVGDRVSITCKASQDVITGVAWYQQKPGQSPKLLIYSASYRYTGVPDRFTGSGSGTDFTFTISNVQAEDLAVYYCQQHYSTPLTFGAGTKLELKTTTPAPRPPTPAPTIASQPLSLRPEACRPAAGGAVHTRGLDFACDIYIWAPLAGTCGVLLLSLVITLYCKRGRKKLLYIFKQPFMRPVQTTQEEDGCSCRFPEEEEGGCELRVKFSRSADAPAYQQGQNQLYNELNLGRREEYDVLDKRRGRDPEMGGKPRRKNPQEGLYNELQKDKMAEAYSEIGMKGERRRGKGHDGLYQGLSTATKDTYDALHMQALPPR

SEQ ID NO: 5979 - protein, 487 aa, Artificial Sequence
  Description of Artificial Sequence: Synthetic Chimeric Antigen Receptor sequence
MALPVTALLLPLALLLHAARPQVQLQQSGPELVKPGASVKISCKASGYAFSSSWMNWVKQRPGQGLEWIGRIYPGDGDTKYNGKFKGKATLTADKSSSTAYMQLSSLTSVDSAVYFCARSTMIATGAMDYWGQGTSVTVSSGGGGSGGGGSGGGGSDIVMTQSHKFMSTSVGDRVSITCKASQDVSTAVAWYQQKPGQSPKLLIYSASYRYTGVPDRFTGSGSGTDFTFTISSVQAEDLAVYYCQQHYSTPPYTFGGGTKLEIKTTTPAPRPPTPAPTIASQPLSLRPEACRPAAGGAVHTRGLDFACDIYIWAPLAGTCGVLLLSLVITLYCKRGRKKLLYIFKQPFMRPVQTTQEEDGCSCRFPEEEEGGCELRVKFSRSADAPAYQQGQNQLYNELNLGRREEYDVLDKRRGRDPEMGGKPRRKNPQEGLYNELQKDKMAEAYSEIGMKGERRRGKGHDGLYQGLSTATKDTYDALHMQALPPR

SEQ ID NO: 5980 - protein, 488 aa, Artificial Sequence
  Description of Artificial Sequence: Synthetic Chimeric Antigen Receptor sequence
MALPVTALLLPLALLLHAARPGSDIQMTQSPSSLSASVGDRVTITCRASQGIRNNLAWYQQKPGKAPKRLIYAASNLQSGVPSRFTGSGSGTEFTLIVSSLQPEDFATYYCLQHHSYPLTSGGGTKVEIKRTGSTSGSGKPGSGEGSEVQVLESGGGLVQPGGSLRLSCAASGFTFSSYAMSWVRQAPGKGLEWVSAISGSGGSTNYADSVKGRFTISRDNSKNTLYLQMNSLRAEDTAVYYCAGSSGWSEYWGQGTLVTVSSASTTTPAPRPPTPAPTIASQPLSLRPEACRPAAGGAVHTRGLDFACDIYIWAPLAGTCGVLLLSLVITLYCKRGRKKLLYIFKQPFMRPVQTTQEEDGCSCRFPEEEEGGCELRVKFSRSADAPAYKQGQNQLYNELNLGRREEYDVLDKRRGRDPEMGGKPRRKNPQEGLYNELQKDKMAEAYSEIGMKGERRRGKGHDGLYQGLSTATKDTYDALHMQALPPR

SEQ ID NO: 5981 - protein, 647 aa, Artificial Sequence
  Description of Artificial Sequence: Synthetic Chimeric Antigen Receptor sequence
MALPVTALLLPLALLLHAARPEVKLLESGGGLVQPGGSLKLSCAASGFDFSRYWMSWVRQAPGKGLEWIGEINPDSSTINYTPSLKDKFIISRDNAKNTLYLQMSKVRSEDTALYYCARPDGNYWYFDVWGAGTTVTVSSGGGGSGGGGSGGGGSDIVMTQSHKFMSTSVGDRVSITCKASQDVGIAVAWYQQKPGQSPKLLIYWASTRHTGVPDRFTGSGSGTDFTLTISNVQSEDLADYFCQQYSSYPYTFGGGTKLEIKEPKSPDKTHTCPPCPAPPVAGPSVFLFPPKPKDTLMIARTPEVTCVVVDVSHEDPEVKFNWYVDGVEVHNAKTKPREEQYNSTYRVVSVLTVLHQDWLNGKEYKCKVSNKALPAPIEKTISKAKGQPREPQVYTLPPSRDELTKNQVSLTCLVKGFYPSDIAVEWESNGQPENNYKTTPPVLDSDGSFFLYSKLTVDKSRWQQGNVFSCSVMHEALHNHYTQKSLSLSPGKKRGRKKLLYIFKQPFMRPVQTTQEEDGCSCRFPEEEEGGCELRVKFSRSADAPAYQQGQNQLYNELNLGRREEYDVLDKRRGRDPEMGGKPRRKNPQEGLYNELQKDKMAEAYSEIGMKGERRRGKGHDGLYQGLSTATKDTYDALHMQALPPR

SEQ ID NO: 5982 - protein, 648 aa, Artificial Sequence
  Description of Artificial Sequence: Synthetic Chimeric Antigen Receptor sequence
MALPVTALLLPLALLLHAARPQVQLQQPGAELVRPGASVKLSCKASGYSFTTYWMNWVKQRPGQGLEWIGMIHPSDSETRLNQKFKDKATLTVDKSSSTAYMQLSSPTSEDSAVYYCARSTMIATRAMDYWGQGTSVTVSSGGGGSGGGGSGGGGSDIVMTQSQKSMSTSVGDRVSITCKASQDVITGVAWYQQKPGQSPKLLIYSASYRYTGVPDRFTGSGSGTDFTFTISNVQAEDLAVYYCQQHYSTPLTFGAGTKLELKEPKSPDKTHTCPPCPAPPVAGPSVFLFPPKPKDTLMIARTPEVTCVVVDVSHEDPEVKFNWYVDGVEVHNAKTKPREEQYNSTYRVVSVLTVLHQDWLNGKEYKCKVSNKALPAPIEKTISKAKGQPREPQVYTLPPSRDELTKNQVSLTCLVKGFYPSDIAVEWESNGQPENNYKTTPPVLDSDGSFFLYSKLTVDKSRWQQGNVFSCSVMHEALHNHYTQKSLSLSPGKKRGRKKLLYIFKQPFMRPVQTTQEEDGCSCRFPEEEEGGCELRVKFSRSADAPAYQQGQNQLYNELNLGRREEYDVLDKRRGRDPEMGGKPRRKNPQEGLYNELQKDKMAEAYSEIGMKGERRRGKGHDGLYQGLSTATKDTYDALHMQALPPR

SEQ ID NO: 5983 - protein, 648 aa, Artificial Sequence
  Description of Artificial Sequence: Synthetic Chimeric Antigen Receptor sequence
MALPVTALLLPLALLLHAARPQVQLQQSGPELVKPGASVKISCKASGYAFSSSWMNWVKQRPGQGLEWIGRIYPGDGDTKYNGKFKGKATLTADKSSSTAYMQLSSLTSVDSAVYFCARSTMIATGAMDYWGQGTSVTVSSGGGGSGGGGSGGGGSETTVTQSPASLSMAIGEKVTIRCITSTDIDDDMNWYQQKPGEPPKLLISEGNTLRPGVPSRFSSSGYGTDFVFTIENMLSEDVADYYCLQSDNLPLTFGGGTKLEIKEPKSPDKTHTCPPCPAPPVAGPSVFLFPPKPKDTLMIARTPEVTCVVVDVSHEDPEVKFNWYVDGVEVHNAKTKPREEQYNSTYRVVSVLTVLHQDWLNGKEYKCKVSNKALPAPIEKTISKAKGQPREPQVYTLPPSRDELTKNQVSLTCLVKGFYPSDIAVEWESNGQPENNYKTTPPVLDSDGSFFLYSKLTVDKSRWQQGNVFSCSVMHEALHNHYTQKSLSLSPGKKRGRKKLLYIFKQPFMRPVQTTQEEDGCSCRFPEEEEGGCELRVKFSRSADAPAYQQGQNQLYNELNLGRREEYDVLDKRRGRDPEMGGKPRRKNPQEGLYNELQKDKMAEAYSEIGMKGERRRGKGHDGLYQGLSTATKDTYDALHMQALPPR

SEQ ID NO: 5984 - protein, 649 aa, Artificial Sequence
  Description of Artificial Sequence: Synthetic Chimeric Antigen Receptor sequence
MALPVTALLLPLALLLHAARPQVQLQQSGAELARPGASVKLSCKASGYTFTSYWMQWVKQRPGQGLEWIGAIYPGDGDTRYTQKFKGKATLTADKSSSTAYMQLSSLASEDSAVYYCARGKVYYGSNPFAYWGQGTLVTVSAGGGGSGGGGSGGGGSDIQMTQSSSYLSVSLGGRVTITCKASDHINNWLAWYQQKPGNAPRLLISGATSLETGVPSRFSGSGSGKDYTLSITSLQTEDVATYYCQQYWSTPWTFGGGTKLEIKEPKSPDKTHTCPPCPAPPVAGPSVFLFPPKPKDTLMIARTPEVTCVVVDVSHEDPEVKFNWYVDGVEVHNAKTKPREEQYNSTYRVVSVLTVLHQDWLNGKEYKCKVSNKALPAPIEKTISKAKGQPREPQVYTLPPSRDELTKNQVSLTCLVKGFYPSDIAVEWESNGQPENNYKTTPPVLDSDGSFFLYSKLTVDKSRWQQGNVFSCSVMHEALHNHYTQKSLSLSPGKKRGRKKLLYIFKQPFMRPVQTTQEEDGCSCRFPEEEEGGCELRVKFSRSADAPAYQQGQNQLYNELNLGRREEYDVLDKRRGRDPEMGGKPRRKNPQEGLYNELQKDKMAEAYSEIGMKGERRRGKGHDGLYQGLSTATKDTYDALHMQALPPR

SEQ ID NO: 5985 - protein, 649 aa, Artificial Sequence
  Description of Artificial Sequence: Synthetic Chimeric Antigen Receptor sequence
MALPVTALLLPLALLLHAARPQVQLQQSGPELVKPGASVKISCKASGYAFSSSWMNWVKQRPGQGLEWIGRIYPGDGDTKYNGKFKGKATLTADKSSSTAYMQLSSLTSVDSAVYFCARSTMIATGAMDYWGQGTSVTVSSGGGGSGGGGSGGGGSDIVMTQSHKFMSTSVGDRVSITCKASQDVSTAVAWYQQKPGQSPKLLIYSASYRYTGVPDRFTGSGSGTDFTFTISSVQAEDLAVYYCQQHYSTPPYTFGGGTKLEIKEPKSPDKTHTCPPCPAPPVAGPSVFLFPPKPKDTLMIARTPEVTCVVVDVSHEDPEVKFNWYVDGVEVHNAKTKPREEQYNSTYRVVSVLTVLHQDWLNGKEYKCKVSNKALPAPIEKTISKAKGQPREPQVYTLPPSRDELTKNQVSLTCLVKGFYPSDIAVEWESNGQPENNYKTTPPVLDSDGSFFLYSKLTVDKSRWQQGNVFSCSVMHEALHNHYTQKSLSLSPGKKRGRKKLLYIFKQPFMRPVQTTQEEDGCSCRFPEEEEGGCELRVKFSRSADAPAYQQGQNQLYNELNLGRREEYDVLDKRRGRDPEMGGKPRRKNPQEGLYNELQKDKMAEAYSEIGMKGERRRGKGHDGLYQGLSTATKDTYDALHMQALPPR

SEQ ID NO: 5986 - protein, 271 aa, Artificial Sequence
  Description of Artificial Sequence: Synthetic polypeptide
MALPVTALLLPLALLLHAARPDIQMTQTTSSLSASLGDRVTISCRASQDISKYLNWYQQKPDGTVKLLIYHTSRLHSGVPSRFSGSGSGTDYSLTISNLEQEDIATYFCQQGNTLPYTFGGGTKLEITGGGGSGGGGSGGGGSEVKLQESGPGLVAPSQSLSVTCTVSGVSLPDYGVSWIRQPPRKGLEWLGVIWGSETTYYNSALKSRLTIIKDNSKSQVFLKMNSLQTDDTAIYYCAKHYYYGGSYAMDYWGQGTSVTVSSHHHHHHHH

SEQ ID NO: 5987 - protein, 719 aa, Artificial Sequence
  Description of Artificial Sequence: Synthetic Chimeric Antigen Receptor sequence
ADAPAYQQGQNQLYNELNLGRREEYDVLDKRRGRDPEMGGKPRRKNPQEGLYNELQKDKMAEAYSEIGMKGERRRGKGHDGLYQGLSTATKDTYDALHMQALPPRRAEGRGSLLTCGDVEENPGPMAVPTQVLGLLLLWLTDARCDIQMTQSPSSLSASVGDRVTITCRASEDIYFNLVWYQQKPGKAPKLLIYDTNRLADGVPSRFSGSGSGTQYTLTISSLQPEDFATYYCQHYKNYPLTFGQGTKLEIKRSGGGGSGGGGSGGGGSRSEVQLVESGGGLVQPGGSLRLSCAASGFTLSNYGMHWIRQAPGKGLEWVSSISLNGGSTYYRDSVKGRFTISRDNAKSTLYLQMNSLRAEDTAVYYCAAQDAYTGGYFDYWGQGTLVTVSSMPCPAPPVAGPSVFLFPPKPKDTLMIARTPEVTCVVVDVSHEDPEVKFNWYVDGVEVHNAKTKPREEQYNSTYRVVSVLTVLHQDWLNGKEYKCKVSNKALPAPIEKTISKAKPCPAPPVAGPSVFLFPPKPKDTLMIARTPEVTCVVVDVSHEDPEVKFNWYVDGVEVHNAKTKPREEQYNSTYRVVSVLTVLHQDWLNGKEYKCKVSNKALPAPIEKTISKAKMALIVLGGVAGLLLFIGLGIFFMALIVLGGVAGLLLFIGLGIFFCVRCRHRRRSGGGGSSHIQIPPGLTELLQGYTVEVLRQQPPDLVEFAVEYFTRLREARA

SEQ ID NO: 5988 - protein, 671 aa, Artificial Sequence
  Description of Artificial Sequence: Synthetic Chimeric Antigen Receptor sequence
MLTSLLCWMALCLLGADHADACPYSNPSLCSGGGGSELPTQGTFSNVSTNVSPAKPTTTACPYSNPSLCSGGGGSPAPRPPTPAPTIASQPLSLRPEACRPAAGGAVHTRGLDFACDIYIWAPLAGTCGVLLLSLVITLYCNHRNRRRVCKCPRPVVRAEGRGSLLTCGDVEENPGPMETDTLLLWVLLLWVPGSTGDIQMTQTTSSLSASLGDRVTISCRASQDISKYLNWYQQKPDGTVKLLIYHTSRLHSGVPSRFSGSGSGTDYSLTISNLEQEDIATYFCQQGNTLPYTFGGGTKLEITKAGGGGSGGGGSGGGGSGGGGSEVKLQESGPGLVAPSQSLSVTCTVSGVSLPDYGVSWIRQPPRKGLEWLGVIWGSETTYYNSALKSRLTIIKDNSKSQVFLKMNSLQTDDTAIYYCAKHYYYGGSYAMDYWGQGTSVTVSSDPTTTPAPRPPTPAPTIASQPLSLRPEACRPAAGGAVHTRGLDFACDIYIWAPLAGTCGVLLLSLVITLYCKRGRKKLLYIFKQPFMRPVQTTQEEDGCSCRFPEEEEGGCELRVKFSRSADAPAYQQGQNQLYNELNLGRREEYDVLDKRRGRDPEMGGKPRRKNPQEGLYNELQKDKMAEAYSEIGMKGERRRGKGHDGLYQGLSTATKDTYDALHMQALPPR

SEQ ID NO: 5989 - protein, 461 aa, Artificial Sequence
  Description of Artificial Sequence: Synthetic Chimeric Antigen Receptor sequence
EVQVLESGGGLVQPGGSLRLSCAASGFTFSSYAMSWVRQAPGKGLEWVSAISGSGGSTNYADSVKGRFTISRDNSKNTLYLQMNSLRAEDTAVYYCAGSSGWSEYWGQGTLVTVSSGGGGSGGGGSGGGGSDIQMTQSPSSLSASVGDRVTITCRASQGIRNNLAWYQQKPGKAPKRLIYAASNLQSGVPSRFTGSGSGTEFTLIVSSLQPEDFATYYCLQHHSYPLTSGGGTKVEIKTTTPAPRPPTPAPTIASQPLSLRPEACRPAAGGAVHTRGLDFACDIYIWAPLAGTCGVLLLSLVITLYCKRGRKKLLYIFKQPFMRPVQTTQEEDGCSCRFPEEEEGGCELRVKFSRSADAPAYQQGQNQLYNELNLGRREEYDVLDKRRGRDPEMGGKPRRKNPQEGLYNELQKDKMAEAYSEIGMKGERRRGKGHDGLYQGLSTATKDTYDALHMQALPPR

SEQ ID NO: 5990 - protein, 554 aa, Artificial Sequence
  Description of Artificial Sequence: Synthetic Chimeric Antigen Receptor sequence
MKHLWFFLLLVAAPRWVLSQVQLQESGPGLVKPSETLSLTCTVSGGSISSSSYYWGWIRQPPGKGLEWIGSIYYSGSTYYNPSLKSRVTISVDTSKNQFSLKLSSVTAADTAVYYCARLPMVTMSFDYWGQGTLVTVSRGGGGSGGGGSGGGGSMASYVLTQPPSVSVAPGKTARITCGGNNIGSKSVHWYQQKPGQAPVLVIYYDSDRPSGIPERFSGSNSGNTATLTISRVEAGDEADYYCQVWDSSSDHVVFGGGTKLTVLGQPKAAPSVTLFPPSSEELQANKATLVCLISDFYPGAVTVAWKADSSPVKAGVETTTPSKQSNNKYAASSYLSLTPEQWKSHRSYSCQVTHEGSTVEKTVAPTECSTRFWVLVVVGGVLACYSLLVTVAFIIFWVRSKRSRLLHSDYMNMTPRRPGPTRKHYQPYAPPRDFAAYRSLRVKFSRSADAPAYQQGQNQLYNELNLGRREEYDVLDKRRGRDPEMGGKPQRRKNPQEGLYNELQKDKMAEAYSEIGMKGERRRGKGHDGLYQGLSTATKDTYDALHMQALPPR

SEQ ID NO: 5991 - protein, 563 aa, Artificial Sequence
  Description of Artificial Sequence: Synthetic Chimeric Antigen Receptor sequence
MKHLWFFLLLVAAPRWVLSQVQLQESGPGLVKPSETLSLTCTVSGGSISSSSYYWGWIRQPPGKGLEWIGSIYYSGSTYYNPSLKSRVTISVDTSKNQFSLKLSSVTAADTAVYYCARLPMVTMSFDYWGQGTLVTVSRGGGGSGGGGSGGGGSMASYVLTQPPSVSVAPGKTARITCGGNNIGSKSVHWYQQKPGQAPVLVIYYDSDRPSGIPERFSGSNSGNTATLTISRVEAGDEADYYCQVWDSSSDHVVFGGGTKLTVLGQPKAAPSVTLFPPSSEELQANKATLVCLISDFYPGAVTVAWKADSSPVKAGVETTTPSKQSNNKYAASSYLSLTPEQWKSHRSYSCQVTHEGSTVEKTVAPTECSTRFWVLVVVGGVLACYSLLVTVAFIIFWVRLRVKFSRSADAPAYQQGQNQLYNELNLGRREEYDVLDKRRGRDPEMGGKPQRRKNPQEGLYNELQKDKMAEAYSEIGMKGERRRGKGHDGLYQGLSTATKDTYDALHMQALPPRRSQCMWPRETQLLLEVPPSTEDARSCQFPEEERGERSAEEKGRLGDLWV

SEQ ID NO: 5992 - protein, 603 aa, Artificial Sequence
  Description of Artificial Sequence: Synthetic Chimeric Antigen Receptor sequence
MKHLWFFLLLVAAPRWVLSQVQLQESGPGLVKPSETLSLTCTVSGGSISSSSYYWGWIRQPPGKGLEWIGSIYYSGSTYYNPSLKSRVTISVDTSKNQFSLKLSSVTAADTAVYYCARLPMVTMSFDYWGQGTLVTVSRGGGGSGGGGSGGGGSMASYVLTQPPSVSVAPGKTARITCGGNNIGSKSVHWYQQKPGQAPVLVIYYDSDRPSGIPERFSGSNSGNTATLTISRVEAGDEADYYCQVWDSSSDHVVFGGGTKLTVLGQPKAAPSVTLFPPSSEELQANKATLVCLISDFYPGAVTVAWKADSSPVKAGVETTTPSKQSNNKYAASSYLSLTPEQWKSHRSYSCQVTHEGSTVEKTVAPTECSTRFWVLVVVGGVLACYSLLVTVAFIIFWVRSKRSRLLHSDYMNMTPRRPGPTRKHYQPYAPPRDFAAYRSLRVKFSRSADAPAYQQGQNQLYNELNLGRREEYDVLDKRRGRDPEMGGKPQRRKNPQEGLYNELQKDKMAEAYSEIGMKGERRRGKGHDGLYQGLSTATKDTYDALHMQALPPRRSQCMWPRETQLLLEVPPSTEDARSCQFPEEERGERSAEEKGRLGDLWV

SEQ ID NO: 5993 - protein, 603 aa, Artificial Sequence [sequence omitted]

SEQ ID NO: 5994 - protein, 603 aa, Artificial Sequence [sequence omitted]

SEQ ID NO: 5995 - protein, 484 aa, Artificial Sequence
  Description of Artificial Sequence: Synthetic Chimeric Antigen Receptor sequence
MALPVTALLLPLALLLHAARPDIQMTQSPSSLSASVGDRVTITCRASQGIRNNLAWYQQKPGKAPKRLIYAASNLQSGVPSRFTGSGSGTEFTLIVSSLQPEDFATYYCLQHHSYPLTSGGGTKVEIKRTGSTSGSGKPGSGEGSEVQVLESGGGLVQPGGSLRLSCAASGFTFSSYAMSWVRQAPGKGLEWVSAISGSGGSTNYADSVKGRFTISRDNSKNTLYLQMNSLRAEDTAVYYCAGSSGWSEYWGQGTLVTVSSTTTPAPRPPTPAPTIASQPLSLRPEACRPAAGGAVHTRGLDFACDIYIWAPLAGTCGVLLLSLVITLYCKRGRKKLLYIFKQPFMRPVQTTQEEDGCSCRFPEEEEGGCELRVKFSRSADAPAYKQGQNQLYNELNLGRREEYDVLDKRRGRDPEMGGKPRRKNPQEGLYNELQKDKMAEAYSEIGMKGERRRGKGHDGLYQGLSTATKDTYDALHMQALPPR

SEQ ID NO: 5996 - protein, 491 aa, Artificial Sequence
  Description of Artificial Sequence: Synthetic Chimeric Antigen Receptor sequence
MALPVTALLLPLALLLHAARPGSEIQLQQSGAELVKPGASVKLSCTGSGFNIEDYYIHWVKQRTEQGLEWIGRIDPENDETKYGPIFQGRATITADTSSNTVYLQLSSLTSEDTAVYYCAFRGGVYWGPGTTLTVSSGGGGSGGGGSGGGGSHMDVVMTQSPLTLSVAIGQSASISCKSSQSLLDSDGKTYLNWLLQRPGQSPKRLISLVSKLDSGVPDRFTGSGSGTDFTLRISRVEAEDLGIYYCWQGTHFPGTFGGGTKLEIKASTTTPAPRPPTPAPTIASQPLSLRPEACRPAAGGAVHTRGLDFACDIYIWAPLAGTCGVLLLSLVITLYCKRGRKKLLYIFKQPFMRPVQTTQEEDGCSCRFPEEEEGGCELRVKFSRSADAPAYKQGQNQLYNELNLGRREEYDVLDKRRGRDPEMGGKPRRKNPQEGLYNELQKDKMAEAYSEIGMKGERRRGKGHDGLYQGLSTATKDTYDALHMQALPPR

SEQ ID NO: 5997 - protein, 490 aa, Artificial Sequence
  Description of Artificial Sequence: Synthetic Chimeric Antigen Receptor sequence
MALPVTALLLPLALLLHAARPDVVMTQSPDSLAVSLGERATINCKSSQSLLDSDGKTYLNWLQQKPGQPPKRLISLVSKLDSGVPDRFSGSGSGTDFTLTISSLQAEDVAVYYCWQGTHFPGTFGGGTKVEIKGGGGSGGGGSGGGGSGGGGSEIQLVQSGAEVKKPGATVKISCKGSGFNIEDYYIHWVQQAPGKGLEWMGRIDPENDETKYGPIFQGRVTITADTSTNTVYMELSSLRSEDTAVYYCAFRGGVYWGQGTTVTVSSTTTPAPRPPTPAPTIASQPLSLRPEACRPAAGGAVHTRGLDFACDIYIWAPLAGTCGVLLLSLVITLYCKRGRKKLLYIFKQPFMRPVQTTQEEDGCSCRFPEEEEGGCELRVKFSRSADAPAYKQGQNQLYNELNLGRREEYDVLDKRRGRDPEMGGKPRRKNPQEGLYNELQKDKMAEAYSEIGMKGERRRGKGHDGLYQGLSTATKDTYDALHMQALPPR

SEQ ID NO: 5998 - protein, 490 aa, Artificial Sequence
  Description of Artificial Sequence: Synthetic Chimeric Antigen Receptor sequence
MALPVTALLLPLALLLHAARPEIQLVQSGAEVKKPGESLRISCKGSGFNIEDYYIHWVRQMPGKGLEWMGRIDPENDETKYGPIFQGHVTISADTSINTVYLQWSSLKASDTAMYYCAFRGGVYWGQGTTVTVSSGGGGSGGGGSGGGGSGGGGSDVVMTQSPLSLPVTLGQPASISCKSSQSLLDSDGKTYLNWLQQRPGQSPRRLISLVSKLDSGVPDRFSGSGSGTDFTLKISRVEAEDVGVYYCWQGTHFPGTFGGGTKVEIKTTTPAPRPPTPAPTIASQPLSLRPEACRPAAGGAVHTRGLDFACDIYIWAPLAGTCGVLLLSLVITLYCKRGRKKLLYIFKQPFMRPVQTTQEEDGCSCRFPEEEEGGCELRVKFSRSADAPAYKQGQNQLYNELNLGRREEYDVLDKRRGRDPEMGGKPRRKNPQEGLYNELQKDKMAEAYSEIGMKGERRRGKGHDGLYQGLSTATKDTYDALHMQALPPR

SEQ ID NO: 5999 - protein, 490 aa, Artificial Sequence
  Description of Artificial Sequence: Synthetic Chimeric Antigen Receptor sequence
MALPVTALLLPLALLLHAARPDVVMTQSPLSLPVTLGQPASISCKSSQSLLDSDGKTYLNWLQQRPGQSPRRLISLVSKLDSGVPDRFSGSGSGTDFTLKISRVEAEDVGVYYCWQGTHFPGTFGGGTKVEIKGGGGSGGGGSGGGGSGGGGSEIQLVQSGAEVKKPGESLRISCKGSGFNIEDYYIHWVRQMPGKGLEWMGRIDPENDETKYGPIFQGHVTISADTSINTVYLQWSSLKASDTAMYYCAFRGGVYWGQGTTVTVSSTTTPAPRPPTPAPTIASQPLSLRPEACRPAAGGAVHTRGLDFACDIYIWAPLAGTCGVLLLSLVITLYCKRGRKKLLYIFKQPFMRPVQTTQEEDGCSCRFPEEEEGGCELRVKFSRSADAPAYKQGQNQLYNELNLGRREEYDVLDKRRGRDPEMGGKPRRKNPQEGLYNELQKDKMAEAYSEIGMKGERRRGKGHDGLYQGLSTATKDTYDALHMQALPPR

SEQ ID NO: 6000 - protein, 490 aa, Artificial Sequence
  Description of Artificial Sequence: Synthetic Chimeric Antigen Receptor sequence
MALPVTALLLPLALLLHAARPEIQLVQSGAEVKKPGATVKISCKGSGFNIEDYYIHWVQQAPGKGLEWMGRIDPENDETKYGPIFQGRVTITADTSTNTVYMELSSLRSEDTAVYYCAFRGGVYWGQGTTVTVSSGGGGSGGGGSGGGGSGGGGSDVVMTQSPLSLPVTLGQPASISCKSSQSLLDSDGKTYLNWLQQRPGQSPRRLISLVSKLDSGVPDRFSGSGSGTDFTLKISRVEAEDVGVYYCWQGTHFPGTFGGGTKVEIKTTTPAPRPPTPAPTIASQPLSLRPEACRPAAGGAVHTRGLDFACDIYIWAPLAGTCGVLLLSLVITLYCKRGRKKLLYIFKQPFMRPVQTTQEEDGCSCRFPEEEEGGCELRVKFSRSADAPAYKQGQNQLYNELNLGRREEYDVLDKRRGRDPEMGGKPRRKNPQEGLYNELQKDKMAEAYSEIGMKGERRRGKGHDGLYQGLSTATKDTYDALHMQALPPR

SEQ ID NO: 6001 - protein, 490 aa, Artificial Sequence
  Description of Artificial Sequence: Synthetic Chimeric Antigen Receptor sequence
MALPVTALLLPLALLLHAARPEIQLVQSGAEVKKPGESLRISCKGSGFNIEDYYIHWVRQMPGKGLEWMGRIDPENDETKYGPIFQGHVTISADTSINTVYLQWSSLKASDTAMYYCAFRGGVYWGQGTTVTVSSGGGGSGGGGSGGGGSGGGGSDVVMTQSPDSLAVSLGERATINCKSSQSLLDSDGKTYLNWLQQKPGQPPKRLISLVSKLDSGVPDRFSGSGSGTDFTLTISSLQAEDVAVYYCWQGTHFPGTFGGGTKVEIKTTTPAPRPPTPAPTIASQPLSLRPEACRPAAGGAVHTRGLDFACDIYIWAPLAGTCGVLLLSLVITLYCKRGRKKLLYIFKQPFMRPVQTTQEEDGCSCRFPEEEEGGCELRVKFSRSADAPAYKQGQNQLYNELNLGRREEYDVLDKRRGRDPEMGGKPRRKNPQEGLYNELQKDKMAEAYSEIGMKGERRRGKGHDGLYQGLSTATKDTYDALHMQALPPR

SEQ ID NO: 6002 - protein, 490 aa, Artificial Sequence
  Description of Artificial Sequence: Synthetic Chimeric Antigen Receptor sequence
MALPVTALLLPLALLLHAARPDVVMTQSPDSLAVSLGERATINCKSSQSLLDSDGKTYLNWLQQKPGQPPKRLISLVSKLDSGVPDRFSGSGSGTDFTLTISSLQAEDVAVYYCWQGTHFPGTFGGGTKVEIKGGGGSGGGGSGGGGSGGGGSEIQLVQSGAEVKKPGESLRISCKGSGFNIEDYYIHWVRQMPGKGLEWMGRIDPENDETKYGPIFQGHVTISADTSINTVYLQWSSLKASDTAMYYCAFRGGVYWGQGTTVTVSSTTTPAPRPPTPAPTIASQPLSLRPEACRPAAGGAVHTRGLDFACDIYIWAPLAGTCGVLLLSLVITLYCKRGRKKLLYIFKQPFMRPVQTTQEEDGCSCRFPEEEEGGCELRVKFSRSADAPAYKQGQNQLYNELNLGRREEYDVLDKRRGRDPEMGGKPRRKNPQEGLYNELQKDKMAEAYSEIGMKGERRRGKGHDGLYQGLSTATKDTYDALHMQALPPR

SEQ ID NO: 6003 - protein, 490 aa, Artificial Sequence
  Description of Artificial Sequence: Synthetic Chimeric Antigen Receptor sequence
MALPVTALLLPLALLLHAARPDVVMTQSPLSLPVTLGQPASISCKSSQSLLDSDGKTYLNWLQQRPGQSPRRLISLVSKLDSGVPDRFSGSGSGTDFTLKISRVEAEDVGVYYCWQGTHFPGTFGGGTKVEIKGGGGSGGGGSGGGGSGGGGSEIQLVQSGAEVKKPGATVKISCKGSGFNIEDYYIHWVQQAPGKGLEWMGRIDPENDETKYGPIFQGRVTITADTSTNTVYMELSSLRSEDTAVYYCAFRGGVYWGQGTTVTVSSTTTPAPRPPTPAPTIASQPLSLRPEACRPAAGGAVHTRGLDFACDIYIWAPLAGTCGVLLLSLVITLYCKRGRKKLLYIFKQPFMRPVQTTQEEDGCSCRFPEEEEGGCELRVKFSRSADAPAYKQGQNQLYNELNLGRREEYDVLDKRRGRDPEMGGKPRRKNPQEGLYNELQKDKMAEAYSEIGMKGERRRGKGHDGLYQGLSTATKDTYDALHMQALPPR

SEQ ID NO: 6004 - protein, 487 aa, Artificial Sequence
  Description of Artificial Sequence: Synthetic Chimeric Antigen Receptor sequence
MALPVTALLLPLALLLHAARPEIQLQQSGAELVKPGASVKLSCTGSGFNIEDYYIHWVKQRTEQGLEWIGRIDPENDETKYGPIFQGRATITADTSSNTVYLQLSSLTSEDTAVYYCAFRGGVYWGPGTTLTVSSGGGGSGGGGSGGGGSHMDVVMTQSPLTLSVAIGQSASISCKSSQSLLDSDGKTYLNWLLQRPGQSPKRLISLVSKLDSGVPDRFTGSGSGTDFTLRISRVEAEDLGIYYCWQGTHFPGTFGGGTKLEIKTTTPAPRPPTPAPTIASQPLSLRPEACRPAAGGAVHTRGLDFACDIYIWAPLAGTCGVLLLSLVITLYCKRGRKKLLYIFKQPFMRPVQTTQEEDGCSCRFPEEEEGGCELRVKFSRSADAPAYKQGQNQLYNELNLGRREEYDVLDKRRGRDPEMGGKPRRKNPQEGLYNELQKDKMAEAYSEIGMKGERRRGKGHDGLYQGLSTATKDTYDALHMQALPPR

SEQ ID NO: 6005 - protein, 490 aa, Artificial Sequence
  Description of Artificial Sequence: Synthetic Chimeric Antigen Receptor sequence
MALPVTALLLPLALLLHAARPEIQLVQSGAEVKKPGATVKISCKGSGFNIEDYYIHWVQQAPGKGLEWMGRIDPENDETKYGPIFQGRVTITADTSTNTVYMELSSLRSEDTAVYYCAFRGGVYWGQGTTVTVSSGGGGSGGGGSGGGGSGGGGSDVVMTQSPDSLAVSLGERATINCKSSQSLLDSDGKTYLNWLQQKPGQPPKRLISLVSKLDSGVPDRFSGSGSGTDFTLTISSLQAEDVAVYYCWQGTHFPGTFGGGTKVEIKTTTPAPRPPTPAPTIASQPLSLRPEACRPAAGGAVHTRGLDFACDIYIWAPLAGTCGVLLLSLVITLYCKRGRKKLLYIFKQPFMRPVQTTQEEDGCSCRFPEEEEGGCELRVKFSRSADAPAYKQGQNQLYNELNLGRREEYDVLDKRRGRDPEMGGKPRRKNPQEGLYNELQKDKMAEAYSEIGMKGERRRGKGHDGLYQGLSTATKDTYDALHMQALPPR

SEQ ID NO: 6006 - protein, 439 aa, Artificial Sequence
  Description of Artificial Sequence: Synthetic Chimeric Antigen Receptor sequence
MALPVTALLLPLALLLHAARPDIQMTQSPSSLSASVGDRVTITCRASQGIRNNLAWYQQKPGKAPKRLIYAASNLQSGVPSRFTGSGSGTEFTLIVSSLQPEDFATYYCLQHHSYPLTSGGGTKVEIKRTGSTSGSGKPGSGEGSEVQVLESGGGLVQPGGSLRLSCAASGFTFSSYAMSWVRQAPGKGLEWVSAISGSGGSTNYADSVKGRFTISRDNSKNTLYLQMNSLRAEDTAVYYCAGSSGWSEYWGQGTLVTVSSTTTPAPRPPTPAPTIASQPLSLRPEACRPAAGGAVHTRGLDFACDIYIWAPLAGTCGVLLLSLVITLYCKRGRKKLLGGGGSGGGGSKRDHHHHHHQDKKTMMMNEEDDGNGMDELLAVLGYKVRSSEMADVAQKLEQLEVMMSNVQEDDLSQLATETVHYNPAELYTWLDSMLTDLN

SEQ ID NO: 6007 - protein, 446 aa, Artificial Sequence
  Description of Artificial Sequence: Synthetic Chimeric Antigen Receptor sequence
MALPVTALLLPLALLLHAARPDIQMTQSPSSLSASVGDRVTITCRASQGIRNNLAWYQQKPGKAPKRLIYAASNLQSGVPSRFTGSGSGTEFTLIVSSLQPEDFATYYCLQHHSYPLTSGGGTKVEIKRTGSTSGSGKPGSGEGSEVQVLESGGGLVQPGGSLRLSCAASGFTFSSYAMSWVRQAPGKGLEWVSAISGSGGSTNVADSVKGRFTISRDNSKNTLVLQMNSLRAEDTAVYYCAGSSGWSEYWGQGTLVTVSSKRGRKKLLGGGGSGGGGSASRILWHEMWHEGLEEASRLYFGERNVKGMFEVLEPLHAMMERGPQTLKETSFNQAYGRDLMEAQEWCRKYMKSGNVKDLLQAWDLYYHVFRRISKTSTTTPAPRPPTPAPTIASQPLSLRPEACRPAAGGAVHTRGLDFACDIYIWAPLAGTCGVLLLSLVITLYC

SEQ ID NO: 6008 - protein, 446 aa, Artificial Sequence
  Description of Artificial Sequence: Synthetic Chimeric Antigen Receptor sequence
MALPVTALLLPLALLLHAARPDIQMTQSPSSLSASVGDRVTITCRASQGIRNNLAWYQQKPGKAPKRLIYAASNLQSGVPSRFTGSGSGTEFTLIVSSLQPEDFATYYCLQHHSYPLTSGGGTKVEIKRTGSTSGSGKPGSGEGSEVQVLESGGGLVQPGGSLRLSCAASGFTFSSYAMSWVRQAPGKGLEWVSAISGSGGSTNYADSVKGRFTISRDNSKNTLYLQMNSLRAEDTAVYYCAGSSGWSEYWGQGTLVTVSSTTTPAPRPPTPAPTIASQPLSLRPEACRPAAGGAVHTRGLDFACDIYIWAPLAGTCGVLLLSLVITLYCKRGRKKLLGGGGSGGGGSASRILWHEMWHEGLEEASRLYFGERNVKGMFEVLEPLHAMMERGPQTLKETSFNQAYGRDLMEAQEWCRKYMKSGNVKDLLQAWDLYYHVFRRISKTS

SEQ ID NO: 6009 - protein, 456 aa, Artificial Sequence
  Description of Artificial Sequence: Synthetic Chimeric Antigen Receptor sequence
MALPVTALLLPLALLLHAARPDIQMTQSPSSLSASVGDRVTITCRASQGIRNNLAWYQQKPGKAPKRLIYAASNLQSGVPSRFTGSGSGTEFTLIVSSLQPEDFATYYCLQHHSYPLTSGGGTKVEIKRTGSTSGSGKPGSGEGSEVQVLESGGGLVQPGGSLRLSCAASGFTFSSYAMSWVRQAPGKGLEWVSAISGSGGSTNYADSVKGRFTISRDNSKNTLYLQMNSLRAEDTAVYYCAGSSGWSEYWGQGTLVTVSSKRGRKKLLGGGGSGGGSGVQVETISPGDGRTFPKRGQTCVVHYTGMLEDGKKFDSSRDRNKPFKFMLGKQEVIRGWEEGVAQMSVGQRAKLTISPDYAYGATGHPGIIPPHATLVFDVELLKLETSTTTPAPRPPTPAPTIASQPLSLRPEACRPAAGGAVHTRGLDFACDIYIWAPLAGTCGVLLLSLVITLYC

SEQ ID NO: 6010 - protein, 457 aa, Artificial Sequence
  Description of Artificial Sequence: Synthetic Chimeric Antigen Receptor sequence
MALPVTALLLPLALLLHAARPDIQMTQSPSSLSASVGDRVTITCRASQGIRNNLAWYQQKPGKAPKRLIYAASNLQSGVPSRFTGSGSGTEFTLIVSSLQPEDFATYYCLQHHSYPLTSGGGTKVEIKRTGSTSGSGKPGSGEGSEVQVLESGGGLVQPGGSLRLSCAASGFTFSSYAMSWVRQAPGKGLEWVSAISGSGGSTNYADSVKGRFTISRDNSKNTLYLQMNSLRAEDTAVYYCAGSSGWSEYWGQGTLVTVSSTTTPAPRPPTPAPTIASQPLSLRPEACRPAAGGAVHTRGLDFACDIYIWAPLAGTCGVLLLSLVITLYCKRGRKKLLGGGGSGGGGSGVQVETISPGDGRTFPKRGQTCVVHYTGMLEDGKKFDSSRDRNKPFKFMLGKQEVIRGWEEGVAQMSVGQRAKLTISPDYAYGATGHPGIIPPHATLVFDVELLKLETS

SEQ ID NO: 6011 - protein, 464 aa, Artificial Sequence
  Description of Artificial Sequence: Synthetic Chimeric Antigen Receptor sequence
QVQLQQSGGGLVKPGASLKLSCVTSGFTFRKFGMSWVRQTSDKRLEWVASISTGGYNTYYSDNVKGRFTISRENAKNTLYLQMSSLKSEDTALYYCTRGYSSTSYAMDYWGQGTTVTVGGGGSGGGGSGGGGSDIELTQSPASLSVATGEKVTIRCMTSTDIDDDMNWYQQKPGEPPKFLISEGNTLRPGVPSRFSSSGTGTDFVFTIENTLSEDVGDYYCLQSFNVPLTFGDGTKLEKALTTTPAPRPPTPAPTIASQPLSLRPEACRPAAGGAVHTRGLDFACDIYIWAPLAGTCGVLLLSLVITLYCKRGRKKLLYIFKQPFMRPVQTTQEEDGCSCRFPEEEEGGCELRVKFSRSADAPAYQQGQNQLYNELNLGRREEYDVLDKRRGRDPEMGGKPRRKNPQEGLYNELQKDKMAEAYSEIGMKGERRRGKGHDGLYQGLSTATKDTYDALHMQALPPR

SEQ ID NO: 6012 - protein, 482 aa, Artificial Sequence
  Description of Artificial Sequence: Synthetic Chimeric Antigen Receptor sequence
MALPVTALLLPLALLLHAARPDIQMTQSPSSLSASVGDRVTITCRASQGIRNNLAWYQQKPGKAPKRLIYAASNLQSGVPSRFTGSGSGTEFTLIVSSLQPEDFATYYCLQHHSYPLTSGGGTKVEIKGGGGSGGGGSGGGGSEVQVLESGGGLVQPGGSLRLSCAASGFTFSSYAMSWVRQAPGKGLEWVSAISGSGGSTNYADSVKGRFTISRDNSKNTLYLQMNSLRAEDTAVYYCAGSSGWSEYWGQGTLVTVSSTTTPAPRPPTPAPTIASQPLSLRPEACRPAAGGAVHTRGLDFACDIYIWAPLAGTCGVLLLSLVITLYCKRGRKKLLYIFKQPFMRPVQTTQEEDGCSCRFPEEEEGGCELRVKFSRSADAPAYQQGQNQLYNELNLGRREEYDVLDKRRGRDPEMGGKPRRKNPQEGLYNELQKDKMAEAYSEIGMKGERRRGKGHDGLYQGLSTATKDTYDALHMQALPPR

SEQ ID NO: 6013 - protein, 484 aa, Artificial Sequence
  Description of Artificial Sequence: Synthetic Chimeric Antigen Receptor sequence
MVLLVTSLLLCELPHPAFLLIPDIQMTQSPSSLSASVGDRVTITCRASQGIRNNLAWYQQKPGKAPKRLIYAASNLQSGVPSRFTGSGSGTEFTLIVSSLQPEDFATYYCLQHHSYPLTSGGGTKVEIKRTGSTSGSGKPGSGEGSEVQVLESGGGLVQPGGSLRLSCAASGFTFSSYAMSWVRQAPGKGLEWVSAISGSGGSTNYADSVKGRFTISRDNSKNTLYLQMNSLRAEDTAVYYCAGSSGWSEYWGQGTLVTVSSAAAIEVMYPPPYLDNEKSNGTIIHVKGKHLCPSPLFPGPSKPFWVLVVVGGVLACYSLLVTVAFIIFWVRSKRSRLLHSDYMNMTPRRPGPTRKHYQPYAPPRDFAAYRSRVKFSRSADAPAYQQGQNQLYNELNLGRREEYDVLDKRRGRDPEMGGKPRRKNPQEGLYNELQKDKMAEAYSEIGMKGERRRGKGHDGLYQGLSTATKDTYDALHMQALPPR

SEQ ID NO: 6014 - protein, 485 aa, Artificial Sequence
  Description of Artificial Sequence: Synthetic Chimeric Antigen Receptor sequence
MALPVTALLLPLALLLHAARPQVQLQQSGGGLVKPGASLKLSCVTSGFTFRKFGMSWVRQTSDKRLEWVASISTGGYNTYYSDNVKGRFTISRENAKNTLYLQMSSLKSEDTALYYCTRGYSSTSYAMDYWGQGTTVTVGGGGSGGGGSGGGGSDIELTQSPASLSVATGEKVTIRCMTSTDIDDDMNWYQQKPGEPPKFLISEGNTLRPGVPSRFSSSGTGTDFVFTIENTLSEDVGDYYCLQSFNVPLTFGDGTKLEKALTTTPAPRPPTPAPTIASQPLSLRPEACRPAAGGAVHTRGLDFACDIYIWAPLAGTCGVLLLSLVITLYCKRGRKKLLYIFKQPFMRPVQTTQEEDGCSCRFPEEEEGGCELRVKFSRSADAPAYQQGQNQLYNELNLGRREEYDVLDKRRGRDPEMGGKPRRKNPQEGLYNELQKDKMAEAYSEIGMKGERRRGKGHDGLYQGLSTATKDTYDALHMQALPPR

SEQ ID NO: 6015 - protein, 548 aa, Artificial Sequence
  Description of Artificial Sequence: Synthetic Chimeric Antigen Receptor sequence
MVLLVTSLLLCELPHPAFLLIPDIQMTQSPSSLSASVGDRVTITCRASQGIRNNLAWYQQKPGKAPKRLIYAASNLQSGVPSRFTGSGSGTEFTLIVSSLQPEDFATYYCLQHHSYPLTSGGGTKVEIKRTGSTSGSGKPGSGEGSEVQVLESGGGLVQPGGSLRLSCAASGFTFSSYAMSWVRQAPGKGLEWVSAISGSGGSTNYADSVKGRFTISRDNSKNTLYLQMNSLRAEDTAVYYCAGSSGWSEYWGQGTLVTVSSAAAFVPVFLPAKPTTTPAPRPPTPAPTIASQPLSLRPEACRPAAGGAVHTRGLDFACDIYIWAPLAGTCGVLLLSLVITLYCNHRNRSKRSRLLHSDYMNMTPRRPGPTRKHYQPYAPPRDFAAYRSRFSVVKRGRKKLLYIFKQPFMRPVQTTQEEDGCSCRFPEEEEGGCELRVKFSRSADAPAYQQGQNQLYNELNLGRREEYDVLDKRRGRDPEMGGKPRRKNPQEGLYNELQKDKMAEAYSEIGMKGERRRGKGHDGLYQGLSTATKDTYDALHMQALPPR

SEQ ID NO: 6016 - protein, 567 aa, Artificial Sequence
  Description of Artificial Sequence: Synthetic Chimeric Antigen Receptor sequence
MALPVTALLLPLALLLHAARPDIQMTQSPSSLSASVGDRVTITCRASQGIRNNLAWYQQKPGKAPKRLIYAASNLQSGVPSRFTGSGSGTEFTLIVSSLQPEDFATYYCLQHHSYPLTSGGGTKVEIKRTGSTSGSGKPGSGEGSEVQVLESGGGLVQPGGSLRLSCAASGFTFSSYAMSWVRQAPGKGLEWVSAISGSGGSTNYADSVKGRFTISRDNSKNTLYLQMNSLRAEDTAVYYCAGSSGWSEYWGQGTLVRVSSTTTPAPRPPTPAPTIASQPLSLRPEACRPAAGGAVHTRGLDFACDIYIWAPLAGTCGVLLLSLVITLYCKRGRKKLLGGGGSGGGGSSNSYDSSSIKVLKGLDAVRKRPGMYIGDTDDGTGLHHMVFEVVDNAIDEALAGHCKEIIVTIHADNSVSVQDDGRGIPTGIHPEEGVSAAEVIMTVLHAGGKFDDNSYKVSGGLHGVGVSVVNALSQKLELVIQREGKIHRQIYEHGVPQAPLAVTGETEKTGTMVRFWPSLETFTNVTEFEYEILAKRLRELSFLNSGVSIRLRDKRDGKEDHFHYEG

SEQ ID NO: 6017 - protein, 647 aa, Artificial Sequence
  Description of Artificial Sequence: Synthetic Chimeric Antigen Receptor sequence
EVQVLESGGGLVQPGGSLRLSCAASGFTFSSYAMSWVRQAPGKGLEWVSAISGSGGSTNYADSVKGRFTISRDNSKNTLYLQMNSLRAEDTAVYYCAGSSGWSEYWGQGTLVTVSSGGGGSGGGGSGGGGSDIQMTQSPSSLSASVGDRVTITCRASQGIRNNLAWYQQKPGKAPKRLIYAASNLQSGVPSRFTGSGSGTEFTLIVSSLQPEDFATYYCLQHHSYPLTSGGGTKVEIKEPKSPDKTHTCPPCPAPPVAGPSVFLFPPKPKDTLMIARTPEVTCVVVDVSHEDPEVKFNWYVDGVEVHNAKTKPREEQYNSTYRVVSVLTVLHQDWLNGKEYKCKVSNKALPAPIEKTISKAKGQPREPQVYTLPPSRDELTKNQVSLTCLVKGFYPSDIAVEWESNGQPENNYKTTPPVLDSDGSFFLYSKLTVDKSRWQQGNVFSCSVMHEALHNHYTQKSLSLSPGKIYIWAPLAGTCGVLLLSLVITLYCKRGRKKLLYIFKQPFMRPVQTTQEEDGCSCRFPEEEEGGCELRVKFSRSADAPAYQQGQNQLYNELNLGRREEYDVLDKRRGRDPEMGGKPRRKNPQEGLYNELQKDKMAEAYSEIGMKGERRRGKGHDGLYQGLSTATKDTYDALHMQALPPR

SEQ ID NO: 6018 - protein, 650 aa, Artificial Sequence
  Description of Artificial Sequence: Synthetic Chimeric Antigen Receptor sequence
QVQLQQSGGGLVKPGASLKLSCVTSGFTFRKFGMSWVRQTSDKRLEWVASISTGGYNTYYSDNVKGRFTISRENAKNTLYLQMSSLKSEDTALYYCTRGYSSTSYAMDYWGQGTTVTVGGGGSGGGGSGGGGSDIELTQSPASLSVATGEKVTIRCMTSTDIDDDMNWYQQKPGEPPKFLISEGNTLRPGVPSRFSSSGTGTDFVFTIENTLSEDVGDYYCLQSFNVPLTFGDGTKLEKALEPKSPDKTHTCPPCPAPPVAGPSVFLFPPKPKDTLMIARTPEVTCVVVDVSHEDPEVKFNWYVDGVEVHNAKTKPREEQYNSTYRVVSVLTVLHQDWLNGKEYKCKVSNKALPAPIEKTISKAKGQPREPQVYTLPPSRDELTKNQVSLTCLVKGFYPSDIAVEWESNGQPENNYKTTPPVLDSDGSFFLYSKLTVDKSRWQQGNVFSCSVMHEALHNHYTQKSLSLSPGKIYIWAPLAGTCGVLLLSLVITLYCKRGRKKLLYIFKQPFMRPVQTTQEEDGCSCRFPEEEEGGCELRVKFSRSADAPAYQQGQNQLYNELNLGRREEYDVLDKRRGRDPEMGGKPRRKNPQEGLYNELQKDKMAEAYSEIGMKGERRRGKGHDGLYQGLSTATKDTYDALHMQALPPR

SEQ ID NO: 6019 - protein, 672 aa, Artificial Sequence [sequence omitted]

SEQ ID NO: 6020 - protein, 675 aa, Artificial Sequence [sequence omitted]

SEQ ID NO: 6021 - protein, 692 aa, Artificial Sequence
  Description of Artificial Sequence: Synthetic Chimeric Antigen Receptor sequence
MALPVTALLLPLALLLHAARPDIQMTQSPSSLSASVGDRVTITCRASQGIRNNLAWYQQKPGKAPKRLIYAASNLQSGVPSRFTGSGSGTEFTLIVSSLQPEDFATYYCLQHHSYPLTSGGGTKVEIKRTGSTSGSGKPGSGEGSEVQVLESGGGLVQPGGSLRLSCAASGFTFSSYAMSWVRQAPGKGLEWVSAISGSGGSTNYADSVKGRFTISRDNSKNTLYLQMNSLRAEDTAVYYCAGSSGWSEYWGQGTLVTVSSTTTPAPRPPTPAPTIASQPLSLRPEACRPAAGGAVHTRGLDFACDIYIWAPLAGTCGVLLLSLVITLYCKRGRKKLLGGGGSGGGGSAASDEVNLIESRTVVPLNTWVLISNFKVAYNILRRPDGTFNRHLAEYLDRKVTANANPVDGVFSFDVLIDRRINLLSRVYRPAYADQEQPPSILDLEKPVDGDIVPVILFFHGGSFAHSSANSAIYDTLCRRLVGLCKCVVVSVNYRRAPENPYPCAYDDGWIALNWVNSRSWLKSKKDSKVHIFLAGDSSGGNIAHNVALRAGESGIDVLGNILLNPMFGGNERTESEKSLDGKYFVTVRDRDWYWKAFLPEGEDREHPACNPFSPRGKSLEGVSFPKSLVVVAGLDLIRDWQLAYAEGLKKAGQEVKLMHLEKATVGFYLLPNNNHFHNVMDEISAFVNAEC

SEQ ID NO: 6022 - protein, 243 aa, Artificial Sequence; identical to SEQ ID NO: 4404
  Description of Artificial Sequence: Synthetic Chimeric Antigen Receptor sequence

SEQ ID NO: 6023 - protein, 422 aa, Artificial Sequence
  Description of Artificial Sequence: Synthetic Chimeric Antigen Receptor sequence
MALPVTALLLPLALLLHAARPEIQLQQSGAELVKPGASVKLSCTGSGFNIEDYYIHWVKQRTEQGLEWIGRIDPENDETKYGPIFQGRATITADTSSNTVYLQLSSLTSEDTAVYYCAFRGGVYWGPGTTLTVSSGGGGSGGGGSGGGGSHMDVVMTQSPLTLSVAIGQSASISCKSSQSLLDSDGKTYLNWLLQRPGQSPKRLISLVSKLDSGVPDRFTGSGSGTDFTLRISRVEAEDLGIYYCWQGTHFPGTFGGGTKLEIQTLYCKRGRKKLLYIFKQPFMRPVQTTQEEDGCSCRFPEEEEGGCELRVKFSRSADAPAYKQGQNQLYNELNLGRREEYDVLDKRRGRDPEMGGKPRRKNPQEGLYNELQKDKMAEAYSEIGMKGERRRGKGHDGLYQGLSTATKDTYDALHMQALPPR

SEQ ID NO: 6024 - protein, 490 aa, Artificial Sequence
  Description of Artificial Sequence: Synthetic Chimeric Antigen Receptor sequence
MALPVTALLLPLALLLHAARPEIQLVQSSAEVKKPSATVKISCKSSSFNIEDYYIHWVQQAPGKGLEWMGRIDPENDETKYGPIFQGRVTITADTSTNTVYMELSSLRSEDTAVYYCAFRGGVYWGQGTTVTVSSGGGGSGGGGSGGGGSGGGGSDVVMTQSPLSLPVTLGQPASISCKSSQSLLDSDGKTYLNWLQQRPGQSPRRLISLVSKLDSGVPDRFSGSGSGTDFTLKISRVEAEDVGVYYCWQGTHFPGTFGGGTKVEIKTTTPAPRPPTPAPTIASQPLSLRPEACRPAAGGAVHTRGLDFACDIYIWAPLAGTCGVLLLSLVITLYCKRGRKKLLYIFKQPFMRPVQTTQEEDGCSCRFPEEEEGGCELRVKFSRSADAPAYKQGQNQLYNELNLGRREEYDVLDKRRGRDPEMGGKPRRKNPQEGLYNELQKDKMAEAYSEIGMKGERRRGKGHDGLYQGLSTATKDTYDALHMQALPPR

SEQ ID NO: 6025 - protein, 491 aa, Artificial Sequence
  Description of Artificial Sequence: Synthetic Chimeric Antigen Receptor sequence
MALPVTALLLPLALLLHAARPDVVMTQSPLSLPVTLGQPASISCKSSCISLLDSDGKTYLNWLQQRPGQSPRRLISLVSKLDSGVPDRFSGSGSGTDFTLKISRVEAEDVGVYYCWQGTHFPGTFGGGTKVEIKGGGGSGGGGSGGGGSGGGGSEIQLVQSGAEVKKPGATVKISCKGSGFNIEDYYIHWVQQAPGKGLEWMGRIDPENDETKYGPIFQGRVTITADTSTNTVYMELSSLRSEDTAVYYCAFRGGVYWGQGTTVTVSSTTTPAPRPPTPAPTIASQPLSLRPEACRPAAGGAVHTRGLDFACDIYIWAPLAGTCGVLLLSLVITLYCKRGRKKLLYIFKQPFMRPVQTTQEEDGCSCRFPEEEEGGCELRVKFSRSADAPAYKQGQNQLYNELNLGRREEYDVLDKRRGRDPEMGGKPRRKNPQEGLYNELQKDKMAEAYSEIGMKGERRRGKGHDGLYQGLSTATKDTYDALHMQALPPR

SEQ ID NO: 6026 - protein, 240 aa, Artificial Sequence; identical to SEQ ID NO: 4356
  Description of Artificial Sequence: Synthetic Chimeric Antigen Receptor sequence

SEQ ID NO: 6027 - protein, 1347 aa, Artificial Sequence
  Description of Artificial Sequence: Synthetic Chimeric Antigen Receptor sequence
QVQLVESGPGVVQPGRSLRISCAVSGFSVTNYGVHWVRQPPGKGLEWLGVRWAGGITNYNSAFMSRLTISKDNSKNTVYLQMNSLRAEDTAMYYCASRGGHYGYALDYWGQGTLVTVSSASTKGPSVFPLAPSSKSTSGGTAALGCLVKDYFPEPVTVSWNSGALTSGVHTFPAVLQSSGLYSLSSVVTVPSSSLGTQTYICNVNHKPSNTKVDKRVEPKSCDKTHTCPPCPAPELLGGPSVFLFPPKPKDTLMISRTPEVTCVVVDVSHEDPEVKFNWYVDGVEVHNAKTKPREEQYNSTYRVVSVLTVLHQDWLNGKEYKCKVSNKALPAPIEKTISKAKGQPREPQVYTLPPSRDELTKNQVSLTCLVKGFYPSDIAVEWESNGQPENNYKTTPPVLDSDGSFFLYSKLTVDKSRWQQGNVFSCSVMHEALHNHYTQKSLSLSPGKGSTSGSGKPGSSEGSTKGEIVMTQTPATLSVSAGERVTITCKASQSVSNDVTWYQQKPGQAPRLLIYSASNRYSGVPARFSGSGYGTEFTFTISSVQSEDFAVYFCQQDYSSFGQGTKLEIKRTVAAPSVFIFPPSDEQLKSGTASVVCLLNNFYPREAKVQWKVDNALQSGNSQESVTEQDSKDSTYSLSSTLTLSKADYEKHKVYACEVTHQGLSSPVTKSFNRGECGSTSGSGKPGSSEGSTKGFWVLVVVGGVLACYSLLVTVAFIIFWVKRGRKKLLYIFKQPFMRPVQTTQEEDGCSCRFPEEEEGGCELQRRKYRSNKGESPVEPAEPCHYSCPREEEGSTIPIQEDYRKPEPACSPGSTSGSGKPGSSEGSTKGRVKFSRSADAPAYKQGQNQLYNELNLGRREEYDVLDKRRGRDPEMGGKPRRKNPQEGLYNELQKDKMAEAYSEIGMKGERRRGKGHDGLYQGLSTATKDTYDALHMQALPPRGSTSGSGKPGSSEGSTKGVGALESLRGNADLAYILSMEPCGHCLIINNVNFCRESGLRTRTGSNIDCEKLRRRFSSLHFMVEVKGDLTAKKMVLALLELAQQDHGALDCCVVVILSHGCQASHLQFPGAVYGTDGCPVSVEKIVNIFNGTSCPSLGGKPKLFFIQACGGEQKDHGFEVASTSPEDESPGSNPEPDATPFQEGLRTFDQLDAISSLPTPSDIFVSYSTFPGFVSWRDPKSGSWYVETLDDIFEQWAHSEDLQSLLLRVANAVSVKGIYKQMPGCFNFLRKKLFFKTSMGVQVETISPGDGRTFPKRGQTCVVHYTGMLEDGKKVDSSRDRNKPFKFMLGKQEVIRGWEEGVAQMSVGQRAKLTISPDYAYGATGHPGIIPPHATLVFDVELLKLE

SEQ ID NO: 6028 - protein, 484 aa, Artificial Sequence; identical to SEQ ID NO: 5995
  Description of Artificial Sequence: Synthetic polypeptide

SEQ ID NO: 6029 - protein, 504 aa, Artificial Sequence
  Description of Artificial Sequence: Synthetic Chimeric Antigen Receptor sequence
MALPVTALLLPLALLLHAARPGSSRAAQPAMAQVQLQQSGAELVKPGASVKISCKASGYSFTGYFMNWVKQSHGKSLEWIGRIHPYDGDTFYNQNFKDKATLTVDKSSNTAHMELLSLTSEDFAVYYCTRYDGSRAMDYWGQGTTVTVSSGGGGSGGGGSGGGGSDIELTQSPASLAVSLGQRAIISCKASQSVSFAGTSLMHWYHQKPGQQPKLLIYRASNLEAGVPTRFSGSGSKTDFTLNIHPVEEEDAATYYCQQSREYPYTFGGGTKLEIKRAAASTTTPAPRPPTPAPTIASQPLSLRPEACRPAAGGAVHTRGLDFACDIYIWAPLAGTCGVLLLSLVITLYCKRGRKKLLYIFKQPFMRPVQTTQEEDGCSCRFPEEEEGGCELRVKFSRSADAPAYKQGQNQLYNELNLGRREEYDVLDKRRGRDPEMGGKPRRKNPQEGLYNELQKDKMAEAYSEIGMKGERRRGKGHDGLYQGLSTATKDTYDALHMQALPPR

SEQ ID NO: 6030 - protein, 491 aa, Artificial Sequence
  Description of Artificial Sequence: Synthetic Chimeric Antigen Receptor sequence
MALPVTALLLPLALLLHAARPGSQLVESGGGLVQPGRSLRLSCTTSGFTFGDYAMIWARQAPGKGLEWVSSISSSSSYIYYADSVKGRFTISRDNAKNSLYLQMNSLRAEDTAVYYCARERYDFWSGMDVWGKGTTVTVSSGGGGSGGGGSGGSAQSALTQPASVSGSPGQSITISCTGTSSDVGSYNLVSWYQQHPGKAPKLMIYEGSKRPSGVSNRFSGSKSGNAASLTISGLQAEDEADYYCQSYDSSLSVVFGGGTKLTVLGASTTTPAPRPPTPAPTIASQPLSLRPEACRPAAGGAVHTRGLDFACDIYIWAPLAGTCGVLLLSLVITLYCKRGRKKLLYIFKQPFMRPVQTTQEEDGCSCRFPEEEEGGCELRVKFSRSADAPAYKQGQNQLYNELNLGRREEYDVLDKRRGRDPEMGGKPRRKNPQEGLYNELQKDKMAEAYSEIGMKGERRRGKGHDGLYQGLSTATKDTYDALHMQALPPR

SEQ ID NO: 6031 - protein, 450 aa, Artificial Sequence
  Description of Artificial Sequence: Synthetic Chimeric Antigen Receptor sequence
MALPVTALLLPLALLLHAARPGSAEVQLVQSGAEVKKPGASVKVSCKASGYTFTSYAMHWVRQAPGQRLEWMGWINAGNGNTKYSQKFQGRVTITRDTSASTAYMELSSLRSEDTAVYYCARDISYGSFDYWGQGTLVTVSSGGGGSGGGGSGGGGSSSELTQDPAVSVALGQTVRITCQGDNLRSYYASWYRQKSGQAPVLVIYGKNNRPSGIPDRFSGSSSGNTASLTITAAQAEDEADYYCHSRKSRGNHLLFGGGTKLTVLGQASTTTPAPRPPTPAPTIASQPLSLRPEACRPAAGGAVHTRGLDFACDIYIWAPLAGTCGVLLLSLVITLYCRVKFSRSADAPAYQQGQNQLYNELNLGRREEYDVLDKRRGRDPEMGGKPRRKNPQEGLYNELQKDKMAEAYSEIGMKGERRRGKGHDGLYQGLSTATKDTYDALHMQALPPR

SEQ ID NO: 6032 - protein, 450 aa, Artificial Sequence
  Description of Artificial Sequence: Synthetic Chimeric Antigen Receptor sequence
MALPVTALLLPLALLLHAARPGSAEVQLVQSGAEVKKPGASVKVSCKASGYTFTSYAMHWVRQAPGQRLEWMGWINAGNGNTKYSQKFQGRVTITRDTSASTAYMELSSLRSEDTAVYYCARDISYGSFDYWGQGTLVTVSSGGGGSGGGGSGGGGSSSELTQDPAVSVALGQTVRITCQGDSLRSNYANWYQQKPGQAPVLVIYGQNNRPSGIPDRFSGSSSGNTASLTITGAQAADEADYYCDSRVSTGNHVVFGGGTKLTVLGQASTTTPAPRPPTPAPTIASQPLSLRPEACRPAAGGAVHTRGLDFACDIYIWAPLAGTCGVLLLSLVITLYCRVKFSRSADAPAYQQGQNQLYNELNLGRREEYDVLDKRRGRDPEMGGKPRRKNPQEGLYNELQKDKMAEAYSEIGMKGERRRGKGHDGLYQGLSTATKDTYDALHMQALPPR

SEQ ID NO: 6033 - protein, 466 aa, Artificial Sequence
  Description of Artificial Sequence: Synthetic Chimeric Antigen Receptor sequence
DAVVTQESALTSSPGETVTLTCRSSTGAVTISNVASWVQEKPDHLFTGLIGGTNNRAPGVPARFSGSLIGDKAALTITGAQTEDEAIYFCVLWYSDHWVFGGGTKLTVLGGGGGSGGGGSGGGGSGGGGSDVQLQESGPGLVAPSQSLSITCTVSGFLLTDVGVNWVRQSPGKGLEWLGVIWGDGITDYNSALKSRLSVTKDNSKSQVFLKMNSLQSGDSARVYCVTGLFDYWGQGTTLTVSSTTTPAPRPPTPAPTIASQPLSLRPEACRPAAGGAVHTRGLDFACDIYIWAPLAGTCGVLLLSLVITLVCKRGRKKLLYIFKQPFMRPVQTTQEEDGCSCRFPEEEEGGCELRVKFSRSADAPAYKQGQNQLYNELNLGRREEYDVLDKRRGRDPEMGGKPRRKNPQEGLYNELQKDKMAEAVSEIGMKGERRRGKGHDGLYQGLSTATKDTYDALHMQALPPR

SEQ ID NO: 6034 - protein, 492 aa, Artificial Sequence
  Description of Artificial Sequence: Synthetic Chimeric Antigen Receptor sequence
MALPVTALLLPLALLLHAARPGSAEVQLVQSGAEVKKPGASVKVSCKASGYTFTSYAMHWVRQAPGQRLEWMGWINAGNGNTKYSQKFQGRVTITRDTSASTAYMELSSLRSEDTAVYYCARDISYGSFDYWGQGTLVTVSSGGGGSGGGGSGGGGSSSELTQDPAVSVALGQTVRITCQGDSLRSNYANWYQQKPGQAPVLVIYGQNNRPSGIPDRFSGSSSGNTASLTITGAQAADEADYYCDSRVSTGNHVVFGGGTKLTVLGQASTTTPAPRPPTPAPTIASQPLSLRPEACRPAAGGAVHTRGLDFACDIYIWAPLAGTCGVLLLSLVITLYCRVGRKKLLYIFKQPFMRPVQTTQEEDGCSCRFPEEEEGGCELRVKFSRSADAPAYQQGQNQLYNELNLGRREEYDVLDKRRGRDPEMGGKPRRKNPQEGLYNELQKDKMAEAYSEIGMKGERRRGKGHDGLYQGLSTATKDTYDALHMQALPPR

SEQ ID NO: 6035 - protein, 496 aa, Artificial Sequence
  Description of Artificial Sequence: Synthetic Chimeric Antigen Receptor sequence
MALPVTALLLPLALLLHAARPGSAEVQLVQSGAEVKKPGASVKVSCKASGYTFTSYAMHWVRQAPGQRLEWMGWINAGNGNTKYSQKFQGRVTITRDTSASTAYMELSSLRSEDTAVYYCARDISYGSFDYWGQGTLVTVSSGGGGSGGGGSGGGGSSSELTQDPAVSVALGQTVRITCQGDNLRSYYASWYRQKSGQAPVLVIYGKNNRPSGIPDRFSGSSSGNTASLTITAAQAEDEADYYCHSRKSRGNHLLFGGGTKLTVLGQASTTTPAPRPPTPAPTIASQPLSLRPEACRPAAGGAVHTRGLDFACDFWVLVVVGGVLACYSLLVTVAFIIFWVRSKRSRLLHSDYMNMTPRRPGPTRKHYQPYAPPRDFAAYRSIDRVKFSRSADAPAYQQGQNQLYNELNLGRREEYDVLDKRRGRDPEMGGKPRRKNPQEGLYNELQKDKMAEAYSEIGMKGERRRGKGHDGLYQGLSTATKDTYDALHMQALPPR

SEQ ID NO: 6036 - protein, 496 aa, Artificial Sequence
  Description of Artificial Sequence: Synthetic Chimeric Antigen Receptor sequence
MALPVTALLLPLALLLHAARPGSAEVQLVQSGAEVKKPGASVKVSCKASGYTFTSYAMHWVRQAPGQRLEWMGWINAGNGNTKYSQKFQGRVTITRDTSASTAYMELSSLRSEDTAVYYCARDISYGSFDYWGQGTLVTVSSGGGGSGGGGSGGGGSSSELTQDPAVSVALGQTVRITCQGDSLRSNYANWYQQKPGQAPVLVIYGQNNRPSGIPDRFSGSSSGNTASLTITGAQAADEADYYCDSRVSTGNHVVFGGGTKLTVLGQASTTTPAPRPPTPAPTIASQPLSLRPEACRPAAGGAVHTRGLDFACDFWVLVVVGGVLACYSLLVTVAFIIFWVRSKRSRLLHSDYMNMTPRRPGPTRKHYQPYAPPRDFAAYRSIDRVKFSRSADAPAYQQGQNQLYNELNLGRREEYDVLDKRRGRDPEMGGKPRRKNPQEGLYNELQKDKMAEAYSEIGMKGERRRGKGHDGLYQGLSTATKDTYDALHMQALPPR

SEQ ID NO: 6037 - protein, 498 aa, Artificial Sequence
  Description of Artificial Sequence: Synthetic Chimeric Antigen Receptor sequence
MALPVTALLLPLALLLHAARPGSAEVQLVQSGAEVKKPGASVKVSCKASGYTFTSYAMHWVRQAPGQRLEWMGWINAGNGNTKYSQKFQGRVTITRDTSASTAYMELSSLRSEDTAVYYCARDISYGSFDYWGQGTLVTVSSGGGGSGGGGSGGGGSSSELTQDPAVSVALGQTVRITCQGDSLRSNYANWYQQKPGQAPVLVIYGQNNRPSGIPDRFSGSSSGNTASLTITGAQAADEADYYCDSRVSTGNHVVFGGGTKLTVLGQASTTTPAPRPPTPAPTIASQPLSLRPEACRPAAGGAVHTRGLDFACDIYIWAPLAGTCGVLLLSLVITLYCRVRKYRSNKGESPVEPAEPCRYSCPREEEGSTIPIQEDYRKPEPACSPRVKFSRSADAPAYQQGQNQLYNELNLGRREEYDVLDKRRGRDPEMGGKPRRKNPQEGLYNELQKDKMAEAYSEIGMKGERRRGKGHDGLYQGLSTATKDTYDALHMQALPPR

SEQ ID NO: 6038 - protein, 434 aa, Artificial Sequence
  Description of Artificial Sequence: Synthetic Chimeric Antigen Receptor sequence
DAVVTQESALTSSPGETVTLTCRSSTGAVTISNVASWVQEKPDHLFTGLIGGTNNRAPGVPARFSGSLIGDKAALTITGAQTEDEAIYFCVLWYSDHWVFGGGTKLTVLGGGGGSGGGGSGGGGSGGGGSDVQLQESGPGLVAPSQSLSITCTVSGFLLTDVGVNWVRQSPGKGLEWLGVIWGDGITDYNSALKSRLSVTKDNSKSQVFLKMNSLQSGDSARYVCVTGLFDYWGQGTTLTVSSESKVGPPCPPCPDIYIWAPLAGTCGVLLLSLVITLVCKRGRKKLLYIFKQPFMRPVQTTQEEDGCSCRFPEEEEGGCELRVKFSRSADAPAYKQGQNQLYNELNLGRREEYDVLDKRRGRDPEMGGKPRRKNPQEGLYNELQKDKMAEAVSEIGMKGERRRGKGHDGLYQGLSTATKDTYDALHMQALPPR

SEQ ID NO: 6039 - protein, 719 aa, Artificial Sequence
  Description of Artificial Sequence: Synthetic Chimeric Antigen Receptor sequence
METDTLLLWVLLLWVPGSTGQVQLKESGPVLVAPSQTLSITCTVSGFSLASYNIHWVRQPPGKGLEWLGVIWAGGSTNYNSALMSRLSISKDNSKSQVFLQMNSLQTDDTAMYYCAKRSDDYSWFAYWGQGTLVTVSASGGGGSGGGGSGGGGSENVLTQSPAIMSASPGEKVTMTCRASSSVSSSYLHWYQQKSGASPKVWIYSTSNLASGVPGRFSGSGSGTSYSLTISSVEAEDAATYYCQQYSGYPITFGAGTKVEVKRSDPAEPKSPDKTHTCPPCPAPELLGGPSVFLFPPKPKDTLMISRTPEVTCVVVDVSHEDPEVKFNWYVDGVEVHNAKTKPREEQYNSTYRVVSVLTVLHQDWLNGKEYKCKVSNKALPAPIEKTISKAKGQPREPQVYTLPPSRDELTKNQVSLTCLVKGFYPSDIAVEWESNGQPENNYKTTPPVLDSDGSFFLYSKLTVDKSRWQQGNVFSCSVMHEALHNHYTQKSLSLSPGKKDPKFWVLVVVGGVLACYSLLVTVAFIIFWVRSKRSRLLHSDYMNMTPRRPGPTRKHYQPYAPPRDFAAYRSRDQRLPPDAHKPPGGGSFRTPIQEEQADAHSTLAKIRVKFSRSADAPAYQQGQNQLYNELNLGRREEYDVLDKRRGRDPEMGGKPRRKNPQEGLYNELQKDKMAEAYSEIGMKGERRRGKGHDGLYQGLSTATKDTYDALHMQALPPR

SEQ ID NO: 6040 - protein, 157 aa, Artificial Sequence
  Description of Artificial Sequence: Synthetic Chimeric Antigen Receptor sequence
MGTSLLCWMALCLLGADHADACPYSNPSLCSGGGGSELPTQGTFSNVSTNVSPAKPTTTACPYSNPSLCSGGGGSPAPRPPTPAPTIASQPLSLRPEACRPAAGGAVHTRGLDFACDIYIWAPLAGTCGVLLLSLVITLYCNHRNRRRVCKCPRPVV

SEQ ID NO: 6041 - protein, 402 aa, Artificial Sequence
  Description of Artificial Sequence: Synthetic Chimeric Antigen Receptor sequence
MLEGVQVETISPGDGRTFPKRGQTCVVHYTGMLEDGKKVDSSRDRNKPFKFMLGKQEVIRGWEEGVAQMSVGQRAKLTISPDYAYGATGHPGIIPPHATLVFDVELLKLESGGGSGVDGFGDVGALESLRGNADLAYILSMEPCGHCLIINNVNFCRESGLRTRTGSNIDCEKLRRRFSSLHFMVEVKGDLTAKKMVLALLELAQQDHGALDCCVVVILSHGCQASHLQFPGAVYGTDGCPVSVEKIVNIFNGTSCPSLGGKPKLFFIQACGGEQKDHGFEVASTSPEDESPGSNPEPDATPFQEGLRTFDQLDAISSLPTPSDIFVSYSTFPGFVSWRDPKSGSWYVETLDDIFEQWAHSEDLQSLLLRVANAVSVKGIYKQMPGCFNFLRKKLFFKTSAS

SEQ ID NO: 6042 - protein, 422 aa, Artificial Sequence
  Description of Artificial Sequence: Synthetic Chimeric Antigen Receptor sequence
DVVMTQSPLSLPVTPGEPASISCRSSQSLVHSNANTYLHWYLQKPGQSPQLLIYKVSNRFSGVPDRFSGSGSGTDFTLKISRVEAEDVGVYYCSQNTHVPPTFGQGTKLEIKRGGGGSGGGGSGGGGSQVQLVQSGAEVKKPGASVKVSCKASGYTFTDYEMHWVRQAPGQGLEWMGALDPKTGDTAYSQKFKGRVTLTADESTSTAYMELSSLRSEDTAVYYCTRFYSYTYWGQGTLVTVSSTTTPAPRPPTPAPTIASQPLSLRPEACRPAAGGAVHTRGLDFACDIYIWAPLAGTCGVLLLSLVITRVKFSRSADAPAYQQGQNQLYNELNLGRREEYDVLDKRRGRDPEMGGKPQRRKNPQEGLYNELQKDKMAEAYSEIGMKGERRRGKGHDGLYQGLSTATKDTYDALHMQALPPR

SEQ ID NO: 6043 - protein, 456 aa, Artificial Sequence
  Description of Artificial Sequence: Synthetic Chimeric Antigen Receptor sequence
MALPVTALLLPLALLLHAARPDVQLVESGGGLVQPGGSRKLSCAASGFTFSNFGMHWVRQAPEKGLEWVAYISSGGSSINYADTVKGRFTISRDNPKNTLFLQMTSLRSEDTAIYYCTRGGTGTRSLYYFDYWGQGATLIVGGGGSGGGGSGGGGSDIQMTQITSSLSVSLGDRVIISCRASQDIGNFLNWYQQKPDGSLKLLIYYTSRLQSGVPSRFSGWGSGTDYSLTISNLEEEDIATFFCQQGKTLPYTFGGGTKLEIKGLAVSTISSFFPPGYQIYIWAPLAGTCGVLLLSLVITLYCKRGRKKLLYIFKQPFMRPVQTTQEEDGCSCRFPEEEEGGCELRVKFSRSADAPAYQQGQNQLYNELNLGRREEYDVLDKRRGRDPEMGGKPRRKNPQEGLYNELQKDKMAEAYSEIGMKGERRRGKGHDGLYQGLSTATKDTYDALHMQALPP

SEQ ID NO: 6044 - protein, 501 aa, Artificial Sequence
  Description of Artificial Sequence: Synthetic Chimeric Antigen Receptor sequence
METDTLLLWVLLLWVPGSTGQVQLQESGPGLVKPSQTLSITCTVSGFSLASYNIHWVRQPPGKGLEWLGVIWAGGSTNYNSALMSRLTISKDNSKNQVFLKMSSLTAADTAVYYCAKRSDDYSWFAYWGQGTLVTVSSGGGGSGGGGSGGGGSENQMTQSPSSLSASVGDRVTMTCRASSSVSSSYLHWYQQKSGKAPKVWIYSTSNLASGVPSRFSGSGSGTDYTLTISSLQPEDFATYYCQQYSGYPITFGQGTKVEIKRSDPAEPKSPDKTHTCPPCPKDPKFWVLVVVGGVLACYSLLVTVAFIIFWVRSKRSRLLHSDYMNMTPRRPGPTRKHYQPYAPPRDFAAYRSRDQRLPPDAHKPPGGGSFRTPIQEEQADAHSTLAKIRVKFSRSADAPAYQQGQNQLYNELNLGRREEYDVLDKRRGRDPEMGGKPRRKNPQEGLYNELQKDKMAEAYSEIGMKGERRRGKGHDGLYQGLSTATKDTYDALHMQALPPR

SEQ ID NO: 6045 - protein, 527 aa, Artificial Sequence
  Description of Artificial Sequence: Synthetic Chimeric Antigen Receptor sequence
METDTLLLWVLLLWVPGSTGQVQLQESGPGLVKPSQTLSITCTVSGFSLASYNIHWVRQPPGKGLEWLGVIWAGGSTNYNSALMSRLTISKDNSKNQVFLKMSSLTAADTAVYYCAKRSDDYSWFAYWGQGTLVTVSSGGGGSGGGGSGGGGSENQMTQSPSSLSASVGDRVTMTCRASSSVSSSYLHWYQQKSGKAPKVWIYSTSNLASGVPSRFSGSGSGTDYTLTISSLQPEDFATYYCQQYSGYPITFGQGTKVEIKRSDPTTTPAPRPPTPAPTIASQPLSLRPEACRPAAGGAVHTRGLDFACDIFWVLVVVGGVLACYSLLVTVAFIIFWVRSKRSRLLHSDYMNMTPRRPGPTRKHYQPYAPPRDFAAYRSRDQRLPPDAHKPPGGGSFRTPIQEEQADAHSTLAKIRVKFSRSADAPAYQQGQNQLYNELNLGRREEYDVLDKRRGRDPEMGGKPRRKNPQEGLYNELQKDKMAEAYSEIGMKGERRRGKGHDGLYQGLSTATKDTYDALHMQALPPR

SEQ ID NO: 6046 - protein, 642 aa, Artificial Sequence
  Description of Artificial Sequence: Synthetic Chimeric Antigen Receptor sequence
METDTLLLWVLLLWVPGSTGQVQLQESGPGLVKPSQTLSITCTVSGFSLASYNIHWVRQPPGKGLEWLGVIWAGGSTNYNSALMSRLTISKDNSKNQVFLKMSSLTAADTAVYYCAKRSDDYSWFAYWGQGTLVTVSSGGGGSGGGGSGGGGSENQMTQSPSSLSASVGDRVTMTCRASSSVSSSYLHWYQQKSGKAPKVWIYSTSNLASGVPSRFSGSGSGTDYTLTISSLQPEDFATYYCQQYSGYPITFGQGTKVEIKRSDPAEPKSPDKTHTCPPCPAPPVAGPSVFLFPPKPKDTLMIARTPEVTCVVVDVSHEDPEVKFNWYVDGVEVHNAKTKPREEQYNSTYRVVSVLTVLHQDWLNGKEYKCKVSNKALPAPIEKTISKAKGQPREPQVYTLPPSRDELTKNQVSLTCLVKGFYPSDIAVEWESNGQPENNYKTTPPVLDSDGSFFLYSKLTVDKSRWQQGNVFSCSVMHEALHNHYTQKSLSLSPGKKDPKFWVLVVVGGVLACYSLLVTVAFIIFWVRSRVKFSRSADAPAYQQGQNQLYNELNLGRREEYDVLDKRRGRDPEMGGKPRRKNPQEGLYNELQKDKMAEAYSEIGMKGERRRGKGHDGLYQGLSTATKDTYDALHMQALPPR

SEQ ID NO: 6047 - protein, 681 aa, Artificial Sequence
  Description of Artificial Sequence: Synthetic Chimeric Antigen Receptor sequence
METDTLLLWVLLLWVPGSTGQVQLQESGPGLVKPSQTLSITCTVSGFSLASYNIHWVRQPPGKGLEWLGVIWAGGSTNYNSALMSRLTISKDNSKNQVFLKMSSLTAADTAVYYCAKRSDDYSWFAYWGQGTLVTVSSGGGGSGGGGSGGGGSENQMTQSPSSLSASVGDRVTMTCRASSSVSSSYLHWYQQKSGKAPKVWIYSTSNLASGVPSRFSGSGSGTDYTLTISSLQPEDFATYYCQQYSGYPITFGQGTKVEIKRSDPAEPKSPDKTHTCPPCPAPPVAGPSVFLFPPKPKDTLMIARTPEVTCVVVDVSHEDPEVKFNWYVDGVEVHNAKTKPREEQYNSTYRVVSVLTVLHQDWLNGKEYKCKVSNKALPAPIEKTISKAKGQPREPQVYTLPPSRDELTKNQVSLTCLVKGFYPSDIAVEWESNGQPENNYKTTPPVLDSDGSFFLYSKLTVDKSRWQQGNVFSCSVMHEALHNHYTQKSLSLSPGKKDPKFWVLVVVGGVLACYSLLVTVAFIIFWVRSKRSRLLHSDYMNMTPRRPGPTRKHYQPYAPPRDFAAYRSRVKFSRSADAPAYQQGQNQLYNELNLGRREEYDVLDKRRGRDPEMGGKPRRKNPQEGLYNELQKDKMAEAYSEIGMKGERRRGKGHDGLYQGLSTATKDTYDALHMQALPPR

SEQ ID NO: 6048 - protein, 717 aa, Artificial Sequence
  Description of Artificial Sequence: Synthetic Chimeric Antigen Receptor sequence
METDTLLLWVLLLWVPGSTGQVQLQESGPGLVKPSQTLSITCTVSGFSLASYNIHWVRQPPGKGLEWLGVIWAGGSTNYNSALMSRLTISKDNSKNQVFLKMSSLTAADTAVYYCAKRSDDYSWFAYWGQGTLVTVSSGGGGSGGGGSGGGGSENQMTQSPSSLSASVGDRVTMTCRASSSVSSSYLHWYQQKSGKAPKVWIYSTSNLASGVPSRFSGSGSGTDYTLTISSLQPEDFATYYCQQYSGYPITFGQGTKVEIKRSDPAEPKSPDKTHTCPPCPAPPVAGPSVFLFPPKPKDTLMIARTPEVTCVVVDVSHEDPEVKFNWYVDGVEVHNAKTKPREEQYNSTYRVVSVLTVLHQDWLNGKEYKCKVSNKALPAPIEKTISKAKGQPREPQVYTLPPSRDELTKNQVSLTCLVKGFYPSDIAVEWESNGQPENNYKTTPPVLDSDGSFFLYSKLTVDKSRWQQGNVFSCSVMHEALHNHYTQKSLSLSPGKKDPKFWVLVVVGGVLACYSLLVTVAFIIFWVRSKRSRLLHSDYMNMTPRRPGPTRKHYQPYAPPRDFAAYRSRDQRLPPDAHKPPGGGSFRTPIQEEQADAHSTLAKIRVKFSRSADAPAYQQGQNQLYNELNLGRREEYDVLDKRRGRDPEMGGKPRRKNPQEGLYNELQKDKMAEAYSEIGMKGERRRGKGHDGLYQGLSTATKDTYDALHMQALPPR

SEQ ID NO: 6049 - protein, 718 aa, Artificial Sequence
  Description of Artificial Sequence: Synthetic Chimeric Antigen Receptor sequence
METDTLLLWVLLLWVPGSTGQVQLQESGPGLVKPSQTLSITCTVSGFSLASYNIHWVRQPPGKGLEWLGVIWAGGSTNYNSALMSRLTISKDNSKNQVFLKMSSLTAADTAVYYCAKRSDDYSWFAYWGQGTLVTVSSGGGGSGGGGSGGGGSENQMTQSPSSLSASVGDRVTMTCRASSSVSSSYLHWYQQKSGKAPKVWIYSTSNLASGVPSRFSGSGSGTDYTLTISSLQPEDFATYYCQQYSGYPITFGQGTKVEIKRSDPAEPKSPDKTHTCPPCPAPELLGGPSVFLFPPKPKDTLMISRTPEVTCVVVDVSHEDPEVKFNWYVDGVEVHNAKTKPREEQYNSTYRVVSVLTVLHQDWLNGKEYKCKVSNKALPAPIEKTISKAKGQPREPQVYTLPPSRDELTKNQVSLTCLVKGFYPSDIAVEWESNGQPENNYKTTPPVLDSDGSFFLYSKLTVDKSRWQQGNVFSCSVMHEALHNHYTQKSLSLSPGKKDPKFWVLVVVGGVLACYSLLVTVAFIIFWVRSKRSRLLHSDYMNMTPRRPGPTRKHYQPYAPPRDFAAYRSRDQRLPPDAHKPPGGGSFRTPIQEEQADAHSTLAKIRVKFSRSADAPAYQQGQNQLYNELNLGRREEYDVLDKRRGRDPEMGGKPRRKNPQEGLYNELQKDKMAEAYSEIGMKGERRRGKGHDGLYQGLSTATKDTYDALHMQALPPR

SEQ ID NO: 6050 - protein, 858 aa, Artificial Sequence
  Description of Artificial Sequence: Synthetic Chimeric Antigen Receptor sequence
MGTSLLCWMALCLLGADHADACPYSNPSLCSGGGGSELPTQGTFSNVSTNVSPAKPTTTACPYSNPSLCSGGGGSPAPRPPTPAPTIASQPLSLRPEACRPAAGGAVHTRGLDFACDIYIWAPLAGTCGVLLLSLVITLYCNHRNRRRVCKCPRPVVRAEGRGSLLTCGDVEENPGPMETDTLLLWVLLLWVPGSTGQVQLQESGPGLVKPSQTLSITCTVSGFSLASYNIHWVRQPPGKGLEWLGVIWAGGSTNYNSALMSRLTISKDNSKNQVFLKMSSLTAADTAVYYCAKRSDDYSWFAYWGQGTLVTVSSGGGGSGGGGSGGGGSENQMTQSPSSLSASVGDRVTMTCRASSSVSSSYLHWYQQKSGKAPKVWIYSTSNLASGVPSRFSGSGSGTDYTLTISSLQPEDFATYYCQQYSGYPITFGQGTKVEIKRSDPAEPKSPDKTHTCPPCPAPPVAGPSVFLFPPKPKDTLMIARTPEVTCVVVDVSHEDPEVKFNWYVDGVEVHNAKTKPREEQYNSTYRVVSVLTVLHQDWLNGKEYKCKVSNKALPAPIEKTISKAKGQPREPQVYTLPPSRDELTKNQVSLTCLVKGFYPSDIAVEWESNGQPENNYKTTPPVLDSDGSFFLYSKLTVDKSRWQQGNVFSCSVMHEALHNHYTQKSLSLSPGKKDPKFWVLVVVGGVLACYSLLVTVAFIIFWVRSKRSRLLHSDYMNMTPRRPGPTRKHYQPYAPPRDFAAYRSRVKFSRSADAPAYQQGQNQLYNELNLGRREEYDVLDKRRGRDPEMGGKPRRKNPQEGLYNELQKDKMAEAYSEIGMKGERRRGKGHDGLYQGLSTATKDTYDALHMQALPPR

SEQ ID NO: 6051 - protein, 892 aa, Artificial Sequence
  Description of Artificial Sequence: Synthetic Chimeric Antigen Receptor sequence
QVQLVESGPGVVQPGRSLRISCAVSGFSVTNYGVHWVRQPPGKGLEWLGVIWAGGITNYNSAFMSRLTISKDNSKNTVYLQMNSLRAEDTAMYYCASRGGHYGYALDYWGQGTLVTVSSGSTSGSGKPGSSEGSTKGEIVMTQTPATLSVSAGERVTITCKASQSVSNDVTWYQQKPGQAPRLLIYSASNRYSGVPARFSGSGYGTEFTFTISSVQSEDFAVYFCQQDYSSFGQGTKLEIKFWVLVVVGGVLACYSLLVTVAFIIFWVKRGRKKLLYIFKQPFMRPVQTTQEEDGCSCRFPEEEEGGCELQRRKYRSNKGESPVEPAEPCHYSCPREEEGSTIPIQEDYRKPEPACSPGSTSGSGKPGSSEGSTKGRVKFSRSADAPAYKQGQNQLYNELNLGRREEYDVLDKRRGRDPEMGGKPRRKNPQEGLYNELQKDKMAEAYSEIGMKGERRRGKGHDGLYQGLSTATKDTYDALHMQALPPRGSTSGSGKPGSSEGSTKGVGALESLRGNADLAYILSMEPCGHCLIINNVNFCRESGLRTRTGSNIDCEKLRRRFSSLHFMVEVKGDLTAKKMVLALLELAQQDHGALDCCVVVILSHGCQASHLQFPGAVYGTDGCPVSVEKIVNIFNGTSCPSLGGKPKLFFIQACGGEQKDHGFEVASTSPEDESPGSNPEPDATPFQEGLRTFDQLDAISSLPTPSDIFVSYSTFPGFVSWRDPKSGSWYVETLDDIFEQWAHSEDLQSLLLRVANAVSVKGIYKQMPGCFNFLRKKLFFKTSMGVQVETISPGDGRTFPKRGQTCVVHYTGMLEDGKKVDSSRDRNKPFKFMLGKQEVIRGWEEGVAQMSVGQRAKLTISPDYAYGATGHPGIIPPHATLVFDVELLKLE

SEQ ID NO: 6052 - protein, 895 aa, Artificial Sequence
  Description of Artificial Sequence: Synthetic Chimeric Antigen Receptor sequence
EVQLVQSGAEVEKPGASVKISCKASGSSFTGYNMNWVRQNIGKSLEWIGAIDPYYGGTSYNQKFKGRATLTVDKSTSTAYMHLKSLRSEDTAVYYCVSGMEYWGQGTSVTVSSGSTSGSGKPGSSEGSTKGDVVMTQTPLSLPVTPGEPASISCRSSQSLVHRNGNTYLHWYLQKPGQSPKLLIHKVSNRFSGVPDRFSGSGSGTDFTLKISRVEAEDLGVYFCSQSTHVPPLTFGAGTKLELKFWVLVVVGGVLACYSLLVTVAFIIFWVKRGRKKLLYIFKQPFMRPVQTTQEEDGCSCRFPEEEEGGCELQRRKYRSNKGESPVEPAEPCHYSCPREEEGSTIPIQEDYRKPEPACSPGSTSGSGKPGSSEGSTKGRVKFSRSADAPAYKQGQNQLYNELNLGRREEYDVLDKRRGRDPEMGGKPRRKNPQEGLYNELQKDKMAEAYSEIGMKGERRRGKGHDGLYQGLSTATKDTYDALHMQALPPRGSTSGSGKPGSSEGSTKGVGALESLRGNADLAYILSMEPCGHCLIINNVNFCRESGLRTRTGSNIDCEKLRRRFSSLHFMVEVKGDLTAKKMVLALLELAQQDHGALDCCVVVILSHGCQASHLQFPGAVYGTDGCPVSVEKIVNIFNGTSCPSLGGKPKLFFIQACGGEQKDHGFEVASTSPEDESPGSNPEPDATPFQEGLRTFDQLDAISSLPTPSDIFVSYSTFPGFVSWRDPKSGSWYVETLDDIFEQWAHSEDLQSLLLRVANAVSVKGIYKQMPGCFNFLRKKLFFKTSMGVQVETISPGDGRTFPKRGQTCVVHYTGMLEDGKKVDSSRDRNKPFKFMLGKQEVIRGWEEGVAQMSVGQRAKLTISPDYAYGATGHPGIIPPHATLVFDVELLKLE

SEQ ID NO: 6053 - protein, 900 aa, Artificial Sequence
  Description of Artificial Sequence: Synthetic Chimeric Antigen Receptor sequence
EVKLVESGGGLVLPGDSLRLSCATSEFTFTDYYMTWVRQPPRKALEWLGFIRNRANGYTTEYNPSVKGRFTISRDNSQSILYLQMNTLRTEDSATYYCARVSNWAFDYWGQGTTLTVSSGSTSGSGKPGSSEGSTKGDVVMTQTPLSLPVSLGDQASISCRSSQSLLKNNGNTFLHWYLQKSGQSPKLLIYKVSNRLSGVPDRFSGSGSGTYFTLKISRVEAEDLGVYFCSQSTHIPYTFGGGTKLEIKFWVLVVVGGVLACYSLLVTVAFIIFWVKRGRKKLLYIFKQPFMRPVQTTQEEDGCSCRFPEEEEGGCELQRRKYRSNKGESPVEPAEPCHYSCPREEEGSTIPIQEDYRKPEPACSPGSTSGSGKPGSSEGSTKGRVKFSRSADAPAYKQGQNQLYNELNLGRREEYDVLDKRRGRDPEMGGKPRRKNPQEGLYNELQKDKMAEAYSEIGMKGERRRGKGHDGLYQGLSTATKDTYDALHMQALPPRGSTSGSGKPGSSEGSTKGVGALESLRGNADLAYILSMEPCGHCLIINNVNFCRESGLRTRTGSNIDCEKLRRRFSSLHFMVEVKGDLTAKKMVLALLELAQQDHGALDCCVVVILSHGCQASHLQFPGAVYGTDGCPVSVEKIVNIFNGTSCPSLGGKPKLFFIQACGGEQKDHGFEVASTSPEDESPGSNPEPDATPFQEGLRTFDQLDAISSLPTPSDIFVSYSTFPGFVSWRDPKSGSWYVETLDDIFEQWAHSEDLQSLLLRVANAVSVKGIYKQMPGCFNFLRKKLFFKTSMGVQVETISPGDGRTFPKRGQTCVVHYTGMLEDGKKVDSSRDRNKPFKFMLGKQEVIRGWEEGVAQMSVGQRAKLTISPDYAYGATGHPGIIPPHATLVFDVELLKLE

SEQ ID NO: 6054 - protein, 1103 aa, Artificial Sequence
  Description of Artificial Sequence: Synthetic Chimeric Antigen Receptor sequence
MLEGVQVETISPGDGRTFPKRGQTCVVHYTGMLEDGKKVDSSRDRNKPFKFMLGKQEVIRGWEEGVAQMSVGQRAKLTISPDYAYGATGHPGIIPPHATLVFDVELLKLESGGGSGVDGFGDVGALESLRGNADLAYILSMEPCGHCLIINNVNFCRESGLRTRTGSNIDCEKLRRRFSSLHFMVEVKGDLTAKKMVLALLELAQQDHGALDCCVVVILSHGCQASHLQFPGAVYGTDGCPVSVEKIVNIFNGTSCPSLGGKPKLFFIQACGGEQKDHGFEVASTSPEDESPGSNPEPDATPFQEGLRTFDQLDAISSLPTPSDIFVSYSTFPGFVSWRDPKSGSWYVETLDDIFEQWAHSEDLQSLLLRVANAVSVKGIYKQMPGCFNFLRKKLFFKTSASRAEGRGSLLTCGDVEENPGPMETDTLLLWVLLLWVPGSTGQVQLQESGPGLVKPSQTLSITCTVSGFSLASYNIHWVRQPPGKGLEWLGVIWAGGSTNYNSALMSRLTISKDNSKNQVFLKMSSLTAADTAVYYCAKRSDDYSWFAYWGQGTLVTVSSGGGGSGGGGSGGGGSENQMTQSPSSLSASVGDRVTMTCRASSSVSSSYLHWYQQKSGKAPKVWIYSTSNLASGVPSRFSGSGSGTDYTLTISSLQPEDFATYYCQQYSGYPITFGQGTKVEIKRSDPAEPKSPDKTHTCPPCPAPPVAGPSVFLFPPKPKDTLMIARTPEVTCVVVDVSHEDPEVKFNWYVDGVEVHNAKTKPREEQYNSTYRVVSVLTVLHQDWLNGKEYKCKVSNKALPAPIEKTISKAKGQPREPQVYTLPPSRDELTKNQVSLTCLVKGFYPSDIAVEWESNGQPENNYKTTPPVLDSDGSFFLYSKLTVDKSRWQQGNVFSCSVMHEALHNHYTQKSLSLSPGKKDPKFWVLVVVGGVLACYSLLVTVAFIIFWVRSKRSRLLHSDYMNMTPRRPGPTRKHYQPYAPPRDFAAYRSRVKFSRSADAPAYQQGQNQLYNELNLGRREEYDVLDKRRGRDPEMGGKPRRKNPQEGLYNELQKDKMAEAYSEIGMKGERRRGKGHDGLYQGLSTATKDTYDALHMQALPPR

SEQ ID NO: 6055 - protein, 454 aa, Artificial Sequence
  Description of Artificial Sequence: Synthetic Chimeric Antigen Receptor sequence
MALPVTALLLPLALLLHAARPQVQLQQSGGGLVKPGGSLTLSCAASRFTFSTYAMSWVRQTPAKRLEWVAYISSGGASTYYRDSVKGRFTISRDNAKNTLYLQMSSLRSEDTAMYYCARGGSRYAMDYWGQGTTVTVSSGGGGSGGGGSGGGGSDIQLTQSPAILSVSPGERVSFSCWASQSIGTSIHWYQQRTNGSPRLLIKYSSESISGIPSRFSGSGSGTDFTLSINSLESEDIADYYCQQTYSWPFTFGSGTKLEIGLAVSTISSFFPPGYQIYIWAPLAGTCGVLLLSLVITLYCKRGRKKLLYIFKQPFMRPVQTTQEEDGCSCRFPEEEEGGCELRVKFSRSADAPAYQQGQNQLYNELNLGRREEYDVLDKRRGRDPEMGGKPRRKNPQEGLYNELQKDKMAEAYSEIGMKGERRRGKGHDGLYQGLSTATKDTYDALHMQALPPR

SEQ ID NO: 6056 - protein, 456 aa, Artificial Sequence
  Description of Artificial Sequence: Synthetic Chimeric Antigen Receptor sequence
MALPVTALLLPLALLLHAARPEVTLVESGGDFVKPGGSLKVSCAASGFAFSHYAMSWVRQTPAKRLEWVAYISSGGSGTYYSDSVKGRFTISRDNAKNTLYLQMRSLRSEDSAMYFCTRVKLGTYYFDSWGQGTTLTVSSGGGGSGGGGSGGGGSDIQMTQTASSLPASLGDRVTISCSASQDISNYLNWYQQKPDGTVKLLIFYSSNLHSGVPSRFSGGGSGTDYSLTISNLEPEDIATYFCHQYSKLPWTFGGGTKLEIKGLAVSTISSFFPPGYQIYIWAPLAGTCGVLLLSLVITLYCKRGRKKLLYIFKQPFMRPVQTTQEEDGCSCRFPEEEEGGCELRVKFSRSADAPAYQQGQNQLYNELNLGRREEYDVLDKRRGRDPEMGGKPRRKNPQEGLYNELQKDKMAEAYSEIGMKGERRRGKGHDGLYQGLSTATKDTYDALHMQALPPR

SEQ ID NO: 6057 - protein, 459 aa, Artificial Sequence
  Description of Artificial Sequence: Synthetic Chimeric Antigen Receptor sequence
MALPVTALLLPLALLLHAARPEVVVVESGGGFVKPGGSLKLSCAAAGFTFSRYAMSWVRQTPEKRLEWVATISSGGSHTYYPDSVKGRFTISRDNAKNTLYLQMSSLRSEDTAIYYCARPGYDRGAWFFDVWGAGTTVTVSSGGGGSGGGGSGGGGSDIVLTQSPATLSVTPGDSVSLSCRASQIISNNLHWYQQKSHESPRLLIKYASQSISGIPSRFSGSGSGTDFTLSINSVETEDFGMYFCQQSNSWPLTFGSGTKLEIKRGLAVSTISSFFPPGYQIYIWAPLAGTCGVLLLSLVITLYCKRGRKKLLYIFKQPFMRPVQTTQEEDGCSCRFPEEEEGGCELRVKFSRSADAPAYQQGQNQLYNELNLGRREEYDVLDKRRGRDPEMGGKPRRKNPQEGLYNELQKDKMAEAYSEIGMKGERRRGKGHDGLYQGLSTATKDTYDALHMQALPPR

SEQ ID NO: 6058 - protein, 483 aa, Artificial Sequence
  Description of Artificial Sequence: Synthetic Chimeric Antigen Receptor sequence
MALPVTALLLPLALLLHAARPQVQLQQSGGGLVKPGGSLTLSCAASRFTFSTYAMSWVRQTPAKRLEWVAYISSGGASTYYRDSVKGRFTISRDNAKNTLYLQMSSLRSEDTAMYYCARGGSRYAMDYWGQGTTVTVSSGGGGSGGGGSGGGGSDIQLTQSPAILSVSPGERVSFSCWASQSIGTSIHWYQQRTNGSPRLLIKYSSESISGIPSRFSGSGSGTDFTLSINSLESEDIADYYCQQTYSWPFTFGSGTKLEITTTPAPRPPTPAPTIASQPLSLRPEACRPAAGGAVHTRGLDFACDIYIWAPLAGTCGVLLLSLVITLYCKRGRKKLLYIFKQPFMRPVQTTQEEDGCSCRFPEEEEGGCELRVKFSRSADAPAYQQGQNQLYNELNLGRREEYDVLDKRRGRDPEMGGKPRRKNPQEGLYNELQKDKMAEAYSEIGMKGERRRGKGHDGLYQGLSTATKDTYDALHMQALPPR

SEQ ID NO: 6059 - protein, 485 aa, Artificial Sequence
  Description of Artificial Sequence: Synthetic Chimeric Antigen Receptor sequence
MALPVTALLLPLALLLHAARPEVTLVESGGDFVKPGGSLKVSCAASGFAFSHYAMSWVRQTPAKRLEWVAYISSGGSGTYYSDSVKGRFTISRDNAKNTLYLQMRSLRSEDSAMYFCTRVKLGTYYFDSWGQGTTLTVSSGGGGSGGGGSGGGGSDIQMTQTASSLPASLGDRVTISCSASQDISNYLNWYQQKPDGTVKLLIFYSSNLHSGVPSRFSGGGSGTDYSLTISNLEPEDIATYFCHQYSKLPWTFGGGTKLEIKTTTPAPRPPTPAPTIASQPLSLRPEACRPAAGGAVHTRGLDFACDIYIWAPLAGTCGVLLLSLVITLYCKRGRKKLLYIFKQPFMRPVQTTQEEDGCSCRFPEEEEGGCELRVKFSRSADAPAYQQGQNQLYNELNLGRREEYDVLDKRRGRDPEMGGKPRRKNPQEGLYNELQKDKMAEAYSEIGMKGERRRGKGHDGLYQGLSTATKDTYDALHMQALPPR

SEQ ID NO: 6060 - protein, 486 aa, Artificial Sequence
  Description of Artificial Sequence: Synthetic Chimeric Antigen Receptor sequence
MALPVTALLLPLALLLHAARPDVQLVESGGGLVQPGGSRKLSCAASGFTFSNFGMHWVRQAPEKGLEWVAYISSGGSSINYADTVKGRFTISRDNPKNTLFLQMTSLRSEDTAIYYCTRGGTGTRSLYYFDYWGQGATLIVGGGGSGGGGSGGGGSDIQMTQITSSLSVSLGDRVIISCRASQDIGNFLNWYQQKPDGSLKLLIYYTSRLQSGVPSRFSGWGSGTDYSLTISNLEEEDIATFFCQQGKTLPYTFGGGTKLEIKTTTPAPRPPTPAPTIASQPLSLRPEACRPAAGGAVHTRGLDFACDIYIWAPLAGTCGVLLLSLVITLYCKRGRKKLLYIFKQPFMRPVQTTQEEDGCSCRFPEEEEGGCELRVKFSRSADAPAYQQGQNQLYNELNLGRREEYDVLDKRRGRDPEMGGKPRRKNPQEGLYNELQKDKMAEAYSEIGMKGERRRGKGHDGLYQGLSTATKDTYDALHMQALPPR

SEQ ID NO: 6061 - protein, 488 aa, Artificial Sequence
  Description of Artificial Sequence: Synthetic Chimeric Antigen Receptor sequence
MALPVTALLLPLALLLHAARPEVVVVESGGGFVKPGGSLKLSCAAAGFTFSRYAMSWVRQTPEKRLEWVATISSGGSHTYYPDSVKGRFTISRDNAKNTLYLQMSSLRSEDTAIYYCARPGYDRGAWFFDVWGAGTTVTVSSGGGGSGGGGSGGGGSDIVLTQSPATLSVTPGDSVSLSCRASQIISNNLHWYQQKSHESPRLLIKYASQSISGIPSRFSGSGSGTDFTLSINSVETEDFGMYFCQQSNSWPLTFGSGTKLEIKRTTTPAPRPPTPAPTIASQPLSLRPEACRPAAGGAVHTRGLDFACDIYIWAPLAGTCGVLLLSLVITLYCKRGRKKLLYIFKQPFMRPVQTTQEEDGCSCRFPEEEEGGCELRVKFSRSADAPAYQQGQNQLYNELNLGRREEYDVLDKRRGRDPEMGGKPRRKNPQEGLYNELQKDKMAEAYSEIGMKGERRRGKGHDGLYQGLSTATKDTYDALHMQALPPR

SEQ ID NO: 6062 - protein, 669 aa, Artificial Sequence
  Description of Artificial Sequence: Synthetic Chimeric Antigen Receptor sequence
MALPVTALLLPLALLLHAARPQVQLQQSGGGLVKPGGSLTLSCAASRFTFSTYAMSWVRQTPAKRLEWVAYISSGGASTYYRDSVKGRFTISRDNAKNTLYLQMSSLRSEDTAMYYCARGGSRYAMDYWGQGTTVTVSSGGGGSGGGGSGGGGSDIQLTQSPAILSVSPGERVSFSCWASQSIGTSIHWYQQRTNGSPRLLIKYSSESISGIPSRFSGSGSGTDFTLSINSLESEDIADYYCQQTYSWPFTFGSGTKLEIEPKSPDKTHTCPPCPAPPVAGPSVFLFPPKPKDTLMIARTPEVTCVVVDVSHEDPEVKFNWYVDGVEVHNAKTKPREEQYNSTYRVVSVLTVLHQDWLNGKEYKCKVSNKALPAPIEKTISKAKGQPREPQVYTLPPSRDELTKNQVSLTCLVKGFYPSDIAVEWESNGQPENNYKTTPPVLDSDGSFFLYSKLTVDKSRWQQGNVFSCSVMHEALHNHYTQKSLSLSPGKIYIWAPLAGTCGVLLLSLVITLYCKRGRKKLLYIFKQPFMRPVQTTQEEDGCSCRFPEEEEGGCELRVKFSRSADAPAYQQGQNQLYNELNLGRREEYDVLDKRRGRDPEMGGKPRRKNPQEGLYNELQKDKMAEAYSEIGMKGERRRGKGHDGLYQGLSTATKDTYDALHMQALPPR

SEQ ID NO: 6063 - protein, 671 aa, Artificial Sequence
  Description of Artificial Sequence: Synthetic Chimeric Antigen Receptor sequence
MALPVTALLLPLALLLHAARPEVTLVESGGDFVKPGGSLKVSCAASGFAFSHYAMSWVRQTPAKRLEWVAYISSGGSGTYYSDSVKGRFTISRDNAKNTLYLQMRSLRSEDSAMYFCTRVKLGTYYFDSWGQGTTLTVSSGGGGSGGGGSGGGGSDIQMTQTASSLPASLGDRVTISCSASQDISNYLNWYQQKPDGTVKLLIFYSSNLHSGVPSRFSGGGSGTDYSLTISNLEPEDIATYFCHQYSKLPWTFGGGTKLEIKEPKSPDKTHTCPPCPAPPVAGPSVFLFPPKPKDTLMIARTPEVTCVVVDVSHEDPEVKFNWYVDGVEVHNAKTKPREEQYNSTYRVVSVLTVLHQDWLNGKEYKCKVSNKALPAPIEKTISKAKGQPREPQVYTLPPSRDELTKNQVSLTCLVKGFYPSDIAVEWESNGQPENNYKTTPPVLDSDGSFFLYSKLTVDKSRWQQGNVFSCSVMHEALHNHYTQKSLSLSPGKIYIWAPLAGTCGVLLLSLVITLYCKRGRKKLLYIFKQPFMRPVQTTQEEDGCSCRFPEEEEGGCELRVKFSRSADAPAYQQGQNQLYNELNLGRREEYDVLDKRRGRDPEMGGKPRRKNPQEGLYNELQKDKMAEAYSEIGMKGERRRGKGHDGLYQGLSTATKDTYDALHMQALPPR

SEQ ID NO: 6064 - protein, 672 aa, Artificial Sequence
  Description of Artificial Sequence: Synthetic Chimeric Antigen Receptor sequence
MALPVTALLLPLALLLHAARPDVQLVESGGGLVQPGGSRKLSCAASGFTFSNFGMHWVRQAPEKGLEWVAYISSGGSSINYADTVKGRFTISRDNPKNTLFLQMTSLRSEDTAIYYCTRGGTGTRSLYYFDYWGQGATLIVGGGGSGGGGSGGGGSDIQMTQITSSLSVSLGDRVIISCRASQDIGNFLNWYQQKPDGSLKLLIYYTSRLQSGVPSRFSGWGSGTDYSLTISNLEEEDIATFFCQQGKTLPYTFGGGTKLEIKEPKSPDKTHTCPPCPAPPVAGPSVFLFPPKPKDTLMIARTPEVTCVVVDVSHEDPEVKFNWYVDGVEVHNAKTKPREEQYNSTYRVVSVLTVLHQDWLNGKEYKCKVSNKALPAPIEKTISKAKGQPREPQVYTLPPSRDELTKNQVSLTCLVKGFYPSDIAVEWESNGQPENNYKTTPPVLDSDGSFFLYSKLTVDKSRWQQGNVFSCSVMHEALHNHYTQKSLSLSPGKIYIWAPLAGTCGVLLLSLVITLYCKRGRKKLLYIFKQPFMRPVQTTQEEDGCSCRFPEEEEGGCELRVKFSRSADAPAYQQGQNQLYNELNLGRREEYDVLDKRRGRDPEMGGKPRRKNPQEGLYNELQKDKMAEAYSEIGMKGERRRGKGHDGLYQGLSTATKDTYDALHMQALPPR

SEQ ID NO: 6065 - protein, 674 aa, Artificial Sequence
  Description of Artificial Sequence: Synthetic Chimeric Antigen Receptor sequence
MALPVTALLLPLALLLHAARPEVVVVESGGGFVKPGGSLKLSCAAAGFTFSRYAMSWVRQTPEKRLEWVATISSGGSHTYYPDSVKGRFTISRDNAKNTLYLQMSSLRSEDTAIYYCARPGYDRGAWFFDVWGAGTTVTVSSGGGGSGGGGSGGGGSDIVLTQSPATLSVTPGDSVSLSCRASQIISNNLHWYQQKSHESPRLLIKYASQSISGIPSRFSGSGSGTDFTLSINSVETEDFGMYFCQQSNSWPLTFGSGTKLEIKREPKSPDKTHTCPPCPAPPVAGPSVFLFPPKPKDTLMIARTPEVTCVVVDVSHEDPEVKFNWYVDGVEVHNAKTKPREEQYNSTYRVVSVLTVLHQDWLNGKEYKCKVSNKALPAPIEKTISKAKGQPREPQVYTLPPSRDELTKNQVSLTCLVKGFYPSDIAVEWESNGQPENNYKTTPPVLDSDGSFFLYSKLTVDKSRWQQGNVFSCSVMHEALHNHYTQKSLSLSPGKIYIWAPLAGTCGVLLLSLVITLYCKRGRKKLLYIFKQPFMRPVQTTQEEDGCSCRFPEEEEGGCELRVKFSRSADAPAYQQGQNQLYNELNLGRREEYDVLDKRRGRDPEMGGKPRRKNPQEGLYNELQKDKMAEAYSEIGMKGERRRGKGHDGLYQGLSTATKDTYDALHMQALPPR

SEQ ID NO: 6066 - protein, 415 aa, Artificial Sequence
  Description of Artificial Sequence: Synthetic Chimeric Antigen Receptor sequence
MDWIWRILFLVGAATGAHSQVQLQQSGAELVRPGASVKLSCKASGYTFTDYEMHWVKQTPVHGLKWIGALDPKTGDTAYSQKFKGKATLTADKSSSTAYMELRSLTSEDSAVYYCTRFYSYTYWGQGTLVTVSAGGGGSGGGGSGGGGSDVVMTQTPLSLPVSLGDQASISCRSSQSLVHSNGNTYLHWYLQKPGQSPKLLIYKVSNRFSGVPDRFSGSGSGTDFTLKISRVEAEDLGVYFCSQNTHVPPTFGSGTKLEIKEPKSCDKTHTCPPCPDPKFWVLVVVGGVLACYSLLVTVAFIIRVKFSRSADAPAYQQGQNQLYNELNLGRREEYDVLDKRRGRDPEMGGKPRRKNPQEGLYNELQKDKMAEAYSEIGMKGERRRGKGHDGLYQGLSTATKDTYDALHMQALPPR

SEQ ID NO: 6067 - protein, 396 aa, Artificial Sequence
  Description of Artificial Sequence: Synthetic Chimeric Antigen Receptor sequence
QVQLQQSGAELVRPGASVKLSCKASGYTFTDYEMHWVKQTPVHGLKWIGALDPKTGDTAYSQKFKGKATLTADKSSSTAYMELRSLTSEDSAVYYCTRFYSYTYWGQGTLVTVSAGGGGSGGGGSGGGGSDVVMTQTPLSLPVSLGDQASISCRSSQSLVHSNGNTYLHWYLQKPGQSPKLLIYKVSNRFSGVPDRFSGSGSGTDFTLKISRVEAEDLGVYFCSQNTHVPPTFGSGTKLEIKEPKSCDKTHTCPPCPDPKFWVLVVVGGVLACYSLLVTVAFIIRVKFSRSADAPAYQQGQNQLYNELNLGRREEYDVLDKRRGRDPEMGGKPRRKNPQEGLYNELQKDKMAEAYSEIGMKGERRRGKGHDGLYQGLSTATKDTYDALHMQALPPR

SEQ ID NO: 6068 - protein, 438 aa, Artificial Sequence
  Description of Artificial Sequence: Synthetic Chimeric Antigen Receptor sequence
QVQLQQSGAELVRPGASVKLSCKASGYTFTDYEMHWVKQTPVHGLKWIGALDPKTGDTAYSQKFKGKATLTADKSSSTAYMELRSLTSEDSAVYYCTRFYSYTYWGQGTLVTVSAGGGGSGGGGSGGGGSDVVMTQTPLSLPVSLGDQASISCRSSQSLVHSNGNTYLHWYLQKPGQSPKLLIYKVSNRFSGVPDRFSGSGSGTDFTLKISRVEAEDLGVYFCSQNTHVPPTFGSGTKLEIKEPKSCDKTHTCPPCPDPKFWVLVVVGGVLACYSLLVTVAFIIKRGRKKLLYIFKQPFMRPVQTTQEEDGCSCRFPEEEEGGCELRVKFSRSADAPAYQQGQNQLYNELNLGRREEYDVLDKRRGRDPEMGGKPRRKNPQEGLYNELQKDKMAEAYSEIGMKGERRRGKGHDGLYQGLSTATKDTYDALHMQALPPR

SEQ ID NO: 6069 - protein, 440 aa, Artificial Sequence
  Description of Artificial Sequence: Synthetic Chimeric Antigen Receptor sequence
QVQLQQSGAELVRPGASVKLSCKASGYTFTDYEMHWVKQTPVHGLKWIGALDPKTGDTAYSQKFKGKATLTADKSSSTAYMELRSLTSEDSAVYYCTRFYSYTYWGQGTLVTVSAGGGGSGGGGSGGGGSDVVMTQTPLSLPVSLGDQASISCRSSQSLVHSNGNTYLHWYLQKPGQSPKLLIYKVSNRFSGVPDRFSGSGSGTDFTLKISRVEAEDLGVYFCSQNTHVPPTFGSGTKLEIKEPKSCDKTHTCPPCPDPKFWVLVVVGGVLACYSLLVTVAFIIFWVRSKRSRLLHSDYMNMTPRRPGPTRKHYQPYAPPRDFAAYRSRVKFSRSADAPAYQQGQNQLYNELNLGRREEYDVLDKRRGRDPEMGGKPRRKNPQEGLYNELQKDKMAEAYSEIGMKGERRRGKGHDGLYQGLSTATKDTYDALHMQALPPR

SEQ ID NO: 6070 - protein, 457 aa, Artificial Sequence
  Description of Artificial Sequence: Synthetic Chimeric Antigen Receptor sequence
MDWIWRILFLVGAATGAHSQVQLQQSGAELVRPGASVKLSCKASGYTFTDYEMHWVKQTPVHGLKWIGALDPKTGDTAYSQKFKGKATLTADKSSSTAYMELRSLTSEDSAVYYCTRFYSYTYWGQGTLVTVSAGGGGSGGGGSGGGGSDVVMTQTPLSLPVSLGDQASISCRSSQSLVHSNGNTYLHWYLQKPGQSPKLLIYKVSNRFSGVPDRFSGSGSGTDFTLKISRVEAEDLGVYFCSQNTHVPPTFGSGTKLEIKEPKSCDKTHTCPPCPDPKFWVLVVVGGVLACYSLLVTVAFIIKRGRKKLLYIFKQPFMRPVQTTQEEDGCSCRFPEEEEGGCELRVKFSRSADAPAYQQGQNQLYNELNLGRREEYDVLDKRRGRDPEMGGKPRRKNPQEGLYNELQKDKMAEAYSEIGMKGERRRGKGHDGLYQGLSTATKDTYDALHMQALPPR

SEQ ID NO: 6071 - protein, 459 aa, Artificial Sequence
  Description of Artificial Sequence: Synthetic Chimeric Antigen Receptor sequence
MDWIWRILFLVGAATGAHSQVQLQQSGAELVRPGASVKLSCKASGYTFTDYEMHWVKQTPVHGLKWIGALDPKTGDTAYSQKFKGKATLTADKSSSTAYMELRSLTSEDSAVYYCTRFYSYTYWGQGTLVTVSAGGGGSGGGGSGGGGSDVVMTQTPLSLPVSLGDQASISCRSSQSLVHSNGNTYLHWYLQKPGQSPKLLIYKVSNRFSGVPDRFSGSGSGTDFTLKISRVEAEDLGVYFCSQNTHVPPTFGSGTKLEIKEPKSCDKTHTCPPCPDPKFWVLVVVGGVLACYSLLVTVAFIIFWVRSKRSRLLHSDYMNMTPRRPGPTRKHYQPYAPPRDFAAYRSRVKFSRSADAPAYQQGQNQLYNELNLGRREEYDVLDKRRGRDPEMGGKPRRKNPQEGLYNELQKDKMAEAYSEIGMKGERRRGKGHDGLYQGLSTATKDTYDALHMQALPPR

SEQ ID NO: 6072 - protein, 482 aa, Artificial Sequence
  Description of Artificial Sequence: Synthetic Chimeric Antigen Receptor sequence
QVQLQQSGAELVRPGASVKLSCKASGYTFTDYEMHWVKQTPVHGLKWIGALDPKTGDTAYSQKFKGKATLTADKSSSTAYMELRSLTSEDSAVYYCTRFYSYTYWGQGTLVTVSAGGGGSGGGGSGGGGSDVVMTQTPLSLPVSLGDQASISCRSSQSLVHSNGNTYLHWYLQKPGQSPKLLIYKVSNRFSGVPDRFSGSGSGTDFTLKISRVEAEDLGVYFCSQNTHVPPTFGSGTKLEIKEPKSCDKTHTCPPCPDPKFWVLVVVGGVLACYSLLVTVAFIIFWVRSKRSRLLHSDYMNMTPRRPGPTRKHYQPYAPPRDFAAYRSKRGRKKLLYIFKQPFMRPVQTTQEEDGCSCRFPEEEEGGCELRVKFSRSADAPAYQQGQNQLYNELNLGRREEYDVLDKRRGRDPEMGGKPRRKNPQEGLYNELQKDKMAEAYSEIGMKGERRRGKGHDGLYQGLSTATKDTYDALHMQALPPR

SEQ ID NO: 6073 - protein, 501 aa, Artificial Sequence
  Description of Artificial Sequence: Synthetic Chimeric Antigen Receptor sequence
MDWIWRILFLVGAATGAHSQVQLQQSGAELVRPGASVKLSCKASGYTFTDYEMHWVKQTPVHGLKWIGALDPKTGDTAYSQKFKGKATLTADKSSSTAYMELRSLTSEDSAVYYCTRFYSYTYWGQGTLVTVSAGGGGSGGGGSGGGGSDVVMTQTPLSLPVSLGDQASISCRSSQSLVHSNGNTYLHWYLQKPGQSPKLLIYKVSNRFSGVPDRFSGSGSGTDFTLKISRVEAEDLGVYFCSQNTHVPPTFGSGTKLEIKEPKSCDKTHTCPPCPDPKFWVLVVVGGVLACYSLLVTVAFIIFWVRSKRSRLLHSDYMNMTPRRPGPTRKHYQPYAPPRDFAAYRSKRGRKKLLYIFKQPFMRPVQTTQEEDGCSCRFPEEEEGGCELRVKFSRSADAPAYQQGQNQLYNELNLGRREEYDVLDKRRGRDPEMGGKPRRKNPQEGLYNELQKDKMAEAYSEIGMKGERRRGKGHDGLYQGLSTATKDTYDALHMQALPPR

SEQ ID NO: 6074 - DNA, 1380 bp, Artificial Sequence
  Description of Artificial Sequence: Synthetic Chimeric Antigen Receptor sequence
atggattggatttggcgcattctgtttctggtgggagccgcaaccggagcacatagtcaggtccagctgcagcagtcaggagccgaactggtgcggcccggcgcaagtgtcaaactgtcatgcaaggccagcgggtataccttcacagactacgagatgcactgggtgaaacagacccctgtgcacggcctgaagtggatcggcgctctggacccaaaaaccggggatacagcatattcccagaagtttaaaggaaaggccactctgaccgctgacaagagctcctctactgcctacatggagctgaggagcctgacatccgaagatagcgccgtgtactattgcacccgcttctactcctatacatactggggccaggggactctggtgaccgtctctgcaggaggaggaggctctggaggaggagggagtggaggcgggggaagcgacgtggtcatgacacagactccactgtccctgcccgtgagcctgggcgatcaggctagcatttcctgtcgaagttcacagagtctggtgcactcaaacggaaatacctatctgcattggtacctgcagaagccaggccagtctcccaaactgctgatctataaggtgagcaaccggttctccggggtccctgacagattttctggaagtggctcagggacagatttcactctgaaaattagcagagtggaggccgaagatctgggcgtctacttttgtagccagaatacccacgtcccaccaacattcggaagcggcactaaactggaaatcaaggagcccaaatcttgtgacaaaactcacacatgcccaccgtgcccggatccgaaagatcccaaattttgggtgctggtggtggttggtggagtcctggcttgctatagcttgctagtaacagtggcctttattattaaacggggcagaaagaaactcctgtatatattcaaacaaccatttatgagaccagtacaaactactcaagaggaagatggctgtagctgccgatttccagaagaagaagaaggaggatgtgaactgagagtgaagttcagcaggagcgcagacgcccccgcgtaccagcagggccagaaccagctctataacgagctcaatctaggacgaagagaggagtacgatgttttggacaagagacgtggccgggaccctgagatggggggaaagccgagaaggaagaaccctcaggaaggcctgtacaatgaactgcagaaagataagatggcggaggcctacagtgagattgggatgaaaggcgagcgccggaggggcaaggggcacgatggcctttaccagggtctcagtacagccaccaaggacacctacgacgcccttcacatgcaggccctgccccctcgc

SEQ ID NO: 6075 - protein, 464 aa, Artificial Sequence
  Description of Artificial Sequence: Synthetic Chimeric Antigen Receptor sequence
DVVMTQSPLSLPVTPGEPASISCRSSQSLVHSNANTYLHWYLQKPGQSPQLLIYKVSNRFSGVPDRFSGSGSGTDFTLKISRVEAEDVGVYYCSQNTHVPPTFGQGTKLEIKRGGGGSGGGGSGGGGSQVQLVQSGAEVKKPGASVKVSCKASGYTFTDYEMHWVRQAPGQGLEWMGALDPKTGDTAYSQKFKGRVTLTADESTSTAYMELSSLRSEDTAVYYCTRFYSYTYWGQGTLVTVSSTTTPAPRPPTPAPTIASQPLSLRPEACRPAAGGAVHTRGLDFACDIYIWAPLAGTCGVLLLSLVITKRGRKKLLYIFKQPFMRPVQTTQEEDGCSCRFPEEEEGGCELRVKFSRSADAPAYQQGQNQLYNELNLGRREEYDVLDKRRGRDPEMGGKPQRRKNPQEGLYNELQKDKMAEAYSEIGMKGERRRGKGHDGLYQGLSTATKDTYDALHMQALPPR

SEQ ID NO: 6076 - protein, 469 aa, Artificial Sequence
  Description of Artificial Sequence: Synthetic Chimeric Antigen Receptor sequence
DVVMTQSPLSLPVTPGEPASISCRSSQSLVHSNANTYLHWYLQKPGQSPQLLIYKVSNRFSGVPDRFSGSGSGTDFTLKISRVEAEDVGVYYCSQNTHVPPTFGQGTKLEIKRGGGGSGGGGSGGGGSQVQLVQSGAEVKKPGASVKVSCKASGYTFTDYEMHWVRQAPGQGLEWMGALDPKTGDTAYSQKFKGRVTLTADESTSTAYMELSSLRSEDTAVYYCTRFYSYTYWGQGTLVTVSSTTTPAPRPPTPAPTIASQPLSLRPEACRPAAGGAVHTRGLDFACDFWVLVVVGGVLACYSLLVTVAFIIFWVRSKRSRLLHSDYMNMTPRRPGPTRKHYQPYAPPRDFAAYRSRVKFSRSADAPAYQQGQNQLYNELNLGRREEYDVLDKRRGRDPEMGGKPQRRKNPQEGLYNELQKDKMAEAYSEIGMKGERRRGKGHDGLYQGLSTATKDTYDALHMQALPPR

SEQ ID NO: 6077 - protein, 500 aa, Artificial Sequence
  Description of Artificial Sequence: Synthetic Chimeric Antigen Receptor sequence
DIQMTQSPSSLSASVGDRVTITCRASQNIATDVSTAVAWIQQKPGKAPKLLIYSASFLYSGVPSRFSGSGSGTDFTLTISSLQPEDFATYYCQQSEPEPYTFGQGTKVEIKRGSTSGSGKPGSGEGSTKGEVQLVESGGGLVQPGGSLRLSCAASGFTLSGDWVIHWVRQAPGKGLEWVGEISAAGGYTDYADSVKGRFTISADTSKNTAYLQMNSLRAEDTAVYYCARESRVSFEAAMDYWGQGTLVPSDIAVEWESNGQPENNYKTTPPVLDSDGSFFLYSRLTVDKSRWQEGNVFSCSVMHEALHNHYTQKSLSLSLGKWVLVVVGGVLACYSLLVTVAFIIKRGRKKLLYIFKQPFMRPVQTTQEEDGCSCRFPEEEEGGCELRVKFSRSADAPAYQQGQNQLYNELNLGRREEYDVLDKRRGRDPEMGGKPQRRKNPQEGLYNELQKDKMAEAYSEIGMKGERRRGKGHDGLYQGLSTATKDTYDALHMQALPPR

SEQ ID NO: 6078 - protein, 511 aa, Artificial Sequence
  Description of Artificial Sequence: Synthetic Chimeric Antigen Receptor sequence
DVVMTQSPLSLPVTPGEPASISCRSSQSLVHSNANTYLHWYLQKPGQSPQLLIYKVSNRFSGVPDRFSGSGSGTDFTLKISRVEAEDVGVYYCSQNTHVPPTFGQGTKLEIKRGGGGSGGGGSGGGGSQVQLVQSGAEVKKPGASVKVSCKASGYTFTDYEMHWVRQAPGQGLEWMGALDPKTGDTAYSQKFKGRVTLTADESTSTAYMELSSLRSEDTAVYYCTRFYSYTYWGQGTLVTVSSTTTPAPRPPTPAPTIASQPLSLRPEACRPAAGGAVHTRGLDFACDFWVLVVVGGVLACYSLLVTVAFIIFWVRSKRSRLLHSDYMNMTPRRPGPTRKHYQPYAPPRDFAAYRSKRGRKKLLYIFKQPFMRPVQTTQEEDGCSCRFPEEEEGGCELRVKFSRSADAPAYQQGQNQLYNELNLGRREEYDVLDKRRGRDPEMGGKPQRRKNPQEGLYNELQKDKMAEAYSEIGMKGERRRGKGHDGLYQGLSTATKDTYDALHMQALPPR

SEQ ID NO: 6079 - protein, 503 aa, Artificial Sequence
  Description of Artificial Sequence: Synthetic Chimeric Antigen Receptor sequence
DIQMTQSPSSLSASVGDRVTITCRASQNIATDVSTAVAWIQQKPGKAPKLLIYSASFLYSGVPSRFSGSGSGTDFTLTISSLQPEDFATYYCQQSEPEPYTFGQGTKVEIKRGSTSGSGKPGSGEGSTKGEVQLVESGGGLVQPGGSLRLSCAASGFTLSGDWVIHWVRQAPGKGLEWVGEISAAGGYTDYADSVKGRFTISADTSKNTAYLQMNSLRAEDTAVYYCARESRVSFEAAMDYWGQGTLVPSDIAVEWESNGQPENNYKTTPPVLDSDGSFFLYSRLTVDKSRWQEGNVFSCSVMHEALHNHYTQKSLSLSLGKFWVLVVVGGVLACYSLLVTVAFIIFWVRSKRSRLLHSDYMNMTPRRPGPTRKHYQPYAPPRDFAAYRSRVKFSRSADAPAYQQGQNQLYNELNLGRREEYDVLDKRRGRDPEMGGKPQRRKNPQEGLYNELQKDKMAEAYSEIGMKGERRRGKGHDGLYQGLSTATKDTYDALHMQALPPR

SEQ ID NO: 6080 - protein, 818 aa, Artificial Sequence
  Description of Artificial Sequence: Synthetic Chimeric Antigen Receptor sequence
MLLLVTSLLLCELPHPAFLLIPEVQLVESGGGLVQPGGSLRLSCAASGFNIKDTYIHWVRQSPGKGLEWVARIYPTNGYTRYADSVKGRFTISADTSKNTAYLQMNSLRAEDTAIYYCSRWGGDGFYAMDYWGQGTLVTVSSASTKGPSVFPLAPSSKSTSGGTAALGCLVKDYFPEPVTVSWNSGALTSGVHTFPAVLQSSGLYSLSSVVTVPSSSLGTQTYICNVNHKPSNTKVDKKVEPKSCESKYGPPCPPCPGGGSSGGGSGGQPREPQVYTLPPSQEEMTKNQVSLTCLVKGFYPSDIAVEWESNGQPENNYKTTPPVLDSDGSFFLYSRLTVDKSRWQEGNVFSCSVMHEALHNHYTQKSLSLSLGKMFWVLVVVGGVLACYSLLVTVAFIIFWVRSKRSRGGHSDYMNMTPRRPGPTRKHYQPYAPPRDFAAYRSGGGRVKFSRSADAPAYQQGQNQLYNELNLGRREEYDVLDKRRGRDPEMGGKPRRKNPQEGLYNELQKDKMAEAYSEIGMKGERRRGKGHDGLYQGLSTATKDTYDALHMQALPPRLEGGGEGRGSLLTCGDVEENPGPRMLLLVTSLLLCELPHPAFLLIPDIQMTQSPILLSASVGDRVTITCRASQDVNTAVAWYQQRTNGSPRLLIYSASFLYSGVPSRFSGSRSGTDFTLTISSLQPEDEADYYCQQHYTTPPTFGAGTKVEIKRTVAAPSVFIFPPSDEQLKSGTASVVCLLNNFYPREAKVQWKVDNALQSGNSQESVTEQDSKDSTYSLSSTLTLSKADYEKHKVYACEVTHQGLSSPVTKSFNRGEC

SEQ ID NO: 6081 - protein, 438 aa, Artificial Sequence
  Description of Artificial Sequence: Synthetic Chimeric Antigen Receptor sequence
DIQMTQSPSSLSASVGDRVTITCRASQDVNTAVAWYQQKPGKAPKLLIVSASFLVSGVPSRFSGSRSGTDFTLTISSLQPEDFATYVCQQHYTTPPTFGQGTKVEIKRTGGGGSGGGGSGGGGSEVQLVESGGGLVQPGGSLRLSCAASGFNIKDTYIHWVRQAPGKGLEWVARIYPTNGYTRYADSVKGRFTISADTSKNTAYLQMNSLRAEDTAVVYCSRWGGDGFYAMDYWGQGTLVTVSSAAAESKVGPPCPPCPDIYIWAPLAGTCGVLLLSLVITLVCKRGRKKLLYIFKQPFMRPVQTTQEEDGCSCRFPEEEEGGCELRVKFSRSADAPAYKQGQNQLYNELNLGRREEYDVLDKRRGRDPEMGGKPRRKNPQEGLYNELQKDKMAEAVSEIGMKGERRRGKGHDGLYQGLSTATKDTYDALHMQALPPR

SEQ ID NO: 6082 - protein, 438 aa, Artificial Sequence
  Description of Artificial Sequence: Synthetic Chimeric Antigen Receptor sequence
DIQMTQSPSSLSASVGDRVTITCRASQDVNTAVAWYQQKPGKAPKLLIYSASFLYSGVPSRFSGSRSGTDFTLTISSLQPEDFATYYCQQHYTTPPTFGQGTKVEIKRTGGGGSGGGGSGGGGSEVQLVESGGGLVQPGGSLRLSCAASGFNIKDTYIHWVRQAPGKGLEWVARIYPTNGYTRYADSVKGRFTISADTSKNTAYLQMNSLRAEDTAVYYCSRWGGDGFYAMDYWGQGTLVTVSSAAAESKYGPPCPPCPDIYIWAPLAGTCGVLLLSLVITLYCKRGRKKLLYIFKQPFMRPVQTTQEEDGCSCRFPEEEEGGCELRVKFSRSADAPAYKQGQNQLYNELNLGRREEYDVLDKRRGRDPEMGGKPRRKNPQEGLYNELQKDKMAEAYSEIGMKGERRRGKGHDGLYQGLSTATKDTYDALHMQALPPR

SEQ ID NO: 6083 - protein, 470 aa, Artificial Sequence
  Description of Artificial Sequence: Synthetic Chimeric Antigen Receptor sequence
DIQMTQSPSSLSASVGDRVTITCRASQDVNTAVAWYQQKPGKAPKLLIVSASFLVSGVPSRFSGSRSGTDFTLTISSLQPEDFATYVCQQHYTTPPTFGQGTKVEIKRTGGGGSGGGGSGGGGSEVQLVESGGGLVQPGGSLRLSCAASGFNIKDTYIHWVRQAPGKGLEWVARIYPTNGYTRYADSVKGRFTISADTSKNTAYLQMNSLRAEDTAVVYCSRWGGDGFYAMDYWGQGTLVTVSSAAATTTPAPRPPTPAPTIASQPLSLRPEACRPAAGGAVHTRGLDFACDIYIWAPLAGTCGVLLLSLVITLVCKRGRKKLLYIFKQPFMRPVQTIQEEDGCSCRFPEEEEGGCELRVKFSRSADAPAYKQGQNQLYNELNLGRREEYDVLDKRRGRDPEMGGKPRRKNPQEGLYNELQKDKMAEAVSEIGMKGERRRGKGHDGLYQGLSTATKDTYDALHMQALPPR

SEQ ID NO: 6084 - protein, 470 aa, Artificial Sequence
  Description of Artificial Sequence: Synthetic Chimeric Antigen Receptor sequence
DIQMTQSPSSLSASVGDRVTITCRASQDVNTAVAWYQQKPGKAPKLLIYSASFLYSGVPSRFSGSRSGTDFTLTISSLQPEDFATYYCQQHYTTPPTFGQGTKVEIKRTGGGGSGGGGSGGGGSEVQLVESGGGLVQPGGSLRLSCAASGFNIKDTYIHWVRQAPGKGLEWVARIYPTNGYTRYADSVKGRFTISADTSKNTAYLQMNSLRAEDTAVYYCSRWGGDGFYAMDYWGQGTLVTVSSAAATTTPAPRPPTPAPTIASQPLSLRPEACRPAAGGAVHTRGLDFACDIYIWAPLAGTCGVLLLSLVITLYCKRGRKKLLYIFKQPFMRPVQTTQEEDGCSCRFPEEEEGGCELRVKFSRSADAPAYKQGQNQLYNELNLGRREEYDVLDKRRGRDPEMGGKPRRKNPQEGLYNELQKDKMAEAYSEIGMKGERRRGKGHDGLYQGLSTATKDTYDALHMQALPPR

SEQ ID NO: 6085 - protein, 680 aa, Artificial Sequence
  Description of Artificial Sequence: Synthetic Chimeric Antigen Receptor sequence
MLLLVTSLLLCELPHPAFLLIPMAQVKLQQSGPDLVKPGASVKISCKASGYSFTGYYMHWVKQSHGKSLEWIGRVNPNSGGTSYNQKFKDKAILTVDKSSSTAYMELRSLTSEDSAVYYCARSKGNYFYAMDYWGQGTTVTVSSSGGGSGGGGSGGGGSDIELTQSPSSLAVSLGQRATISCRASESVDSHGTSLMHWYQQKPGQPPKFLIYRASNLESGIPARFSGSGSRTDFTLTINPVETDDVAIYYCQQSNEDPPTFGGGTKLELKESKYGPPCPPCPAPEFLGGPSVFLFPPKPKDTLMISRTPEVTCVVVDVSQEDPEVQFNWYVDGVEVHNAKTKPREEQFNSTYRVVSVLTVLHQDWLNGKEYKCKVSNKGLPSSIEKTISKAKGQPREPQVYTLPPSQEEMTKNQVSLTCLVKGFYPSDIAVEWESNGQPENNYKTTPPVLDSDGSFFLYSRLTVDKSRWQEGNVFSCSVMHEALHNHYTQKSLSLSLGKMFWVLVVVGGVLACYSLLVTVAFIIFWVRSKRSRGGHSDYMNMTPRRPGPTRKHYQPYAPPRDFAAYRSRVKFSRSADAPAYQQGQNQLYNELNLGRREEYDVLDKRRGRDPEMGGKPRRKNPQEGLYNELQKDKMAEAYSEIGMKGERRRGKGHDGLYQGLSTATKDTYDALHMQALPPR

SEQ ID NO: 6086 - protein, 816 aa, Artificial Sequence
  Description of Artificial Sequence: Synthetic Chimeric Antigen Receptor sequence
MLLLVTSLLLCELPHPAFLLIPDIQMTQSPILLSASVGDRVTITCRASQDVNTAVAWYQQRTNGSPRLLIYSASFLYSGVPSRFSGSRSGTDFTLTISSLQPEDEADYYCQQHYTTPPTFGAGTKVEIKRTVAAPSVFIFPPSDEQLKSGTASVVCLLNNFYPREAKVQWKVDNALQSGNSQESVTEQDSKDSTYSLSSTLTLSKADYEKHKVYACEVTHQGLSSPVTKSFNRGECLEGGGEGRGSLLTCGDVEENPGMLLLVTSLLLCELPHPAFLLIPEVQLVESGGGLVQPGGSLRLSCAASGFNIKDTYIHWVRQSPGKGLEWVARIYPTNGYTRYADSVKGRFTISADTSKNTAYLQMNSLRAEDTAIYYCSRWGGDGFYAMDYWGQGTLVTVSSASTKGPSVFPLAPSSKSTSGGTAALGCLVKDYFPEPVTVSWNSGALTSGVHTFPAVLQSSGLYSLSSVVTVPSSSLGTQTYICNVNHKPSNTKVDKKVEPKSCESKYGPPCPPCPGGGSSGGGSGGQPREPQVYTLPPSQEEMTKNQVSLTCLVKGFYPSDIAVEWESNGQPENNYKTTPPVLDSDGSFFLYSRLTVDKSRWQEGNVFSCSVMHEALHNHYTQKSLSLSLGKMFWVLVVVGGVLACYSLLVTVAFIIFWVRSKRSRGGHSDYMNMTPRRPGPTRKHYQPYAPPRDFAAYRSGGGRVKFSRSADAPAYQQGQNQLYNELNLGRREEYDVLDKRRGRDPEMGGKPRRKNPQEGLYNELQKDKMAEAYSEIGMKGERRRGKGHDGLYQGLSTATKDTYDALHMQALPPR

SEQ ID NO: 6087 - protein, 1162 aa, Artificial Sequence
  Description of Artificial Sequence: Synthetic Chimeric Antigen Receptor sequence
MLLLVTSLLLCELPHPAFLLIPEVQLVESGGGLVQPGGSLRLSCAASGFNIKDTYIHWVRQSPGKGLEWVARIYPTNGYTRYADSVKGRFTISADTSKNTAYLQMNSLRAEDTAIYYCSRWGGDGFYAMDYWGQGTLVTVSSASTKGPSVFPLAPSSKSTSGGTAALGCLVKDYFPEPVTVSWNSGALTSGVHTFPAVLQSSGLYSLSSVVTVPSSSLGTQTYICNVNHKPSNTKVDKKVEPKSCESKYGPPCPPCPGGGSSGGGSGGQPREPQVYTLPPSQEEMTKNQVSLTCLVKGFYPSDIAVEWESNGQPENNYKTTPPVLDSDGSFFLYSRLTVDKSRWQEGNVFSCSVMHEALHNHYTQKSLSLSLGKMFWVLVVVGGVLACYSLLVTVAFIIFWVRSKRSRGGHSDYMNMTPRRPGPTRKHYQPYAPPRDFAAYRSGGGRVKFSRSADAPAYQQGQNQLYNELNLGRREEYDVLDKRRGRDPEMGGKPRRKNPQEGLYNELQKDKMAEAYSEIGMKGERRRGKGHDGLYQGLSTATKDTYDALHMQALPPRLEGGGEGRGSLLTCGDVEENPGPRMPPPRLLFFLLFLTPMEVRPEEPLVVKVEEGDNAVLQCLKGTSDGPTQQLTWSRESPLKPFLKLSLGLPGLGIHMRPLAIWLFIFNVSQQMGGFYLCQPGPPSEKAWQPGWTVNVEGSGELFRWNVSDLGGLGCGLKNRSSEGPSSPSGKLMSPKLYVWAKDRPEIWEGEPPCVPPRDSLNQSLSQDLTMAPGSTLWLSCGVPPDSVSRGPLSWTHVHPKGPKSLLSLELKDDRPARDMWVMETGLLLPRATAQDAGKYYCHRGNLTMSFHLEITARPVLWHWLLRTGGWKVSAVTLAYLIFCLCSLVGILHLQRALVLRRKRGGSTSEGRGSLLTCGDVEENPGPMETDTLLLWVLLLWVPGSTGDIQMTQSPILLSASVGDRVTITCRASQDVNTAVAWYQQRTNGSPRLLIYSASFLYSGVPSRFSGSRSGTDFTLTISSLQPEDEADYYCQQHYTTPPTFGAGTKVEIKRTVAAPSVFIFPPSDEQLKSGTASVVCLLNNFYPREAKVQWKVDNALQSGNSQESVTEQDSKDSTYSLSSTLTLSKADYEKHKVYACEVTHQGLSSPVTKSFNRGEC

SEQ ID NO: 6088 - protein, 606 aa, Artificial Sequence
  Description of Artificial Sequence: Synthetic Chimeric Antigen Receptor sequence
MHPLLNPLLLALGLMALLLTTVIALTCLGGFASPGPVPPSTALRELIEELVNITQNQKAPLCNGSMVWSINLTAGMYCAALESLINVSGCSAIEKTQRMLSGFCPHKVSAGQFSSLHVRDTKIEVAQFVKDLLLHLKKLFREGQFNPRKPTTTPAPRPPTPAPTIASQPLSLRPEACRPAAGGAVHTRGLDFAQLLCYLLDGILFIYGVILTALFLRVVTFWVRSKRSRLLHSDYMNMTPRRPGPTRKHYQPYAPPRDFAAYRSTRKFSRSADAPAYQQGQNQLYNELNLGRREEYDVLDKRRGRDPEMGGKPRRKNPQEGLYNELQKDKMAEAYSEIGMKGERRRGKGHDGLYQGLSTATKDTYDALHMQALPPRQPAAAEGRGSLLTCGDVEENPGPMDKDCEMKRTTLDSPLGKLELSGCEQGLHEIKLLGKGTSAADAVEVPAPAAVLGGPEPLMQCTAWLNAYFHQPEAIEEFPVPALHHPVFQQESFTRQVLWKLLKVVKFGEVISYQQLAALAGNPKAARAVGGAMRGNPVKILIPCHRVVCSSGAVGNYSGGLAVKEWLLAHEGHRLGKPGLGGSSGLAGAWLKGAGATSGSPPAGRN

SEQ ID NO: 6089 - protein, 330 aa, Artificial Sequence
  Description of Artificial Sequence: Synthetic Chimeric Antigen Receptor sequence
MVRGVPFRHLLLVLQLALLPAATQGKKVVLGKKGDTVELTCTASQKKSIQFHWKNSNQIKILGNQGSFLTKGPSKLNDRADSRRSLWDQGNFPLIIKNLKIEDSDTYICEVEDQKEEVQLLVFGLTANSDTHLLQGQSLTLTLESPPGSSPSVQCRSPRGKNIQGGKTLSVSQLELQDSGTWTCTVLQNQKKVEFKIDIVVLAFQKASGGGGSKQVGNKFFLTNGEIMTFEKVKALCVKFQASVATPRNAAENGAIQNLIKEEAFLGITDEKTEGQFVDLTGNRLTYTNWNEGEPNNAGSDEDCVLLLKNGQWNDVPCSTSHLAVCEFPI

SEQ ID NO: 6090 - protein, 354 aa, Artificial Sequence
  Description of Artificial Sequence: Synthetic Chimeric Antigen Receptor sequence
MVRGVPFRHLLLVLQLALLPAATQGKKVVLGKKGDTVELTCTASQKKSIQFHWKNSNQIKILGNQGSFLTKGPSKLNDRADSRRSLWDQGNFPLIIKNLKIEDSDTYICEVEDQKEEVQLLVFGLTANSDTHLLQGQSLTLTLESPPGSSPSVQCRSPRGKNIQGGKTLSVSQLELQDSGTWTCTVLQNQKKVEFKIDIVVLAFQKASGGGGSQNDILQVVSQGWKYFKGNFYYFSLIPKTWYSAEQFCVSRNSHLTSVTSESEQEFLYKTAGGLIYWIGLTKAGMEGDWSWVDDTPFNKVQSVRFWIPGEPNNAGNNEHCGNIKAPSLQAWNDAPCDKTFLFICKRPYVPSEP

SEQ ID NO: 6091 - protein, 362 aa, Artificial Sequence
  Description of Artificial Sequence: Synthetic Chimeric Antigen Receptor sequence
MVRGVPFRHLLLVLQLALLPAATQGKKVVLGKKGDTVELTCTASQKKSIQFHWKNSNQIKILGNQGSFLTKGPSKLNDRADSRRSLWDQGNFPLIIKNLKIEDSDTYICEVEDQKEEVQLLVFGLTANSDTHLLQGQSLTLTLESPPGSSPSVQCRSPRGKNIQGGKTLSVSQLELQDSGTWTCTVLQNQKKVEFKIDIVVLAFQKASGGGGSIYQELTDLKTAFERLCRHCPKDWTFFQGNCYFMSNSQRNWHDSVTACQEVRAQLVVIKTAEEQNFLQLQTSRSNRFSWMGLSDLNQEGTWQWVDGSPLSPSFQRYWNSGEPNNSGNEDCAEFSGSGWNDNRCDVDNYWICKKPAACFRD

SEQ ID NO: 6092 - protein, 380 aa, Artificial Sequence [sequence omitted]

SEQ ID NO: 6093 - protein, 457 aa, Artificial Sequence
  Description of Artificial Sequence: Synthetic Chimeric Antigen Receptor sequence
MALPVTALLLPLALLLHAARPEVKLQESGPGLVAPSQSLSFTCTVSGFSLSRNSVHWVRQPPGKGLEWLGMIWGGGSTDYNSALKSRLNISKDSSKSQVFLKMNSLQTDDTAMYFCARNGGYDVFHYWGQGTTVTVSSGGGGSGGGGSGGGGSQAVVTQESALTTSPGETVTLTCRSSTGAVTTSNYANWVQEKPDHLFTGLIGGTNNRAPGVPARFSGSLIGDKAALTITGAQTEDEAIYFCALWYSNHLVFGGGTKLTVLGGLAVSTISSFFPPGYQIYIWAPLAGTCGVLLLSLVITLYCKRGRKKLLYIFKQPFMRPVQTTQEEDGCSCRFPEEEEGGCELRVKFSRSADAPAYQQGQNQLYNELNLGRREEYDVLDKRRGRDPEMGGKPRRKNPQEGLYNELQKDKMAEAYSEIGMKGERRRGKGHDGLYQGLSTATKDTYDALHMQALPPR

SEQ ID NO: 6094 - protein, 180 aa, Artificial Sequence; identical to SEQ ID NO: 5053
  Description of Artificial Sequence: Synthetic Chimeric Antigen Receptor sequence

SEQ ID NO: 6095 - protein, 457 aa, Artificial Sequence
  Description of Artificial Sequence: Synthetic Chimeric Antigen Receptor sequence
MALPVTALLLPLALLLHAARPEVQLVESGGGLVQPGGSLRLSCAASGFSLSRNSVHWVRQAPGKGLEWLGMIWGGGSTDYNSALKSRFTISRDNSKNTLYLQMNSLRAEDTAVYYCARNGGYDVFHYWGQGTTVTVSSGGGGSGGGGSGGGGSQAVVTQEPSLTVSPGGTVTLTCRSSTGAVTTSNYANWVQQKPGQAPRGLIGGTNNRAPWTPARFSGSLLGGKAALTLSGVQPEDEAEYYCALWYSNHLVFGGGTKLTVLGGLAVSTISSFFPPGYQIYIWAPLAGTCGVLLLSLVITLYCKRGRKKLLYIFKQPFMRPVQTTQEEDGCSCRFPEEEEGGCELRVKFSRSADAPAYQQGQNQLYNELNLGRREEYDVLDKRRGRDPEMGGKPRRKNPQEGLYNELQKDKMAEAYSEIGMKGERRRGKGHDGLYQGLSTATKDTYDALHMQALPPR

SEQ ID NO: 6096 - protein, 460 aa, Artificial Sequence
  Description of Artificial Sequence: Synthetic Chimeric Antigen Receptor sequence
MALPVTALLLPLALLLHAARPEVKLQESGPGLVAPSQSLSFTCTVSGFSLSRNSVHWVRQPPGKGLEWLGMIWGGGSTDYNSALKSRLNISKDSSKSQVFLKMNSLQTDDTAMYFCARNGGYDVFHYWGQGTTVTVSSGGGGSGGGGSGGGGSQAVVTQESALTTSPGETVTLTCRSSTGAVTTSNYANWVQEKPDHLFTGLIGGTNNRAPGVPARFSGSLIGDKAALTITGAQTEDEAIYFCALWYSNHLVFGGGTKLTVLGGLAVSTISSFFPPGYQIISFFLALTSTALLFLLFFLTLRFSVVKRGRKKLLYIFKQPFMRPVQTTQEEDGCSCRFPEEEEGGCELRVKFSRSADAPAYQQGQNQLYNELNLGRREEYDVLDKRRGRDPEMGGKPRRKNPQEGLYNELQKDKMAEAYSEIGMKGERRRGKGHDGLYQGLSTATKDTYDALHMQALPPR

SEQ ID NO: 6097 - protein, 460 aa, Artificial Sequence
  Description of Artificial Sequence: Synthetic Chimeric Antigen Receptor sequence
MALPVTALLLPLALLLHAARPEVQLVESGGGLVQPGGSLRLSCAASGFSLSRNSVHWVRQAPGKGLEWLGMIWGGGSTDYNSALKSRFTISRDNSKNTLYLQMNSLRAEDTAVYYCARNGGYDVFHYWGQGTTVTVSSGGGGSGGGGSGGGGSQAVVTQEPSLTVSPGGTVTLTCRSSTGAVTTSNYANWVQQKPGQAPRGLIGGTNNRAPWTPARFSGSLLGGKAALTLSGVQPEDEAEYYCALWYSNHLVFGGGTKLTVLGGLAVSTISSFFPPGYQIISFFLALTSTALLFLLFFLTLRFSVVKRGRKKLLYIFKQPFMRPVQTTQEEDGCSCRFPEEEEGGCELRVKFSRSADAPAYQQGQNQLYNELNLGRREEYDVLDKRRGRDPEMGGKPRRKNPQEGLYNELQKDKMAEAYSEIGMKGERRRGKGHDGLYQGLSTATKDTYDALHMQALPPR

SEQ ID NO: 6098 - protein, 486 aa, Artificial Sequence
  Description of Artificial Sequence: Synthetic Chimeric Antigen Receptor sequence
MALPVTALLLPLALLLHAARPEVKLQESGPGLVAPSQSLSFTCTVSGFSLSRNSVHWVRQPPGKGLEWLGMIWGGGSTDYNSALKSRLNISKDSSKSQVFLKMNSLQTDDTAMYFCARNGGYDVFHYWGQGTTVTVSSGGGGSGGGGSGGGGSQAVVTQESALTTSPGETVTLTCRSSTGAVTTSNYANWVQEKPDHLFTGLIGGTNNRAPGVPARFSGSLIGDKAALTITGAQTEDEAIYFCALWYSNHLVFGGGTKLTVLGTTTPAPRPPTPAPTIASQPLSLRPEACRPAAGGAVHTRGLDFACDIYIWAPLAGTCGVLLLSLVITLYCKRGRKKLLYIFKQPFMRPVQTTQEEDGCSCRFPEEEEGGCELRVKFSRSADAPAYQQGQNQLYNELNLGRREEYDVLDKRRGRDPEMGGKPRRKNPQEGLYNELQKDKMAEAYSEIGMKGERRRGKGHDGLYQGLSTATKDTYDALHMQALPPR

SEQ ID NO: 6099 - protein, 486 aa, Artificial Sequence
  Description of Artificial Sequence: Synthetic Chimeric Antigen Receptor sequence
MALPVTALLLPLALLLHAARPEVQLVESGGGLVQPGGSLRLSCAASGFSLSRNSVHWVRQAPGKGLEWLGMIWGGGSTDYNSALKSRFTISRDNSKNTLYLQMNSLRAEDTAVYYCARNGGYDVFHYWGQGTTVTVSSGGGGSGGGGSGGGGSQAVVTQEPSLTVSPGGTVTLTCRSSTGAVTTSNYANWVQQKPGQAPRGLIGGTNNRAPWTPARFSGSLLGGKAALTLSGVQPEDEAEYYCALWYSNHLVFGGGTKLTVLGTTTPAPRPPTPAPTIASQPLSLRPEACRPAAGGAVHTRGLDFACDIYIWAPLAGTCGVLLLSLVITLYCKRGRKKLLYIFKQPFMRPVQTTQEEDGCSCRFPEEEEGGCELRVKFSRSADAPAYQQGQNQLYNELNLGRREEYDVLDKRRGRDPEMGGKPRRKNPQEGLYNELQKDKMAEAYSEIGMKGERRRGKGHDGLYQGLSTATKDTYDALHMQALPPR

SEQ ID NO: 6100 - protein, 489 aa, Artificial Sequence
  Description of Artificial Sequence: Synthetic Chimeric Antigen Receptor sequence
MALPVTALLLPLALLLHAARPEVKLQESGPGLVAPSQSLSFTCTVSGFSLSRNSVHWVRQPPGKGLEWLGMIWGGGSTDYNSALKSRLNISKDSSKSQVFLKMNSLQTDDTAMYFCARNGGYDVFHYWGQGTTVTVSSGGGGSGGGGSGGGGSQAVVTQESALTTSPGETVTLTCRSSTGAVTTSNYANWVQEKPDHLFTGLIGGTNNRAPGVPARFSGSLIGDKAALTITGAQTEDEAIYFCALWYSNHLVFGGGTKLTVLGTTTPAPRPPTPAPTIASQPLSLRPEACRPAAGGAVHTRGLDFACDIISFFLALTSTALLFLLFFLTLRFSVVKRGRKKLLYIFKQPFMRPVQTTQEEDGCSCRFPEEEEGGCELRVKFSRSADAPAYQQGQNQLYNELNLGRREEYDVLDKRRGRDPEMGGKPRRKNPQEGLYNELQKDKMAEAYSEIGMKGERRRGKGHDGLYQGLSTATKDTYDALHMQALPPR

SEQ ID NO: 6101 - protein, 489 aa, Artificial Sequence
  Description of Artificial Sequence: Synthetic Chimeric Antigen Receptor sequence
MALPVTALLLPLALLLHAARPEVQLVESGGGLVQPGGSLRLSCAASGFSLSRNSVHWVRQAPGKGLEWLGMIWGGGSTDYNSALKSRFTISRDNSKNTLYLQMNSLRAEDTAVYYCARNGGYDVFHYWGQGTTVTVSSGGGGSGGGGSGGGGSQAVVTQEPSLTVSPGGTVTLTCRSSTGAVTTSNYANWVQQKPGQAPRGLIGGTNNRAPWTPARFSGSLLGGKAALTLSGVQPEDEAEYYCALWYSNHLVFGGGTKLTVLGTTTPAPRPPTPAPTIASQPLSLRPEACRPAAGGAVHTRGLDFACDIISFFLALTSTALLFLLFFLTLRFSVVKRGRKKLLYIFKQPFMRPVQTTQEEDGCSCRFPEEEEGGCELRVKFSRSADAPAYQQGQNQLYNELNLGRREEYDVLDKRRGRDPEMGGKPRRKNPQEGLYNELQKDKMAEAYSEIGMKGERRRGKGHDGLYQGLSTATKDTYDALHMQALPPR

SEQ ID NO: 6102 - protein, 672 aa, Artificial Sequence
  Description of Artificial Sequence: Synthetic Chimeric Antigen Receptor sequence
MALPVTALLLPLALLLHAARPEVKLQESGPGLVAPSQSLSFTCTVSGFSLSRNSVHWVRQPPGKGLEWLGMIWGGGSTDYNSALKSRLNISKDSSKSQVFLKMNSLQTDDTAMYFCARNGGYDVFHYWGQGTTVTVSSGGGGSGGGGSGGGGSQAVVTQESALTTSPGETVTLTCRSSTGAVTTSNYANWVQEKPDHLFTGLIGGTNNRAPGVPARFSGSLIGDKAALTITGAQTEDEAIYFCALWYSNHLVFGGGTKLTVLGEPKSPDKTHTCPPCPAPPVAGPSVFLFPPKPKDTLMIARTPEVTCVVVDVSHEDPEVKFNWYVDGVEVHNAKTKPREEQYNSTYRVVSVLTVLHQDWLNGKEYKCKVSNKALPAPIEKTISKAKGQPREPQVYTLPPSRDELTKNQVSLTCLVKGFYPSDIAVEWESNGQPENNYKTTPPVLDSDGSFFLYSKLTVDKSRWQQGNVFSCSVMHEALHNHYTQKSLSLSPGKIYIWAPLAGTCGVLLLSLVITLYCKRGRKKLLYIFKQPFMRPVQTTQEEDGCSCRFPEEEEGGCELRVKFSRSADAPAYQQGQNQLYNELNLGRREEYDVLDKRRGRDPEMGGKPRRKNPQEGLYNELQKDKMAEAYSEIGMKGERRRGKGHDGLYQGLSTATKDTYDALHMQALPPR

SEQ ID NO: 6103 - protein, 672 aa, Artificial Sequence
  Description of Artificial Sequence: Synthetic Chimeric Antigen Receptor sequence
MALPVTALLLPLALLLHAARPEVQLVESGGGLVQPGGSLRLSCAASGFSLSRNSVHWVRQAPGKGLEWLGMIWGGGSTDYNSALKSRFTISRDNSKNTLYLQMNSLRAEDTAVYYCARNGGYDVFHYWGQGTTVTVSSGGGGSGGGGSGGGGSQAVVTQEPSLTVSPGGTVTLTCRSSTGAVTTSNYANWVQQKPGQAPRGLIGGTNNRAPWTPARFSGSLLGGKAALTLSGVQPEDEAEYYCALWYSNHLVFGGGTKLTVLGEPKSPDKTHTCPPCPAPPVAGPSVFLFPPKPKDTLMIARTPEVTCVVVDVSHEDPEVKFNWYVDGVEVHNAKTKPREEQYNSTYRVVSVLTVLHQDWLNGKEYKCKVSNKALPAPIEKTISKAKGQPREPQVYTLPPSRDELTKNQVSLTCLVKGFYPSDIAVEWESNGQPENNYKTTPPVLDSDGSFFLYSKLTVDKSRWQQGNVFSCSVMHEALHNHYTQKSLSLSPGKIYIWAPLAGTCGVLLLSLVITLYCKRGRKKLLYIFKQPFMRPVQTTQEEDGCSCRFPEEEEGGCELRVKFSRSADAPAYQQGQNQLYNELNLGRREEYDVLDKRRGRDPEMGGKPRRKNPQEGLYNELQKDKMAEAYSEIGMKGERRRGKGHDGLYQGLSTATKDTYDALHMQALPPR

SEQ ID NO: 6104 - protein, 675 aa, Artificial Sequence
  Description of Artificial Sequence: Synthetic Chimeric Antigen Receptor sequence
MALPVTALLLPLALLLHAARPEVKLQESGPGLVAPSQSLSFTCTVSGFSLSRNSVHWVRQPPGKGLEWLGMIWGGGSTDYNSALKSRLNISKDSSKSQVFLKMNSLQTDDTAMYFCARNGGYDVFHYWGQGTTVTVSSGGGGSGGGGSGGGGSQAVVTQESALTTSPGETVTLTCRSSTGAVTTSNYANWVQEKPDHLFTGLIGGTNNRAPGVPARFSGSLIGDKAALTITGAQTEDEAIYFCALWYSNHLVFGGGTKLTVLGEPKSPDKTHTCPPCPAPPVAGPSVFLFPPKPKDTLMIARTPEVTCVVVDVSHEDPEVKFNWYVDGVEVHNAKTKPREEQYNSTYRVVSVLTVLHQDWLNGKEYKCKVSNKALPAPIEKTISKAKGQPREPQVYTLPPSRDELTKNQVSLTCLVKGFYPSDIAVEWESNGQPENNYKTTPPVLDSDGSFFLYSKLTVDKSRWQQGNVFSCSVMHEALHNHYTQKSLSLSPGKIISFFLALTSTALLFLLFFLTLRFSVVKRGRKKLLYIFKQPFMRPVQTTQEEDGCSCRFPEEEEGGCELRVKFSRSADAPAYQQGQNQLYNELNLGRREEYDVLDKRRGRDPEMGGKPRRKNPQEGLYNELQKDKMAEAYSEIGMKGERRRGKGHDGLYQGLSTATKDTYDALHMQALPPR

SEQ ID NO: 6105 - protein, 675 aa, Artificial Sequence
  Description of Artificial Sequence: Synthetic Chimeric Antigen Receptor sequence
MALPVTALLLPLALLLHAARPEVQLVESGGGLVQPGGSLRLSCAASGFSLSRNSVHWVRQAPGKGLEWLGMIWGGGSTDYNSALKSRFTISRDNSKNTLYLQMNSLRAEDTAVYYCARNGGYDVFHYWGQGTTVTVSSGGGGSGGGGSGGGGSQAVVTQEPSLTVSPGGTVTLTCRSSTGAVTTSNYANWVQQKPGQAPRGLIGGTNNRAPWTPARFSGSLLGGKAALTLSGVQPEDEAEYYCALWYSNHLVFGGGTKLTVLGEPKSPDKTHTCPPCPAPPVAGPSVFLFPPKPKDTLMIARTPEVTCVVVDVSHEDPEVKFNWYVDGVEVHNAKTKPREEQYNSTYRVVSVLTVLHQDWLNGKEYKCKVSNKALPAPIEKTISKAKGQPREPQVYTLPPSRDELTKNQVSLTCLVKGFYPSDIAVEWESNGQPENNYKTTPPVLDSDGSFFLYSKLTVDKSRWQQGNVFSCSVMHEALHNHYTQKSLSLSPGKIISFFLALTSTALLFLLFFLTLRFSVVKRGRKKLLYIFKQPFMRPVQTTQEEDGCSCRFPEEEEGGCELRVKFSRSADAPAYQQGQNQLYNELNLGRREEYDVLDKRRGRDPEMGGKPRRKNPQEGLYNELQKDKMAEAYSEIGMKGERRRGKGHDGLYQGLSTATKDTYDALHMQALPPR

SEQ ID NO: 6106 - protein, 606 aa, Artificial Sequence
  Description of Artificial Sequence: Synthetic Chimeric Antigen Receptor sequence
MHPLLNPLLLALGLMALLLTTVIALTCLGGFASPGPVPPSTALRKLIEELVNITQNQKAPLCNGSMVWSINLTAGMYCAALESLINVSGCSAIEKTQRMLSGFCPHKVSAGQFSSLHVRDTKIEVAQFVKDLLLHLKKLFKEGQFNPRKPTTTPAPRPPTPAPTIASQPLSLRPEACRPAAGGAVHTRGLDFAQLLCYLLDGILFIYGVILTALFLRVVTFWVRSKRSRLLHSDYMNMTPRRPGPTRKHYQPYAPPRDFAAYRSTRKFSRSADAPAYQQGQNQLYNELNLGRREEYDVLDKRRGRDPEMGGKPRRKNPQEGLYNELQKDKMAEAYSEIGMKGERRRGKGHDGLYQGLSTATKDTYDALHMQALPPRQPAAAEGRGSLLTCGDVEENPGPMDKDCEMKRTTLDSPLGKLELSGCEQGLHEIKLLGKGTSAADAVEVPAPAAVLGGPEPLMQCTAWLNAYFHQPEAIEEFPVPALHHPVFQQESFTRQVLWKLLKVVKFGEVISYQQLAALAGNPKAARAVGGAMRGNPVKILIPCHRVVCSSGAVGNYSGGLAVKEWLLAHEGHRLGKPGLGGSSGLAGAWLKGAGATSGSPPAGRN

SEQ ID NO: 6107 - protein, 606 aa, Artificial Sequence
  Description of Artificial Sequence: Synthetic Chimeric Antigen Receptor sequence
MHPLLNPLLLALGLMALLLTTVIALTCLGGFASPGPVPPSTALRYLIEELVNITQNQKAPLCNGSMVWSINLTAGMYCAALESLINVSGCSAIEKTQRMLSGFCPHKVSAGQFSSLHVRDTKIEVAQFVKDLLLHLKKLFREGQFNPRKPTTTPAPRPPTPAPTIASQPLSLRPEACRPAAGGAVHTRGLDFAQLLCYLLDGILFIYGVILTALFLRVVTFWVRSKRSRLLHSDYMNMTPRRPGPTRKHYQPYAPPRDFAAYRSTRKFSRSADAPAYQQGQNQLYNELNLGRREEYDVLDKRRGRDPEMGGKPRRKNPQEGLYNELQKDKMAEAYSEIGMKGERRRGKGHDGLYQGLSTATKDTYDALHMQALPPRQPAAAEGRGSLLTCGDVEENPGPMDKDCEMKRTTLDSPLGKLELSGCEQGLHEIKLLGKGTSAADAVEVPAPAAVLGGPEPLMQCTAWLNAYFHQPEAIEEFPVPALHHPVFQQESFTRQVLWKLLKVVKFGEVISYQQLAALAGNPKAARAVGGAMRGNPVKILIPCHRVVCSSGAVGNYSGGLAVKEWLLAHEGHRLGKPGLGGSSGLAGAWLKGAGATSGSPPAGRN

SEQ ID NO: 6108 - protein, 889 aa, Artificial Sequence
  Description of Artificial Sequence: Synthetic Chimeric Antigen Receptor sequence
MLLLVTSLLLCELPHPAFLLIPGPVPPSTALRYLIEELVNITQNQKAPLCNGSMVWSINLTAGMYCAALESLINVSGCSAIEKTQRMLSGFCPHKVSAGQFSSLHVRDTKIEVAQFVKDLLLHLKKLFREGRFNESKYGPPCPPCPAPEFEGGPSVFLFPPKPKDTLMISRTPEVTCVVVDVSQEDPEVQFNWYVDGVEVHNAKTKPREEQFQSTYRVVSVLTVLHQDWLNGKEYKCKVSNKGLPSSIEKTISKAKGQPREPQVYTLPPSQEEMTKNQVSLTCLVKGFYPSDIAVEWESNGQPENNYKTTPPVLDSDGSFFLYSRLTVDKSRWQEGNVFSCSVMHEALHNHYTQKSLSLSLGKMALIVLGGVAGLLLFIGLGIFFKRGRKKLLYIFKQPFMRPVQTTQEEDGCSCRFPEEEEGGCELGGGRVKFSRSADAPAYQQGQNQLYNELNLGRREEYDVLDKRRGRDPEMGGKPRRKNPQEGLYNELQKDKMAEAYSEIGMKGERRRGKGHDGLYQGLSTATKDTYDALHMQALPPRLEGGGEGRGSLLTCGDVEENPGPRMPPPRLLFFLLFLTPMEVRPEEPLVVKVEEGDNAVLQCLKGTSDGPTQQLTWSRESPLKPFLKLSLGLPGLGIHMRPLAIWLFIFNVSQQMGGFYLCQPGPPSEKAWQPGWTVNVEGSGELFRWNVSDLGGLGCGLKNRSSEGPSSPSGKLMSPKLYVWAKDRPEIWEGEPPCVPPRDSLNQSLSQDLTMAPGSTLWLSCGVPPDSVSRGPLSWTHVHPKGPKSLLSLELKDDRPARDMWVMETGLLLPRATAQDAGKYYCHRGNLTMSFHLEITARPVLWHWLLRTGGWKVSAVTLAYLIFCLCSLVGILHLQRALVLRRKR

SEQ ID NO: 6109 - protein, 200 aa, Artificial Sequence
  Description of Artificial Sequence: Synthetic Chimeric Antigen Receptor sequence
DLEPKSCDKTHTCPPCPDPKFWVLVVVGGVLACYSLLVTVAFIIFWVRSKRSRLLHSDYMNMTPRRPGPTRKHYQPYAPPRDFAAYRSRVKFSRSADAPAYQQGQNQLYNELNLGRREEYDVLDKRRGRDPEMGGKPRRKNPQEGLYNELQKDKMAEAYSEIGMKGERRRGKGHDGLYQGLSTATKDTYDALHMQALPPR

SEQ ID NO: 6110 - protein, 419 aa, Artificial Sequence
  Description of Artificial Sequence: Synthetic Chimeric Antigen Receptor sequence
DPAEPKSPDKTHTCPPCPAPELLGGPSVFLFPPKPKDTLMISRTPEVTCVVVDVSHEDPEVKFNWYVDGVEVHNAKTKPREEQYNSTYRVVSVLTVLHQDWLNGKEYKCKVSNKALPAPIEKTISKAKGQPREPQVYTLPPSRDELTKNQVSLTCLVKGFYPSDIAVEWESNGQPENNYKTTPPVLDSDGSFFLYSKLTVDKSRWQQGNVFSCSVMHEALHNHYTQKSLSLSPGKKDPKFWVLVVVGGVLACYSLLVTVAFIIFWVRSKRSRLLHSDYMNMTPRRPGPTRKHYQPYAPPRDFAAYRSRVKFSRSADAPAYQQGQNQLYNELNLGRREEYDVLDKRRGRDPEMGGKPRRKNPQEGLYNELQKDKMAEAYSEIGMKGERRRGKGHDGLYQGLSTATKDTYDALHMQALPPR

SEQ ID NO: 6111 - protein, 467 aa, Artificial Sequence
  Description of Artificial Sequence: Synthetic Chimeric Antigen Receptor sequence
MDWIWRILFLVGAATGAHSQVQLQQPGAELVRPGASVKLSCKASGYTFSNYLMNWVKQRPEQDLDWIGRIDPYDGDIDYNQNFKDKAILTVDKSSSTAYMQLSSLTSEDSAVYYCARGYGTAYGVDYWGQGTSVTVSSAKTTPPKLEEGEFSEARVDIVLTQSPASLAVSLGQRATISCRASESVDNYGISFMNWFQQKPGQPPKLLIYAASRQGSGVPARFSGSGSGTDFSLNIHPMEEDDTAMYFCQQSKEVPWTFGGGTKLEIKDLEPKSCDKTHTCPPCPDPKFWVLVVVGGVLACYSLLVTVAFIIFWVRSKRSRLLHSDYMNMTPRRPGPTRKHYQPYAPPRDFAAYRSRVKFSRSADAPAYQQGQNQLYNELNLGRREEYDVLDKRRGRDPEMGGKPRRKNPQEGLYNELQKDKMAEAYSEIGMKGERRRGKGHDGLYQGLSTATKDTYDALHMQALPPR

SEQ ID NO: 6112 - protein, 487 aa, Artificial Sequence
  Description of Artificial Sequence: Synthetic Chimeric Antigen Receptor sequence
MVLLVTSLLLCELPHPAFLLIPDIQQVQLQQSGPELEKPGASVKISCKASGYSFTGYTMNWVKQSHGKSLEWIGLITPYNGASSYNQKFRGKATLTVDKSSSTAYMDLLSLTSEDSAVYFCARGGYDGRGFDYWGQGTTVTVSSGGGGSGGGGSGGGGSDIELTQSPAIMSASPGEKVTMTCSASSSVSYMHWYQQKSGTSPKRWIYDTSKLASGVPGRFSGSGSGNSYSLTISSVEAEDDATYYCQQWSGYPLTFGAGTKLEIKAAAIEVMYPPPYLDNEKSNGTIIHVKGKHLCPSPLFPGPSKPFWVLVVVGGVLACYSLLVTVAFIIFWVRSKRSRLLHSDYMNMTPRRPGPTRKHYQPYAPPRDFAAYRSRVKFSRSADAPAYQQGQNQLYNELNLGRREEYDVLDKRRGRDPEMGGKPRRKNPQEGLYNELQKDKMAEAYSEIGMKGERRRGKGHDGLYQGLSTATKDTYDALHMQALPPR

SEQ ID NO: 6113 - protein, 688 aa, Artificial Sequence
  Description of Artificial Sequence: Synthetic Chimeric Antigen Receptor sequence
MDWIWRILFLVGAATGAHSQVQLQQPGAELVRPGASVKLSCKASGYTFSNYLMNWVKQRPEQDLDWIGRIDPYDGDIDYNQNFKDKAILTVDKSSSTAYMQLSSLTSEDSAVYYCARGYGTAYGVDYWGQGTSVTVSSAKTTPPKLEEGEFSEARVDIVLTQSPASLAVSLGQRATISCRASESVDNYGISFMNWFQQKPGQPPKLLIYAASRQGSGVPARFSGSGSGTDFSLNIHPMEEDDTAMYFCQQSKEVPWTFGGGTKLEIKAEDPAEPKSPDKTHTCPPCPAPELLGGPSVFLFPPKPKDTLMISRTPEVTCVVVDVSHEDPEVKFNWYVDGVEVHNAKTKPREEQYNSTYRVVSVLTVLHQDWLNGKEYKCKVSNKALPAPIEKTISKAKGQPREPQVYTLPPSRDELTKNQVSLTCLVKGFYPSDIAVEWESNGQPENNYKTTPPVLDSDGSFFLYSKLTVDKSRWQQGNVFSCSVMHEALHNHYTQKSLSLSPGKKDPKFWVLVVVGGVLACYSLLVTVAFIIFWVRSKRSRLLHSDYMNMTPRRPGPTRKHYQPYAPPRDFAAYRSRVKFSRSADAPAYQQGQNQLYNELNLGRREEYDVLDKRRGRDPEMGGKPRRKNPQEGLYNELQKDKMAEAYSEIGMKGERRRGKGHDGLYQGLSTATKDTYDALHMQALPPR

SEQ ID NO: 6114 - protein, 340 aa, Artificial Sequence
  Description of Artificial Sequence: Synthetic Chimeric Antigen Receptor sequence
GPVPPSTALRYLIEELVNITQNQKAPLCNGSMVWSINLTAGMYCAALESLINVSGCSAIEKTQRMLSGFCPHKVSAGQFSSLHVRDTKIEVAQFVKDLLLHLKKLFREGRFNAKPTTTPAPRPPTPAPTIASQPLSLRPEACRPAAGGAVHTRGLDFACDIYIWAPLAGTCGVLLLSLVITLYKRGRKKLLYIFKQPFMRPVQTTQEEDGCSCRFPEEEEGGCELGGGRVKFSRSADAPAYQQGQNQLYNELNLGRREEYDVLDKRRGRDPEMGGKPRRKNPQEGLYNELQKDKMAEAYSEIGMKGERRRGKGHDGLYQGLSTATKDTYDALHMQALPPR

SEQ ID NO: 6115 - protein, 341 aa, Artificial Sequence
  Description of Artificial Sequence: Synthetic Chimeric Antigen Receptor sequence
GPVPPSTALRYLIEELVNITQNQKAPLCNGSMVWSINLTAGMYCAALESLINVSGCSAIEKTQRMLSGFCPHKVSAGQFSSLHVRDTKIEVAQFVKDLLLHLKKLFREGRFNAKPTTTPAPRPPTPAPTIASQPLSLRPEACRPAAGGAVHTRGLDFACDIYIWAPLAGTCGVLLLSLVITGGGKRGRKKLLYIFKQPFMRPVQTTQEEDGCSCRFPEEEEGGCELGGGRVKFSRSADAPAYQQGQNQLYNELNLGRREEYDVLDKRRGRDPEMGGKPRRKNPQEGLYNELQKDKMAEAYSEIGMKGERRRGKGHDGLYQGLSTATKDTYDALHMQALPPR

SEQ ID NO: 6116 - protein, 351 aa, Artificial Sequence
  Description of Artificial Sequence: Synthetic Chimeric Antigen Receptor sequence
GPVPPSTALRYLIEELVNITQNQKAPLCNGSMVWSINLTAGMYCAALESLINVSGCSAIEKTQRMLSGFCPHKVSAGQFSSLHVRDTKIEVAQFVKDLLLHLKKLFREGRFNGGGSSGGGSGMFWVLVVVGGVLACYSLLVTVAFIIFWVRSKRSRGGHSDYMNMTPRRPGPTRKHYQPYAPPRDFAAYRSGGGKRGRKKLLYIFKQPFMRPVQTTQEEDGCSCRFPEEEEGGCELGGGRVKFSRSADAPAYQQGQNQLYNELNLGRREEYDVLDKRRGRDPEMGGKPRRKNPQEGLYNELQKDKMAEAYSEIGMKGERRRGKGHDGLYQGLSTATKDTYDALHMQALPPR

SEQ ID NO: 6117 - protein, 362 aa, Artificial Sequence
  Description of Artificial Sequence: Synthetic Chimeric Antigen Receptor sequence
MLLLVTSLLLCELPHPAFLLIPGPVPPSTALRYLIEELVNITQNQKAPLCNGSMVWSINLTAGMYCAALESLINVSGCSAIEKTQRMLSGFCPHKVSAGQFSSLHVRDTKIEVAQFVKDLLLHLKKLFREGRFNAKPTTTPAPRPPTPAPTIASQPLSLRPEACRPAAGGAVHTRGLDFACDIYIWAPLAGTCGVLLLSLVITLYKRGRKKLLYIFKQPFMRPVQTTQEEDGCSCRFPEEEEGGCELGGGRVKFSRSADAPAYQQGQNQLYNELNLGRREEYDVLDKRRGRDPEMGGKPRRKNPQEGLYNELQKDKMAEAYSEIGMKGERRRGKGHDGLYQGLSTATKDTYDALHMQALPPR

SEQ ID NO: 6118 - protein, 363 aa, Artificial Sequence
  Description of Artificial Sequence: Synthetic Chimeric Antigen Receptor sequence
GPVPPSTALRYLIEELVNITQNQKAPLCNGSMVWSINLTAGMYCAALESLINVSGCSAIEKTQRMLSGFCPHKVSAGQFSSLHVRDTKIEVAQFVKDLLLHLKKLFREGRFNESKYGPPCPPCPGGGSSGGGSGMFWVLVVVGGVLACYSLLVTVAFIIFWVRSKRSRGGHSDYMNMTPRRPGPTRKHYQPYAPPRDFAAYRSGGGKRGRKKLLYIFKQPFMRPVQTTQEEDGCSCRFPEEEEGGCELGGGRVKFSRSADAPAYQQGQNQLYNELNLGRREEYDVLDKRRGRDPEMGGKPRRKNPQEGLYNELQKDKMAEAYSEIGMKGERRRGKGHDGLYQGLSTATKDTYDALHMQALPPR

SEQ ID NO: 6119 - protein, 363 aa, Artificial Sequence
  Description of Artificial Sequence: Synthetic Chimeric Antigen Receptor sequence
MLLLVTSLLLCELPHPAFLLIPGPVPPSTALRYLIEELVNITQNQKAPLCNGSMVWSINLTAGMYCAALESLINVSGCSAIEKTQRMLSGFCPHKVSAGQFSSLHVRDTKIEVAQFVKDLLLHLKKLFREGRFNAKPTTTPAPRPPTPAPTIASQPLSLRPEACRPAAGGAVHTRGLDFACDIYIWAPLAGTCGVLLLSLVITGGGKRGRKKLLYIFKQPFMRPVQTTQEEDGCSCRFPEEEEGGCELGGGRVKFSRSADAPAYQQGQNQLYNELNLGRREEYDVLDKRRGRDPEMGGKPRRKNPQEGLYNELQKDKMAEAYSEIGMKGERRRGKGHDGLYQGLSTATKDTYDALHMQALPPR

SEQ ID NO: 6120 - protein, 373 aa, Artificial Sequence
  Description of Artificial Sequence: Synthetic Chimeric Antigen Receptor sequence
MLLLVTSLLLCELPHPAFLLIPGPVPPSTALRYLIEELVNITQNQKAPLCNGSMVWSINLTAGMYCAALESLINVSGCSAIEKTQRMLSGFCPHKVSAGQFSSLHVRDTKIEVAQFVKDLLLHLKKLFREGRFNGGGSSGGGSGMFWVLVVVGGVLACYSLLVTVAFIIFWVRSKRSRGGHSDYMNMTPRRPGPTRKHYQPYAPPRDFAAYRSGGGKRGRKKLLYIFKQPFMRPVQTTQEEDGCSCRFPEEEEGGCELGGGRVKFSRSADAPAYQQGQNQLYNELNLGRREEYDVLDKRRGRDPEMGGKPRRKNPQEGLYNELQKDKMAEAYSEIGMKGERRRGKGHDGLYQGLSTATKDTYDALHMQALPPR

SEQ ID NO: 6121 - protein, 385 aa, Artificial Sequence
  Description of Artificial Sequence: Synthetic Chimeric Antigen Receptor sequence
MLLLVTSLLLCELPHPAFLLIPGPVPPSTALRYLIEELVNITQNQKAPLCNGSMVWSINLTAGMYCAALESLINVSGCSAIEKTQRMLSGFCPHKVSAGQFSSLHVRDTKIEVAQFVKDLLLHLKKLFREGRFNESKYGPPCPPCPGGGSSGGGSGMFWVLVVVGGVLACYSLLVTVAFIIFWVRSKRSRGGHSDYMNMTPRRPGPTRKHYQPYAPPRDFAAYRSGGGKRGRKKLLYIFKQPFMRPVQTTQEEDGCSCRFPEEEEGGCELGGGRVKFSRSADAPAYQQGQNQLYNELNLGRREEYDVLDKRRGRDPEMGGKPRRKNPQEGLYNELQKDKMAEAYSEIGMKGERRRGKGHDGLYQGLSTATKDTYDALHMQALPPR

SEQ ID NO: 6122 - protein, 388 aa, Artificial Sequence
  Description of Artificial Sequence: Synthetic Chimeric Antigen Receptor sequence
GPVPPSTALRYLIEELVNITQNQKAPLCNGSMVWSINLTAGMYCAALESLINVSGCSAIEKTQRMLSGFCPHKVSAGQFSSLHVRDTKIEVAQFVKDLLLHLKKLFREGRFNAKPTTTPAPRPPTPAPTIASQPLSLRPEACRPAAGGAVHTRGLDFACDFWVLVVVGGVLACYSLLVTVAFIIFWVRSKRSRGGHSDYMNMTPRRPGPTRKHYQPYAPPRDFAAYRSGGGKRGRKKLLYIFKQPFMRPVQTTQEEDGCSCRFPEEEEGGCELGGGRVKFSRSADAPAYQQGQNQLYNELNLGRREEYDVLDKRRGRDPEMGGKPRRKNPQEGLYNELQKDKMAEAYSEIGMKGERRRGKGHDGLYQGLSTATKDTYDALHMQALPPR

SEQ ID NO: 6123 - protein, 410 aa, Artificial Sequence
  Description of Artificial Sequence: Synthetic Chimeric Antigen Receptor sequence
MLLLVTSLLLCELPHPAFLLIPGPVPPSTALRYLIEELVNITQNQKAPLCNGSMVWSINLTAGMYCAALESLINVSGCSAIEKTQRMLSGFCPHKVSAGQFSSLHVRDTKIEVAQFVKDLLLHLKKLFREGRFNAKPTTTPAPRPPTPAPTIASQPLSLRPEACRPAAGGAVHTRGLDFACDFWVLVVVGGVLACYSLLVTVAFIIFWVRSKRSRGGHSDYMNMTPRRPGPTRKHYQPYAPPRDFAAYRSGGGKRGRKKLLYIFKQPFMRPVQTTQEEDGCSCRFPEEEEGGCELGGGRVKFSRSADAPAYQQGQNQLYNELNLGRREEYDVLDKRRGRDPEMGGKPRRKNPQEGLYNELQKDKMAEAYSEIGMKGERRRGKGHDGLYQGLSTATKDTYDALHMQALPPR

SEQ ID NO: 6124 - protein, 420 aa, Artificial Sequence
  Description of Artificial Sequence: Synthetic Chimeric Antigen Receptor sequence
GPVPPSTALRYLIEELVNITQNQKAPLCNGSMVWSINLTAGMYCAALESLINVSGCSAIEKTQRMLSGFCPHKVSAGQFSSLHVRDTKIEVAQFVKDLLLHLKKLFREGRFNESKYGPPCPPCPGGGSSGGGSGGQPREPQVYTLPPSQEEMTKNQVSLTCLVKGFYPSDIAVEWESNGQPENNYKTTPPVLDSDGSFFLYSRLTVDKSRWQEGNVFSCSVMHEALHNHYTQKSLSLSLGKMALIVLGGVAGLLLFIGLGIFFKRGRKKLLYIFKQPFMRPVQTTQEEDGCSCRFPEEEEGGCELGGGRVKFSRSADAPAYQQGQNQLYNELNLGRREEYDVLDKRRGRDPEMGGKPRRKNPQEGLYNELQKDKMAEAYSEIGMKGERRRGKGHDGLYQGLSTATKDTYDALHMQALPPR

SEQ ID NO: 6125 - protein, 442 aa, Artificial Sequence
  Description of Artificial Sequence: Synthetic Chimeric Antigen Receptor sequence
MLLLVTSLLLCELPHPAFLLIPGPVPPSTALRYLIEELVNITQNQKAPLCNGSMVWSINLTAGMYCAALESLINVSGCSAIEKTQRMLSGFCPHKVSAGQFSSLHVRDTKIEVAQFVKDLLLHLKKLFREGRFNESKYGPPCPPCPGGGSSGGGSGGQPREPQVYTLPPSQEEMTKNQVSLTCLVKGFYPSDIAVEWESNGQPENNYKTTPPVLDSDGSFFLYSRLTVDKSRWQEGNVFSCSVMHEALHNHYTQKSLSLSLGKMALIVLGGVAGLLLFIGLGIFFKRGRKKLLYIFKQPFMRPVQTTQEEDGCSCRFPEEEEGGCELGGGRVKFSRSADAPAYQQGQNQLYNELNLGRREEYDVLDKRRGRDPEMGGKPRRKNPQEGLYNELQKDKMAEAYSEIGMKGERRRGKGHDGLYQGLSTATKDTYDALHMQALPPR

SEQ ID NO: 6126 - protein, 470 aa, Artificial Sequence
  Description of Artificial Sequence: Synthetic Chimeric Antigen Receptor sequence
GPVPPSTALRYLIEELVNITQNQKAPLCNGSMVWSINLTAGMYCAALESLINVSGCSAIEKTQRMLSGFCPHKVSAGQFSSLHVRDTKIEVAQFVKDLLLHLKKLFREGRFNESKYGPPCPPCPGGGSSGGGSGGQPREPQVYTLPPSQEEMTKNQVSLTCLVKGFYPSDIAVEWESNGQPENNYKTTPPVLDSDGSFFLYSRLTVDKSRWQEGNVFSCSVMHEALHNHYTQKSLSLSLGKMFWVLVVVGGVLACYSLLVTVAFIIFWVRSKRSRGGHSDYMNMTPRRPGPTRKHYQPYAPPRDFAAYRSGGGKRGRKKLLYIFKQPFMRPVQTTQEEDGCSCRFPEEEEGGCELGGGRVKFSRSADAPAYQQGQNQLYNELNLGRREEYDVLDKRRGRDPEMGGKPRRKNPQEGLYNELQKDKMAEAYSEIGMKGERRRGKGHDGLYQGLSTATKDTYDALHMQALPPR

SEQ ID NO: 6127 - protein, 492 aa, Artificial Sequence
  Description of Artificial Sequence: Synthetic Chimeric Antigen Receptor sequence
MLLLVTSLLLCELPHPAFLLIPGPVPPSTALRYLIEELVNITQNQKAPLCNGSMVWSINLTAGMYCAALESLINVSGCSAIEKTQRMLSGFCPHKVSAGQFSSLHVRDTKIEVAQFVKDLLLHLKKLFREGRFNESKYGPPCPPCPGGGSSGGGSGGQPREPQVYTLPPSQEEMTKNQVSLTCLVKGFYPSDIAVEWESNGQPENNYKTTPPVLDSDGSFFLYSRLTVDKSRWQEGNVFSCSVMHEALHNHYTQKSLSLSLGKMFWVLVVVGGVLACYSLLVTVAFIIFWVRSKRSRGGHSDYMNMTPRRPGPTRKHYQPYAPPRDFAAYRSGGGKRGRKKLLYIFKQPFMRPVQTTQEEDGCSCRFPEEEEGGCELGGGRVKFSRSADAPAYQQGQNQLYNELNLGRREEYDVLDKRRGRDPEMGGKPRRKNPQEGLYNELQKDKMAEAYSEIGMKGERRRGKGHDGLYQGLSTATKDTYDALHMQALPPR

SEQ ID NO: 6128 - protein, 519 aa, Artificial Sequence
  Description of Artificial Sequence: Synthetic Chimeric Antigen Receptor sequence
GPVPPSTALRYLIEELVNITQNQKAPLCNGSMVWSINLTAGMYCAALESLINVSGCSAIEKTQRMLSGFCPHKVSAGQFSSLHVRDTKIEVAQFVKDLLLHLKKLFREGRFNESKYGPPCPPCPAPEFEGGPSVFLFPPKPKDTLMISRTPEVTCVVVDVSQEDPEVQFNWYVDGVEVHNAKTKPREEQFQSTYRVVSVLTVLHQDWLNGKEYKCKVSNKGLPSSIEKTISKAKGQPREPQVYTLPPSQEEMTKNQVSLTCLVKGFYPSDIAVEWESNGQPENNYKTTPPVLDSDGSFFLYSRLTVDKSRWQEGNVFSCSVMHEALHNHYTQKSLSLSLGKIYIWAPLAGTCGVLLLSLVITKRGRKKLLYIFKQPFMRPVQTTQEEDGCSCRFPEEEEGGCELGGGRVKFSRSADAPAYQQGQNQLYNELNLGRREEYDVLDKRRGRDPEMGGKPRRKNPQEGLYNELQKDKMAEAYSEIGMKGERRRGKGHDGLYQGLSTATKDTYDALHMQALPPR

SEQ ID NO: 6129 - protein, 541 aa, Artificial Sequence
  Description of Artificial Sequence: Synthetic Chimeric Antigen Receptor sequence
MLLLVTSLLLCELPHPAFLLIPGPVPPSTALRYLIEELVNITQNQKAPLCNGSMVWSINLTAGMYCAALESLINVSGCSAIEKTQRMLSGFCPHKVSAGQFSSLHVRDTKIEVAQFVKDLLLHLKKLFREGRFNESKYGPPCPPCPAPEFEGGPSVFLFPPKPKDTLMISRTPEVTCVVVDVSQEDPEVQFNWYVDGVEVHNAKTKPREEQFQSTYRVVSVLTVLHQDWLNGKEYKCKVSNKGLPSSIEKTISKAKGQPREPQVYTLPPSQEEMTKNQVSLTCLVKGFYPSDIAVEWESNGQPENNYKTTPPVLDSDGSFFLYSRLTVDKSRWQEGNVFSCSVMHEALHNHYTQKSLSLSLGKIYIWAPLAGTCGVLLLSLVITKRGRKKLLYIFKQPFMRPVQTTQEEDGCSCRFPEEEEGGCELGGGRVKFSRSADAPAYQQGQNQLYNELNLGRREEYDVLDKRRGRDPEMGGKPRRKNPQEGLYNELQKDKMAEAYSEIGMKGERRRGKGHDGLYQGLSTATKDTYDALHMQALPPR

SEQ ID NO: 6130 - protein, 570 aa, Artificial Sequence
  Description of Artificial Sequence: Synthetic Chimeric Antigen Receptor sequence
GPVPPSTALRYLIEELVNITQNQKAPLCNGSMVWSINLTAGMYCAALESLINVSGCSAIEKTQRMLSGFCPHKVSAGQFSSLHVRDTKIEVAQFVKDLLLHLKKLFREGRFNESKYGPPCPPCPAPEFEGGPSVFLFPPKPKDTLMISRTPEVTCVVVDVSQEDPEVQFNWYVDGVEVHNAKTKPREEQFQSTYRVVSVLTVLHQDWLNGKEYKCKVSNKGLPSSIEKTISKAKGQPREPQVYTLPPSQEEMTKNQVSLTCLVKGFYPSDIAVEWESNGQPENNYKTTPPVLDSDGSFFLYSRLTVDKSRWQEGNVFSCSVMHEALHNHYTQKSLSLSLGKMFWVLVVVGGVLACYSLLVTVAFIIFWVRSKRSRGGHSDYMNMTPRRPGPTRKHYQPYAPPRDFAAYRSGGGKRGRKKLLYIFKQPFMRPVQTTQEEDGCSCRFPEEEEGGCELGGGRVKFSRSADAPAYQQGQNQLYNELNLGRREEYDVLDKRRGRDPEMGGKPRRKNPQEGLYNELQKDKMAEAYSEIGMKGERRRGKGHDGLYQGLSTATKDTYDALHMQALPPR

SEQ ID NO: 6131 - protein, 592 aa, Artificial Sequence
  Description of Artificial Sequence: Synthetic Chimeric Antigen Receptor sequence
MLLLVTSLLLCELPHPAFLLIPGPVPPSTALRYLIEELVNITQNQKAPLCNGSMVWSINLTAGMYCAALESLINVSGCSAIEKTQRMLSGFCPHKVSAGQFSSLHVRDTKIEVAQFVKDLLLHLKKLFREGRFNESKYGPPCPPCPAPEFEGGPSVFLFPPKPKDTLMISRTPEVTCVVVDVSQEDPEVQFNWYVDGVEVHNAKTKPREEQFQSTYRVVSVLTVLHQDWLNGKEYKCKVSNKGLPSSIEKTISKAKGQPREPQVYTLPPSQEEMTKNQVSLTCLVKGFYPSDIAVEWESNGQPENNYKTTPPVLDSDGSFFLYSRLTVDKSRWQEGNVFSCSVMHEALHNHYTQKSLSLSLGKMFWVLVVVGGVLACYSLLVTVAFIIFWVRSKRSRGGHSDYMNMTPRRPGPTRKHYQPYAPPRDFAAYRSGGGKRGRKKLLYIFKQPFMRPVQTTQEEDGCSCRFPEEEEGGCELGGGRVKFSRSADAPAYQQGQNQLYNELNLGRREEYDVLDKRRGRDPEMGGKPRRKNPQEGLYNELQKDKMAEAYSEIGMKGERRRGKGHDGLYQGLSTATKDTYDALHMQALPPR

SEQ ID NO: 6132 - protein, 688 aa, Artificial Sequence
  Description of Artificial Sequence: Synthetic Chimeric Antigen Receptor sequence
MEFGLSWLFLVAILKGVQCSRDIVMTQSQKFMSTSVGDRVSVTCKASQNVGTNVAWYQQKPGQSPKALIYSTSYRYSGVPDRFTGSGSGTDFTLTISNVQSEDLAEYFCQQYNSYPYTFGGGTKLEIKGGGGSGGGGSGGGGSEVQLQQSGAELVKPGASVKLSCTASGFNIKDTYMHWVKQRPEQGLEWIGRIDPANGNTKYDPKFQGKATIIADTSSNTAYLQLSSLTSEDTAVYYCARGVYHDYDGDYWGQGTTLTVSSYVTVSSQDPAEPKSPDKTHTCPPCPAPELLGGPSVFLFPPKPKDTLMISRTPEVTCVVVDVSHEDPEVKFNWYVDGVEVHNAKTKPREEQYNSTYRVVSVLTVLHQDWLNGKEYKCKVSNKALPAPIEKTISKAKGQPREPQVYTLPPSRDELTKNQVSLTCLVKGFYPSDIAVEWESNGQPENNYKTTPPVLDSDGSFFLYSKLTVDKSRWQQGNVFSCSVMHEALHNHYTQKSLSLSPGKKDPKFWVLVVVGGVLACYSLLVTVAFIIFWVRSKRSRLLHSDYMNMTPRRPGPTRKHYQPYAPPRDFAAYRSRVKFSRSADAPAYQQGQNQLYNELNLGRREEYDVLDKRRGRDPEMGGKPRRKNPQEGLYNELQKDKMAEAYSEIGMKGERRRGKGHDGLYQGLSTATKDTYDALHMQALPPR

SEQ ID NO: 6133 - protein, 488 aa, Artificial Sequence
  Description of Artificial Sequence: Synthetic Chimeric Antigen Receptor sequence
MALPVTALLLPLALLLHAARPGSQVQLQQSGPELEKPGASVKISCKASGYSFTGYTMNWVKQSHGKSLEWIGLITPYNGASSYNQKFRGKATLTVDKSSSTAYMDLLSLTSEDSAVYFCARGGYDGRGFDYWGQGTTVTVSSGGGGSGGGGSSGGGSDIELTQSPAIMSASPGEKVTMTCSASSSVSYMHWYQQKSGTSPKRWIYDTSKLASGVPGRFSGSGSGNSYSLTISSVEAEDDATYYCQQWSKHPLTYGAGTKLEIKASTTTPAPRPPTPAPTIASQPLSLRPEACRPAAGGAVHTRGLDFACDIYIWAPLAGTCGVLLLSLVITLYCKRGRKKLLYIFKQPFMRPVQTTQEEDGCSCRFPEEEEGGCELRVKFSRSADAPAYKQGQNQLYNELNLGRREEYDVLDKRRGRDPEMGGKPRRKNPQEGLYNELQKDKMAEAYSEIGMKGERRRGKGHDGLYQGLSTATKDTYDALHMQALPPR

SEQ ID NO: 6134 - protein, 480 aa, Artificial Sequence
  Description of Artificial Sequence: Synthetic polypeptide
MALPVTALLLPLALLLHAARPQVQLVQSGGGLVQPGRSLRLSCAASGFTFDDYAMHWVRQAPGKGLEWVSGISWNSGSIGYADSVKGRFTISRDNAKNSLYLQMNSLRAEDTAVYYCAKDGSSSWSWGYFDYWGQGTLVTVSSGGGGSGGGGSGGGGSSSELTQDPAVSVALGQTVRTTCQGDALRSYYASWYQQKPGQAPMLVIYGKNNRPSGIPDRFSGSDSGDTASLTITGAQAEDEADYYCNSRDSSGYPVFGTGTKVTVLTTTPAPRPPTPAPTIASQPLSLRPEACRPAAGGAVHTRGLDFACDIYIWAPLAGTCGVLLLSLVITLYCKRGRKKLLYIFKQPFMRPVQTTQEEDGCSCRFPEEEEGGCELRVKFSRSADAPAYKQGQNQLYNELNLGRREEYDVLDKRRGRDPEMGGKPRRKNPQEGLYNELQKDKMAEAYSEIGMKGERRRGKGHDGLYQGLSTATKDTYDAL

SEQ ID NO: 6135 - protein, 445 aa, Artificial Sequence
  Description of Artificial Sequence: Synthetic Chimeric Antigen Receptor sequence
MALPVTALLLPLALLLHAARPEVQLVESGGGLVKPGGSLRLSCAASGFTFSRYGMSWVRQAPGKRLEWVSTISGGGTYIYYPDSVKGRFTISRDNAKNTLYLQMNSLRAEDTAVYYCTRDNYGRNYDYGMDYWGQGTLVTVSSGGGGSGGGGSGGGGSEIVLTQSPATLSLSPGERATLTCSATSSVSYIHWYQQRPGQSPRLLIYSTSNLASGIPARFSGSGSGSDYTLTISSLEPEDFAVYYCQQRSSSPFTFGSGTKVEIKTTTPAPRPPTPAPTIASQPLSLRPEACRPAAGGAVHTRGLDFACDIYIWAPLAGTCGVLLLSLVITLYCRVKFSRSADAPAYKQGQNQLYNELNLGRREEYDVLDKRRGRDPEMGGKPRRKNPQEGLYNELQKDKMAEAYSEIGMKGERRRGKGHDGLYQGLSTATKDTYDALHMQALPPR

SEQ ID NO: 6136 - protein, 464 aa, Artificial Sequence
  Description of Artificial Sequence: Synthetic Chimeric Antigen Receptor sequence
MALPVTALLLPLALLLHAARPGSQVQLQQSGPGLVTPSQTLSLTCAISGDSVSSNSATWNWIRQSPSRGLEWLGRTYYRSKWYNDYAVSVKSRMSINPDTSKNQFSLQLNSVTPEDTAVYYCARGMMTYYYGMDVWGQGTTVTVSSGILGSGGGGSGGGGSGGGGSQPVLTQSSSLSASPGASASLTCTLRSGINVGPYRIYWYQQKPGSPPQYLLNYKSDSDKQQGSGVPSRFSGSKDASANAGVLLISGLRSEDEADYYCMIWHSSAAVFGGGTQLTVLSASTTTPAPRPPTPAPTIASRPLSLRPEACRPAAGGAVHTRGLDFACDIYIWAPLAGTCGVLLLSLVITLYCRVKFSRSADAPAYQQGQNQLYNELNLGRREEYDVLDKRRGRDPEMGGKPRRKNPQEGLYNELQKDKMAEAYSEIGMKGERRGKGHDGLYQGLSTARKDTYDALHMQALPPT

SEQ ID NO: 6137 - protein, 487 aa, Artificial Sequence
  Description of Artificial Sequence: Synthetic Chimeric Antigen Receptor sequence
MVLLVTSLLLCELPHPAFLLIPDIQQVQLQQSGPELEKPGASVKISCKASGYSFTGYTMNWVKQSHGKSLEWIGLITPYNGASSYNQKFRGKATLTVDKSSSTAYMDLLSLTSEDSAVYFCARGGYDGRGFDYWGQGTTVTVSSGGGGSGGGGSSGGGSDIELTQSPAIMSASPGEKVTMTCSASSSVSYMHWYQQKSGTSPKRWIYDTSKLASGVPGRFSGSGSGNSYSLTISSVEAEDDATYYCQQWSKHPLTFGAGTKLEIKAAAIEVMYPPPYLDNEKSNGTIIHVKGKHLCPSPLFPGPSKPFWVLVVVGGVLACYSLLVTVAFIIFWVRSKRSRLLHSDYMNMTPRRPGPTRKHYQPYAPPRDFAAYRSRVKFSRSADAPAYQQGQNQLYNELNLGRREEYDVLDKRRGRDPEMGGKPRRKNPQEGLYNELQKDKMAEAYSEIGMKGERRRGKGHDGLYQGLSTATKDTYDALHMQALPPR

SEQ ID NO: 6138 - protein, 490 aa, Artificial Sequence
  Description of Artificial Sequence: Synthetic Chimeric Antigen Receptor sequence
MVLLVTSLLLCELPHPAFLLIPDIQAQVQLVQSGAEVKRPGASVQVSCRASGYSINTYYMQWVRQAPGAGLEWMGVINPSGVTSYAQKFQGRVTLTNDTSTNTVYMQLNSLTSADTAVYYCARWALWGDFGMDVWGKGTLVTVSSGGGGSGGGGSGGGGSDIQMTQSPSTLSASIGDRVTITCRASEGIYHWLAWYQQKPGKAPKLLIYKASSLASGAPSRFSGSGSGTDFTLTISSLQPDDFATYYCQQYSNYPLTFGGGTKLEIKRAAAIEVMYPPPYLDNEKSNGTIIHVKGKHLCPSPLFPGPSKPFWVLVVVGGVLACYSLLVTVAFIIFWVRSKRSRLLHSDYMNMTPRRPGPTRKHYQPYAPPRDFAAYRSRVKFSRSADAPAYQQGQNQLYNELNLGRREEYDVLDKRRGRDPEMGGKPRRKNPQEGLYNELQKDKMAEAYSEIGMKGERRRGKGHDGLYQGLSTATKDTYDALHMQALPPR

SEQ ID NO: 6139 - protein, 507 aa, Artificial Sequence
  Description of Artificial Sequence: Synthetic Chimeric Antigen Receptor sequence
MALPVTALLLPLALLLHAARPGSQVQLQQSGPGLVTPSQTLSLTCAISGDSVSSNSATWNWIRQSPSRGLEWLGRTYYRSKWYNDYAVSVKSRMSINPDTSKNQFSLQLNSVTPEDTAVYYCARGMMTYYYGMDVWGQGTTVTVSSGILGSGGGGSGGGGSGGGGSQPVLTQSSSLSASPGASASLTCTLRSGINVGPYRIYWYQQKPGSPPQYLLNYKSDSDKQQGSGVPSRFSGSKDASANAGVLLISGLRSEDEADYYCMIWHSSAAVFGGGTQLTVLSASTTTPAPRPPTPAPTIASQPLSLRPEACRPAAGGAVHTRGLDFACDIYIWAPLAGTCGVLLLSLVITLYCKRGRKKLLYIFKQPFMRPVQTTQEEDGCSCRFPEEEEGGCELRVKFSRSADAPAYKQGQNQLYNELNLGRREEYDVLDKRRGRDPEMGGKPRRKNPQEGLYNELQKDKMAEAYSEIGMKGERRRGKGHDGLYQGLSTATKDTYDALHMQALPPR

SEQ ID NO: 6140 - protein, 511 aa, Artificial Sequence
  Description of Artificial Sequence: Synthetic Chimeric Antigen Receptor sequence
MALPVTALLLPLALLLHAARPGSQVQLQQSGPGLVTPSQTLSLTCAISGDSVSSNSATWNWIRQSPSRGLEWLGRTYYRSKWYNDYAVSVKSRMSINPDTSKNQFSLQLNSVTPEDTAVYYCARGMMTYYYGMDVWGQGTTVTVSSGILGSGGGGSGGGGSGGGGSQPVLTQSSSLSASPGASASLTCTLRSGINVGPYRIYWYQQKPGSPPQYLLNYKSDSDKQQGSGVPSRFSGSKDASANAGVLLISGLRSEDEADYYCMIWHSSAAVFGGGTQLTVLSASTTTPAPRPPTPAPTIASQPLSLRPEACRPAAGGAVHTRGLDFACDFWVLVVVGGVLACYSLLVTVAFIIFWVRSKRSRLLHSDYMNMTPRRPGPTRKHYQPYAPPRDFAAYRSIDRVKFSRSADAPAYQQGQNQLYNELNLGRREEYDVLDKRRGRDPEMGGKPRRKNPQEGLYNELQKDKMAEAYSEIGMKGERRRGKGHDGLYQGLSTATKDTYDALHMQALPPR

SEQ ID NO: 6141 - protein, 551 aa, Artificial Sequence
  Description of Artificial Sequence: Synthetic Chimeric Antigen Receptor sequence
MVLLVTSLLLCELPHPAFLLIPDIQQVQLQQSGPELEKPGASVKISCKASGYSFTGYTMNWVKQSHGKSLEWIGLITPYNGASSYNQKFRGKATLTVDKSSSTAYMDLLSLTSEDSAVYFCARGGYDGRGFDYWGQGTTVTVSSGGGGSGGGGSGGGGSDIELTQSPAIMSASPGEKVTMTCSASSSVSYMHWYQQKSGTSPKRWIYDTSKLASGVPGRFSGSGSGNSYSLTISSVEAEDDATYYCQQWSGYPLTFGAGTKLEIKAAAFVPVFLPAKPTTTPAPRPPTPAPTIASQPLSLRPEACRPAAGGAVHTRGLDFACDIYIWAPLAGTCGVLLLSLVITLYCNHRNRSKRSRLLHSDYMNMTPRRPGPTRKHYQPYAPPRDFAAYRSRFSVVKRGRKKLLYIFKQPFMRPVQTTQEEDGCSCRFPEEEEGGCELRVKFSRSADAPAYQQGQNQLYNELNLGRREEYDVLDKRRGRDPEMGGKPRRKNPQEGLYNELQKDKMAEAYSEIGMKGERRRGKGHDGLYQGLSTATKDTYDALHMQALPPR

SEQ ID NO: 6142 - protein, 551 aa, Artificial Sequence
  Description of Artificial Sequence: Synthetic Chimeric Antigen Receptor sequence
MVLLVTSLLLCELPHPAFLLIPDIQQVQLQQSGPELEKPGASVKISCKASGYSFTGYTMNWVKQSHGKSLEWIGLITPYNGASSYNQKFRGKATLTVDKSSSTAYMDLLSLTSEDSAVYFCARGGYDGRGFDYWGQGTTVTVSSGGGGSGGGGSSGGGSDIELTQSPAIMSASPGEKVTMTCSASSSVSYMHWYQQKSGTSPKRWIYDTSKLASGVPGRFSGSGSGNSYSLTISSVEAEDDATYYCQQWSKHPLTFGAGTKLEIKAAAFVPVFLPAKPTTTPAPRPPTPAPTIASQPLSLRPEACRPAAGGAVHTRGLDFACDIYIWAPLAGTCGVLLLSLVITLYCNHRNRSKRSRLLHSDYMNMTPRRPGPTRKHYQPYAPPRDFAAYRSRFSVVKRGRKKLLYIFKQPFMRPVQTTQEEDGCSCRFPEEEEGGCELRVKFSRSADAPAYQQGQNQLYNELNLGRREEYDVLDKRRGRDPEMGGKPRRKNPQEGLYNELQKDKMAEAYSEIGMKGERRRGKGHDGLYQGLSTATKDTYDALHMQALPPR

SEQ ID NO: 6143 - protein, 554 aa, Artificial Sequence
  Description of Artificial Sequence: Synthetic Chimeric Antigen Receptor sequence
MVLLVTSLLLCELPHPAFLLIPDIQAQVQLVQSGAEVKRPGASVQVSCRASGYSINTYYMQWVRQAPGAGLEWMGVINPSGVTSYAQKFQGRVTLTNDTSTNTVYMQLNSLTSADTAVYYCARWALWGDFGMDVWGKGTLVTVSSGGGGSGGGGSGGGGSDIQMTQSPSTLSASIGDRVTITCRASEGIYHWLAWYQQKPGKAPKLLIYKASSLASGAPSRFSGSGSGTDFTLTISSLQPDDFATYYCQQYSNYPLTFGGGTKLEIKRAAAFVPVFLPAKPTTTPAPRPPTPAPTIASQPLSLRPEACRPAAGGAVHTRGLDFACDIYIWAPLAGTCGVLLLSLVITLYCNHRNRSKRSRLLHSDYMNMTPRRPGPTRKHYQPYAPPRDFAAYRSRFSVVKRGRKKLLYIFKQPFMRPVQTTQEEDGCSCRFPEEEEGGCELRVKFSRSADAPAYQQGQNQLYNELNLGRREEYDVLDKRRGRDPEMGGKPRRKNPQEGLYNELQKDKMAEAYSEIGMKGERRRGKGHDGLYQGLSTATKDTYDALHMQALPPR

SEQ ID NO: 6144 - protein, 738 aa, Artificial Sequence
  Description of Artificial Sequence: Synthetic Chimeric Antigen Receptor sequence
MALPVTALLLPLALLLHAARPEVQLQQSGGERATPGASVKMSCKTSGYTFTNYWMHWVKQRPGQGLEWIGYINPSSGYTQYNQKFKDKATLTADKSSSTAYIQLSSLTSEDSAVYYCSTYYGDYLFPYWGQGTLVTVSAGGGGSGGGGSGGGGSDVLMTQTPLSLPVSLGDQASISCRSSQDIVYGNGNTYLEWYLQKPGQSPKLLIYKVSNRFSGVPDRFSGSGSGTDFTLKISRVEAEDLGVYYCFQGSHVPYTFGGGTKLEIKRAAAIEVEQKLISEEDLLDNEKSNGTIIHVKGKHLCPSPLFPGPSKPFWVLVVVGGVLACYSLLVTVAFIIFWVRSKRSRLLHSDYMNMTPRRPGPTRKHYQPYAPPRDFAAYRSRVKFSRSADAPAYQQGQNQLYNELNLGRREEYDVLDKRRGRDPEMGGKPRRKNPQEGLYNELQKDKMAEAYSEIGMKGERRRGKGHDGLYQGLSTATKDTYDALHMQALPPRARGAAAGAGGAGRMVSELIKENMHMKLYMEGTVNNHHFKCTSEGEGKPYEGTQTMRIKAVEGGPLPFAFDILATSFMYGSKTFINHTQGIPDFFKQSFPEGFTWERVTTYEDGGVLTATQDTSLQDGCLIYNVKIRGVNFPSNGPVMQKKTLGWEASTETLYPADGGLEGRADMALKLVGGGHLICNLKTTYRSKKPAKNLKMPGVYYVDRRLERIKEADKETYVEQHEVAVARYCDLPSKLGHR

SEQ ID NO: 6145 - protein, 451 aa, Artificial Sequence
  Description of Artificial Sequence: Synthetic Chimeric Antigen Receptor sequence
MALPVTALLLPLALLLHAARPEVQLVESGGGLVKPGGSLRLSCAASGFTFSGYAMSWVRQAPGKGLEWVSTISSGGTYIYYPDSVKGRFTISRDNAKNSLYLQMNSLRAEDTAVYYCARLGGDNYYEYFDVWGKGTTVTVSSGGGGSGGGGSGGGGSDIVLTQSPASLAVSPGQRATITCRASKSVSTSGYSYMHWYQQKPGQPPKLLIYLASNLESGVPARFSGSGSGTDFTLTINPVEANDTANYYCQHSRELPFTFGGGTKVEIKRTTTTPAPRPPTPAPTIASQPLSLRPEACRPAAGGAVHTRGLDFACDIYIWAPLAGTCGVLLLSLVITLYCRVKFSRSADAPAYKQGQNQLYNELNLGRREEYDVLDKRRGRDPEMGGKPRRKNPQEGLYNELQKDKMAEAYSEIGMKGERRRGKGHDGLYQGLSTATKDTYDALHMQALPPR

SEQ ID NO: 6146 - protein, 482 aa, Artificial Sequence
  Description of Artificial Sequence: Synthetic Chimeric Antigen Receptor sequence
MALPVTALLLPLALLLHAARPEVQLVESGGGLVKPGGSLRLSCAASGFTFSRYGMSWVRQAPGKRLEWVSTISGGGTYIYYPDSVKGRFTISRDNAKNTLYLQMNSLRAEDTAVYYCTRDNYGRNYDYGMDYWGQGTLVTVSSGGGGSGGGGSGGGGSEIVLTQSPATLSLSPGERATLTCSATSSVSYIHWYQQRPGQSPRLLIYSTSNLASGIPARFSGSGSGSDYTLTISSLEPEDFAVYYCQQRSSSPFTFGSGTKVEIKTTTPAPRPPTPAPTIASQPLSLRPEACRPAAGGAVHTRGLDFACDIYIWAPLAGTCGVLLLSLVITLYCRRDQRLPPDAHKPPGGGSFRTPIQEEQADAHSTLAKIRVKFSRSADAPAYKQGQNQLYNELNLGRREEYDVLDKRRGRDPEMGGKPRRKNPQEGLYNELQKDKMAEAYSEIGMKGERRRGKGHDGLYQGLSTATKDTYDALHMQALPPR

SEQ ID NO: 6147 - protein, 486 aa, Artificial Sequence
  Description of Artificial Sequence: Synthetic Chimeric Antigen Receptor sequence
MALPVTALLLPLALLLHAARPEVQLVESGGGLVKPGGSLRLSCAASGFTFSRYGMSWVRQAPGKRLEWVSTISGGGTYIYYPDSVKGRFTISRDNAKNTLYLQMNSLRAEDTAVYYCTRDNYGRNYDYGMDYWGQGTLVTVSSGGGGSGGGGSGGGGSEIVLTQSPATLSLSPGERATLTCSATSSVSYIHWYQQRPGQSPRLLIYSTSNLASGIPARFSGSGSGSDYTLTISSLEPEDFAVYYCQQRSSSPFTFGSGTKVEIKTTTPAPRPPTPAPTIASQPLSLRPEACRPAAGGAVHTRGLDFACDIYIWAPLAGTCGVLLLSLVITLYCRSKRSRLLHSDYMNMTPRRPGPTRKHYQPYAPPRDFAAYRSRVKFSRSADAPAYKQGQNQLYNELNLGRREEYDVLDKRRGRDPEMGGKPRRKNPQEGLYNELQKDKMAEAYSEIGMKGERRRGKGHDGLYQGLSTATKDTYDALHMQALPPR

SEQ ID NO: 6148 - protein, 487 aa, Artificial Sequence
  Description of Artificial Sequence: Synthetic Chimeric Antigen Receptor sequence
MALPVTALLLPLALLLHAARPEVQLVESGGGLVKPGGSLRLSCAASGFTFSRYGMSWVRQAPGKRLEWVSTISGGGTYIYYPDSVKGRFTISRDNAKNTLYLQMNSLRAEDTAVYYCTRDNYGRNYDYGMDYWGQGTLVTVSSGGGGSGGGGSGGGGSEIVLTQSPATLSLSPGERATLTCSATSSVSYIHWYQQRPGQSPRLLIYSTSNLASGIPARFSGSGSGSDYTLTISSLEPEDFAVYYCQQRSSSPFTFGSGTKVEIKTTTPAPRPPTPAPTIASQPLSLRPEACRPAAGGAVHTRGLDFACDIYIWAPLAGTCGVLLLSLVITLYCKRGRKKLLYIFKQPFMRPVQTTQEEDGCSCRFPEEEEGGCELRVKFSRSADAPAYKQGQNQLYNELNLGRREEYDVLDKRRGRDPEMGGKPRRKNPQEGLYNELQKDKMAEAYSEIGMKGERRRGKGHDGLYQGLSTATKDTYDALHMQALPPR

SEQ ID NO: 6149 - protein, 488 aa, Artificial Sequence
  Description of Artificial Sequence: Synthetic Chimeric Antigen Receptor sequence
MALPVTALLLPLALLLHAARPEVQLVESGGGLVKPGGSLRLSCAASGFTFSGYAMSWVRQAPGKGLEWVSTISSGGTYIYYPDSVKGRFTISRDNAKNSLYLQMNSLRAEDTAVYYCARLGGDNYYEYFDVWGKGTTVTVSSGGGGSGGGGSGGGGSDIVLTQSPASLAVSPGQRATITCRASKSVSTSGYSYMHWYQQKPGQPPKLLIYLASNLESGVPARFSGSGSGTDFTLTINPVEANDTANYYCQHSRELPFTFGGGTKVEIKRTTTTPAPRPPTPAPTIASQPLSLRPEACRPAAGGAVHTRGLDFACDIYIWAPLAGTCGVLLLSLVITLYCRRDQRLPPDAHKPPGGGSFRTPIQEEQADAHSTLAKIRVKFSRSADAPAYKQGQNQLYNELNLGRREEYDVLDKRRGRDPEMGGKPRRKNPQEGLYNELQKDKMAEAYSEIGMKGERRRGKGHDGLYQGLSTATKDTYDALHMQALPPR

SEQ ID NO: 6150 - protein, 492 aa, Artificial Sequence
  Description of Artificial Sequence: Synthetic Chimeric Antigen Receptor sequence
MALPVTALLLPLALLLHAARPEVQLVESGGGLVKPGGSLRLSCAASGFTFSGYAMSWVRQAPGKGLEWVSTISSGGTYIYYPDSVKGRFTISRDNAKNSLYLQMNSLRAEDTAVYYCARLGGDNYYEYFDVWGKGTTVTVSSGGGGSGGGGSGGGGSDIVLTQSPASLAVSPGQRATITCRASKSVSTSGYSYMHWYQQKPGQPPKLLIYLASNLESGVPARFSGSGSGTDFTLTINPVEANDTANYYCQHSRELPFTFGGGTKVEIKRTTTTPAPRPPTPAPTIASQPLSLRPEACRPAAGGAVHTRGLDFACDIYIWAPLAGTCGVLLLSLVITLYCRSKRSRLLHSDYMNMTPRRPGPTRKHYQPYAPPRDFAAYRSRVKFSRSADAPAYKQGQNQLYNELNLGRREEYDVLDKRRGRDPEMGGKPRRKNPQEGLYNELQKDKMAEAYSEIGMKGERRRGKGHDGLYQGLSTATKDTYDALHMQALPPR

SEQ ID NO: 6151 - protein, 493 aa, Artificial Sequence
  Description of Artificial Sequence: Synthetic Chimeric Antigen Receptor sequence
MALPVTALLLPLALLLHAARPEVQLVESGGGLVKPGGSLRLSCAASGFTFSGYAMSWVRQAPGKGLEWVSTISSGGTYIYYPDSVKGRFTISRDNAKNSLYLQMNSLRAEDTAVYYCARLGGDNYYEYFDVWGKGTTVTVSSGGGGSGGGGSGGGGSDIVLTQSPASLAVSPGQRATITCRASKSVSTSGYSYMHWYQQKPGQPPKLLIYLASNLESGVPARFSGSGSGTDFTLTINPVEANDTANYYCQHSRELPFTFGGGTKVEIKRTTTTPAPRPPTPAPTIASQPLSLRPEACRPAAGGAVHTRGLDFACDIYIWAPLAGTCGVLLLSLVITLYCKRGRKKLLYIFKQPFMRPVQTTQEEDGCSCRFPEEEEGGCELRVKFSRSADAPAYKQGQNQLYNELNLGRREEYDVLDKRRGRDPEMGGKPRRKNPQEGLYNELQKDKMAEAYSEIGMKGERRRGKGHDGLYQGLSTATKDTYDALHMQALPPR

SEQ ID NO: 6152 - protein, 513 aa, Artificial Sequence
  Description of Artificial Sequence: Synthetic Chimeric Antigen Receptor sequence
EVQLVESGGGLVKPGGSLRLSCAASGFTFSGYAMSWVRQAPGKGLEWVSTISSGGTYIYYPDSVKGRFTISRDNAKNSLYLQMNSLRAEDTAVYYCARLGGDNYYEYFDVWGKGTTVTVSSGGGGSGGGGSGGGGSDIVLTQSPASLAVSPGQRATITCRASKSVSTSGYSYMHWYQQKPGQPPKLLIYLASNLESGVPARFSGSGSGTDFTLTINPVEANDTANYYCQHSRELPFTFGGGTKVEIKRTTTTPAPRPPTPAPTIASQPLSLRPEACRPAAGGAVHTRGLDFACDIYIWAPLAGTCGVLLLSLVITLYCRSKRSRLLHSDYMNMTPRRPGPTRKHYQPYAPPRDFAAYRSKRGRKKLLYIFKQPFMRPVQTTQEEDGCSCRFPEEEEGGCELRVKFSRSADAPAYKQGQNQLYNELNLGRREEYDVLDKRRGRDPEMGGKPRRKNPQEGLYNELQKDKMAEAYSEIGMKGERRRGKGHDGLYQGLSTATKDTYDALHMQALPPR

SEQ ID NO: 6153 - protein, 523 aa, Artificial Sequence
  Description of Artificial Sequence: Synthetic Chimeric Antigen Receptor sequence
MALPVTALLLPLALLLHAARPEVQLVESGGGLVKPGGSLRLSCAASGFTFSRYGMSWVRQAPGKRLEWVSTISGGGTYIYYPDSVKGRFTISRDNAKNTLYLQMNSLRAEDTAVYYCTRDNYGRNYDYGMDYWGQGTLVTVSSGGGGSGGGGSGGGGSEIVLTQSPATLSLSPGERATLTCSATSSVSYIHWYQQRPGQSPRLLIYSTSNLASGIPARFSGSGSGSDYTLTISSLEPEDFAVYYCQQRSSSPFTFGSGTKVEIKTTTPAPRPPTPAPTIASQPLSLRPEACRPAAGGAVHTRGLDFACDIYIWAPLAGTCGVLLLSLVITLYCRSKRSRLLHSDYMNMTPRRPGPTRKHYQPYAPPRDFAAYRSRRDQRLPPDAHKPPGGGSFRTPIQEEQADAHSTLAKIRVKFSRSADAPAYKQGQNQLYNELNLGRREEYDVLDKRRGRDPEMGGKPRRKNPQEGLYNELQKDKMAEAYSEIGMKGERRRGKGHDGLYQGLSTATKDTYDALHMQALPPR

SEQ ID NO: 6154 - protein, 528 aa, Artificial Sequence
  Description of Artificial Sequence: Synthetic Chimeric Antigen Receptor sequence
MALPVTALLLPLALLLHAARPEVQLVESGGGLVKPGGSLRLSCAASGFTFSRYGMSWVRQAPGKRLEWVSTISGGGTYIYYPDSVKGRFTISRDNAKNTLYLQMNSLRAEDTAVYYCTRDNYGRNYDYGMDYWGQGTLVTVSSGGGGSGGGGSGGGGSEIVLTQSPATLSLSPGERATLTCSATSSVSYIHWYQQRPGQSPRLLIYSTSNLASGIPARFSGSGSGSDYTLTISSLEPEDFAVYYCQQRSSSPFTFGSGTKVEIKTTTPAPRPPTPAPTIASQPLSLRPEACRPAAGGAVHTRGLDFACDIYIWAPLAGTCGVLLLSLVITLYCRSKRSRLLHSDYMNMTPRRPGPTRKHYQPYAPPRDFAAYRSKRGRKKLLYIFKQPFMRPVQTTQEEDGCSCRFPEEEEGGCELRVKFSRSADAPAYKQGQNQLYNELNLGRREEYDVLDKRRGRDPEMGGKPRRKNPQEGLYNELQKDKMAEAYSEIGMKGERRRGKGHDGLYQGLSTATKDTYDALHMQALPPR

SEQ ID NO: 6155 - protein, 529 aa, Artificial Sequence
  Description of Artificial Sequence: Synthetic Chimeric Antigen Receptor sequence
MALPVTALLLPLALLLHAARPEVQLVESGGGLVKPGGSLRLSCAASGFTFSGYAMSWVRQAPGKGLEWVSTISSGGTYIYYPDSVKGRFTISRDNAKNSLYLQMNSLRAEDTAVYYCARLGGDNYYEYFDVWGKGTTVTVSSGGGGSGGGGSGGGGSDIVLTQSPASLAVSPGQRATITCRASKSVSTSGYSYMHWYQQKPGQPPKLLIYLASNLESGVPARFSGSGSGTDFTLTINPVEANDTANYYCQHSRELPFTFGGGTKVEIKRTTTTPAPRPPTPAPTIASQPLSLRPEACRPAAGGAVHTRGLDFACDIYIWAPLAGTCGVLLLSLVITLYCRSKRSRLLHSDYMNMTPRRPGPTRKHYQPYAPPRDFAAYRSRRDQRLPPDAHKPPGGGSFRTPIQEEQADAHSTLAKIRVKFSRSADAPAYKQGQNQLYNELNLGRREEYDVLDKRRGRDPEMGGKPRRKNPQEGLYNELQKDKMAEAYSEIGMKGERRRGKGHDGLYQGLSTATKDTYDALHMQALPPR

SEQ ID NO: 6156 - protein, 535 aa, Artificial Sequence
  Description of Artificial Sequence: Synthetic Chimeric Antigen Receptor sequence
MALPVTALLLPLALLLHAARPEVQLQQSGGERATPGASVKMSCKTSGYTFTNYWMHWVKQRPGQGLEWIGYINPSSGYTQYNQKFKDKATLTADKSSSTAYIQLSSLTSEDSAVYYCSTYYGDYLFPYWGQGTLVTVSAGGGGSGGGGSGGGGSDVLMTQTPLSLPVSLGDQASISCRSSQDIVYGNGNTYLEWYLQKPGQSPKLLIYKVSNRFSGVPDRFSGSGSGTDFTLKISRVEAEDLGVYYCFQGSHVPYTFGGGTKLEIKRAAAIEVEQKLISEEDLLDNEKSNGTIIHVKGKHLCPSPLFPGPSKPFWVLVVVGGVLACYSLLVTVAFIIFWVRSKRSRLLHSDYMNMTPRRPGPTRKHYQPYAPPRDFAAYRSKRGRKKLLYIFKQPFMRPVQTTQEEDGCSCRFPEEEEGGCELRVKFSRSADAPAYQQGQNQLYNELNLGRREEYDVLDKRRGRDPEMGGKPRRKNPQEGLYNELQKDKMAEAYSEIGMKGERRRGKGHDGLYQGLSTATKDTYDALHMQALPPR

SEQ ID NO: 6157 - protein, 555 aa, Artificial Sequence
  Description of Artificial Sequence: Synthetic Chimeric Antigen Receptor sequence
MALPVTALLLPLALLLHAARPEVQLQQSGGERATPGASVKMSCKTSGYTFTNYWMHWVKQRPGQGLEWIGYINPSSGYTQYNQKFKDKATLTADKSSSTAYIQLSSLTSEDSAVYYCSTYYGDYLFPYWGQGTLVTVSAGGGGSGGGGSGGGGSDVLMTQTPLSLPVSLGDQASISCRSSQDIVYGNGNTYLEWYLQKPGQSPKLLIYKVSNRFSGVPDRFSGSGSGTDFTLKISRVEAEDLGVYYCFQGSHVPYTFGGGTKLEIKRAAAIEVEQKLISEEDLLDNEKSNGTIIHVKGKHLCPSPLFPGPSKPFWVLVVVGGVLACYSLLVTVAFIIFWVRSKRSRLLHSDYMNMTPRRPGPTRKHYQPYAPPRDFAAYRSRDQRLPPDAHKPPGECLMALPHCSWRVRPTHQSLLFSSPGGGSFRTPIQEEQADAHSTLAKIRVKFSRSADAPAYQQGQNQLYNELNLGRREEYDVLDKRRGRDPEMGGKPRRKNPQEGLYNELQKDKMAEAYSEIGMKGERRRGKGHDGLYQGLSTATKDTYDALHMQALPPR

SEQ ID NO: 6158 - protein, 1397 aa, Artificial Sequence
  Description of Artificial Sequence: Synthetic Chimeric Antigen Receptor sequence
MEEISAAAVKVVPGPERPSPFSQLVYTSNDSYIVHSGDLRKIHKAASRGQVRKLEKMTKRKKTINLNIQDAQKRTALHWACVNGHEEVVTFLVDRKCQLDVLDGEHRTPLMKALQCHQEACANILIDSGADINLVDVYGNTALHYAVYSEILSVVAKLLSHGAVIEVHNKASLTPLLLSITKRSEQIVEFLLIKNANANAVNKYKCTALMLAVCHGSSEIVGMLLQQNVDVFAADICGVTAEHYAVTCGFHHIHEQIMEYIRKLSKNHQNTNPEGTSAGTPDEAAPLAERTPDTAESLVEKTPDEAAPLVERTPDTAESLVEKTPDEAASLVEGTSDKIQCLEKATSGKFEQSAEETPREITSPAKETSEKFTWPAKGRPRKIAWEKKEDTPREIMSPAKETSEKFTWAAKGRPRKIAWEKKETPVKTGCVARVTSNKTKVLEKGRSKMIACPTKESSTKASANDQRFPSESKQEEDEEYSCDSRSLFESSAKIQVCIPESIYQKVMEINREVEEPPKKPSAFKPAIEMQNSVPNKAFELKNEQTLRADPMFPPESKQKDYEENSWDSESLCETVSQKDVCLPKATHQKEIDKINGKLEESPNKDGLLKATCGMKVSIPTKALELKDMQTFKAEPPGKPSAFEPATEMQKSVPNKALELKNEQTLRADEILPSESKQKDYEENSWDTESLCETVSQKDVCLPKAAHQKEIDKINGKLEGSPVKDGLLKANCGMKVSIPTKALELMDMQTFKAEPPEKPSAFEPAIEMQKSVPNKALELKNEQTLRADEILPSESKQKDYEESSWDSESLCETVSQKDVCLPKATHQKEIDKINGKLEESPDNDGFLKAPCRMKVSIPTKALELMDMQTFKAEPPEKPSAFEPAIEMQKSVPNKALELKNEQTLRADQMFPSESKQKKVEENSWDSESLRETVSQKDVCVPKATHQKEMDKISGKLEDSTSLSKILDTVHSCERARELQKDHCEQRTGKMEQMKKKFCVLKKKLSEAKEIKSQLENQKVKWEQELCSVRLTLNQEEEKRRNADILNEKIREELGRIEEQHRKELEVKQQLEQALRIQDIELKSVESNLNQVSHTHENENYLLHENCMLKKEIAMLKLEIATLKHQYQEKENKYFEDIKILKEKNAELQMTLKLKEESLTKRASQYSGQLKVLIAENTMLTSKLKEKQDKEILEAEIESHHPRLASAVQDHDQIVTSRKSQEPAFHIAGDACLQRKMNVDVSSTIYNNEVLHQPLSEAQRKSKSLKINLNYAGDALRENTLVSEHAQRDQRETQCQMKEAEHMYQNEQDNVNKHTEQQESLDQKLFQLQSKNMWLQQQLVHAHKKADNKSKITIDIHFLERKMQHHLLKEKNEEIFNYNNHLKNRIYQYEKEKAETENS

SEQ ID NO: 6159 - protein, 463 aa, Artificial Sequence
  Description of Artificial Sequence: Synthetic Chimeric Antigen Receptor sequence
VQLQESGPDLVKPSQSLSLTCTVTGYSITSGYSWHWIRQFPGNKLEWMGYIHYSGDTDYNPSLKSRFSITRDTSKNQFFLQLNSVTTEDTATYYCATPGGFVYWGQGTLVTVSAGGGGSGGGGSGGGGSDVVMTQTPLTLSVTIGQPASISCKSSQSLLDSDGKTYLHWLLQRPGQSPKRLIFLVSKLDSGVPDRFTGSGSGTDFTLKISRVEAEDLGVYYCWQGTHFPQTFGGGTKLEIKAAAIEVMYPPPYLDNEKSNGTIIHVKGKHLCPSPLFPGPSKPFWVLVVVGGVLACYSLLVTVAFIIFWVRSKRSRLLHSDYMNMTPRRPGPTRKHYQPYAPPRDFAAYRSRVKFSRSADAPAYQQGQNQLYNELNLGRREEYDVLDKRRGRDPEMGGKPRRKNPQEGLYNELQKDKMAEAYSEIGMKGERRRGKGHDGLYQGLSTATKDTYDALHMQALPPR

SEQ ID NO: 6160 - protein, 394 aa, Artificial Sequence
  Description of Artificial Sequence: Synthetic Chimeric Antigen Receptor sequence
MALPVTALLLPLALLLHAARPPGWFLDSPDRPWNPPTFSPALLVVTEGDNATFTCSFSNTSESFVLNWYRMSPSNQTDKLAAFPEDRSQPGQDCRFRVTQLPNGRDFHMSVVRARRNDSGTYLCGAISLAPKAQIKESLRAELRVTERRAEVPTAHPSPSPRPAGQFQTLVTTTPAPRPPTPAPTIASQPLSLRPEACRPAAGGAVHTRGLDFACDIYIWAPLAGTCGVLLLSLVITLYCKRGRKKLLYIFKQPFMRPVQTTQEEDGCSCRFPEEEEGGCELRVKFSRSADAPAYKQGQNQLYNELNLGRREEYDVLDKRRGRDPEMGGKPRRKNPQEGLYNELQKDKMAEAYSEIGMKGERRRGKGHDGLYQGLSTATKDTYDALHMQALPPR

SEQ ID NO: 6161 - protein, 453 aa, Artificial Sequence
  Description of Artificial Sequence: Synthetic Chimeric Antigen Receptor sequence
MALPVTALLLPLALLLHAARPEVQLLESGGGLVQPGGSLRLSCAASGFTFSSYAMNWVRQAPGKGLEWVSAISDSGGSTYYADSVKGRFTISRDNSKNTLYLQMNSLRAEDTAVYYCARYWPMDIWGQGTLVTVSSGGGGSGGGGSGGGGSEIVLTQSPGTLSLSPGERATLSCRASQSVSSSYLAWYQQKPGQAPRLLMYDASIRATGIPDRFSGSGSGTDFTLTISRLEPEDFAVYYCQQYGSWPLTFGQGTKVEIKGLAVSTISSFFPPGYQIYIWAPLAGTCGVLLLSLVITLYCKRGRKKLLYIFKQPFMRPVQTTQEEDGCSCRFPEEEEGGCELRVKFSRSADAPAYQQGQNQLYNELNLGRREEYDVLDKRRGRDPEMGGKPRRKNPQEGLYNELQKDKMAEAYSEIGMKGERRRGKGHDGLYQGLSTATKDTYDALHMQALPPR

SEQ ID NO: 6162 - protein, 486 aa, Artificial Sequence
  Description of Artificial Sequence: Synthetic Chimeric Antigen Receptor sequence
VQLQESGPDLVKPSQSLSLTCTVTGYSITSGYSWHWIRQFPGNKLEWMGYIHYSGDTDYNPSLKSRFSITRDTSKNQFFLQLNSVTTEDTATYYCATPGGFVYWGQGTLVTVSAGGGGSGGGGSGGGGSDVVMTQTPLTLSVTIGQPASISCKSSQSLLDSDGKTYLHWLLQRPGQSPKRLIFLVSKLDSGVPDRFTGSGSGTDFTLKISRVEAEDLGVYYCWQGTHFPQTFGGGTKLEIKAAAFVPVFLPAKPTTTPAPRPPTPAPTIASQPLSLRPEACRPAAGGAVHTRGLDFACDIYIWAPLAGTCGVLLLSLVITLYCNHRNRFSVVKRGRKKLLYIFKQPFMRPVQTTQEEDGCSCRFPEEEEGGCELRVKFSRSADAPAYQQGQNQLYNELNLGRREEYDVLDKRRGRDPEMGGKPRRKNPQEGLYNELQKDKMAEAYSEIGMKGERRRGKGHDGLYQGLSTATKDTYDALHMQALPPR

SEQ ID NO: 6163 - protein, 489 aa, Artificial Sequence
  Description of Artificial Sequence: Synthetic Chimeric Antigen Receptor sequence
MALPVTALLLPLALLLHAARPAIRMTQSPSSLSASVGDRVTITCQASQDISNYLNWYQQKPGKAPKLLIYDASNLETGVPSRFSGSGSGTDFTFTISSLQPEDIATYYCQQYDNLPLTFGGGTKVEIKRGGGGSGGGGSGGGGSEVQLVESGGGLVKPGGSLRLSCAASGFTFSDYYMSWIRQAPGKGLEWVSYISDSTNTIYYADSVKGRFTVSRDNPKNSLYLQMISLRAEDTAVYYCARAVGAGEGFDHWGQGTLVTVSSAAATTTPAPRPPTPAPTIASQPLSLRPEACRPAAGGAVHTRGLDFACDIYIWAPLAGTCGVLLLSLVITLYCKRGRKKLLYIFKQPFMRPVQTTQEEDGCSCRFPEEEEGGCELRVKFSRSADAPAYQQGQNQLYNELNLGRREEYDVLDKRRGRDPEMGGKPRRKNPQEGLYNELQKDKMAEAYSEIGMKGERRRGKGHDGLYQGLSTATKDTYDALHMQALPPR

SEQ ID NO: 6164 - protein, 527 aa, Artificial Sequence
  Description of Artificial Sequence: Synthetic Chimeric Antigen Receptor sequence
VQLQESGPDLVKPSQSLSLTCTVTGYSITSGYSWHWIRQFPGNKLEWMGYIHYSGDTDYNPSLKSRFSITRDTSKNQFFLQLNSVTTEDTATYYCATPGGFVYWGQGTLVTVSAGGGGSGGGGSGGGGSDVVMTQTPLTLSVTIGQPASISCKSSQSLLDSDGKTYLHWLLQRPGQSPKRLIFLVSKLDSGVPDRFTGSGSGTDFTLKISRVEAEDLGVYYCWQGTHFPQTFGGGTKLEIKAAAFVPVFLPAKPTTTPAPRPPTPAPTIASQPLSLRPEACRPAAGGAVHTRGLDFACDIYIWAPLAGTCGVLLLSLVITLYCNHRNRSKRSRLLHSDYMNMTPRRPGPTRKHYQPYAPPRDFAAYRSRFSVVKRGRKKLLYIFKQPFMRPVQTTQEEDGCSCRFPEEEEGGCELRVKFSRSADAPAYQQGQNQLYNELNLGRREEYDVLDKRRGRDPEMGGKPRRKNPQEGLYNELQKDKMAEAYSEIGMKGERRRGKGHDGLYQGLSTATKDTYDALHMQALPPR

SEQ ID NO: 6165 - protein, 453 aa, Artificial Sequence
  Description of Artificial Sequence: Synthetic Chimeric Antigen Receptor sequence
MALPVTALLLPLALLLHAARPEVQLLESGGGLVQPGGSLRLSCAASGFTFSSYAMNWVRQAPGKGLEWVSAILSSGGSTYYADSVKGRFTISRDNSKNTLYLQMNSLRAEDTAVYYCARYWPMDIWGQGTLVTVSSGGGGSGGGGSGGGGSEIVLTQSPGTLSLSPGERATLSCRGGQSVSSSYLAWYQQKPGQAPRLLMYDASIRATGIPDRFSGSGSGTDFTLTISRLEPEDFAVYYCQQYQSWPLTFGQGTKVEIKGLAVSTISSFFPPGYQIYIWAPLAGTCGVLLLSLVITLYCKRGRKKLLYIFKQPFMRPVQTTQEEDGCSCRFPEEEEGGCELRVKFSRSADAPAYQQGQNQLYNELNLGRREEYDVLDKRRGRDPEMGGKPRRKNPQEGLYNELQKDKMAEAYSEIGMKGERRRGKGHDGLYQGLSTATKDTYDALHMQALPPR

SEQ ID NO: 6166 - protein, 482 aa, Artificial Sequence
  Description of Artificial Sequence: Synthetic Chimeric Antigen Receptor sequence
MALPVTALLLPLALLLHAARPEVQLLESGGGLVQPGGSLRLSCAASGFTFSSYAMNWVRQAPGKGLEWVSAISDSGGSTYYADSVKGRFTISRDNSKNTLYLQMNSLRAEDTAVYYCARYWPMDIWGQGTLVTVSSGGGGSGGGGSGGGGSEIVLTQSPGTLSLSPGERATLSCRASQSVSSSYLAWYQQKPGQAPRLLMYDASIRATGIPDRFSGSGSGTDFTLTISRLEPEDFAVYYCQQYGSWPLTFGQGTKVEIKTTTPAPRPPTPAPTIASQPLSLRPEACRPAAGGAVHTRGLDFACDIYIWAPLAGTCGVLLLSLVITLYCKRGRKKLLYIFKQPFMRPVQTTQEEDGCSCRFPEEEEGGCELRVKFSRSADAPAYQQGQNQLYNELNLGRREEYDVLDKRRGRDPEMGGKPRRKNPQEGLYNELQKDKMAEAYSEIGMKGERRRGKGHDGLYQGLSTATKDTYDALHMQALPPR

SEQ ID NO: 6167 - protein, 668 aa, Artificial Sequence
  Description of Artificial Sequence: Synthetic Chimeric Antigen Receptor sequence
MALPVTALLLPLALLLHAARPEVQLLESGGGLVQPGGSLRLSCAASGFTFSSYAMNWVRQAPGKGLEWVSAISDSGGSTYYADSVKGRFTISRDNSKNTLYLQMNSLRAEDTAVYYCARYWPMDIWGQGTLVTVSSGGGGSGGGGSGGGGSEIVLTQSPGTLSLSPGERATLSCRASQSVSSSYLAWYQQKPGQAPRLLMYDASIRATGIPDRFSGSGSGTDFTLTISRLEPEDFAVYYCQQYGSWPLTFGQGTKVEIKEPKSPDKTHTCPPCPAPPVAGPSVFLFPPKPKDTLMIARTPEVTCVVVDVSHEDPEVKFNWYVDGVEVHNAKTKPREEQYNSTYRVVSVLTVLHQDWLNGKEYKCKVSNKALPAPIEKTISKAKGQPREPQVYTLPPSRDELTKNQVSLTCLVKGFYPSDIAVEWESNGQPENNYKTTPPVLDSDGSFFLYSKLTVDKSRWQQGNVFSCSVMHEALHNHYTQKSLSLSPGKIYIWAPLAGTCGVLLLSLVITLYCKRGRKKLLYIFKQPFMRPVQTTQEEDGCSCRFPEEEEGGCELRVKFSRSADAPAYQQGQNQLYNELNLGRREEYDVLDKRRGRDPEMGGKPRRKNPQEGLYNELQKDKMAEAYSEIGMKGERRRGKGHDGLYQGLSTATKDTYDALHMQALPPR

SEQ ID NO: 6168 - protein, 453 aa, Artificial Sequence
  Description of Artificial Sequence: Synthetic Chimeric Antigen Receptor sequence
MALPVTALLLPLALLLHAARPEVQLLESGGGLVQPGGSLRLSCAASGFTFSSYAMNWVRQAPGKGLEWVSAISDFGGSTYYADSVKGRFTISRDNSKNTLYLQMNSLRAEDTAVYYCARYWPMDIWGQGTLVTVSSGGGGSGGGGSGGGGSEIVLTQSPGTLSLSPGERATLSCRASQSVSDIYLAWYQQKPGQAPRLLMYDASIRATGIPDRFSGSGSGTDFTLTISRLEPEDFAVYYCQQYQTWPLTFGQGTKVEIKGLAVSTISSFFPPGYQIYIWAPLAGTCGVLLLSLVITLYCKRGRKKLLYIFKQPFMRPVQTTQEEDGCSCRFPEEEEGGCELRVKFSRSADAPAYQQGQNQLYNELNLGRREEYDVLDKRRGRDPEMGGKPRRKNPQEGLYNELQKDKMAEAYSEIGMKGERRRGKGHDGLYQGLSTATKDTYDALHMQALPPR

SEQ ID NO: 6169 - protein, 482 aa, Artificial Sequence
  Description of Artificial Sequence: Synthetic Chimeric Antigen Receptor sequence
MALPVTALLLPLALLLHAARPEVQLLESGGGLVQPGGSLRLSCAASGFTFSSYAMNWVRQAPGKGLEWVSAILSSGGSTYYADSVKGRFTISRDNSKNTLYLQMNSLRAEDTAVYYCARYWPMDIWGQGTLVTVSSGGGGSGGGGSGGGGSEIVLTQSPGTLSLSPGERATLSCRGGQSVSSSYLAWYQQKPGQAPRLLMYDASIRATGIPDRFSGSGSGTDFTLTISRLEPEDFAVYYCQQYQSWPLTFGQGTKVEIKTTTPAPRPPTPAPTIASQPLSLRPEACRPAAGGAVHTRGLDFACDIYIWAPLAGTCGVLLLSLVITLYCKRGRKKLLYIFKQPFMRPVQTTQEEDGCSCRFPEEEEGGCELRVKFSRSADAPAYQQGQNQLYNELNLGRREEYDVLDKRRGRDPEMGGKPRRKNPQEGLYNELQKDKMAEAYSEIGMKGERRRGKGHDGLYQGLSTATKDTYDALHMQALPPR

SEQ ID NO: 6170 - protein, 519 aa, Artificial Sequence
  Description of Artificial Sequence: Synthetic Chimeric Antigen Receptor sequence
MALPVTALLLPLALLLHAARPEVQLLESGGGLVQPGGSLRLSCAASGFTFSSYAMNWVRQAPGKGLEWVSAILSSGGSTYYADSVKGRFTISRDNSKNTLYLQMNSLRAEDTAVYYCARYWPMDIWGQGTLVTVSSGGGGSGGGGSGGGGSEIVLTQSPGTLSLSPGERATLSCRGGQSVSSSYLAWYQQKPGQAPRLLMYDASIRATGIPDRFSGSGSGTDFTLTISRLEPEDFAVYYCQQYQSWPLTFGQGTKVEIKGSGGGGSCPYSNPSLCSGGGGSCPYSNPSLCSGGGGSTTTPAPRPPTPAPTIASQPLSLRPEACRPAAGGAVHTRGLDFACDIYIWAPLAGTCGVLLLSLVITLYCKRGRKKLLYIFKQPFMRPVQTTQEEDGCSCRFPEEEEGGCELRVKFSRSADAPAYQQGQNQLYNELNLGRREEYDVLDKRRGRDPEMGGKPRRKNPQEGLYNELQKDKMAEAYSEIGMKGERRRGKGHDGLYQGLSTATKDTYDALHMQALPPR

SEQ ID NO: 6171 - protein, 668 aa, Artificial Sequence
  Description of Artificial Sequence: Synthetic Chimeric Antigen Receptor sequence
MALPVTALLLPLALLLHAARPEVQLLESGGGLVQPGGSLRLSCAASGFTFSSYAMNWVRQAPGKGLEWVSAILSSGGSTYYADSVKGRFTISRDNSKNTLYLQMNSLRAEDTAVYYCARYWPMDIWGQGTLVTVSSGGGGSGGGGSGGGGSEIVLTQSPGTLSLSPGERATLSCRGGQSVSSSYLAWYQQKPGQAPRLLMYDASIRATGIPDRFSGSGSGTDFTLTISRLEPEDFAVYYCQQYQSWPLTFGQGTKVEIKEPKSPDKTHTCPPCPAPPVAGPSVFLFPPKPKDTLMIARTPEVTCVVVDVSHEDPEVKFNWYVDGVEVHNAKTKPREEQYNSTYRVVSVLTVLHQDWLNGKEYKCKVSNKALPAPIEKTISKAKGQPREPQVYTLPPSRDELTKNQVSLTCLVKGFYPSDIAVEWESNGQPENNYKTTPPVLDSDGSFFLYSKLTVDKSRWQQGNVFSCSVMHEALHNHYTQKSLSLSPGKIYIWAPLAGTCGVLLLSLVITLYCKRGRKKLLYIFKQPFMRPVQTTQEEDGCSCRFPEEEEGGCELRVKFSRSADAPAYQQGQNQLYNELNLGRREEYDVLDKRRGRDPEMGGKPRRKNPQEGLYNELQKDKMAEAYSEIGMKGERRRGKGHDGLYQGLSTATKDTYDALHMQALPPR

SEQ ID NO: 6172 - protein, 453 aa, Artificial Sequence
  Description of Artificial Sequence: Synthetic Chimeric Antigen Receptor sequence
MALPVTALLLPLALLLHAARPEVQLLESGGGLVQPGGSLRLSCAASGFTFGSYAMTWVRQAPGKGLEWVSAISGSGGNTFYADSVKGRFTISRDNSKNTLYLQMNSLRAEDTAVYYCARVSPIAAPMDYWGQGTLVTVSSGGGGSGGGGSGGGGSEIVLTQSPGTLSLSPGERATLSCRASQLGSFYLAWYQQKPGQAPRLLIYGASSRATGIPDRFSGSGSGTDFTLTISRLEPEDFAVYYCQHYNYPPSFTFGQGTKVEIKGLAVSTISSFFPPGYQIYIWAPLAGTCGVLLLSLVITLYCKRGRKKLLYIFKQPFMRPVQTTQEEDGCSCRFPEEEEGGCELRVKFSRSADAPAYQQGQNQLYNELNLGRREEYDVLDKRRGRDPEMGGKPRRKNPQEGLYNELQKDKMAEAYSEIGMKGERRRGKGHDGLYQGLSTATKDTYDALHMQA

SEQ ID NO: 6173 - protein, 482 aa, Artificial Sequence
  Description of Artificial Sequence: Synthetic Chimeric Antigen Receptor sequence
MALPVTALLLPLALLLHAARPEVQLLESGGGLVQPGGSLRLSCAASGFTFSSYAMNWVRQAPGKGLEWVSAISDFGGSTYYADSVKGRFTISRDNSKNTLYLQMNSLRAEDTAVYYCARYWPMDIWGQGTLVTVSSGGGGSGGGGSGGGGSEIVLTQSPGTLSLSPGERATLSCRASQSVSDIYLAWYQQKPGQAPRLLMYDASIRATGIPDRFSGSGSGTDFTLTISRLEPEDFAVYYCQQYQTWPLTFGQGTKVEIKTTTPAPRPPTPAPTIASQPLSLRPEACRPAAGGAVHTRGLDFACDIYIWAPLAGTCGVLLLSLVITLYCKRGRKKLLYIFKQPFMRPVQTTQEEDGCSCRFPEEEEGGCELRVKFSRSADAPAYQQGQNQLYNELNLGRREEYDVLDKRRGRDPEMGGKPRRKNPQEGLYNELQKDKMAEAYSEIGMKGERRRGKGHDGLYQGLSTATKDTYDALHMQALPPR

SEQ ID NO: 6174 - protein, 668 aa, Artificial Sequence
  Description of Artificial Sequence: Synthetic Chimeric Antigen Receptor sequence
MALPVTALLLPLALLLHAARPEVQLLESGGGLVQPGGSLRLSCAASGFTFSSYAMNWVRQAPGKGLEWVSAISDFGGSTYYADSVKGRFTISRDNSKNTLYLQMNSLRAEDTAVYYCARYWPMDIWGQGTLVTVSSGGGGSGGGGSGGGGSEIVLTQSPGTLSLSPGERATLSCRASQSVSDIYLAWYQQKPGQAPRLLMYDASIRATGIPDRFSGSGSGTDFTLTISRLEPEDFAVYYCQQYQTWPLTFGQGTKVEIKEPKSPDKTHTCPPCPAPPVAGPSVFLFPPKPKDTLMIARTPEVTCVVVDVSHEDPEVKFNWYVDGVEVHNAKTKPREEQYNSTYRVVSVLTVLHQDWLNGKEYKCKVSNKALPAPIEKTISKAKGQPREPQVYTLPPSRDELTKNQVSLTCLVKGFYPSDIAVEWESNGQPENNYKTTPPVLDSDGSFFLYSKLTVDKSRWQQGNVFSCSVMHEALHNHYTQKSLSLSPGKIYIWAPLAGTCGVLLLSLVITLYCKRGRKKLLYIFKQPFMRPVQTTQEEDGCSCRFPEEEEGGCELRVKFSRSADAPAYQQGQNQLYNELNLGRREEYDVLDKRRGRDPEMGGKPRRKNPQEGLYNELQKDKMAEAYSEIGMKGERRRGKGHDGLYQGLSTATKDTYDALHMQALPPR

SEQ ID NO: 6175 - protein, 453 aa, Artificial Sequence
  Description of Artificial Sequence: Synthetic Chimeric Antigen Receptor sequence
MALPVTALLLPLALLLHAARPEVQLLESGGGLVQPGGSLRLSCAASGFTFGSYAMTWVRQAPGKGLEWVSAIDYSGGNTFYADSVKGRFTISRDNSKNTLYLQMNSLRAEDTAVYYCARVSPIASGMDYWGQGTLVTVSSGGGGSGGGGSGGGGSEIVLTQSPGTLSLSPGERATLSCRASQSVSSSYPSWYQQKPGQAPRLLIYGASSRATGIPDRFSGSGSGTDFTLTISRLEPEDFAVYYCQHYPYPPSFTFGQGTKVEIKGLAVSTISSFFPPGYQIYIWAPLAGTCGVLLLSLVITLYCKRGRKKLLYIFKQPFMRPVQTTQEEDGCSCRFPEEEEGGCELRVKFSRSADAPAYQQGQNQLYNELNLGRREEYDVLDKRRGRDPEMGGKPRRKNPQEGLYNELQKDKMAEAYSEIGMKGERRRGKGHDGLYQGLSTATKDTYDALHMQ

SEQ ID NO: 6176 - protein, 486 aa, Artificial Sequence
  Description of Artificial Sequence: Synthetic Chimeric Antigen Receptor sequence
MALPVTALLLPLALLLHAARPEVQLLESGGGLVQPGGSLRLSCAASGFTFGSYAMTWVRQAPGKGLEWVSAISGSGGNTFYADSVKGRFTISRDNSKNTLYLQMNSLRAEDTAVYYCARVSPIAAPMDYWGQGTLVTVSSGGGGSGGGGSGGGGSEIVLTQSPGTLSLSPGERATLSCRASQLGSFYLAWYQQKPGQAPRLLIYGASSRATGIPDRFSGSGSGTDFTLTISRLEPEDFAVYYCQHYNYPPSFTFGQGTKVEIKTTTPAPRPPTPAPTIASQPLSLRPEACRPAAGGAVHTRGLDFACDIYIWAPLAGTCGVLLLSLVITLYCKRGRKKLLYIFKQPFMRPVQTTQEEDGCSCRFPEEEEGGCELRVKFSRSADAPAYQQGQNQLYNELNLGRREEYDVLDKRRGRDPEMGGKPRRKNPQEGLYNELQKDKMAEAYSEIGMKGERRRGKGHDGLYQGLSTATKDTYDALHMQALPPR

SEQ ID NO: 6177 - protein, 672 aa, Artificial Sequence
  Description of Artificial Sequence: Synthetic Chimeric Antigen Receptor sequence
MALPVTALLLPLALLLHAARPEVQLLESGGGLVQPGGSLRLSCAASGFTFGSYAMTWVRQAPGKGLEWVSAISGSGGNTFYADSVKGRFTISRDNSKNTLYLQMNSLRAEDTAVYYCARVSPIAAPMDYWGQGTLVTVSSGGGGSGGGGSGGGGSEIVLTQSPGTLSLSPGERATLSCRASQLGSFYLAWYQQKPGQAPRLLIYGASSRATGIPDRFSGSGSGTDFTLTISRLEPEDFAVYYCQHYNYPPSFTFGQGTKVEIKEPKSPDKTHTCPPCPAPPVAGPSVFLFPPKPKDTLMIARTPEVTCVVVDVSHEDPEVKFNWYVDGVEVHNAKTKPREEQYNSTYRVVSVLTVLHQDWLNGKEYKCKVSNKALPAPIEKTISKAKGQPREPQVYTLPPSRDELTKNQVSLTCLVKGFYPSDIAVEWESNGQPENNYKTTPPVLDSDGSFFLYSKLTVDKSRWQQGNVFSCSVMHEALHNHYTQKSLSLSPGKIYIWAPLAGTCGVLLLSLVITLYCKRGRKKLLYIFKQPFMRPVQTTQEEDGCSCRFPEEEEGGCELRVKFSRSADAPAYQQGQNQLYNELNLGRREEYDVLDKRRGRDPEMGGKPRRKNPQEGLYNELQKDKMAEAYSEIGMKGERRRGKGHDGLYQGLSTATKDTYDALHMQALPPR

SEQ ID NO: 6178 - protein, 453 aa, Artificial Sequence
  Description of Artificial Sequence: Synthetic Chimeric Antigen Receptor sequence
MALPVTALLLPLALLLHAARPEVQLLESGGGLVQPGGSLRLSCAASGFTFSSYPMSWVRQAPGKGLEWVSAIGGSGGSTYYADSVKGRFTISRDNSKNTLYLQMNSLRAEDTAVYYCARYWPMDSWGQGTLVTVSSGGGGSGGGGSGGGGSEIVLTQSPGTLSLSPGERATLSCRASQSVSSTYLAWYQQKPGQAPRLLIYDASSRAPGIPDRFSGSGSGTDFTLTISRLEPEDFAVYYCQQYSTSPLTFGQGTKVEIKGLAVSTISSFFPPGYQIYIWAPLAGTCGVLLLSLVITLYCKRGRKKLLYIFKQPFMRPVQTTQEEDGCSCRFPEEEEGGCELRVKFSRSADAPAYQQGQNQLYNELNLGRREEYDVLDKRRGRDPEMGGKPRRKNPQEGLYNELQKDKMAEAYSEIGMKGERRRGKGHDGLYQGLSTATKDTYDALHMQALPPR

SEQ ID NO: 6179 - protein, 487 aa, Artificial Sequence
  Description of Artificial Sequence: Synthetic Chimeric Antigen Receptor sequence
MALPVTALLLPLALLLHAARPEVQLLESGGGLVQPGGSLRLSCAASGFTFGSYAMTWVRQAPGKGLEWVSAIDYSGGNTFYADSVKGRFTISRDNSKNTLYLQMNSLRAEDTAVYYCARVSPIASGMDYWGQGTLVTVSSGGGGSGGGGSGGGGSEIVLTQSPGTLSLSPGERATLSCRASQSVSSSYPSWYQQKPGQAPRLLIYGASSRATGIPDRFSGSGSGTDFTLTISRLEPEDFAVYYCQHYPYPPSFTFGQGTKVEIKTTTPAPRPPTPAPTIASQPLSLRPEACRPAAGGAVHTRGLDFACDIYIWAPLAGTCGVLLLSLVITLYCKRGRKKLLYIFKQPFMRPVQTTQEEDGCSCRFPEEEEGGCELRVKFSRSADAPAYQQGQNQLYNELNLGRREEYDVLDKRRGRDPEMGGKPRRKNPQEGLYNELQKDKMAEAYSEIGMKGERRRGKGHDGLYQGLSTATKDTYDALHMQALPPR

SEQ ID NO: 6180 - protein, 673 aa, Artificial Sequence
  Description of Artificial Sequence: Synthetic Chimeric Antigen Receptor sequence
MALPVTALLLPLALLLHAARPEVQLLESGGGLVQPGGSLRLSCAASGFTFGSYAMTWVRQAPGKGLEWVSAIDYSGGNTFYADSVKGRFTISRDNSKNTLYLQMNSLRAEDTAVYYCARVSPIASGMDYWGQGTLVTVSSGGGGSGGGGSGGGGSEIVLTQSPGTLSLSPGERATLSCRASQSVSSSYPSWYQQKPGQAPRLLIYGASSRATGIPDRFSGSGSGTDFTLTISRLEPEDFAVYYCQHYPYPPSFTFGQGTKVEIKEPKSPDKTHTCPPCPAPPVAGPSVFLFPPKPKDTLMIARTPEVTCVVVDVSHEDPEVKFNWYVDGVEVHNAKTKPREEQYNSTYRVVSVLTVLHQDWLNGKEYKCKVSNKALPAPIEKTISKAKGQPREPQVYTLPPSRDELTKNQVSLTCLVKGFYPSDIAVEWESNGQPENNYKTTPPVLDSDGSFFLYSKLTVDKSRWQQGNVFSCSVMHEALHNHYTQKSLSLSPGKIYIWAPLAGTCGVLLLSLVITLYCKRGRKKLLYIFKQPFMRPVQTTQEEDGCSCRFPEEEEGGCELRVKFSRSADAPAYQQGQNQLYNELNLGRREEYDVLDKRRGRDPEMGGKPRRKNPQEGLYNELQKDKMAEAYSEIGMKGERRRGKGHDGLYQGLSTATKDTYDALHMQALPPR

SEQ ID NO: 6181 - protein, 453 aa, Artificial Sequence
  Description of Artificial Sequence: Synthetic Chimeric Antigen Receptor sequence
MALPVTALLLPLALLLHAARPEVQLLESGGGLVQPGGSLRLSCAASGFTFSSYPMSWVRQAPGKGLEWVSAIGGSGGWSYYADSVKGRFTISRDNSKNTLYLQMNSLRAEDTAVYYCARYWPMDSWGQGTLVTVSSGGGGSGGGGSGGGGSEIVLTQSPGTLSLSPGERATLSCWLSQSVSSTYLAWYQQKPGQAPRLLIYDASSRAPGIPDRFSGSGSGTDFTLTISRLEPEDFAVYYCQQYSEWPLTFGQGTKVEIKGLAVSTISSFFPPGYQIYIWAPLAGTCGVLLLSLVITLYCKRGRKKLLYIFKQPFMRPVQTTQEEDGCSCRFPEEEEGGCELRVKFSRSADAPAYQQGQNQLYNELNLGRREEYDVLDKRRGRDPEMGGKPRRKNPQEGLYNELQKDKMAEAYSEIGMKGERRRGKGHDGLYQGLSTATKDTYDALHMQALPPR

SEQ ID NO: 6182 - protein, 482 aa, Artificial Sequence
  Description of Artificial Sequence: Synthetic Chimeric Antigen Receptor sequence
MALPVTALLLPLALLLHAARPEVQLLESGGGLVQPGGSLRLSCAASGFTFSSYPMSWVRQAPGKGLEWVSAIGGSGGSTYYADSVKGRFTISRDNSKNTLYLQMNSLRAEDTAVYYCARYWPMDSWGQGTLVTVSSGGGGSGGGGSGGGGSEIVLTQSPGTLSLSPGERATLSCRASQSVSSTYLAWYQQKPGQAPRLLIYDASSRAPGIPDRFSGSGSGTDFTLTISRLEPEDFAVYYCQQYSTSPLTFGQGTKVEIKTTTPAPRPPTPAPTIASQPLSLRPEACRPAAGGAVHTRGLDFACDIYIWAPLAGTCGVLLLSLVITLYCKRGRKKLLYIFKQPFMRPVQTTQEEDGCSCRFPEEEEGGCELRVKFSRSADAPAYQQGQNQLYNELNLGRREEYDVLDKRRGRDPEMGGKPRRKNPQEGLYNELQKDKMAEAYSEIGMKGERRRGKGHDGLYQGLSTATKDTYDALHMQALPPR

SEQ ID NO: 6183 - protein, 668 aa, Artificial Sequence
  Description of Artificial Sequence: Synthetic Chimeric Antigen Receptor sequence
MALPVTALLLPLALLLHAARPEVQLLESGGGLVQPGGSLRLSCAASGFTFSSYPMSWVRQAPGKGLEWVSAIGGSGGSTYYADSVKGRFTISRDNSKNTLYLQMNSLRAEDTAVYYCARYWPMDSWGQGTLVTVSSGGGGSGGGGSGGGGSEIVLTQSPGTLSLSPGERATLSCRASQSVSSTYLAWYQQKPGQAPRLLIYDASSRAPGIPDRFSGSGSGTDFTLTISRLEPEDFAVYYCQQYSTSPRIFGQGTKVEIKEPKSPDKTHTCPPCPAPPVAGPSVFLFPPKPKDTLMIARTPEVTCVVVDVSHEDPEVKFNWYVDGVEVHNAKTKPREEQYNSTYRVVSVLTVLHQDWLNGKEYKCKVSNKALPAPIEKTISKAKGQPREPQVYTLPPSRDELTKNQVSLTCLVKGFYPSDIAVEWESNGQPENNYKTTPPVLDSDGSFFLYSKLTVDKSRWQQGNVFSCSVMHEALHNHYTQKSLSLSPGKIYIWAPLAGTCGVLLLSLVITLYCKRGRKKLLYIFKQPFMRPVQTTQEEDGCSCRFPEEEEGGCELRVKFSRSADAPAYQQGQNQLYNELNLGRREEYDVLDKRRGRDPEMGGKPRRKNPQEGLYNELQKDKMAEAYSEIGMKGERRRGKGHDGLYQGLSTATKDTYDALHMQALPPR

SEQ ID NO: 6184 - protein, 482 aa, Artificial Sequence
  Description of Artificial Sequence: Synthetic Chimeric Antigen Receptor sequence
MALPVTALLLPLALLLHAARPEVQLLESGGGLVQPGGSLRLSCAASGFTFSSYPMSWVRQAPGKGLEWVSAIGGSGGWSYYADSVKGRFTISRDNSKNTLYLQMNSLRAEDTAVYYCARYWPMDSWGQGTLVTVSSGGGGSGGGGSGGGGSEIVLTQSPGTLSLSPGERATLSCWLSQSVSSTYLAWYQQKPGQAPRLLIYDASSRAPGIPDRFSGSGSGTDFTLTISRLEPEDFAVYYCQQYSEWPLTFGQGTKVEIKTTTPAPRPPTPAPTIASQPLSLRPEACRPAAGGAVHTRGLDFACDIYIWAPLAGTCGVLLLSLVITLYCKRGRKKLLYIFKQPFMRPVQTTQEEDGCSCRFPEEEEGGCELRVKFSRSADAPAYQQGQNQLYNELNLGRREEYDVLDKRRGRDPEMGGKPRRKNPQEGLYNELQKDKMAEAYSEIGMKGERRRGKGHDGLYQGLSTATKDTYDALHMQALPPR

SEQ ID NO: 6185 - protein, 668 aa, Artificial Sequence
  Description of Artificial Sequence: Synthetic Chimeric Antigen Receptor sequence
MALPVTALLLPLALLLHAARPEVQLLESGGGLVQPGGSLRLSCAASGFTFSSYPMSWVRQAPGKGLEWVSAIGGSGGWSYYADSVKGRFTISRDNSKNTLYLQMNSLRAEDTAVYYCARYWPMDSWGQGTLVTVSSGGGGSGGGGSGGGGSEIVLTQSPGTLSLSPGERATLSCWLSQSVSSTYLAWYQQKPGQAPRLLIYDASSRAPGIPDRFSGSGSGTDFTLTISRLEPEDFAVYYCQQYSEWPLTFGQGTKVEIKEPKSPDKTHTCPPCPAPPVAGPSVFLFPPKPKDTLMIARTPEVTCVVVDVSHEDPEVKFNWYVDGVEVHNAKTKPREEQYNSTYRVVSVLTVLHQDWLNGKEYKCKVSNKALPAPIEKTISKAKGQPREPQVYTLPPSRDELTKNQVSLTCLVKGFYPSDIAVEWESNGQPENNYKTTPPVLDSDGSFFLYSKLTVDKSRWQQGNVFSCSVMHEALHNHYTQKSLSLSPGKIYIWAPLAGTCGVLLLSLVITLYCKRGRKKLLYIFKQPFMRPVQTTQEEDGCSCRFPEEEEGGCELRVKFSRSADAPAYQQGQNQLYNELNLGRREEYDVLDKRRGRDPEMGGKPRRKNPQEGLYNELQKDKMAEAYSEIGMKGERRRGKGHDGLYQGLSTATKDTYDALHMQALPPR

SEQ ID NO: 6186 - protein, 373 aa, Artificial Sequence
  Description of Artificial Sequence: Synthetic Chimeric Antigen Receptor sequence
PGWFLDSPDRPWNPPTFSPALLVVTEGDNATFTCSFSNTSESFVLNWYRMSPSNQTDKLAAFPEDRSQPGQDCRFRVTQLPNGRDFHMSVVRARRNDSGTYLCGAISLAPKAQIKESLRAELRVTERRAEVPTAHPSPSPRPAGQFQTLVTTTPAPRPPTPAPTIASQPLSLRPEACRPAAGGAVHTRGLDFACDIYIWAPLAGTCGVLLLSLVITLYCKRGRKKLLYIFKQPFMRPVQTTQEEDGCSCRFPEEEEGGCELRVKFSRSADAPAYKQGQNQLYNELNLGRREEYDVLDKRRGRDPEMGGKPRRKNPQEGLYNELQKDKMAEAYSEIGMKGERRRGKGHDGLYQGLSTATKDTYDALHMQALPPR

SEQ ID NO: 6187 - protein, 354 aa, Artificial Sequence
  Description of Artificial Sequence: Synthetic Chimeric Antigen Receptor sequence
MALPVTALLLPLALLLHAARPPGWFLDSPDRPWNPPTFSPALLVVTEGDNATFTCSFSNTSESFYLNWYRMSPSNQTDKLAAFPEDRSQPGQDCRFRVTQLPNGRDFHMSVYRARRNDSGTYLCGAISLAPKAQIKESLRAELRVTERRAEVPTAHPSPSPRPAGQFQTLVTTTPAPRPPTPAPTIASQPLSLRPEACRPAAGGAVHTRGLDFACDIYIWAPLAGDGCSCRFPEEEEGGCELRVKFSRSADAPAYKQGQNQLYNELNLGRREEYDVLDKRRGRDPEMGGKPRRKNPQEGLYNELQKDKMAEAYSEIGMKGERRRGKGHDGLYQGLSTATKDTYDALHMQALPPR

SEQ ID NO: 6188 - protein, 367 aa, Artificial Sequence
  Description of Artificial Sequence: Synthetic Chimeric Antigen Receptor sequence
MALPVTALLLPLALLLHAARPPGWFLDSPDRPWNPPTFSPALLVVTEGDNATFTCSFSNTSESFVLNWYRMSPSNQTDKLAAFPEDRSQPGQDCRFRVTQLPNGRDFHMSVVRARRNDSGTYLCGAISLAPKAQIKESLRAELRVTERRAEVPTAHPSPSPRPAGQFQTLVTTTPAPRPPTPAPTIASQPLSLRPEACRPAAGGAVHTRGLDFACDIYIWAPLAGTCGVLLLSLVITLYCKRGRKKLLGGGGSGGGGSGVQVETISPGDGRTFPKRGQTCVVHYTGMLEDGKKFDSSRDRNKPFKFMLGKQEVIRGWEEGVAQMSVGQRAKLTISPDYAYGATGHPGIIPPHATLVFDVELLKLETS

SEQ ID NO: 6189 - protein, 372 aa, Artificial Sequence
  Description of Artificial Sequence: Synthetic Chimeric Antigen Receptor sequence
PGWFLDSPDRPWNPPTFSPALLVVTEGDNATFTCSFSNTSESFVLNWYRMSPSNQTDKLAAFPEDRSQPGQDCRFRVTQLPNGRDFHMSVVRARRNDSGTVLCGAISLAPKAQIKESHAELRVTERRAEVPTAHPSPSPRPAGQFQTLVTTTPAPRPPTPAPTIASQPLSLRPEACRPAAGGAVHTRGLDFACDIYIWAPLAGTCGVLLLSLVITLYCKRGRKKLLYIFKQPFMRPVQTTQEEDGCSCRFPEEEEGGCELRVKFSRSADAPAYKQGQNQLYNELNLGRREEYDVLDKRRGRDPEMGGKPRRKNPQEGLYNELQKDKMAEAYSEIGMKGERRRGKGHDGLYQGLSTATKDTYDALHMQALPPR

SEQ ID NO: 6190 - protein, 373 aa, Artificial Sequence; identical to SEQ ID NO: 6186
  Description of Artificial Sequence: Synthetic Chimeric Antigen Receptor sequence

SEQ ID NO: 6191 - protein, 373 aa, Artificial Sequence; identical to SEQ ID NO: 6186
  Description of Artificial Sequence: Synthetic Chimeric Antigen Receptor sequence

SEQ ID NO: 6192 - protein, 373 aa, Artificial Sequence
  Description of Artificial Sequence: Synthetic Chimeric Antigen Receptor sequence
PGWFLDSPDRPWNPPTFSPALLVVTEGDNATFTCSFSNTSESFYLNWYRMSPSNQTDKLAAFPEDRSQPGQDCRFRVTQLPNGRDFHMSVYRARRNDSGTYLCGAISLAPKAQIKESLRAELRVTERRAEVPTAHPSPSPRPAGQFQTLVTTTPAPRPPTPAPTIASQPLSLRPEACRPAAGGAVHTRGLDFACDIYIWAPLAGTCGVLLLSLVITLYCKRGRKKLLYIFKQPFMRPVQTTQEEDGCSCRFPEEEEGGCELRVKFSRSADAPAYKQGQNQLYNELNLGRREEYDVLDKRRGRDPEMGGKPRRKNPQEGLYNELQKDKMAEAYSEIGMKGERRRGKGHDGLYQGLSTATKDTYDALHMQALPPR

SEQ ID NO: 6193 - protein, 386 aa, Artificial Sequence
  Description of Artificial Sequence: Synthetic Chimeric Antigen Receptor sequence
MALPVTALLLPLALLLHAARPGSGSGAQAAEVQLQQSGPELVKPGTSVRISCKTSGYTFTEYTIHWVKQSHGKSLEWIGNINPNNGGTTYNQKFEDKATLTVDKSSSTAYMELRSLTSEDSAVYYCAAGWNFDYWGQGTTVTVSSGGGGSGGGGSGGGGSDIVMTQSHKFMSTSVGDRVSIICKASQDVGTAVDWYQQKPGQSPKLLIYWASTRHTGVPDRFTGSGSGTDFTLTITNVQSEDLADYFCQQYNSYPLTFGAGTMLDLKRAAARSDPASGAGSGSGSAIELLPVPGAKKSAKLYIPYIILTIIILTIVGFIWLLKVNGCRKYKLNKTESTPVVEEDEMQPYASYTEKNNPLYDTTNKVKASEALQSEVDTDLHTLSHG

SEQ ID NO: 6194 - protein, 390 aa, Artificial Sequence
  Description of Artificial Sequence: Synthetic Chimeric Antigen Receptor sequence
MALPVTALLLPLALLLHAARPPGWFLDSPDRPWPPTFSPALLVVTEGDNATFTCSFSNTSESFVLNWYRMSPSNQTDKLAAFPEDRSQPGQDCRFRVTQLPNGRDFHMSVWARRDSGTYLCGAISLAPKAQIKESLRAELRVTERRAEVPTAHPSPSPRPAGQFQTLVTTTPAPRPPTPAPTIASQPLSLRPEACRPAAGGAVHTRGLDFACDRYIWAPLAGTCGVLLLSLVITLYCKRGRKKLLYIFKQPFMRPVQTTQEEDGCSCRFPEEEEGGCELRVKFSRSADAPAYKQGQNQLYNELNLGRREEYDVLDKRRGRDPEMGGKPRRKPQEGLYNELQKDKMAEAYSEIGMKGERRRGKGHDGLYQGLSTATKDTYDALHMQALPPR

SEQ ID NO: 6195 - protein, 394 aa, Artificial Sequence
  Description of Artificial Sequence: Synthetic Chimeric Antigen Receptor sequence
MALPVTALLLPLALLLHAARPPGWFLDSPDRPWNPPTFSPALLVVTEGDNATFTCSFSNTSESFVLNWVRMSPSNQTDKLAAFPEDRSQPGQDCRFRVTQLPNGRDFHMSVVRARRNDSGTVLCGAISLAPKAQIKESLRAELRVTERRAEVPTAHPSPSPRPAGQFQTLVTTTPAPRPPTPAPTIASQPLSLRPEACRPAAGGAVHTRGLDFACDIYIWAPLAGTCGVLLLSLVITLYCKRGRKKLLYIFKQPFMRPVQTTQEEDGCSCRFPEEEEGGCELRVKFSRSADAPAYKQGQNQLYNELNLGRREEYDVLDKRRGRDPEMGGKPRRKNPQEGLYNELQKDKMAEAYSEIGMKGERRRGKGHDGLYQGLSTATKDTYDALHMQALPPR

SEQ ID NO: 6196 - protein, 394 aa, Artificial Sequence
  Description of Artificial Sequence: Synthetic Chimeric Antigen Receptor sequence
MALPVTALLLPLALLLHAARPPGWFLDSPDRPWNPPTFSPALLVVTEGDNATFTCSFSNTSESFVLNWYRMSPSNQTDKLAAFPEDRSQPGQDCRFRVTQLPNGRDFHMSVVRARRNDSGTYLCGAISLAPKAQIKESLRAEIRVTERRAEVPTAHPSPSPRPAGQFQTLVTTTPAPRPPTPAPTIASQPLSLRPEACRPAAGGAVHTRGLDFACDIYIWAPLAGTCGVLIISLVITLYCKRGRKKLLYIFKQPFMRPVQTTQEEDGCSCRFPEEEEGGCELRVKFSRSADAPAYKQGQNQLYNELNLGRREEYDVLDKRRGRDPEMGGKPRRKNPQEGLYNELQKDKMAEAYSEIGMKGERRRGKGHDGLYQGLSTATKDTYDALHMQALPPR

SEQ ID NO: 6197 - protein, 488 aa, Artificial Sequence
  Description of Artificial Sequence: Synthetic Chimeric Antigen Receptor sequence
MALPVTALLLPLALLLHAARPQVQLVQSGGGLVQPGRSLRLSCAASGFTFDDYAMHWVRQAPGKGLEWVSGISWNSGSIGYADSVKGRFTISRDNAKNSLYLQMNSLRAEDTAVYYCAKDGSSSWSWGYFDYWGQGTLVTVSSGGGGSGGGGSGGGGSSSELTQDPAVSVALGQTVRTTCQGDALRSYYASWYQQKPGQAPMLVIYGKNNRPSGIPDRFSGSDSGDTASLTITGAQAEDEADYYCNSRDSSGYPVFGTGTKVTVLTTTPAPRPPTPAPTIASQPLSLRPEACRPAAGGAVHTRGLDFACDIYIWAPLAGTCGVLLLSLVITLYCKRGRKKLLYIFKQPFMRPVQTTQEEDGCSCRFPEEEEGGCELRVKFSRSADAPAYKQGQNQLYNELNLGRREEYDVLDKRRGRDPEMGGKPRRKNPQEGLYNELQKDKMAEAYSEIGMKGERRRGKGHDGLYQGLSTATKDTYDALHMQALPPR

SEQ ID NO: 6198 - DNA, 1182 bp, Artificial Sequence
  Description of Artificial Sequence: Synthetic Chimeric Antigen Receptor sequence
atggccctccctgtcactgccctgcttctccccctcgcactcctgctccacgccgctagaccacccggatggtttctggactctccggatcgcccgtggaatcccccaaccttctcaccggcactcttggttgtgactgagggcgataatgcgaccttcacgtgctcgttctccaacacctccgaatcattcgtgctgaactggtaccgcatgagcccgtcaaaccagaccgacaagctcgccgcgtttccggaagatcggtcgcaaccgggacaggattgtcggttccgcgtgactcaactgccgaatggcagagacttccacatgagcgtggtccgcgctaggcgaaacgactccgggacctacctgtgcggagccatctcgctggcgcctaaggcccaaatcaaagagagcttgagggccgaactgagagtgaccgagcgcagagctgaggtgccaactgcacatccatccccatcgcctcggcctgcggggcagtttcagaccctggtcacgaccactccggcgccgcgcccaccgactccggccccaactatcgcgagccagcccctgtcgctgaggccggaagcatgccgccctgccgccggaggtgctgtgcatacccggggattggacttcgcatgcgacatctacatttgggctcctctcgccggaacttgtggcgtgctccttctgtccctggtcatcaccctgtactgcaagcggggtcggaaaaagcttctgtacattttcaagcagcccttcatgaggcccgtgcaaaccacccaggaggaggacggttgctcctgccggttccccgaagaggaagaaggaggttgcgagctgcgcgtgaagttctcccggagcgccgacgcccccgcctataagcagggccagaaccagctgtacaacgaactgaacctgggacggcgggaagagtacgatgtgctggacaagcggcgcggccgggaccccgaaatgggcgggaagcctagaagaaagaaccctcaggaaggcctgtataacgagctgcagaaggacaagatggccgaggcctactccgaaattgggatgaagggagagcggcggaggggaaaggggcacgacggcctgtaccaaggactgtccaccgccaccaaggacacatacgatgccctgcacatgcaggcccttccccctcgc

SEQ ID NO: 6199 - protein, 488 aa, Artificial Sequence
  Description of Artificial Sequence: Synthetic Chimeric Antigen Receptor sequence
MALPVTALLLPLALLLHAARPQVQLQQSGAEVKKPGASVKVSCKASGYTFTGYYMHWVRQAPGQGLEWMGRINPNSGGTNYAQKFQGRVTMTRDTSISTAYMELSRLRSEDTAVYYCARGRYYGMDVWGQGTMVTVSSGGGGSGGGGSGGGGSGGGGSEIVLTQSPATLSLSPGERATISCRASQSVSSNFAWYQQRPGQAPRLLIYDASNRATGIPPRFSGSGSGTDFTLTISSLEPEDFAAYYCHQRSNWLYTFGQGTKVDIKTTTPAPRPPTPAPTIASQPLSLRPEACRPAAGGAVHTRGLDFACDIYIWAPLAGTCGVLLLSLVITLYCKRGRKKLLYIFKQPFMRPVQTTQEEDGCSCRFPEEEEGGCELRVKFSRSADAPAYKQGQNQLYNELNLGRREEYDVLDKRRGRDPEMGGKPRRKNPQEGLYNELQKDKMAEAYSEIGMKGERRRGKGHDGLYQGLSTATKDTYDALHMQALPPR

SEQ ID NO: 6200 - protein, 499 aa, Artificial Sequence
  Description of Artificial Sequence: Synthetic Chimeric Antigen Receptor sequence
MALPVTALLLPLALLLHAARPQVQLVQSGAEVKKPGASVKVSCKASGYTFTSYGISWVRQAPGQGLEWMGWISAYNGNTNYAQKLQGRVTMTTDTSTSTAYMELRSLRSDDTAVYYCARVAGGIYYYYGMDVWGQGTTITVSSGGGGSGGGGSGGGGSGGGGSDIVMTQTPDSLAVSLGERATISCKSSHSVLYNRNNKNYLAWYQQKPGQPPKLLFYWASTRKSGVPDRFSGSGSGTDFTLTISSLQPEDFATYFCQQTQTFPLTFGQGTRLEINTTTPAPRPPTPAPTIASQPLSLRPEACRPAAGGAVHTRGLDFACDIYIWAPLAGTCGVLLLSLVITLYCKRGRKKLLYIFKQPFMRPVQTTQEEDGCSCRFPEEEEGGCELRVKFSRSADAPAYKQGQNQLYNELNLGRREEYDVLDKRRGRDPEMGGKPRRKNPQEGLYNELQKDKMAEAYSEIGMKGERRRGKGHDGLYQGLSTATKDTYDALHMQALPPR

SEQ ID NO: 6201 - protein, 485 aa, Artificial Sequence
  Description of Artificial Sequence: Synthetic Chimeric Antigen Receptor sequence
MALPVTALLLPLALLLHAARPQVQLQQSGAEVKKPGASVKVSCKASGYTFTGYYMHWVRQAPGQGLEWMGWINPNSGGTNYAQNFQGRVTMTRDTSISTAYMELRRLRSDDTAVYYCASGWDFDYWGQGTLVTVSSGGGGSGGGGSGGGGSGGGGSDIRMTQSPSSLSASVGDRVTITCRASQSIRYYLSWYQQKPGKAPKLLIYTASILQNGVPSRFSGSGSGTDFTLTISSLQPEDFATYYCLQTYTTPDFGPGTKVEIKTTTPAPRPPTPAPTIASQPLSLRPEACRPAAGGAVHTRGLDFACDIYIWAPLAGTCGVLLLSLVITLYCKRGRKKLLYIFKQPFMRPVQTTQEEDGCSCRFPEEEEGGCELRVKFSRSADAPAYKQGQNQLYNELNLGRREEYDVLDKRRGRDPEMGGKPRRKNPQEGLYNELQKDKMAEAYSEIGMKGERRRGKGHDGLYQGLSTATKDTYDALHMQALPPR

SEQ ID NO: 6202 - protein, 490 aa, Artificial Sequence
  Description of Artificial Sequence: Synthetic Chimeric Antigen Receptor sequence
MALPVTALLLPLALLLHAARPQVQLVQSGAEVKKPGASVKVSCKASGYTFTGYYMHWVRQAPGQGLEWMGRINPNSGGTNYAQKFQGRVTMTTDTSTSTAYMELRSLRSDDTAVYYCARTTTSYAFDIWGQGTMVTVSSGGGGSGGGGSGGGGSGGGGSDIQLTQSPSTLSASVGDRVTITCRASQSISTWLAWYQQKPGKAPNLLIYKASTLESGVPSRFSGSGSGTEFTLTISSLQPDDFATYYCQQYNTYSPYTFGQGTKLEIKTTTPAPRPPTPAPTIASQPLSLRPEACRPAAGGAVHTRGLDFACDIYIWAPLAGTCGVLLLSLVITLYCKRGRKKLLYIFKQPFMRPVQTTQEEDGCSCRFPEEEEGGCELRVKFSRSADAPAYKQGQNQLYNELNLGRREEYDVLDKRRGRDPEMGGKPRRKNPQEGLYNELQKDKMAEAYSEIGMKGERRRGKGHDGLYQGLSTATKDTYDALHMQALPPR

SEQ ID NO: 6203 - protein, 493 aa, Artificial Sequence
  Description of Artificial Sequence: Synthetic Chimeric Antigen Receptor sequence
MALPVTALLLPLALLLHAARPQVQLVQSGGGLVKPGGSLRLSCEASGFIFSDYYMGWIRQAPGKGLEWVSYIGRSGSSMYYADSVKGRFTFSRDNAKNSLYLQMNSLRAEDTAVYYCAASPVVAATEDFQHWGQGTLVTVSSGGGGSGGGGSGGGGSGGGGSDIVMTQTPATLSLSPGERATLSCRASQSVTSNYLAWYQQKPGQAPRLLLFGASTRATGIPDRFSGSGSGTDFTLTINRLEPEDFAMYYCQQYGSAPVTFGQGTKLEIKTTTPAPRPPTPAPTIASQPLSLRPEACRPAAGGAVHTRGLDFACDIYIWAPLAGTCGVLLLSLVITLYCKRGRKKLLYIFKQPFMRPVQTTQEEDGCSCRFPEEEEGGCELRVKFSRSADAPAYKQGQNQLYNELNLGRREEYDVLDKRRGRDPEMGGKPRRKNPQEGLYNELQKDKMAEAYSEIGMKGERRRGKGHDGLYQGLSTATKDTYDALHMQALPPR

SEQ ID NO: 6204 - protein, 493 aa, Artificial Sequence
  Description of Artificial Sequence: Synthetic Chimeric Antigen Receptor sequence
MALPVTALLLPLALLLHAARPQVQLVQSGAEVRAPGASVKISCKASGFTFRGYYIHWVRQAPGQGLEWMGIINPSGGSRAYAQKFQGRVTMTRDTSTSTVYMELSSLRSDDTAMYYCARTASCGGDCYYLDYWGQGTLVTVSSGGGGSGGGGSGGGGSGGGGSDIQMTQSPPTLSASVGDRVTITCRASENVNIWLAWYQQKPGKAPKLLIYKSSSLASGVPSRFSGSGSGAEFTLTISSLQPDDFATYYCQQYQSYPLTFGGGTKVDIKTTTPAPRPPTPAPTIASQPLSLRPEACRPAAGGAVHTRGLDFACDIYIWAPLAGTCGVLLLSLVITLYCKRGRKKLLYIFKQPFMRPVQTTQEEDGCSCRFPEEEEGGCELRVKFSRSADAPAYKQGQNQLYNELNLGRREEYDVLDKRRGRDPEMGGKPRRKNPQEGLYNELQKDKMAEAYSEIGMKGERRRGKGHDGLYQGLSTATKDTYDALHMQALPPR

SEQ ID NO: 6205 - protein, 490 aa, Artificial Sequence
  Description of Artificial Sequence: Synthetic Chimeric Antigen Receptor sequence
MALPVTALLLPLALLLHAARPEVQLVESGGGLVQPGRSLRLSCAASGFTFDDYAMHWVRQAPGKGLEWVSGISWNSGSTGYADSVKGRFTISRDNAKNSLYLQMNSLRAEDTALYYCAKDSSSWYGGGSAFDIWGQGTMVTVSSGGGGSGGGGSGGGGSSSELTQEPAVSVALGQTVRITCQGDSLRSYYASWYQQKPGQAPVLVIFGRSRRPSGIPDRFSGSSSGNTASLIITGAQAEDEADYYCNSRDNTANHYVFGTGTKLTVLTTTPAPRPPTPAPTIASQPLSLRPEACRPAAGGAVHTRGLDFACDIYIWAPLAGTCGVLLLSLVITLYCKRGRKKLLYIFKQPFMRPVQTTQEEDGCSCRFPEEEEGGCELRVKFSRSADAPAYKQGQNQLYNELNLGRREEYDVLDKRRGRDPEMGGKPRRKNPQEGLYNELQKDKMAEAYSEIGMKGERRRGKGHDGLYQGLSTATKDTYDALHMQALPPR

SEQ ID NO: 6206 - protein, 490 aa, Artificial Sequence
  Description of Artificial Sequence: Synthetic Chimeric Antigen Receptor sequence
MALPVTALLLPLALLLHAARPEVQLVESGGGLVQPGRSLRLSCAASGFTFDDYAMHWVRQAPGKGLEWVSGISWNSGSTGYADSVKGRFTISRDNAKNSLYLQMNSLRAEDTALYYCAKDSSSWYGGGSAFDIWGQGTMVTVSSGGGGSGGGGSGGGGSSSELTQDPAVSVALGQTVRITCQGDSLRSYYASWYQQKPGQAPVLVIYGKNNRPSGIPDRFSGSSSGNTASLTITGAQAEDEADYYCNSRGSSGNHYVFGTGTKVTVLTTTPAPRPPTPAPTIASQPLSLRPEACRPAAGGAVHTRGLDFACDIYIWAPLAGTCGVLLLSLVITLYCKRGRKKLLYIFKQPFMRPVQTTQEEDGCSCRFPEEEEGGCELRVKFSRSADAPAYKQGQNQLYNELNLGRREEYDVLDKRRGRDPEMGGKPRRKNPQEGLYNELQKDKMAEAYSEIGMKGERRRGKGHDGLYQGLSTATKDTYDALHMQALPPR

SEQ ID NO: 6207 - protein, 495 aa, Artificial Sequence
  Description of Artificial Sequence: Synthetic Chimeric Antigen Receptor sequence
MALPVTALLLPLALLLHAARPQVQLVQSGGGLVQPGGSLRLSCAASGFTFSSYWMHWVRQAPGKGLVWVSRINSDGSSTSYADSVKGRFTISRDNAKNTLYLQMNSLRAEDTAVYYCVRTGWVGSYYYYMDVWGKGTTVTVSSGGGGSGGGGSGGGGSGGGGSEIVLTQSPGTLSLSPGERATLSCRASQSVSSNYLAWYQQKPGQPPRLLIYDVSTRATGIPARFSGGGSGTDFTLTISSLEPEDFAVYYCQQRSNWPPWTFGQGTKVEIKTTTPAPRPPTPAPTIASQPLSLRPEACRPAAGGAVHTRGLDFACDIYIWAPLAGTCGVLLLSLVITLYCKRGRKKLLYIFKQPFMRPVQTTQEEDGCSCRFPEEEEGGCELRVKFSRSADAPAYKQGQNQLYNELNLGRREEYDVLDKRRGRDPEMGGKPRRKNPQEGLYNELQKDKMAEAYSEIGMKGERRRGKGHDGLYQGLSTATKDTYDALHMQALPPR

SEQ ID NO: 6208 - protein, 494 aa, Artificial Sequence
  Description of Artificial Sequence: Synthetic Chimeric Antigen Receptor sequence
MALPVTALLLPLALLLHAARPQVQLVQSGGGVVQPGRSLRLSCAASGFTFSSYGMHWVRQAPGKGLEWVAVISYDGSNKYYADSVKGRFTISRDNSKNTLYLQMNSLRAEDTAVYYCAKGYSRYYYYGMDVWGQGTTVTVSSGGGGSGGGGSGGGGSGGGGSEIVMTQSPATLSLSPGERAILSCRASQSVYTKYLGWYQQKPGQAPRLLIYDASTRATGIPDRFSGSGSGTDFTLTINRLEPEDFAVYYCQHYGGSPLITFGQGTKVDIKTTTPAPRPPTPAPTIASQPLSLRPEACRPAAGGAVHTRGLDFACDIYIWAPLAGTCGVLLLSLVITLYCKRGRKKLLYIFKQPFMRPVQTTQEEDGCSCRFPEEEEGGCELRVKFSRSADAPAYKQGQNQLYNELNLGRREEYDVLDKRRGRDPEMGGKPRRKNPQEGLYNELQKDKMAEAYSEIGMKGERRRGKGHDGLYQGLSTATKDTYDALHMQALPPR

SEQ ID NO: 6209 - protein, 497 aa, Artificial Sequence
  Description of Artificial Sequence: Synthetic Chimeric Antigen Receptor sequence
MALPVTALLLPLALLLHAARPQVQLVQSGAEVKKPGASVKVSCKASGYTFTGYYMHWVRQAPGQGLEWMGWINPNSGGTNYAQKFQGRVTMTRDTSISTAYMELSRLRSDDTAVYYCARDLRRTVVTPRAYYGMDVWGQGTTVTVSSGGGGSGGGGSGGGGSGGGGSDIQLTQSPSTLSASVGDRVTITCQASQDISNSLNWYQQKAGKAPKLLIYDASTLETGVPSRFSGSGSGTDFSFTISSLQPEDIATYYCQQHDNLPLTFGQGTKVEIKTTTPAPRPPTPAPTIASQPLSLRPEACRPAAGGAVHTRGLDFACDIYIWAPLAGTCGVLLLSLVITLYCKRGRKKLLYIFKQPFMRPVQTTQEEDGCSCRFPEEEEGGCELRVKFSRSADAPAYKQGQNQLYNELNLGRREEYDVLDKRRGRDPEMGGKPRRKNPQEGLYNELQKDKMAEAYSEIGMKGERRRGKGHDGLYQGLSTATKDTYDALHMQALPPR

SEQ ID NO: 6210 - protein, 493 aa, Artificial Sequence
  Description of Artificial Sequence: Synthetic Chimeric Antigen Receptor sequence
MALPVTALLLPLALLLHAARPQVQLVQSGGGLVQPGGSLRLSCAASGFTFSSYAMSWVRQAPGKGLEWVSAISGSGGSTYYADSVKGRFTISRDNSKNTLYLQMNSLRAEDTAVYYCAKREAAAGHDWYFDLWGRGTLVTVSSGGGGSGGGGSGGGGSGGGGSDIRVTQSPSSLSASVGDRVTITCRASQSISSYLNWYQQKPGKAPKLLIYAASSLQSGVPSRFSGSGSGTDFTLTISSLQPEDFATYYCQQSYSIPLTFGQGTKVEIKTTTPAPRPPTPAPTIASQPLSLRPEACRPAAGGAVHTRGLDFACDIYIWAPLAGTCGVLLLSLVITLYCKRGRKKLLYIFKQPFMRPVQTTQEEDGCSCRFPEEEEGGCELRVKFSRSADAPAYKQGQNQLYNELNLGRREEYDVLDKRRGRDPEMGGKPRRKNPQEGLYNELQKDKMAEAYSEIGMKGERRRGKGHDGLYQGLSTATKDTYDALHMQALPPR

SEQ ID NO: 6211 - protein, 491 aa, Artificial Sequence
  Description of Artificial Sequence: Synthetic Chimeric Antigen Receptor sequence
MALPVTALLLPLALLLHAARPQVQLVQSWAEVKKPGASVKVSCKASGYTFTSYYMHWVRQAPGQGLEWMGIINPSGGSTSYAQKFQGRVTMTRDTSTSTVYMELSNLRSEDTAVYYCARSPRVTTGYFDYWGQGTLVTVSSGGGGSGGGGSGGGGSGGGGSDIQLTQSPSTLSASVGDRVTITCRASQSISSWLAWYQQKPGKAPKLLIYKASSLESGVPSRFSGSGSGTEFTLTISSLQPDDFATYYCQQYSSYPLTFGGGTRLEIKTTTPAPRPPTPAPTIASQPLSLRPEACRPAAGGAVHTRGLDFACDIYIWAPLAGTCGVLLLSLVITLYCKRGRKKLLYIFKQPFMRPVQTTQEEDGCSCRFPEEEEGGCELRVKFSRSADAPAYKQGQNQLYNELNLGRREEYDVLDKRRGRDPEMGGKPRRKNPQEGLYNELQKDKMAEAYSEIGMKGERRRGKGHDGLYQGLSTATKDTYDALHMQALPPR

SEQ ID NO: 6212 - protein, 497 aa, Artificial Sequence
  Description of Artificial Sequence: Synthetic Chimeric Antigen Receptor sequence
MALPVTALLLPLALLLHAARPQVQLVQSGAEVRRPGASVKISCRASGDTSTRHYIHWLRQAPGQGPEWMGVINPTTGPATGSPAYAQMLQGRVTMTRDTSTRTVYMELRSLRFEDTAVYYCARSVVGRSAPYYFDYWGQGTLVTVSSGGGGSGGGGSGGGGSGGGGSDIQMTQSPSSLSASVGDRVTITCRASQGISDYSAWYQQKPGKAPKLLIYAASTLQSGVPSRFSGSGSGTDFTLTISYLQSEDFATYYCQQYYSYPLTFGGGTKVDIKTTTPAPRPPTPAPTIASQPLSLRPEACRPAAGGAVHTRGLDFACDIYIWAPLAGTCGVLLLSLVITLYCKRGRKKLLYIFKQPFMRPVQTTQEEDGCSCRFPEEEEGGCELRVKFSRSADAPAYKQGQNQLYNELNLGRREEYDVLDKRRGRDPEMGGKPRRKNPQEGLYNELQKDKMAEAYSEIGMKGERRRGKGHDGLYQGLSTATKDTYDALHMQALPPR

SEQ ID NO: 6213 - protein, 493 aa, Artificial Sequence
  Description of Artificial Sequence: Synthetic Chimeric Antigen Receptor sequence
MALPVTALLLPLALLLHAARPQVQLQQSGAEVKKPGASVKVSCKASGYTFTNYYMHWVRQAPGQGLEWMGIINPSGGYTTYAQKFQGRLTMTRDTSTSTVYMELSSLRSEDTAVYYCARIRSCGGDCYYFDNWGQGTLVTVSSGGGGSGGGGSGGGGSGGGGSDIQLTQSPSTLSASVGDRVTITCRASENVNIWLAWYQQKPGKAPKLLIYKSSSLASGVPSRFSGSGSGAEFTLTISSLQPDDFATYYCQQYQSYPLTFGGGTKVDIKTTTPAPRPPTPAPTIASQPLSLRPEACRPAAGGAVHTRGLDFACDIYIWAPLAGTCGVLLLSLVITLYCKRGRKKLLYIFKQPFMRPVQTTQEEDGCSCRFPEEEEGGCELRVKFSRSADAPAYKQGQNQLYNELNLGRREEYDVLDKRRGRDPEMGGKPRRKNPQEGLYNELQKDKMAEAYSEIGMKGERRRGKGHDGLYQGLSTATKDTYDALHMQALPPR

SEQ ID NO: 6214 - protein, 490 aa, Artificial Sequence
  Description of Artificial Sequence: Synthetic Chimeric Antigen Receptor sequence
MALPVTALLLPLALLLHAARPQITLKESGPALVKPTQTLTLTCTFSGFSLSTAGVHVGWIRQPPGKALEWLALISWADDKRYRPSLRSRLDITRVTSKDQVVLSMTNMQPEDTATYYCALQGFDGYEANWGPGTLVTVSSGGGGSGGGGSGGGGSGGGGSDIVMTQSPSSLSASAGDRVTITCRASRGISSALAWYQQKPGKPPKLLIYDASSLESGVPSRFSGSGSGTDFTLTIDSLEPEDFATYYCQQSYSTPWTFGQGTKVDIKTTTPAPRPPTPAPTIASQPLSLRPEACRPAAGGAVHTRGLDFACDIYIWAPLAGTCGVLLLSLVITLYCKRGRKKLLYIFKQPFMRPVQTTQEEDGCSCRFPEEEEGGCELRVKFSRSADAPAYKQGQNQLYNELNLGRREEYDVLDKRRGRDPEMGGKPRRKNPQEGLYNELQKDKMAEAYSEIGMKGERRRGKGHDGLYQGLSTATKDTYDALHMQALPPR

SEQ ID NO: 6215 - protein, 490 aa, Artificial Sequence
  Description of Artificial Sequence: Synthetic Chimeric Antigen Receptor sequence
MALPVTALLLPLALLLHAARPQVQLVQSGAEVKKPGAPVKVSCKASGYTFTGYYMHWVRQAPGQGLEWMGWINPNSGGTNYAQKFQGRVTMTRDTSISTAYMELSRLRSDDTAVYYCARGEWDGSYYYDYWGQGTLVTVSSGGGGSGGGGSGGGGSGGGGSDIVLTQTPSSLSASVGDRVTITCRASQSINTYLNWYQHKPGKAPKLLIYAASSLQSGVPSRFSGSGSGTDFTLTISSLQPEDFATYYCQQSFSPLTFGGGTKLEIKTTTPAPRPPTPAPTIASQPLSLRPEACRPAAGGAVHTRGLDFACDIYIWAPLAGTCGVLLLSLVITLYCKRGRKKLLYIFKQPFMRPVQTTQEEDGCSCRFPEEEEGGCELRVKFSRSADAPAYKQGQNQLYNELNLGRREEYDVLDKRRGRDPEMGGKPRRKNPQEGLYNELQKDKMAEAYSEIGMKGERRRGKGHDGLYQGLSTATKDTYDALHMQALPPR

SEQ ID NO: 6216 - protein, 486 aa, Artificial Sequence
  Description of Artificial Sequence: Synthetic Chimeric Antigen Receptor sequence
MALPVTALLLPLALLLHAARPQVQLVESGGGLVQPGGSLRLSCAASGFTFSSYWMHWVRQVPGKGLVWVSRINTDGSTTTYADSVEGRFTISRDNAKNTLYLQMNSLRDDDTAVYYCVGGHWAVWGQGTTVTVSSGGGGSGGGGSGGGGSGGGGSDIQMTQSPSTLSASVGDRVTITCRASQSISDRLAWYQQKPGKAPKLLIYKASSLESGVPSRFSGSGSGTEFTLTISSLQPDDFAVYYCQQYGHLPMYTFGQGTKVEIKTTTPAPRPPTPAPTIASQPLSLRPEACRPAAGGAVHTRGLDFACDIYIWAPLAGTCGVLLLSLVITLYCKRGRKKLLYIFKQPFMRPVQTTQEEDGCSCRFPEEEEGGCELRVKFSRSADAPAYKQGQNQLYNELNLGRREEYDVLDKRRGRDPEMGGKPRRKNPQEGLYNELQKDKMAEAYSEIGMKGERRRGKGHDGLYQGLSTATKDTYDALHMQALPPR

SEQ ID NO: 6217 - protein, 485 aa, Artificial Sequence
  Description of Artificial Sequence: Synthetic Chimeric Antigen Receptor sequence
MALPVTALLLPLALLLHAARPQVQLVQSGAEVEKPGASVKVSCKASGYTFTDYYMHWVRQAPGQGLEWMGWINPNSGGTNYAQKFQGRVTMTRDTSISTAYMELSRLRSDDTAVYYCASGWDFDYWGQGTLVTVSSGGGGSGGGGSGGGGSGGGGSDIVMTQSPSSLSASVGDRVTITCRASQSIRYYLSWYQQKPGKAPKLLIYTASILQNGVPSRFSGSGSGTDFTLTISSLQPEDFATYYCLQTYTTPDFGPGTKVEIKTTTPAPRPPTPAPTIASQPLSLRPEACRPAAGGAVHTRGLDFACDIYIWAPLAGTCGVLLLSLVITLYCKRGRKKLLYIFKQPFMRPVQTTQEEDGCSCRFPEEEEGGCELRVKFSRSADAPAYKQGQNQLYNELNLGRREEYDVLDKRRGRDPEMGGKPRRKNPQEGLYNELQKDKMAEAYSEIGMKGERRRGKGHDGLYQGLSTATKDTYDALHMQALPPR

SEQ ID NO: 6218 - protein, 497 aa, Artificial Sequence
  Description of Artificial Sequence: Synthetic Chimeric Antigen Receptor sequence
MALPVTALLLPLALLLHAARPQVQLVQSGAEVKKPGASVKVSCKASGYTFTSYYMHWVRQAPGQGLEWMGIINPSGGSTSYAQKFQGRVTMTRDTSTSTVYMELSSLRSEDTAVYYCARYRLIAVAGDYYYYGMDVWGQGTMVTVSSGGGGSGGGGSGGGGSGGGGSDIQMTQSPSSVSASVGDRVTITCRASQGVGRWLAWYQQKPGTAPKLLIYAASTLQSGVPSRFSGSGSGTDFTLTINNLQPEDFATYYCQQANSFPLTFGGGTRLEIKTTTPAPRPPTPAPTIASQPLSLRPEACRPAAGGAVHTRGLDFACDIYIWAPLAGTCGVLLLSLVITLYCKRGRKKLLYIFKQPFMRPVQTTQEEDGCSCRFPEEEEGGCELRVKFSRSADAPAYKQGQNQLYNELNLGRREEYDVLDKRRGRDPEMGGKPRRKNPQEGLYNELQKDKMAEAYSEIGMKGERRRGKGHDGLYQGLSTATKDTYDALHMQALPPR

SEQ ID NO: 6219 - protein, 494 aa, Artificial Sequence
  Description of Artificial Sequence: Synthetic Chimeric Antigen Receptor sequence
MALPVTALLLPLALLLHAARPQVQLVQSGGGVVQPGRSLRLSCAASGFTFSSYAMHWVRQAPGKGLEWVAVISYDGSNKYYADSVKGRFTISRDNSKNTLYLQMNSLRAEDTAVYYCARWKVSSSSPAFDYWGQGTLVTVSSGGGGSGGGGSGGGGSGGGGSEIVLTQSPATLSLSPGERAILSCRASQSVYTKYLGWYQQKPGQAPRLLIYDASTRATGIPDRFSGSGSGTDFTLTINRLEPEDFAVYYCQHYGGSPLITFGQGTRLEIKTTTPAPRPPTPAPTIASQPLSLRPEACRPAAGGAVHTRGLDFACDIYIWAPLAGTCGVLLLSLVITLYCKRGRKKLLYIFKQPFMRPVQTTQEEDGCSCRFPEEEEGGCELRVKFSRSADAPAYKQGQNQLYNELNLGRREEYDVLDKRRGRDPEMGGKPRRKNPQEGLYNELQKDKMAEAYSEIGMKGERRRGKGHDGLYQGLSTATKDTYDALHMQALPPR

SEQ ID NO: 6220 - protein, 490 aa, Artificial Sequence
  Description of Artificial Sequence: Synthetic Chimeric Antigen Receptor sequence
MALPVTALLLPLALLLHAARPQVQLQQSGAEVKKPGASVKVSCKTSGYPFTGYSLHWVRQAPGQGLEWMGWINPNSGGTNYAQKFQGRVTMTRDTSISTAYMELSRLRSDDTAVYYCARDHYGGNSLFYWGQGTLVTVSSGGGGSGGGGSGGGGSGGGGSDIQLTQSPSSISASVGDTVSITCRASQDSGTWLAWYQQKPGKAPNLLMYDASTLEDGVPSRFSGSASGTEFTLTVNRLQPEDSATYYCQQYNSYPLTFGGGTKVDIKTTTPAPRPPTPAPTIASQPLSLRPEACRPAAGGAVHTRGLDFACDIYIWAPLAGTCGVLLLSLVITLYCKRGRKKLLYIFKQPFMRPVQTTQEEDGCSCRFPEEEEGGCELRVKFSRSADAPAYKQGQNQLYNELNLGRREEYDVLDKRRGRDPEMGGKPRRKNPQEGLYNELQKDKMAEAYSEIGMKGERRRGKGHDGLYQGLSTATKDTYDALHMQALPPR

SEQ ID NO: 6221 - protein, 492 aa, Artificial Sequence
  Description of Artificial Sequence: Synthetic Chimeric Antigen Receptor sequence
MALPVTALLLPLALLLHAARPQVQLVQSGAEVKKPGASVEVSCKASGYTFTSYYMHWVRQAPGQGLEWMGIINPSGGSTGYAQKFQGRVTMTRDTSTSTVHMELSSLRSEDTAVYYCARGGYSSSSDAFDIWGQGTMVTVSSGGGGSGGGGSGGGGSGGGGSDIQMTQSPPSLSASVGDRVTITCRASQDISSALAWYQQKPGTPPKLLIYDASSLESGVPSRFSGSGSGTDFTLTISSLQPEDFATYYCQQFSSYPLTFGGGTRLEIKTTTPAPRPPTPAPTIASQPLSLRPEACRPAAGGAVHTRGLDFACDIYIWAPLAGTCGVLLLSLVITLYCKRGRKKLLYIFKQPFMRPVQTTQEEDGCSCRFPEEEEGGCELRVKFSRSADAPAYKQGQNQLYNELNLGRREEYDVLDKRRGRDPEMGGKPRRKNPQEGLYNELQKDKMAEAYSEIGMKGERRRGKGHDGLYQGLSTATKDTYDALHMQALPPR

SEQ ID NO: 6222 - protein, 356 aa, Artificial Sequence
  Description of Artificial Sequence: Synthetic Chimeric Antigen Receptor sequence
MALPVTALLLPLALLLHAARPPGWFLDSPDRPWNPPTFSPALLVVTEGDNATFTCSFSNTSESFVLNWYRMSPSNQTDKLAAFPEDRSQPGQDCRFRVTQLPNGRDFHMSVVRARRNDSGTYLCGAISLAPKAQIKESLRAELRVTERRAEVPTARPSPSPRPAGQFQTLVTTTPAPRPPTPAPTIASQPLSLRPEACRPAAGGAVHTRGLDFACDIYIWAPLAGTCGVLLLSLVITLYCKRGRKKLLGGGGSGGGGSASRILWHEMWHEGLEEASRLYFGERNVKGMFEVLEPLHAMMERGPQTLKETSFNQAYGRDLMEAQEWCRKYMKSGNVKDLLQAWDLYYHVFRRISKTS

SEQ ID NO: 6223 - protein, 1701 aa, Artificial Sequence
  Description of Artificial Sequence: Synthetic Chimeric Antigen Receptor sequence
MSLPVTALLLPLALLLHAARPDIQMTQTTSSLSASLGDRVTISCRASQDISKYLNWYQQKPDGTVKLLIYHTSRLHSGVPSRFSGSGSGTDYSLTISNLEQEDIATYFCQQGNTLPYTFGGGTKLEITKAGGGGSGGGGSGGGGSGGGGSEVKLQESGPGLVAPSQSLSVTCTVSGVSLPDYGVSWIRQPPRKGLEWLGVIWGSETTYYNSALKSRLTMKDNSKSQVFLKMNSLQTDDTAIYYCAKHYYYGGSYAMDYWGQGTSVTVSSDPTTTPAPRPPTPAPTIASQPLSLRPEACRPAAGGAVHTRGLDFACDIFVWLVWGGVLACYSLLVTVAFIIFWVRRVKFSRSADAPAYQQGQQLYNELNLGRREEYDVLDKRRGRDPEMGGKPRRKNPQEGLYNELQKDMAEAYSEIGMKGERRRGKGHDGLYQGLSTATKDTYDALHMQALPPRRAEGRGSLLTCGDVEENPGPMAVPTQVLGLLLLWLTDARCDIQMTQSPSSLSASVGDRVTITCRASEDIYFNLVWYQQKPGKAPKLLIYDTNRLADGVPSRFSGSGSGTQYTLTISSLQPEDFATYYCQHYKNYPLTFGQGTKLEIKRSGGGGSGGGGSGGGGSGGGGSRSEVQLVESGGGLVQPGGSLRLSCAASGFTLSNYGMHWIRQAPGKGLEWVSSISLNGGSTYYRDSVKGRFTISRDNAKSTLYLQMNSLRAEDTAVYYCAAQDAYTGGYFDYWGQGTLVTVSSMDPAEPKSPDKTHTCPPCPAPPVAGPSVFLFPPKPKDTLMIARTPEVTCVWDVSHEDPEVKFNWYVDGVEVHNAKTKPREEQYNSTYRWSVLTVLHQDWLNGKEYKCKVSNKALPAPIEKTISKAKGQPREPQVYTLPPSRDELTNQVSLTCLVKGFYPSDIAVEWESNGQPENNYKTTPPVLDSDGSFFLYSKLTVDKSRWQQGNVFSCSVMHEALHNHYTQKSLSLSPGKKDPKALIAFLAFLIIVTSIALLWLYKIYDLHKKRSCNLDEQQELVERDDEKQLMNVEPIHADILLETYKRKIADEGRLFLAEFQSIPRVFSKFPIEARKPFNQNKNRYVDILPYDYNRVELSEINGDAGSNYINASYIDGFKEPRKYIAAQGPRDETVDDFWRMIWEQKATVIVMVTRCEEGNRNKCAEYWPSMEEGTRAFGDVWKINQHKRCPDYIIQKLNIVNKKEKATGREVTHIQFTSWPDHGVPEDPHLLLKLRRRVNAFSNFFSGPIWHCSAGVGRTGTYIGIDAMLEGLEAENKVDVYGYWKLRRQRCLMVQVEAQYILIHQALVEYNQFGETEVNLSELHPYLHNMKKRDPPSEPSPLEAEFQRLPSYRSWRTQHIGNQEENKSKNRNSNVIPYDYNRVPLKHELEMSKESEHDSDESSDDDSDSEEPSKYINASFIMSYWKPEVMIAAQGPLKETIGDFWQMIFQRKVKVIVMLTELKHGDQEICAQYWGEGKQTYGDIEVDLDTDKSSTYTLRVFELRHSKRKDSRTVYQYQYTNWSVEQLPAEPKELISMIQWKQKLPQKNSSEGNKHHKSTPLLIHCRDGSQQTGIFCALLNLLESAETEEWDIFQWKALRKARPGMVSTFEQYQFLYDVIASTYPAQNGQVKKNNHQEDKIEFDNEVDKVKQDANCVNPLGAPEKLPEAKEQAEGSEPTSGTEGPEHSVNGPASPALNQGS

SEQ ID NO: 6224 - protein, 378 aa, Artificial Sequence
  Description of Artificial Sequence: Synthetic Chimeric Antigen Receptor sequence
MALPVTALLLPLALLLHAARPGSGSGAQAAEVQLQQSGPELVKPGTSVRISCKTSGYTFTEYTIHWVKQSHGKSLEWIGNINPNNGGTTYNQKFEDKATLTVDKSSSTAYMELRSLTSEDSAVYYCAAGWNFDYWGQGTTVTVSSGGGGSGGGGSGGGGSDIVMTQSHKFMSTSVGDRVSIICKASQDVGTAVDWYQQKPGQSPKLLIYWASTRHTGVPDRFTGSGSGTDFTLTITNVQSEDLADYFCQQYNSYPLTFGAGTMLDLKRAAARSDPASGAGSGSGSAVKEGPPSEHSGISRNAIIFLVLGILVFLILLGIGIYFYWSKCSREVLWHCHLCPSSTEHASASANGHVSYSAVSRENSSSQDPQTEGTRSHG

SEQ ID NO: 6225 - protein, 386 aa, Artificial Sequence
  Description of Artificial Sequence: Synthetic Chimeric Antigen Receptor sequence
MALPVTALLLPLALLLHAARPGSGSGAQAAEVQLQQSGPELVKPGTSVRISCKTSGYTFTEYTIHWVKQSHGKSLEWIGNINPNNGGTTYNQKFEDKATLTVDKSSSTAYMELRSLTSEDSAVYYCAAGWNFDYWGQGTTVTVSSGGGGSGGGGSGGGGSDIVMTQSHKFMSTSVGDRVSIICKASQDVGTAVDWYQQKPGQSPKLLIYWASTRHTGVPDRFTGSGSGTDFTLTITNVQSEDLADYFCQQYNSYPLTFGAGTMLDLKRAAARSDPASGAGSGSGSAVQAPSSSPMGIIVAVVTGIAVAAIVAAVVALIYCRKKRISALPGYPECREMGETLPEKPANPTNPDEADKVGAENTITYSLLMHPDALEEPDDQNRISHG

SEQ ID NO: 6226 - protein, 404 aa, Artificial Sequence
  Description of Artificial Sequence: Synthetic Chimeric Antigen Receptor sequence
MALPVTALLLPLALLLHAARPGSGSGAQAAEVQLQQSGPELVKPGTSVRISCKTSGYTFTEYTIHWVKQSHGKSLEWIGNINPNNGGTTYNQKFEDKATLTVDKSSSTAYMELRSLTSEDSAVYYCAAGWNFDYWGQGTTVTVSSGGGGSGGGGSGGGGSDIVMTQSHKFMSTSVGDRVSIICKASQDVGTAVDWYQQKPGQSPKLLIYWASTRHTGVPDRFTGSGSGTDFTLTITNVQSEDLADYFCQQYNSYPLTFGAGTMLDLKRAAARSDPASGAGSGSGSASFRALPHAWSDPSDPLPVSVTGNSRYLHALIGTSVVIIPFAILLFFLLHRWCANKKNAVVMDQEPAGNRTVNREDSDEQDPQEVTYAQLNHCVFTQRKITRPSQRPKTPPTDTSVSHG

SEQ ID NO: 6227 - protein, 405 aa, Artificial Sequence
  Description of Artificial Sequence: Synthetic Chimeric Antigen Receptor sequence
MALPVTALLLPLALLLHAEVQLQQSGPELVKPGTSVRISCKTSGYTFTEYTIHWVKQSHGKSLEWIGNINPNNGGTTYNQKFEDKATLTVDKSSSTAYMELRSLTSEDSAVYYCAAGWNFDYWGQGTTVTVSSGGGGSGGGGSGGGGSDIVMTQSHKFMSTSVGDRVSIICKASQDVGTAVDWYQQKPGQSPKLLIYWASTRHTGVPDRFTGSGSGTDFTLTITNVQSEDLADYFCQQYNSYPLTFGAGTMLDLKRAAATERRAEVPTAHPSPSPRPAGQFQTLVVGVVGGLLGSLVLLVWVLAVICSRAARGTIGARRTGQPLKEDPSAVPVFSVDYGELDFQWREKTPEPPVPCVPEQTEYATIVFPSGMGTSSPARRGSADGPRSAQPLRPEDGHCSWPLSH

SEQ ID NO: 6228 - protein, 409 aa, Artificial Sequence
  Description of Artificial Sequence: Synthetic Chimeric Antigen Receptor sequence
MALPVTALLLPLALLLHAARPGSGSGAQAAEVQLQQSGPELVKPGTSVRISCKTSGYTFTEYTIHWVKQSHGKSLEWIGNINPNNGGTTYNQKFEDKATLTVDKSSSTAYMELRSLTSEDSAVYYCAAGWNFDYWGQGTTVTVSSGGGGSGGGGSGGGGSDIVMTQSHKFMSTSVGDRVSIICKASQDVGTAVDWYQQKPGQSPKLLIYWASTRHTGVPDRFTGSGSGTDFTLTITNVQSEDLADYFCQQYNSYPLTFGAGTMLDLKRAAARSDPASGAGSGSGSALFVHWKPEGRAGGVLGAVWGASITTLVFLCVCFIFRVKTRRKKAAQPVQNTDDVNPVMVSGSRGHQHQFQTGIVSDHPAEAGPISEDEQELHYAVLHFHKVQPQEPKVTDTEYSEIKIHKSHG

SEQ ID NO: 6229 - protein, 410 aa, Artificial Sequence
  Description of Artificial Sequence: Synthetic Chimeric Antigen Receptor sequence
MALPVTALLLPLALLLHAARPGSGSGAQAAEVQLQQSGPELVKPGTSVRISCKTSGYTFTEYTIHWVKQSHGKSLEWIGNINPNNGGTTYNQKFEDKATLTVDKSSSTAYMELRSLTSEDSAVYYCAAGWNFDYWGQGTTVTVSSGGGGSGGGGSGGGGSDIVMTQSHKFMSTSVGDRVSIICKASQDVGTAVDWYQQKPGQSPKLLIYWASTRHTGVPDRFTGSGSGTDFTLTITNVQSEDLADYFCQQYNSYPLTFGAGTMLDLKRAAARSDPASGAGSGSGSAGPDGYRRDLMTAGVLWGLFGVLGFTGVALLLYALFHKISGESSATNEPRGASRPNPQEFTYSSPTPDMEELQPVYVNVGSVDVDVVYSQVWSMQQPESSANIRTLLENKDSQVIYSSVKKSSHG

SEQ ID NO: 6230 - protein, 412 aa, Artificial Sequence
  Description of Artificial Sequence: Synthetic Chimeric Antigen Receptor sequence
MALPVTALLLPLALLLHAARPGSGSGAQAAEVQLQQSGPELVKPGTSVRISCKTSGYTFTEYTIHWVKQSHGKSLEWIGNINPNNGGTTYNQKFEDKATLTVDKSSSTAYMELRSLTSEDSAVYYCAAGWNFDYWGQGTTVTVSSGGGGSGGGGSGGGGSDIVMTQSHKFMSTSVGDRVSIICKASQDVGTAVDWYQQKPGQSPKLLIYWASTRHTGVPDRFTGSGSGTDFTLTITNVQSEDLADYFCQQYNSYPLTFGAGTMLDLKRAAARSDPASGAGSGSGSAPGHIRLYVVEKENLPVFPVWVVVGIVTAVVLGLTLLISMILAVLYRRKNSKRDYTGCSTSESLSPVKQAPRKSPSDTEGLVKSLPSGSHQGPVIYAQLDHSGGHHSDKINKSESVVYADIRKNSHG

SEQ ID NO: 6231 - protein, 416 aa, Artificial Sequence
  Description of Artificial Sequence: Synthetic Chimeric Antigen Receptor sequence
MALPVTALLLPLALLLHAARPGSGSGAQAAEVQLQQSGPELVKPGTSVRISCKTSGYTFTEYTIHWVKQSHGKSLEWIGNINPNNGGTTYNQKFEDKATLTVDKSSSTAYMELRSLTSEDSAVYYCAAGWNFDYWGQGTTVTVSSGGGGSGGGGSGGGGSDIVMTQSHKFMSTSVGDRVSIICKASQDVGTAVDWYQQKPGQSPKLLIYWASTRHTGVPDRFTGSGSGTDFTLTITNVQSEDLADYFCQQYNSYPLTFGAGTMLDLKRAAARSDPASGAGSGSGSALQSKATSGVTQGVVGGAGATALVFLSFCVIFVVVRSCRKKSARPAAGVGDTGIEDANAVRGSASQGPLTEPWAEDSPPDQPPPASARSSVGEGELQYASLSFQMVKPWDSRGQEATDTEYSEIKIHRSHG

SEQ ID NO: 6232 - protein, 419 aa, Artificial Sequence
  Description of Artificial Sequence: Synthetic Chimeric Antigen Receptor sequence
MALPVTALLLPLALLLHAARPGSGSGAQAAEVQLQQSGPELVKPGTSVRISCKTSGYTFTEYTIHWVKQSHGKSLEWIGNINPNNGGTTYNQKFEDKATLTVDKSSSTAYMELRSLTSEDSAVYYCAAGWNFDYWGQGTTVTVSSGGGGSGGGGSGGGGSDIVMTQSHKFMSTSVGDRVSIICKASQDVGTAVDWYQQKPGQSPKLLIYWASTRHTGVPDRFTGSGSGTDFTLTITNVQSEDLADYFCQQYNSYPLTFGAGTMLDLKRAAARSDPASGAGSGSGSAMPSTGGDSCPFCLKLLLPGLLLLLVVIILILAFWVLPKYKTRKAMRNNVPRDRGDTAMEVGIYANILEKQAKEESVPEVGSRPCVSTAQDEAKHSQELQYATPVFQEVAPREQEACDSYKSGYVYSELNFSHG

SEQ ID NO: 6233 - protein, 420 aa, Artificial Sequence
  Description of Artificial Sequence: Synthetic Chimeric Antigen Receptor sequence
MALPVTALLLPLALLLHAARPGSGSGAQAAEVQLQQSGPELVKPGTSVRISCKTSGYTFTEYTIHWVKQSHGKSLEWIGNINPNNGGTTYNQKFEDKATLTVDKSSSTAYMELRSLTSEDSAVYYCAAGWNFDYWGQGTTVTVSSGGGGSGGGGSGGGGSDIVMTQSHKFMSTSVGDRVSIICKASQDVGTAVDWYQQKPGQSPKLLIYWASTRHTGVPDRFTGSGSGTDFTLTITNVQSEDLADYFCQQYNSYPLTFGAGTMLDLKRAAARSDPASGAGSGSGSALQQEYTGKMRPVSGVLLGAVGGAGATALVFLSFCVIFIVVRSCRKKSARPAADVGDIGMKDANTIRGSASQGNLTESWADDNPRHHGLAAHSSGEEREIQYAPLSFHKGEPQDLSGQEATNNEYSEIKIPKSHG

SEQ ID NO: 6234 - protein, 422 aa, Artificial Sequence
  Description of Artificial Sequence: Synthetic Chimeric Antigen Receptor sequence
MALPVTALLLPLALLLHAARPGSGSGAQAAEVQLQQSGPELVKPGTSVRISCKTSGYTFTEYTIHWVKQSHGKSLEWIGNINPNNGGTTYNQKFEDKATLTVDKSSSTAYMELRSLTSEDSAVYYCAAGWNFDYWGQGTTVTVSSGGGGSGGGGSGGGGSDIVMTQSHKFMSTSVGDRVSIICKASQDVGTAVDWYQQKPGQSPKLLIYWASTRHTGVPDRFTGSGSGTDFTLTITNVQSEDLADYFCQQYNSYPLTFGAGTMLDLKRAAARSDPASGAGSGSGSALQNEYTGKMRPISGVTLGAFGGAGATALVFLYFCIIFVVVRSCRKKSARPAVGVGDTGMEDANAVRGSASQGPLIESPADDSPPHHAPPALATPSPEEGEIQYASLSFHKARPQYPQEQEAIGYEYSEINIPKSHG

SEQ ID NO: 6235 - protein, 425 aa, Artificial Sequence
  Description of Artificial Sequence: Synthetic Chimeric Antigen Receptor sequence
MALPVTALLLPLALLLHAARPGSGSGAQAAEVQLQQSGPELVKPGTSVRISCKTSGYTFTEYTIHWVKQSHGKSLEWIGNINPNNGGTTYNQKFEDKATLTVDKSSSTAYMELRSLTSEDSAVYYCAAGWNFDYWGQGTTVTVSSGGGGSGGGGSGGGGSDIVMTQSHKFMSTSVGDRVSIICKASQDVGTAVDWYQQKPGQSPKLLIYWASTRHTGVPDRFTGSGSGTDFTLTITNVQSEDLADYFCQQYNSYPLTFGAGTMLDLKRAAARSDPASGAGSGSGSALNVTYVPQNPTTGIFPGDGSGKQETRAGVVHGAIGGAGVTALLALCLCLIFFIVKTHRRKAARTAVGRNDTHPTTGSASPKHQKKSKLHGPTETSSCSGAAPTVEMDEELHYASLNFHGMNPSKDTSTEYSEVRTQSHG

SEQ ID NO: 6236 - protein, 425 aa, Artificial Sequence
  Description of Artificial Sequence: Synthetic Chimeric Antigen Receptor sequence
MALPVTALLLPLALLLHAARPGSGSGAQAAEVQLQQSGPELVKPGTSVRISCKTSGYTFTEYTIHWVKQSHGKSLEWIGNINPNNGGTTYNQKFEDKATLTVDKSSSTAYMELRSLTSEDSAVYYCAAGWNFDYWGQGTTVTVSSGGGGSGGGGSGGGGSDIVMTQSHKFMSTSVGDRVSIICKASQDVGTAVDWYQQKPGQSPKLLIYWASTRHTGVPDRFTGSGSGTDFTLTITNVQSEDLADYFCQQYNSYPLTFGAGTMLDLKRAAARSDPASGAGSGSGSAPYEWSNSSDPLLVSVTGNPSNSWPSPTEPSSETGNPRHLHVLIGTSVVIILFILLLFFLLHRWCCNKKNAVVMDQEPAGNRTVNREDSDEQDPQEVTYAQLNHCVFTQRKITRPSQRPKTPPTDIIVYTELPNAEPSHG

SEQ ID NO: 6237 - protein, 427 aa, Artificial Sequence
  Description of Artificial Sequence: Synthetic Chimeric Antigen Receptor sequence
MALPVTALLLPLALLLHAARPGSGSGAQAAEVQLQQSGPELVKPGTSVRISCKTSGYTFTEYTIHWVKQSHGKSLEWIGNINPNNGGTTYNQKFEDKATLTVDKSSSTAYMELRSLTSEDSAVYYCAAGWNFDYWGQGTTVTVSSGGGGSGGGGSGGGGSDIVMTQSHKFMSTSVGDRVSIICKASQDVGTAVDWYQQKPGQSPKLLIYWASTRHTGVPDRFTGSGSGTDFTLTITNVQSEDLADYFCQQYNSYPLTFGAGTMLDLKRAAARSDPASGAGSGSGSALNFTVPTGARSNHLTSGVIEGLLSTLGPATVALLFCYGLKRKIGRRSARDPLRSLPSPLPQEFTYLNSPTPGQLQPIYENVNVVSGDEVYSLAYYNQPEQESVAAETLGTHMEDKVSLDIYSRLRKANITDVDYEDAMSHG

SEQ ID NO: 6238 - protein, 430 aa, Artificial Sequence
  Description of Artificial Sequence: Synthetic Chimeric Antigen Receptor sequence
MALPVTALLLPLALLLHAARPGSGSGAQAAEVQLQQSGPELVKPGTSVRISCKTSGYTFTEYTIHWVKQSHGKSLEWIGNINPNNGGTTYNQKFEDKATLTVDKSSSTAYMELRSLTSEDSAVYYCAAGWNFDYWGQGTTVTVSSGGGGSGGGGSGGGGSDIVMTQSHKFMSTSVGDRVSIICKASQDVGTAVDWYQQKPGQSPKLLIYWASTRHTGVPDRFTGSGSGTDFTLTITNVQSEDLADYFCQQYNSYPLTFGAGTMLDLKRAAARSDPASGAGSGSGSAVTVRETPGNRDGLVAAGATGGLLSALLLAVALLFHCWRRRKSGVGFLGDETRLPPAPGPGESSHSICPAQVELQSLYVDVHPKKGDLVYSEIQTTQLGEEEEANTSRTLLEDKDVSVVYSEVKTQHPDNSAGKISSKDEESSHG

SEQ ID NO: 6239 - protein, 432 aa, Artificial Sequence
  Description of Artificial Sequence: Synthetic Chimeric Antigen Receptor sequence
MALPVTALLLPLALLLHAARPGSGSGAQAAEVQLQQSGPELVKPGTSVRISCKTSGYTFTEYTIHWVKQSHGKSLEWIGNINPNNGGTTYNQKFEDKATLTVDKSSSTAYMELRSLTSEDSAVYYCAAGWNFDYWGQGTTVTVSSGGGGSGGGGSGGGGSDIVMTQSHKFMSTSVGDRVSIICKASQDVGTAVDWYQQKPGQSPKLLIYWASTRHTGVPDRFTGSGSGTDFTLTITNVQSEDLADYFCQQYNSYPLTFGAGTMLDLKRAAARSDPASGAGSGSGSALYITGLTANRSGPFATGVAGGLLSIAGLAAGALLLYCWLSRKAGRKPASDPARSPPDSDSQEPTYHNVPAWEELQPVYTNANPRGENVVYSEVRIIQEKKKHAVASDPRHLRNKGSPIIYSEVKVASTPVSGSLFLASSAPHRSHG

SEQ ID NO: 6240 - protein, 432 aa, Artificial Sequence
  Description of Artificial Sequence: Synthetic Chimeric Antigen Receptor sequence
MALPVTALLLPLALLLHAARPGSGSGAQAAEVQLQQSGPELVKPGTSVRISCKTSGYTFTEYTIHWVKQSHGKSLEWIGNINPNNGGTTYNQKFEDKATLTVDKSSSTAYMELRSLTSEDSAVYYCAAGWNFDYWGQGTTVTVSSGGGGSGGGGSGGGGSDIVMTQSHKFMSTSVGDRVSIICKASQDVGTAVDWYQQKPGQSPKLLIYWASTRHTGVPDRFTGSGSGTDFTLTITNVQSEDLADYFCQQYNSYPLTFGAGTMLDLKRAAARSDPASGAGSGSGSAPYEWSKSSDPLLVSVTGNPSNSWPSPTEPSSKTGNPRHLHILIGTSVVIILFILLFFLLHRWCSNKKNAAVMDQESAGNRTANSEDSDEQDPQEVTYTQLNHCVFTQRKITRPSQRPKTPPTDIIVYTELPNAESRSKVVSCPSHG

SEQ ID NO: 6241 - protein, 432 aa, Artificial Sequence
  Description of Artificial Sequence: Synthetic Chimeric Antigen Receptor sequence
MALPVTALLLPLALLLHAARPGSGSGAQAAEVQLQQSGPELVKPGTSVRISCKTSGYTFTEYTIHWVKQSHGKSLEWIGNINPNNGGTTYNQKFEDKATLTVDKSSSTAYMELRSLTSEDSAVYYCAAGWNFDYWGQGTTVTVSSGGGGSGGGGSGGGGSDIVMTQSHKFMSTSVGDRVSIICKASQDVGTAVDWYQQKPGQSPKLLIYWASTRHTGVPDRFTGSGSGTDFTLTITNVQSEDLADYFCQQYNSYPLTFGAGTMLDLKRAAARSDPASGAGSGSGSAPYEWSNSSDPLLVSVIGNPSNSWPSPTEPSSKTGNPRHLHILIGTSVVIILFILLFFLLHRWCSNKKNAAVMDQESAGNRTANSEDSDEQDPQEVTYTQLNHCVFTQRKITRPSQRPKTPPTDIIVYAELPNAESRSKVVSCPSHG

SEQ ID NO: 6242 - protein, 432 aa, Artificial Sequence
  Description of Artificial Sequence: Synthetic Chimeric Antigen Receptor sequence
MALPVTALLLPLALLLHAARPGSGSGAQAAEVQLQQSGPELVKPGTSVRISCKTSGYTFTEYTIHWVKQSHGKSLEWIGNINPNNGGTTYNQKFEDKATLTVDKSSSTAYMELRSLTSEDSAVYYCAAGWNFDYWGQGTTVTVSSGGGGSGGGGSGGGGSDIVMTQSHKFMSTSVGDRVSIICKASQDVGTAVDWYQQKPGQSPKLLIYWASTRHTGVPDRFTGSGSGTDFTLTITNVQSEDLADYFCQQYNSYPLTFGAGTMLDLKRAAARSDPASGAGSGSGSAERRAEVPTAHPSPSPRPAGQFQTLVVGVVGGLLGSLVLLVWVLAVICSRAARGTIGARRTGQPLKEDPSAVPVFSVDYGELDFQWREKTPEPPVPCVPEQTEYATIVFPSGMGTSSPARRGSADGPRSAQPLRPEDGHCSWPLSHG

SEQ ID NO: 6243 - protein, 433 aa, Artificial Sequence
  Description of Artificial Sequence: Synthetic Chimeric Antigen Receptor sequence
MALPVTALLLPLALLLHAARPGSGSGAQAAEVQLQQSGPELVKPGTSVRISCKTSGYTFTEYTIHWVKQSHGKSLEWIGNINPNNGGTTYNQKFEDKATLTVDKSSSTAYMELRSLTSEDSAVYYCAAGWNFDYWGQGTTVTVSSGGGGSGGGGSGGGGSDIVMTQSHKFMSTSVGDRVSIICKASQDVGTAVDWYQQKPGQSPKLLIYWASTRHTGVPDRFTGSGSGTDFTLTITNVQSEDLADYFCQQYNSYPLTFGAGTMLDLKRAAARSDPASGAGSGSGSAPYEWSDPSDPLLVSVTGNPSSSWPSPTEPSSKSGNPRHLHILIGTSVVIILFILLLFFLLHLWCSNKKNAAVMDQEPAGNRTANSEDSDEQDPEEVTYAQLDHCVFTQRKITRPSQRPKTPPTDTILYTELPNAKPRSKVVSCPSHG

SEQ ID NO: 6244 - protein, 434 aa, Artificial Sequence
  Description of Artificial Sequence: Synthetic Chimeric Antigen Receptor sequence
QVQLQQSGAELVRPGASVTLSCKASGYTFSDYEMHWVIQTPVHGLEWIGAIDPETGGTAYNQKFKGKAILTADKSSSTAYMELRSLTSEDSAVYYCTGYYDYDSFTYWGQGTLVTVSAGGGGSGGGGSGGGGSDIVMTQSQKIMSTTVGDRVSITCKASQNVDAAVAWYQQKPGQSPKLLIYSASNRYTGVPDRFTGSGSGTDFTLTISNMQSEDLADYFCQQYDIYPYTFGGGTKLEIKGLAVSTISSFFPPGYQIYIWAPLAGTCGVLLLSLVITLYCKRGRKKLLYIFKQPFMRPVQTTQEEDGCSCRFPEEEEGGCELRVKFSRSADAPAYQQGQNQLYNELNLGRREEYDVLDKRRGRDPEMGGKPRRKNPQEGLYNELQKDKMAEAYSEIGMKGERRRGKGHDGLYQGLSTATKDTYDALHMQALPPR

SEQ ID NO: 6245 - protein, 436 aa, Artificial Sequence
  Description of Artificial Sequence: Synthetic Chimeric Antigen Receptor sequence
MALPVTALLLPLALLLHAARPGSGSGAQAAEVQLQQSGPELVKPGTSVRISCKTSGYTFTEYTIHWVKQSHGKSLEWIGNINPNNGGTTYNQKFEDKATLTVDKSSSTAYMELRSLTSEDSAVYYCAAGWNFDYWGQGTTVTVSSGGGGSGGGGSGGGGSDIVMTQSHKFMSTSVGDRVSIICKASQDVGTAVDWYQQKPGQSPKLLIYWASTRHTGVPDRFTGSGSGTDFTLTITNVQSEDLADYFCQQYNSYPLTFGAGTMLDLKRAAARSDPASGAGSGSGSAVRVILAPWKKGLIAVVIIGVIIALLIIAAKCYFLRKAKAKQMPVEMSRPAVPLLNSNNEKMSDPNMEANSHYGHNDDVGNHAMKPINDNKEPLNSDVQYTEVQVSSAESHKDLGKKDTETVYSEVRKAVPDAVESRYSRTEGSLDGTSHG

SEQ ID NO: 6246 - protein, 442 aa, Artificial Sequence
  Description of Artificial Sequence: Synthetic Chimeric Antigen Receptor sequence
MALPVTALLLPLALLLHAARPGSGSGAQAAEVQLQQSGPELVKPGTSVRISCKTSGYTFTEYTIHWVKQSHGKSLEWIGNINPNNGGTTYNQKFEDKATLTVDKSSSTAYMELRSLTSEDSAVYYCAAGWNFDYWGQGTTVTVSSGGGGSGGGGSGGGGSDIVMTQSHKFMSTSVGDRVSIICKASQDVGTAVDWYQQKPGQSPKLLIYWASTRHTGVPDRFTGSGSGTDFTLTITNVQSEDLADYFCQQYNSYPLTFGAGTMLDLKRAAARSDPASGAGSGSGSAQAVTTTTQRPSSMTTTWRLSSTTTTTGLRVTQGKRRSDSWHISLETAVGVAVAVTVLGIMILGLICLLRWRRRKGQQRTKATTPAREPFQNTEEPYENIRNEGQNTDPKLNPKDDGIVYASLALSSSTSPKAPPSHRPLKSPQNETLYSVLKASHG

SEQ ID NO: 6247 - protein, 444 aa, Artificial Sequence
  Description of Artificial Sequence: Synthetic Chimeric Antigen Receptor sequence
MALPVTALLLPLALLLHAARPGSGSGAQAAEVQLQQSGPELVKPGTSVRISCKTSGYTFTEYTIHWVKQSHGKSLEWIGNINPNNGGTTYNQKFEDKATLTVDKSSSTAYMELRSLTSEDSAVYYCAAGWNFDYWGQGTTVTVSSGGGGSGGGGSGGGGSDIVMTQSHKFMSTSVGDRVSIICKASQDVGTAVDWYQQKPGQSPKLLIYWASTRHTGVPDRFTGSGSGTDFTLTITNVQSEDLADYFCQQYNSYPLTFGAGTMLDLKRAAARSDPASGAGSGSGSAPCVWSNSSDPLLVSVTGNPSSSWPSPTEPSSKSGICRHLHVLIGTSVVIFLFILLLFFLLYRWCSNKKNAAVMDQEPAGDRTVNRQDSDEQDPQEVTYAQLDHCVFIQRKISRPSQRPKTPLTDTSVYTELPNAEPRSKVVSCPRAPQSGLEGVFSHG

SEQ ID NO: 6248 - protein, 444 aa, Artificial Sequence
  Description of Artificial Sequence: Synthetic Chimeric Antigen Receptor sequence
MALPVTALLLPLALLLHAARPGSGSGAQAAEVQLQQSGPELVKPGTSVRISCKTSGYTFTEYTIHWVKQSHGKSLEWIGNINPNNGGTTYNQKFEDKATLTVDKSSSTAYMELRSLTSEDSAVYYCAAGWNFDYWGQGTTVTVSSGGGGSGGGGSGGGGSDIVMTQSHKFMSTSVGDRVSIICKASQDVGTAVDWYQQKPGQSPKLLIYWASTRHTGVPDRFTGSGSGTDFTLTITNVQSEDLADYFCQQYNSYPLTFGAGTMLDLKRAAARSDPASGAGSGSGSALQNEGTGTSRPVSQVTLAAVGGAGATALAFLSFCIIFIIVRSCRKKSARPAAGVGDTGMEDAKAIRGSASQGPLTESWKDGNPLKKPPPAVAPSSGEEGELHYATLSFHKVKPQDPQGQEATDSEYSEIKIHKRETAETQACLRNHNPSSKEVRGSHG

SEQ ID NO: 6249 - protein, 460 aa, Artificial Sequence
  Description of Artificial Sequence: Synthetic Chimeric Antigen Receptor sequence
MALPVTALLLPLALLLHAARPGSGSGAQAAEVQLQQSGPELVKPGTSVRISCKTSGYTFTEYTIHWVKQSHGKSLEWIGNINPNNGGTTYNQKFEDKATLTVDKSSSTAYMELRSLTSEDSAVYYCAAGWNFDYWGQGTTVTVSSGGGGSGGGGSGGGGSDIVMTQSHKFMSTSVGDRVSIICKASQDVGTAVDWYQQKPGQSPKLLIYWASTRHTGVPDRFTGSGSGTDFTLTITNVQSEDLADYFCQQYNSYPLTFGAGTMLDLKRAAARSDPASGAGSGSGSAGTSRNRTGLTAAGITGLVLSILVLAAAAALLHYARARRKPGGLSATGTSSHSPSECQEPSSSRPSRIDPQEPTHSKPLAPMELEPMYSNANPGDSNPIYSQIWSIQHTKENSANCPMMHQEHEELTVLYSELKKTHPDDSAGEASSRGRAHEEDDEENYENVPRVLLASDHSHG

SEQ ID NO: 6250 - protein, 461 aa, Artificial Sequence
  Description of Artificial Sequence: Synthetic Chimeric Antigen Receptor sequence
MALPVTALLLPLALLLHAARPGSGSGAQAAEVQLQQSGPELVKPGTSVRISCKTSGYTFTEYTIHWVKQSHGKSLEWIGNINPNNGGTTYNQKFEDKATLTVDKSSSTAYMELRSLTSEDSAVYYCAAGWNFDYWGQGTTVTVSSGGGGSGGGGSGGGGSDIVMTQSHKFMSTSVGDRVSIICKASQDVGTAVDWYQQKPGQSPKLLIYWASTRHTGVPDRFTGSGSGTDFTLTITNVQSEDLADYFCQQYNSYPLTFGAGTMLDLKRAAARSDPASGAGSGSGSAGPSGDPSLSPTGSTPTPGPEDQPLTPTGLDPQSGLGRHLGVVTGVSVAFVLLLFLLLFLLLRHRHQSKHRTSAHFYRPAGAAGPEPKDQGLQKRASPVADIQEEILNAAVKDTQPKDGVEMDARAAASEAPQDVTYAQLHSLTLRREATEPPPSQEREPPAEPSIYAPLAIHSHG

SEQ ID NO: 6251 - protein, 464 aa, Artificial Sequence
  Description of Artificial Sequence: Synthetic Chimeric Antigen Receptor sequence
MALPVTALLLPLALLLHAARPGSGSGAQAAEVQLQQSGPELVKPGTSVRISCKTSGYTFTEYTIHWVKQSHGKSLEWIGNINPNNGGTTYNQKFEDKATLTVDKSSSTAYMELRSLTSEDSAVYYCAAGWNFDYWGQGTTVTVSSGGGGSGGGGSGGGGSDIVMTQSHKFMSTSVGDRVSIICKASQDVGTAVDWYQQKPGQSPKLLIYWASTRHTGVPDRFTGSGSGTDFTLTITNVQSEDLADYFCQQYNSYPLTFGAGTMLDLKRAAARSDPASGAGSGSGSAPYEWSDASDPLPVSVTGNPSSSWPSPTEPSFKTGIARHLHAVIRYSVAIILFTILPFFLLHRWCSKKKDAAVMNQEPAGHRTVNREDSDEQDPQEVTYAQLDHCIFTQRKITGPSQRSKRPSTDTSVCIELPNAEPRALSPAHEHHSQALMGSSRETTALSQTQLASSHVPAAGISHG

SEQ ID NO: 6252 - protein, 464 aa, Artificial Sequence
  Description of Artificial Sequence: Synthetic Chimeric Antigen Receptor sequence
MALPVTALLLPLALLLHAARPGSGSGAQAAEVQLQQSGPELVKPGTSVRISCKTSGYTFTEYTIHWVKQSHGKSLEWIGNINPNNGGTTYNQKFEDKATLTVDKSSSTAYMELRSLTSEDSAVYYCAAGWNFDYWGQGTTVTVSSGGGGSGGGGSGGGGSDIVMTQSHKFMSTSVGDRVSIICKASQDVGTAVDWYQQKPGQSPKLLIYWASTRHTGVPDRFTGSGSGTDFTLTITNVQSEDLADYFCQQYNSYPLTFGAGTMLDLKRAAARSDPASGAGSGSGSAPYEWSDPSDPLLVSVTGNSSSSSSSPTEPSSKTGIRRHLHILIGTSVAIILFIILFFFLLHCCCSNKKNAAVMDQEPAGDRTVNREDSDDQDPQEVTYAQLDHCVFTQTKITSPSQRPKTPPTDTTMYMELPNAKPRSLSPAHKHHSQALRGSSRETTALSQNRVASSHVPAAGISHG

SEQ ID NO: 6253 - protein, 468 aa, Artificial Sequence
  Description of Artificial Sequence: Synthetic Chimeric Antigen Receptor sequence
MALPVTALLLPLALLLHAARPGSGSGAQAAEVQLQQSGPELVKPGTSVRISCKTSGYTFTEYTIHWVKQSHGKSLEWIGNINPNNGGTTYNQKFEDKATLTVDKSSSTAYMELRSLTSEDSAVYYCAAGWNFDYWGQGTTVTVSSGGGGSGGGGSGGGGSDIVMTQSHKFMSTSVGDRVSIICKASQDVGTAVDWYQQKPGQSPKLLIYWASTRHTGVPDRFTGSGSGTDFTLTITNVQSEDLADYFCQQYNSYPLTFGAGTMLDLKRAAARSDPASGAGSGSGSAGPSMGSSPPPTGPISTPAGPEDQPLTPTGSDPQSGLGRHLGVVIGILVAVVLLLLLLLLLFLILRHRRQGKHWTSTQRKADFQHPAGAVGPEPTDRGLQWRSSPAADAQEENLYAAVKDTQPEDGVEMDTRAAASEAPQDVTYAQLHSLTLRRKATEPPPSQEREPPAEPSIYATLAIHSHG

SEQ ID NO: 6254 - protein, 495 aa, Artificial Sequence
  Description of Artificial Sequence: Synthetic Chimeric Antigen Receptor sequence
MALPVTALLLPLALLLHAARPGSGSGAQAAEVQLQQSGPELVKPGTSVRISCKTSGYTFTEYTIHWVKQSHGKSLEWIGNINPNNGGTTYNQKFEDKATLTVDKSSSTAYMELRSLTSEDSAVYYCAAGWNFDYWGQGTTVTVSSGGGGSGGGGSGGGGSDIVMTQSHKFMSTSVGDRVSIICKASQDVGTAVDWYQQKPGQSPKLLIYWASTRHTGVPDRFTGSGSGTDFTLTITNVQSEDLADYFCQQYNSYPLTFGAGTMLDLKRAAARSDPASGAGSGSGSAKNESAASSTGKTPAAEETVTTILGMLASPYHYLIIIVVLVIILAVVVVGFSCRKKFISYLKGICSGGGGGPERVHRVLFRRRSCPSRVPGAEDNARNETLSNRYLQPTQVSEQEIQGQELAELTGVTVELPEEPQRLLEQAEAEGCQRRRLLVPVNDADSADISTLLDASATLEEGHAKETIQDQLVGSEKLFYEEDEAGSATSCLSHG

SEQ ID NO: 6255 - protein, 501 aa, Artificial Sequence
  Description of Artificial Sequence: Synthetic Chimeric Antigen Receptor sequence
MALPVTALLLPLALLLHAARPGSGSGAQAAEVQLQQSGPELVKPGTSVRISCKTSGYTFTEYTIHWVKQSHGKSLEWIGNINPNNGGTTYNQKFEDKATLTVDKSSSTAYMELRSLTSEDSAVYYCAAGWNFDYWGQGTTVTVSSGGGGSGGGGSGGGGSDIVMTQSHKFMSTSVGDRVSIICKASQDVGTAVDWYQQKPGQSPKLLIYWASTRHTGVPDRFTGSGSGTDFTLTITNVQSEDLADYFCQQYNSYPLTFGAGTMLDLKRAAARSDPASGAGSGSGSAGHSGGSSLPPTGPPSTPGLGRYLEVLIGVSVAFVLLLFLLLFLLLRRQRHSKHRTSDQRKTDFQRPAGAAETEPKDRGLLRRSSPAADVQEENLYAAVKDTQSEDRVELDSQSPHDEDPQAVTYAPVKHSSPRREMASPPSSLSGEFLDTKDRQVEEDRQMDTEAAASEASQDVTYAQLHSLTLRRKATEPPPSQEGEPPAEPSIYATLAIHSHG

SEQ ID NO: 6256 - protein, 510 aa, Artificial Sequence
  Description of Artificial Sequence: Synthetic Chimeric Antigen Receptor sequence
MALPVTALLLPLALLLHAARPGSGSGAQAAEVQLQQSGPELVKPGTSVRISCKTSGYTFTEYTIHWVKQSHGKSLEWIGNINPNNGGTTYNQKFEDKATLTVDKSSSTAYMELRSLTSEDSAVYYCAAGWNFDYWGQGTTVTVSSGGGGSGGGGSGGGGSDIVMTQSHKFMSTSVGDRVSIICKASQDVGTAVDWYQQKPGQSPKLLIYWASTRHTGVPDRFTGSGSGTDFTLTITNVQSEDLADYFCQQYNSYPLTFGAGTMLDLKRAAARSDPASGAGSGSGSAVYSLPQLLGPSCSWEAEGLHCRCSFRAWPAPSLCWRLEEKPLEGNSSQGSFKVNSSSPGPWANSSLILHGGLNSDLKVSCKAWNIYGSQSGSVLLLQGRSNLGTGVVPAALGGAGVMALLCICLCLIFFLIVKARRKQAAGRPEKMDDEDPIMGTITSGSRKKPWPDSPGDQASPPGDAPPLEEQKELHYASLSFSEMKSREPKDQEAPSTTEYSEIKTSKSHG

SEQ ID NO: 6257 - protein, 519 aa, Artificial Sequence
  Description of Artificial Sequence: Synthetic Chimeric Antigen Receptor sequence
MALPVTALLLPLALLLHAARPGSGSGAQAAEVQLQQSGPELVKPGTSVRISCKTSGYTFTEYTIHWVKQSHGKSLEWIGNINPNNGGTTYNQKFEDKATLTVDKSSSTAYMELRSLTSEDSAVYYCAAGWNFDYWGQGTTVTVSSGGGGSGGGGSGGGGSDIVMTQSHKFMSTSVGDRVSIICKASQDVGTAVDWYQQKPGQSPKLLIYWASTRHTGVPDRFTGSGSGTDFTLTITNVQSEDLADYFCQQYNSYPLTFGAGTMLDLKRAAARSDPASGAGSGSGSAGSLEGPRPSPTRSVSTAAGPEDQPLMPTGSVPHSGLRRHWEVLIGVLVVSILLLSLLLFLLLQHWRQGKHRTLAQRQADFQRPPGAAEPEPKDGGLQRRSSPAADVQGENFCAAVKNTQPEDGVEMDTRQSPHDEDPQAVTYAKVKHSRPRREMASPPSPLSGEFLDTKDRQAEEDRQMDTEAAASEAPQDVTYAQLHSFTLRQKATEPPPSQEGASPAEPSVYATLAIHSHG

SEQ ID NO: 6258 - protein, 528 aa, Artificial Sequence
  Description of Artificial Sequence: Synthetic Chimeric Antigen Receptor sequence
MALPVTALLLPLALLLHAARPGSGSGAQAAEVQLQQSGPELVKPGTSVRISCKTSGYTFTEYTIHWVKQSHGKSLEWIGNINPNNGGTTYNQKFEDKATLTVDKSSSTAYMELRSLTSEDSAVYYCAAGWNFDYWGQGTTVTVSSGGGGSGGGGSGGGGSDIVMTQSHKFMSTSVGDRVSIICKASQDVGTAVDWYQQKPGQSPKLLIYWASTRHTGVPDRFTGSGSGTDFTLTITNVQSEDLADYFCQQYNSYPLTFGAGTMLDLKRAAARSDPASGAGSGSGSAVHKESGNGHNIWVILVVTLVVPLLLVAVLIVCCCIGSGCGGDPKCMDRVCFWRLGLLRGPGAEDNAHNEILSNADSLSTFVSEQQMESQEPADLTGVTVQSPGEAQCLLGPAEAEGSQRRRLLVPANGADPTETLMLFFDKFANIVPFDSWDQLMRQLDLTKNEIDVVRAGTAGPGDALYAMLMKWVNKTGRNASIHTLLDALERMEERHAKEKIQDLLVDSGKFIYLEDGTGSAVSLESHG

SEQ ID NO: 6259 - protein, 535 aa, Artificial Sequence
  Description of Artificial Sequence: Synthetic Chimeric Antigen Receptor sequence
MALPVTALLLPLALLLHAARPGSGSGAQAAEVQLQQSGPELVKPGTSVRISCKTSGYTFTEYTIHWVKQSHGKSLEWIGNINPNNGGTTYNQKFEDKATLTVDKSSSTAYMELRSLTSEDSAVYYCAAGWNFDYWGQGTTVTVSSGGGGSGGGGSGGGGSDIVMTQSHKFMSTSVGDRVSIICKASQDVGTAVDWYQQKPGQSPKLLIYWASTRHTGVPDRFTGSGSGTDFTLTITNVQSEDLADYFCQQYNSYPLTFGAGTMLDLKRAAARSDPASGAGSGSGSAVHYPPQLLGPSCSWEAEGLHCSCSSQASPAPSLRWWLGEELLEGNSSQGSFEVTPSSAGPWANSSLSLHGGLSSGLRLRCKAWNVHGAQSGSVFQLLPGKLEHGGGLGLGAALGAGVAALLAFCSCLVVFRVKICRKEARKRAAAEQDVPSTLGPISQGHQHECSAGSSQDHPPPGAATYTPGKGEEQELHYASLSFQGLRLWEPADQEAPSTTEYSEIKIHTGQPLRGPGFGLQLEREMSGMVPKSHG

SEQ ID NO: 6260 - protein, 545 aa, Artificial Sequence
  Description of Artificial Sequence: Synthetic Chimeric Antigen Receptor sequence
MALPVTALLLPLALLLHAARPGSGSGAQAAEVQLQQSGPELVKPGTSVRISCKTSGYTFTEYTIHWVKQSHGKSLEWIGNINPNNGGTTYNQKFEDKATLTVDKSSSTAYMELRSLTSEDSAVYYCAAGWNFDYWGQGTTVTVSSGGGGSGGGGSGGGGSDIVMTQSHKFMSTSVGDRVSIICKASQDVGTAVDWYQQKPGQSPKLLIYWASTRHTGVPDRFTGSGSGTDFTLTITNVQSEDLADYFCQQYNSYPLTFGAGTMLDLKRAAARSDPASGAGSGSGSAVHYSPKLLGPSCSWEAEGLHCSCSSQASPAPSLRWWLGEELLEGNSSQDSFEVTPSSAGPWANSSLSLHGGLSSGLRLRCEAWNVHGAQSGSILQLPDKKGLISTAFSNGAFLGIGITALLFLCLALIIMKILPKRRTQTETPRPRFSRHSTILDYINVVPTAGPLAQKRNQKATPNSPRTPLPPGAPSPESKKNQKKQYQLPSFPEPKSSTQAPESQESQEELHYATLNFPGVRPRPEARMPKGTQADYAEVKFQSHG

SEQ ID NO: 6261 - protein, 551 aa, Artificial Sequence
  Description of Artificial Sequence: Synthetic Chimeric Antigen Receptor sequence
MALPVTALLLPLALLLHAARPGSGSGAQAAEVQLQQSGPELVKPGTSVRISCKTSGYTFTEYTIHWVKQSHGKSLEWIGNINPNNGGTTYNQKFEDKATLTVDKSSSTAYMELRSLTSEDSAVYYCAAGWNFDYWGQGTTVTVSSGGGGSGGGGSGGGGSDIVMTQSHKFMSTSVGDRVSIICKASQDVGTAVDWYQQKPGQSPKLLIYWASTRHTGVPDRFTGSGSGTDFTLTITNVQSEDLADYFCQQYNSYPLTFGAGTMLDLKRAAARSDPASGAGSGSGSAVHKESGTKHSGEAPAVEETVTSSPGTPASPCSLSGIIIGVTVAAVVLIVAVFVCKSLLWKKVLPYLKGICSGGGGDPERVDRSSQRPGAEDNVLNEIVSILQPTQVPEQEMEVQEPAEPTGVNMLSPGESEHLLEPAEAERSQRRRLLVPANEGDPTETLRQCFDDFADLVPFDSWEPLMRKLGLMDNEIKVAKAEAAGHRDTLYTMLIKWVNKTGRDASVHTLLDALETLGERLAKQKIEDHLLSSGKFMYLEGNADSAMSSHG

SEQ ID NO: 6262 - protein, 670 aa, Artificial Sequence
  Description of Artificial Sequence: Synthetic Chimeric Antigen Receptor sequence
MALPVTALLLPLALLLHAEVQLQQSGPELVKPGTSVRISCKTSGYTFTEYTIHWVKQSHGKSLEWIGNINPNNGGTTYNQKFEDKATLTVDKSSSTAYMELRSLTSEDSAVYYCAAGWNFDYWGQGTTVTVSSGGGGSGGGGSGGGGSDIVMTQSHKFMSTSVGDRVSIICKASQDVGTAVDWYQQKPGQSPKLLIYWASTRHTGVPDRFTGSGSGTDFTLTITNVQSEDLADYFCQQYNSYPLTFGAGTMLDLKRAAATERRAEVPTAHPSPSPRPAGQFQTLVVGVVGGLLGSLVLLVWVLAVICSRAARGTIGARRTGQPLKEDPSAVPVFSVDYGELDFQWREKTPEPPVPCVPEQTEYATIVFPSGMGTSSPARRGSADGPRSAQPLRPEDGHCSWPLSHGGSGEGRGSLLTCGDVEENPGPHMVSKGEELFTGVVPILVELDGDVNGHKFSVSGEGEGDATYGKLTLKFICTTGKLPVPWPTLVTTLTYGVQCFSRYPDHMKQHDFFKSAMPEGYVQERTIFFKDDGNYKTRAEVKFEGDTLVNRIELKGIDFKEDGNILGHKLEYNYNSHNVYIMADKQKNGIKVNFKIRHNIEDGSVQLADHYQQNTPIGDGPVLLPDNHYLSTQSALSKDPNEKRDHMVLLEFVTAAGITLGMDELYKAAD

SEQ ID NO: 6263 - protein, 759 aa, Artificial Sequence
  Description of Artificial Sequence: Synthetic Chimeric Antigen Receptor sequence
MALPVTALLLPLALLLHAARPGSGSGAQAAEVQLQQSGPELVKPGTSVRISCKTSGYTFTEYTIHWVKQSHGKSLEWIGNINPNNGGTTYNQKFEDKATLTVDKSSSTAYMELRSLTSEDSAVYYCAAGWNFDYWGQGTTVTVSSGGGGSGGGGSGGGGSDIVMTQSHKFMSTSVGDRVSIICKASQDVGTAVDWYQQKPGQSPKLLIYWASTRHTGVPDRFTGSGSGTDFTLTITNVQSEDLADYFCQQYNSYPLTFGAGTMLDLKRAAARSDPASGAGSGSGSAKNESAASSTGKTPAAEETVTTILGMLASPYHYLIIIVVLVIILAVVVVGFSCRKKFISYLKGICSGGGGGPERVHRVLFRRRSCPSRVPGAEDNARNETLSNRYLQPTQVSEQEIQGQELAELTGVTVELPEEPQRLLEQAEAEGCQRRRLLVPVNDADSADISTLLDASATLEEGHAKETIQDQLVGSEKLFYEEDEAGSATSCLSHGGSGEGRGSLLTCGDVEENPGPHMVSKGEELFTGVVPILVELDGDVNGHKFSVSGEGEGDATYGKLTLKFICTTGKLPVPWPTLVTTLTYGVQCFSRYPDHMKQHDFFKSAMPEGYVQERTIFFKDDGNYKTRAEVKFEGDTLVNRIELKGIDFKEDGNILGHKLEYNYNSHNVYIMADKQKNGIKVNFKIRHNIEDGSVQLADHYQQNTPIGDGPVLLPDNHYLSTQSALSKDPNEKRDHMVLLEFVTAAGITLGMDELYKAAD

SEQ ID NO: 6264 - protein, 792 aa, Artificial Sequence
  Description of Artificial Sequence: Synthetic Chimeric Antigen Receptor sequence
MALPVTALLLPLALLLHAARPGSGSGAQAAEVQLQQSGPELVKPGTSVRISCKTSGYTFTEYTIHWVKQSHGKSLEWIGNINPNNGGTTYNQKFEDKATLTVDKSSSTAYMELRSLTSEDSAVYYCAAGWNFDYWGQGTTVTVSSGGGGSGGGGSGGGGSDIVMTQSHKFMSTSVGDRVSIICKASQDVGTAVDWYQQKPGQSPKLLIYWASTRHTGVPDRFTGSGSGTDFTLTITNVQSEDLADYFCQQYNSYPLTFGAGTMLDLKRAAARSDPASGAGSGSGSAVHKESGNGHNIWVILVVTLVVPLLLVAVLIVCCCIGSGCGGDPKCMDRVCFWRLGLLRGPGAEDNAHNEILSNADSLSTFVSEQQMESQEPADLTGVTVQSPGEAQCLLGPAEAEGSQRRRLLVPANGADPTETLMLFFDKFANIVPFDSWDQLMRQLDLTKNEIDVVRAGTAGPGDALYAMLMKWVNKTGRNASIHTLLDALERMEERHAKEKIQDLLVDSGKFIYLEDGTGSAVSLESHGGSGEGRGSLLTCGDVEENPGPHMVSKGEELFTGVVPILVELDGDVNGHKFSVSGEGEGDATYGKLTLKFICTTGKLPVPWPTLVTTLTYGVQCFSRYPDHMKQHDFFKSAMPEGYVQERTIFFKDDGNYKTRAEVKFEGDTLVNRIELKGIDFKEDGNILGHKLEYNYNSHNVYIMADKQKNGIKVNFKIRHNIEDGSVQLADHYQQNTPIGDGPVLLPDNHYLSTQSALSKDPNEKRDHMVLLEFVTAAGITLGMDELYKAAD

SEQ ID NO: 6265 - protein, 815 aa, Artificial Sequence
  Description of Artificial Sequence: Synthetic Chimeric Antigen Receptor sequence
MALPVTALLLPLALLLHAARPGSGSGAQAAEVQLQQSGPELVKPGTSVRISCKTSGYTFTEYTIHWVKQSHGKSLEWIGNINPNNGGTTYNQKFEDKATLTVDKSSSTAYMELRSLTSEDSAVYYCAAGWNFDYWGQGTTVTVSSGGGGSGGGGSGGGGSDIVMTQSHKFMSTSVGDRVSIICKASQDVGTAVDWYQQKPGQSPKLLIYWASTRHTGVPDRFTGSGSGTDFTLTITNVQSEDLADYFCQQYNSYPLTFGAGTMLDLKRAAARSDPASGAGSGSGSAVHKESGTKHSGEAPAVEETVTSSPGTPASPCSLSGIIIGVTVAAVVLIVAVFVCKSLLWKKVLPYLKGICSGGGGDPERVDRSSQRPGAEDNVLNEIVSILQPTQVPEQEMEVQEPAEPTGVNMLSPGESEHLLEPAEAERSQRRRLLVPANEGDPTETLRQCFDDFADLVPFDSWEPLMRKLGLMDNEIKVAKAEAAGHRDTLYTMLIKWVNKTGRDASVHTLLDALETLGERLAKQKIEDHLLSSGKFMYLEGNADSAMSSHGGSGEGRGSLLTCGDVEENPGPHMVSKGEELFTGVVPILVELDGDVNGHKFSVSGEGEGDATYGKLTLKFICTTGKLPVPWPTLVTTLTYGVQCFSRYPDHMKQHDFFKSAMPEGYVQERTIFFKDDGNYKTRAEVKFEGDTLVNRIELKGIDFKEDGNILGHKLEYNYNSHNVYIMADKQKNGIKVNFKIRHNIEDGSVQLADHYQQNTPIGDGPVLLPDNHYLSTQSALSKDPNEKRDHMVLLEFVTAAGITLGMDELYKAAD

SEQ ID NO: 6266 - protein, 346 aa, Artificial Sequence
  Description of Artificial Sequence: Synthetic Chimeric Antigen Receptor sequence
MDKDCEMKRTTLDSPLGKLELSGCEQGLHRIIFLGKGTSAADAVEVPAPAAVLGGPEPLMQATAWLNAYFHQPEAIEEFPVPALHHPVFQQESFTRQVLWKLLKVVKFGEVISYSHLAALAGNPAATAAVKTALSGNPVPILIPCHRVVQGDLDVGGYEGGLAVKEWLLAHEGHRLGKPGLGGGGGSGGGGSKRGRKKLLYIFKQPFMRPVQTTQEEDGCSCRFPEEEEGGCELRVKFSRSADAPAYKQGQNQLYNELNLGRREEYDVLDKRRGRDPEMGGKPRRKNPQEGLYNELQKDKMAEAYSEIGMKGERRRGKGHDGLYQGLSTATKDTYDALHMQALPPR

SEQ ID NO: 6267 - protein, 430 aa, Artificial Sequence
  Description of Artificial Sequence: Synthetic Chimeric Antigen Receptor sequence
EVKLQQSGPELVKPGASVKISCKTSGYTFTEYTMHWVKQSHGKSLEWIGGINPNNGGTSYNQKFKGKATLTVDKSSSTAYMELRSLTSEDSAVYYCALQGFAYWGQGTPLTVSSGGGGSGGGGSGGGGSMEIEITQTPALMSASPGEKVTMTCSASSSVSYMYWYQQKPRSSPKPWIYLTSNLASGVPARFSGSGSGTSYSLTISSMEAEDAATYYCQQWSSNPYTFGGGTRLELKGLAVSTISSFFPPGYQIYIWAPLAGTCGVLLLSLVITLYCKRGRKKLLYIFKQPFMRPVQTTQEEDGCSCRFPEEEEGGCELRVKFSRSADAPAYQQGQNQLYNELNLGRREEYDVLDKRRGRDPEMGGKPRRKNPQEGLYNELQKDKMAEAYSEIGMKGERRRGKGHDGLYQGLSTATKDTYDALHMQALPPR

SEQ ID NO: 6268 - protein, 432 aa, Artificial Sequence
  Description of Artificial Sequence: Synthetic Chimeric Antigen Receptor sequence
QVQLKESGPGLVAPSQTLSITCTVSGFSLTSYGVHWVRQPPGKGLEWLGVIWAGGFTNYNSALKSRLSISKDNSKSQVLLKMTSLQTDDTAMYYCARRGSSYSMDYWGQGTSVTVSSGGGGSGGGGSGGGGSEIVLSQSPAITAASLGQKVTITCSASSNVSYIHWYQQRSGTSPRPWIYEISKLASGVPVRFSGSGSGTSYSLTISSMEAEDAAIYYCQQWNYPLITFGSGTKLEIQGLAVSTISSFFPPGYQIYIWAPLAGTCGVLLLSLVITLYCKRGRKKLLYIFKQPFMRPVQTTQEEDGCSCRFPEEEEGGCELRVKFSRSADAPAYQQGQNQLYNELNLGRREEYDVLDKRRGRDPEMGGKPRRKNPQEGLYNELQKDKMAEAYSEIGMKGERRRGKGHDGLYQGLSTATKDTYDALHMQALPPR

SEQ ID NO: 6269 - protein, 433 aa, Artificial Sequence
  Description of Artificial Sequence: Synthetic Chimeric Antigen Receptor sequence
EVKLQQSGPELVKPGASVKISCKTSGYTFTEYTMHWVKQSHGKSLEWIGGINPNNGGTSYNQKFKGKATLTVDKSSSTAYMELRSLTSEDSAVYYCALQGFAYWGQGTPLTVSSGGGGSGGGGSGGGGSMEIEITQTPALMSASPGEKVTMTCSASSSVSYMYWYQQKPRSSPKPWIYLTSNLASGVPARFSGSGSGTSYSLTISSMEAEDAATYYCQQWSSNPYTFGGGTRLELKGLAVSTISSFFPPGYQIISFFLALTSTALLFLLFFLTLRFSVVKRGRKKLLYIFKQPFMRPVQTTQEEDGCSCRFPEEEEGGCELRVKFSRSADAPAYQQGQNQLYNELNLGRREEYDVLDKRRGRDPEMGGKPRRKNPQEGLYNELQKDKMAEAYSEIGMKGERRRGKGHDGLYQGLSTATKDTYDALHMQALPPR

SEQ ID NO: 6270 - protein, 434 aa, Artificial Sequence
  Description of Artificial Sequence: Synthetic Chimeric Antigen Receptor sequence
EVKLVESGGGLVKPGGSLKLSCAASGFTFSSYAMSWVRQTPEKRLEWVASISTGASAYFPDSVKGRFTISRDNARNILYLQMSSLRSEDTAMYYCARITTSTWYFDVWGAGTTVTVSSGGGGSGGGGSGGGGSDIKMTQSPSSMYASLGERVTITCKASQDINSYLSWFQQKPGKSPKTLIYRANRLVDGVPSRFSGSGSGQDYSLTISSLEYEDMGIYYCLQYDEFPYTFGGGTKLEIKGLAVSTISSFFPPGYQIYIWAPLAGTCGVLLLSLVITLYCKRGRKKLLYIFKQPFMRPVQTTQEEDGCSCRFPEEEEGGCELRVKFSRSADAPAYQQGQNQLYNELNLGRREEYDVLDKRRGRDPEMGGKPRRKNPQEGLYNELQKDKMAEAYSEIGMKGERRRGKGHDGLYQGLSTATKDTYDALHMQALPPR

SEQ ID NO: 6271 - protein, 435 aa, Artificial Sequence
  Description of Artificial Sequence: Synthetic Chimeric Antigen Receptor sequence
EVKLVESGGGLVKPGGSLKLSCAASGFTFSSYAMSWVRQIPEKRLEWVASISRGGTTYYPDSVKGRFTISRDNVRNILYLQMSSLRSEDTAMYYCGRYDYDGYYAMDYWGQGTSVTVSSGGGGSGGGGSGGGGSDIKMTQSPSSMYASLGERVTITCKASPDINSYLSWFQQKPGKSPKTLIYRANRLVDGVPSRFSGGGSGQDYSLTINSLEYEDMGIYYCLQYDEFPYTFGGGTKLEMKGLAVSTISSFFPPGYQIYIWAPLAGTCGVLLLSLVITLYCKRGRKKLLYIFKQPFMRPVQTTQEEDGCSCRFPEEEEGGCELRVKFSRSADAPAYQQGQNQLYNELNLGRREEYDVLDKRRGRDPEMGGKPRRKNPQEGLYNELQKDKMAEAYSEIGMKGERRRGKGHDGLYQGLSTATKDTYDALHMQALPPR

SEQ ID NO: 6272 - protein, 435 aa, Artificial Sequence
  Description of Artificial Sequence: Synthetic Chimeric Antigen Receptor sequence
EVQLQQSGPELEKPGASVKISCKASGFAFTGYNMNWVKQTNGKSLEWIGSIDPYYGGSTYNQKFKDKATLTVDKSSSTAYMQLKSLTSDDSAVYYCARSPGGDYAMDYWGQGTSVTVSSGGGGSGGGGSGGGGSDIKMTQSPSSMYASVGERVTITCKASQGINSYSGWFQQKPGKSPKTLIYRGNRLVDGVPSRFSGSGSGQDYSLTISSLEYEDMGIYYCLQYDEFPYTFGGGTKLEIKGLAVSTISSFFPPGYQIYIWAPLAGTCGVLLLSLVITLYCKRGRKKLLYIFKQPFMRPVQTTQEEDGCSCRFPEEEEGGCELRVKFSRSADAPAYQQGQNQLYNELNLGRREEYDVLDKRRGRDPEMGGKPRRKNPQEGLYNELQKDKMAEAYSEIGMKGERRRGKGHDGLYQGLSTATKDTYDALHMQALPPR

SEQ ID NO: 6273 - protein, 435 aa, Artificial Sequence
  Description of Artificial Sequence: Synthetic Chimeric Antigen Receptor sequence
QVQLKESGPGLVAPSQTLSITCTVSGFSLTSYGVHWVRQPPGKGLEWLGVIWAGGFTNYNSALKSRLSISKDNSKSQVLLKMTSLQTDDTAMYYCARRGSSYSMDYWGQGTSVTVSSGGGGSGGGGSGGGGSEIVLSQSPAITAASLGQKVTITCSASSNVSYIHWYQQRSGTSPRPWIYEISKLASGVPVRFSGSGSGTSYSLTISSMEAEDAAIYYCQQWNYPLITFGSGTKLEIQGLAVSTISSFFPPGYQIISFFLALTSTALLFLLFFLTLRFSVVKRGRKKLLYIFKQPFMRPVQTTQEEDGCSCRFPEEEEGGCELRVKFSRSADAPAYQQGQNQLYNELNLGRREEYDVLDKRRGRDPEMGGKPRRKNPQEGLYNELQKDKMAEAYSEIGMKGERRRGKGHDGLYQGLSTATKDTYDALHMQALPPR

SEQ ID NO: 6274 - protein, 435 aa, Artificial Sequence
  Description of Artificial Sequence: Synthetic Chimeric Antigen Receptor sequence
QVQLQQPGAELVKPGTSVKLSCKASGYNFTNYWINWVKLRPGQGLEWIGEIYPGSGSTNYNEKFKSKATLTADTSSSTAYMQLSSLASEDSALYYCARDGNYYAMDYWGQGTSVTVSSGGGGSGGGGSGGGGSDIQMTQTTSSLSASLGDRVTITCRASQDINNYLNWYQQKPDGTVKLLIYYTSALHSGVPSRFSGSGSGTDYSLTISNLEQEDIATYFCQQGNTLPPYTFGGGTKLEIKGLAVSTISSFFPPGYQIYIWAPLAGTCGVLLLSLVITLYCKRGRKKLLYIFKQPFMRPVQTTQEEDGCSCRFPEEEEGGCELRVKFSRSADAPAYQQGQNQLYNELNLGRREEYDVLDKRRGRDPEMGGKPRRKNPQEGLYNELQKDKMAEAYSEIGMKGERRRGKGHDGLYQGLSTATKDTYDALHMQALPPR

SEQ ID NO: 6275 - protein, 436 aa, Artificial Sequence
  Description of Artificial Sequence: Synthetic Chimeric Antigen Receptor sequence
EVKLQESGAELARPGASVKMSCKASGYTFTSYTMHWVKQRPGQGLEWIGYINPSSGYTEYNQKFKDKTTLTADKSSSTAYMQLSSLTSGDSAVYYCARRVLWLRRGDYWGQGTILTVSAGGGGSGGGGSGGGGSMEVLITQTPSSLSASLGERVSLTCRASQDIGSSLNWLQQEPDGTIKRLIYATSSLDSGVPKRFSGSRSGSDYSLTISSLESEDFVDYYCLQYASSPYTFGGGTKLELKGLAVSTISSFFPPGYQIYIWAPLAGTCGVLLLSLVITLYCKRGRKKLLYIFKQPFMRPVQTTQEEDGCSCRFPEEEEGGCELRVKFSRSADAPAYQQGQNQLYNELNLGRREEYDVLDKRRGRDPEMGGKPRRKNPQEGLYNELQKDKMAEAYSEIGMKGERRRGKGHDGLYQGLSTATKDTYDALHMQALPPR

SEQ ID NO: 6276 - protein, 437 aa, Artificial Sequence
  Description of Artificial Sequence: Synthetic Chimeric Antigen Receptor sequence
EVKLVESGGGLVKPGGSLKLSCAASGFTFSSYAMSWVRQTPEKRLEWVASISTGASAYFPDSVKGRFTISRDNARNILYLQMSSLRSEDTAMYYCARITTSTWYFDVWGAGTTVTVSSGGGGSGGGGSGGGGSDIKMTQSPSSMYASLGERVTITCKASQDINSYLSWFQQKPGKSPKTLIYRANRLVDGVPSRFSGSGSGQDYSLTISSLEYEDMGIYYCLQYDEFPYTFGGGTKLEIKGLAVSTISSFFPPGYQIISFFLALTSTALLFLLFFLTLRFSVVKRGRKKLLYIFKQPFMRPVQTTQEEDGCSCRFPEEEEGGCELRVKFSRSADAPAYQQGQNQLYNELNLGRREEYDVLDKRRGRDPEMGGKPRRKNPQEGLYNELQKDKMAEAYSEIGMKGERRRGKGHDGLYQGLSTATKDTYDALHMQALPPR

SEQ ID NO: 6277 - protein, 437 aa, Artificial Sequence
  Description of Artificial Sequence: Synthetic Chimeric Antigen Receptor sequence
QVQLQQSGAELVRPGASVTLSCKASGYTFSDYEMHWVIQTPVHGLEWIGAIDPETGGTAYNQKFKGKAILTADKSSSTAYMELRSLTSEDSAVYYCTGYYDYDSFTYWGQGTLVTVSAGGGGSGGGGSGGGGSDIVMTQSQKIMSTTVGDRVSITCKASQNVDAAVAWYQQKPGQSPKLLIYSASNRYTGVPDRFTGSGSGTDFTLTISNMQSEDLADYFCQQYDIYPYTFGGGTKLEIKGLAVSTISSFFPPGYQIISFFLALTSTALLFLLFFLTLRFSVVKRGRKKLLYIFKQPFMRPVQTTQEEDGCSCRFPEEEEGGCELRVKFSRSADAPAYQQGQNQLYNELNLGRREEYDVLDKRRGRDPEMGGKPRRKNPQEGLYNELQKDKMAEAYSEIGMKGERRRGKGHDGLYQGLSTATKDTYDALHMQALPPR

SEQ ID NO: 6278 - protein, 438 aa, Artificial Sequence
  Description of Artificial Sequence: Synthetic Chimeric Antigen Receptor sequence
EVKLVESGGGLVKPGGSLKLSCAASGFTFSSYAMSWVRQIPEKRLEWVASISRGGTTYYPDSVKGRFTISRDNVRNILYLQMSSLRSEDTAMYYCGRYDYDGYYAMDYWGQGTSVTVSSGGGGSGGGGSGGGGSDIKMTQSPSSMYASLGERVTITCKASPDINSYLSWFQQKPGKSPKTLIYRANRLVDGVPSRFSGGGSGQDYSLTINSLEYEDMGIYYCLQYDEFPYTFGGGTKLEMKGLAVSTISSFFPPGYQIISFFLALTSTALLFLLFFLTLRFSVVKRGRKKLLYIFKQPFMRPVQTTQEEDGCSCRFPEEEEGGCELRVKFSRSADAPAYQQGQNQLYNELNLGRREEYDVLDKRRGRDPEMGGKPRRKNPQEGLYNELQKDKMAEAYSEIGMKGERRRGKGHDGLYQGLSTATKDTYDALHMQALPPR

SEQ ID NO: 6279 - protein, 438 aa, Artificial Sequence
  Description of Artificial Sequence: Synthetic Chimeric Antigen Receptor sequence
EVQLQQSGPELEKPGASVKISCKASGFAFTGYNMNWVKQTNGKSLEWIGSIDPYYGGSTYNQKFKDKATLTVDKSSSTAYMQLKSLTSDDSAVYYCARSPGGDYAMDYWGQGTSVTVSSGGGGSGGGGSGGGGSDIKMTQSPSSMYASVGERVTITCKASQGINSYSGWFQQKPGKSPKTLIYRGNRLVDGVPSRFSGSGSGQDYSLTISSLEYEDMGIYYCLQYDEFPYTFGGGTKLEIKGLAVSTISSFFPPGYQIISFFLALTSTALLFLLFFLTLRFSVVKRGRKKLLYIFKQPFMRPVQTTQEEDGCSCRFPEEEEGGCELRVKFSRSADAPAYQQGQNQLYNELNLGRREEYDVLDKRRGRDPEMGGKPRRKNPQEGLYNELQKDKMAEAYSEIGMKGERRRGKGHDGLYQGLSTATKDTYDALHMQALPPR

SEQ ID NO: 6280 - protein, 438 aa, Artificial Sequence
  Description of Artificial Sequence: Synthetic Chimeric Antigen Receptor sequence
QVQLQQPGAELVKPGTSVKLSCKASGYNFTNYWINWVKLRPGQGLEWIGEIYPGSGSTNYNEKFKSKATLTADTSSSTAYMQLSSLASEDSALYYCARDGNYYAMDYWGQGTSVTVSSGGGGSGGGGSGGGGSDIQMTQTTSSLSASLGDRVTITCRASQDINNYLNWYQQKPDGTVKLLIYYTSALHSGVPSRFSGSGSGTDYSLTISNLEQEDIATYFCQQGNTLPPYTFGGGTKLEIKGLAVSTISSFFPPGYQIISFFLALTSTALLFLLFFLTLRFSVVKRGRKKLLYIFKQPFMRPVQTTQEEDGCSCRFPEEEEGGCELRVKFSRSADAPAYQQGQNQLYNELNLGRREEYDVLDKRRGRDPEMGGKPRRKNPQEGLYNELQKDKMAEAYSEIGMKGERRRGKGHDGLYQGLSTATKDTYDALHMQALPPR

SEQ ID NO: 6281 - protein, 439 aa, Artificial Sequence
  Description of Artificial Sequence: Synthetic Chimeric Antigen Receptor sequence
EVKLQESGAELARPGASVKMSCKASGYTFTSYTMHWVKQRPGQGLEWIGYINPSSGYTEYNQKFKDKTTLTADKSSSTAYMQLSSLTSGDSAVYYCARRVLWLRRGDYWGQGTILTVSAGGGGSGGGGSGGGGSMEVLITQTPSSLSASLGERVSLTCRASQDIGSSLNWLQQEPDGTIKRLIYATSSLDSGVPKRFSGSRSGSDYSLTISSLESEDFVDYYCLQYASSPYTFGGGTKLELKGLAVSTISSFFPPGYQIISFFLALTSTALLFLLFFLTLRFSVVKRGRKKLLYIFKQPFMRPVQTTQEEDGCSCRFPEEEEGGCELRVKFSRSADAPAYQQGQNQLYNELNLGRREEYDVLDKRRGRDPEMGGKPRRKNPQEGLYNELQKDKMAEAYSEIGMKGERRRGKGHDGLYQGLSTATKDTYDALHMQALPPR

SEQ ID NO: 6282 - protein, 454 aa, Artificial Sequence
  Description of Artificial Sequence: Synthetic Chimeric Antigen Receptor sequence
MALPVTALLLPLALLLHAARPQVQLQESGPGLVKPSETLSLTCTVSGFSLTSYGYVHWVRQPPGKGLEWLGVIWAGGFTNYNPSLKSRLTISKDNSKNQVSLKLSSVTAADTAVYYCARRGSSYSMDYWGQGTLVTVSSGGGGSGGGGSGGGGSEIVLTQSPATLSLSPGERATLSCRASSNVSYIHWYQQKPGQAPRPWIYEISKLATGIPARFSGSGSGTDYTLTISSLEPEDFAVYYCQQWNYPLITFGQGTKLEIKGLAVSTISSFFPPGYQIYIWAPLAGTCGVLLLSLVITLYCKRGRKKLLYIFKQPFMRPVQTTQEEDGCSCRFPEEEEGGCELRVKFSRSADAPAYQQGQNQLYNELNLGRREEYDVLDKRRGRDPEMGGKPRRKNPQEGLYNELQKDKMAEAYSEIGMKGERRRGKGHDGLYQGLSTATKDTYDALHMQALPPR

SEQ ID NO: 6283 - protein, 455 aa, Artificial Sequence
  Description of Artificial Sequence: Synthetic Chimeric Antigen Receptor sequence
MALPVTALLLPLALLLHAARPEVQLVESGGGLVKPGGSLRLSCAASGFTFSSYAMSWVRQAPGKGLEWVASISTGASAYFADSVKGRFTISRDNAKNSLYLQMNSLRAEDTAVYYCARITTSTWYFDVWGQGTTVTVSSGGGGSGGGGSGGGGSDIQMTQSPSSLSASVGDRVTITCRASQDINSYLSWFQQKPGKAPKTLIYRANRLQSGVPSRFSGSGSGQDYTLTISSLQPEDFATYYCLQYDEFPYTFGQGTKLEIKGLAVSTISSFFPPGYQIYIWAPLAGTCGVLLLSLVITLYCKRGRKKLLYIFKQPFMRPVQTTQEEDGCSCRFPEEEEGGCELRVKFSRSADAPAYQQGQNQLYNELNLGRREEYDVLDKRRGRDPEMGGKPRRKNPQEGLYNELQKDKMAEAYSEIGMKGERRRGKGHDGLYQGLSTATKDTYDALHMQALPPR

SEQ ID NO: 6284 - protein, 457 aa, Artificial Sequence
  Description of Artificial Sequence: Synthetic Chimeric Antigen Receptor sequence
MALPVTALLLPLALLLHAARPQVQLQESGPGLVKPSETLSLTCTVSGFSLTSYGYVHWVRQPPGKGLEWLGVIWAGGFTNYNPSLKSRLTISKDNSKNQVSLKLSSVTAADTAVYYCARRGSSYSMDYWGQGTLVTVSSGGGGSGGGGSGGGGSEIVLTQSPATLSLSPGERATLSCRASSNVSYIHWYQQKPGQAPRPWIYEISKLATGIPARFSGSGSGTDYTLTISSLEPEDFAVYYCQQWNYPLITFGQGTKLEIKGLAVSTISSFFPPGYQIISFFLALTSTALLFLLFFLTLRFSVVKRGRKKLLYIFKQPFMRPVQTTQEEDGCSCRFPEEEEGGCELRVKFSRSADAPAYQQGQNQLYNELNLGRREEYDVLDKRRGRDPEMGGKPRRKNPQEGLYNELQKDKMAEAYSEIGMKGERRRGKGHDGLYQGLSTATKDTYDALHMQALPPR

SEQ ID NO: 6285 - protein, 458 aa, Artificial Sequence
  Description of Artificial Sequence: Synthetic Chimeric Antigen Receptor sequence
MALPVTALLLPLALLLHAARPEVQLVESGGGLVKPGGSLRLSCAASGFTFSSYAMSWVRQAPGKGLEWVASISTGASAYFADSVKGRFTISRDNAKNSLYLQMNSLRAEDTAVYYCARITTSTWYFDVWGQGTTVTVSSGGGGSGGGGSGGGGSDIQMTQSPSSLSASVGDRVTITCRASQDINSYLSWFQQKPGKAPKTLIYRANRLQSGVPSRFSGSGSGQDYTLTISSLQPEDFATYYCLQYDEFPYTFGQGTKLEIKGLAVSTISSFFPPGYQIISFFLALTSTALLFLLFFLTLRFSVVKRGRKKLLYIFKQPFMRPVQTTQEEDGCSCRFPEEEEGGCELRVKFSRSADAPAYQQGQNQLYNELNLGRREEYDVLDKRRGRDPEMGGKPRRKNPQEGLYNELQKDKMAEAYSEIGMKGERRRGKGHDGLYQGLSTATKDTYDALHMQALPPR

SEQ ID NO: 6286 - protein, 459 aa, Artificial Sequence
  Description of Artificial Sequence: Synthetic Chimeric Antigen Receptor sequence
EVKLQQSGPELVKPGASVKISCKTSGYTFTEYTMHWVKQSHGKSLEWIGGINPNNGGTSYNQKFKGKATLTVDKSSSTAYMELRSLTSEDSAVYYCALQGFAYWGQGTPLTVSSGGGGSGGGGSGGGGSMEIEITQTPALMSASPGEKVTMTCSASSSVSYMYWYQQKPRSSPKPWIYLTSNLASGVPARFSGSGSGTSYSLTISSMEAEDAATYYCQQWSSNPYTFGGGTRLELKTTTPAPRPPTPAPTIASQPLSLRPEACRPAAGGAVHTRGLDFACDIYIWAPLAGTCGVLLLSLVITLYCKRGRKKLLYIFKQPFMRPVQTTQEEDGCSCRFPEEEEGGCELRVKFSRSADAPAYQQGQNQLYNELNLGRREEYDVLDKRRGRDPEMGGKPRRKNPQEGLYNELQKDKMAEAYSEIGMKGERRRGKGHDGLYQGLSTATKDTYDALHMQALPPR

SEQ ID NO: 6287 - protein, 461 aa, Artificial Sequence
  Description of Artificial Sequence: Synthetic Chimeric Antigen Receptor sequence
QVQLKESGPGLVAPSQTLSITCTVSGFSLTSYGVHWVRQPPGKGLEWLGVIWAGGFTNYNSALKSRLSISKDNSKSQVLLKMTSLQTDDTAMYYCARRGSSYSMDYWGQGTSVTVSSGGGGSGGGGSGGGGSEIVLSQSPAITAASLGQKVTITCSASSNVSYIHWYQQRSGTSPRPWIYEISKLASGVPVRFSGSGSGTSYSLTISSMEAEDAAIYYCQQWNYPLITFGSGTKLEIQTTTPAPRPPTPAPTIASQPLSLRPEACRPAAGGAVHTRGLDFACDIYIWAPLAGTCGVLLLSLVITLYCKRGRKKLLYIFKQPFMRPVQTTQEEDGCSCRFPEEEEGGCELRVKFSRSADAPAYQQGQNQLYNELNLGRREEYDVLDKRRGRDPEMGGKPRRKNPQEGLYNELQKDKMAEAYSEIGMKGERRRGKGHDGLYQGLSTATKDTYDALHMQALPPR

SEQ ID NO: 6288 - protein, 462 aa, Artificial Sequence
  Description of Artificial Sequence: Synthetic Chimeric Antigen Receptor sequence
EVKLQQSGPELVKPGASVKISCKTSGYTFTEYTMHWVKQSHGKSLEWIGGINPNNGGTSYNQKFKGKATLTVDKSSSTAYMELRSLTSEDSAVYYCALQGFAYWGQGTPLTVSSGGGGSGGGGSGGGGSMEIEITQTPALMSASPGEKVTMTCSASSSVSYMYWYQQKPRSSPKPWIYLTSNLASGVPARFSGSGSGTSYSLTISSMEAEDAATYYCQQWSSNPYTFGGGTRLELKTTTPAPRPPTPAPTIASQPLSLRPEACRPAAGGAVHTRGLDFACDIISFFLALTSTALLFLLFFLTLRFSVVKRGRKKLLYIFKQPFMRPVQTTQEEDGCSCRFPEEEEGGCELRVKFSRSADAPAYQQGQNQLYNELNLGRREEYDVLDKRRGRDPEMGGKPRRKNPQEGLYNELQKDKMAEAYSEIGMKGERRRGKGHDGLYQGLSTATKDTYDALHMQALPPR

SEQ ID NO: 6289 - protein, 463 aa, Artificial Sequence
  Description of Artificial Sequence: Synthetic Chimeric Antigen Receptor sequence
EVKLVESGGGLVKPGGSLKLSCAASGFTFSSYAMSWVRQTPEKRLEWVASISTGASAYFPDSVKGRFTISRDNARNILYLQMSSLRSEDTAMYYCARITTSTWYFDVWGAGTTVTVSSGGGGSGGGGSGGGGSDIKMTQSPSSMYASLGERVTITCKASQDINSYLSWFQQKPGKSPKTLIYRANRLVDGVPSRFSGSGSGQDYSLTISSLEYEDMGIYYCLQYDEFPYTFGGGTKLEIKTTTPAPRPPTPAPTIASQPLSLRPEACRPAAGGAVHTRGLDFACDIYIWAPLAGTCGVLLLSLVITLYCKRGRKKLLYIFKQPFMRPVQTTQEEDGCSCRFPEEEEGGCELRVKFSRSADAPAYQQGQNQLYNELNLGRREEYDVLDKRRGRDPEMGGKPRRKNPQEGLYNELQKDKMAEAYSEIGMKGERRRGKGHDGLYQGLSTATKDTYDALHMQALPPR

SEQ ID NO: 6290 - protein, 463 aa, Artificial Sequence
  Description of Artificial Sequence: Synthetic Chimeric Antigen Receptor sequence
QVQLQQSGAELVRPGASVTLSCKASGYTFSDYEMHWVIQTPVHGLEWIGAIDPETGGTAYNQKFKGKAILTADKSSSTAYMELRSLTSEDSAVYYCTGYYDYDSFTYWGQGTLVTVSAGGGGSGGGGSGGGGSDIVMTQSQKIMSTTVGDRVSITCKASQNVDAAVAWYQQKPGQSPKLLIYSASNRYTGVPDRFTGSGSGTDFTLTISNMQSEDLADYFCQQYDIYPYTFGGGTKLEIKTTTPAPRPPTPAPTIASQPLSLRPEACRPAAGGAVHTRGLDFACDIYIWAPLAGTCGVLLLSLVITLYCKRGRKKLLYIFKQPFMRPVQTTQEEDGCSCRFPEEEEGGCELRVKFSRSADAPAYQQGQNQLYNELNLGRREEYDVLDKRRGRDPEMGGKPRRKNPQEGLYNELQKDKMAEAYSEIGMKGERRRGKGHDGLYQGLSTATKDTYDALHMQALPPR

SEQ ID NO: 6291 - protein, 464 aa, Artificial Sequence
  Description of Artificial Sequence: Synthetic Chimeric Antigen Receptor sequence
EVKLVESGGGLVKPGGSLKLSCAASGFTFSSYAMSWVRQIPEKRLEWVASISRGGTTYYPDSVKGRFTISRDNVRNILYLQMSSLRSEDTAMYYCGRYDYDGYYAMDYWGQGTSVTVSSGGGGSGGGGSGGGGSDIKMTQSPSSMYASLGERVTITCKASPDINSYLSWFQQKPGKSPKTLIYRANRLVDGVPSRFSGGGSGQDYSLTINSLEYEDMGIYYCLQYDEFPYTFGGGTKLEMKTTTPAPRPPTPAPTIASQPLSLRPEACRPAAGGAVHTRGLDFACDIYIWAPLAGTCGVLLLSLVITLYCKRGRKKLLYIFKQPFMRPVQTTQEEDGCSCRFPEEEEGGCELRVKFSRSADAPAYQQGQNQLYNELNLGRREEYDVLDKRRGRDPEMGGKPRRKNPQEGLYNELQKDKMAEAYSEIGMKGERRRGKGHDGLYQGLSTATKDTYDALHMQALPPR

SEQ ID NO: 6292 - protein, 464 aa, Artificial Sequence
  Description of Artificial Sequence: Synthetic Chimeric Antigen Receptor sequence
EVQLQQSGPELEKPGASVKISCKASGFAFTGYNMNWVKQTNGKSLEWIGSIDPYYGGSTYNQKFKDKATLTVDKSSSTAYMQLKSLTSDDSAVYYCARSPGGDYAMDYWGQGTSVTVSSGGGGSGGGGSGGGGSDIKMTQSPSSMYASVGERVTITCKASQGINSYSGWFQQKPGKSPKTLIYRGNRLVDGVPSRFSGSGSGQDYSLTISSLEYEDMGIYYCLQYDEFPYTFGGGTKLEIKTTTPAPRPPTPAPTIASQPLSLRPEACRPAAGGAVHTRGLDFACDIYIWAPLAGTCGVLLLSLVITLYCKRGRKKLLYIFKQPFMRPVQTTQEEDGCSCRFPEEEEGGCELRVKFSRSADAPAYQQGQNQLYNELNLGRREEYDVLDKRRGRDPEMGGKPRRKNPQEGLYNELQKDKMAEAYSEIGMKGERRRGKGHDGLYQGLSTATKDTYDALHMQALPPR

SEQ ID NO: 6293 - protein, 464 aa, Artificial Sequence
  Description of Artificial Sequence: Synthetic Chimeric Antigen Receptor sequence
QVQLKESGPGLVAPSQTLSITCTVSGFSLTSYGVHWVRQPPGKGLEWLGVIWAGGFTNYNSALKSRLSISKDNSKSQVLLKMTSLQTDDTAMYYCARRGSSYSMDYWGQGTSVTVSSGGGGSGGGGSGGGGSEIVLSQSPAITAASLGQKVTITCSASSNVSYIHWYQQRSGTSPRPWIYEISKLASGVPVRFSGSGSGTSYSLTISSMEAEDAAIYYCQQWNYPLITFGSGTKLEIQTTTPAPRPPTPAPTIASQPLSLRPEACRPAAGGAVHTRGLDFACDIISFFLALTSTALLFLLFFLTLRFSVVKRGRKKLLYIFKQPFMRPVQTTQEEDGCSCRFPEEEEGGCELRVKFSRSADAPAYQQGQNQLYNELNLGRREEYDVLDKRRGRDPEMGGKPRRKNPQEGLYNELQKDKMAEAYSEIGMKGERRRGKGHDGLYQGLSTATKDTYDALHMQALPPR

SEQ ID NO: 6294 - protein, 464 aa, Artificial Sequence
  Description of Artificial Sequence: Synthetic Chimeric Antigen Receptor sequence
QVQLQQPGAELVKPGTSVKLSCKASGYNFTNYWINWVKLRPGQGLEWIGEIYPGSGSTNYNEKFKSKATLTADTSSSTAYMQLSSLASEDSALYYCARDGNYYAMDYWGQGTSVTVSSGGGGSGGGGSGGGGSDIQMTQTTSSLSASLGDRVTITCRASQDINNYLNWYQQKPDGTVKLLIYYTSALHSGVPSRFSGSGSGTDYSLTISNLEQEDIATYFCQQGNTLPPYTFGGGTKLEIKTTTPAPRPPTPAPTIASQPLSLRPEACRPAAGGAVHTRGLDFACDIYIWAPLAGTCGVLLLSLVITLYCKRGRKKLLYIFKQPFMRPVQTTQEEDGCSCRFPEEEEGGCELRVKFSRSADAPAYQQGQNQLYNELNLGRREEYDVLDKRRGRDPEMGGKPRRKNPQEGLYNELQKDKMAEAYSEIGMKGERRRGKGHDGLYQGLSTATKDTYDALHMQALPPR

SEQ ID NO: 6295 - protein, 466 aa, Artificial Sequence
  Description of Artificial Sequence: Synthetic Chimeric Antigen Receptor sequence
EVKLVESGGGLVKPGGSLKLSCAASGFTFSSYAMSWVRQTPEKRLEWVASISTGASAYFPDSVKGRFTISRDNARNILYLQMSSLRSEDTAMYYCARITTSTWYFDVWGAGTTVTVSSGGGGSGGGGSGGGGSDIKMTQSPSSMYASLGERVTITCKASQDINSYLSWFQQKPGKSPKTLIYRANRLVDGVPSRFSGSGSGQDYSLTISSLEYEDMGIYYCLQYDEFPYTFGGGTKLEIKTTTPAPRPPTPAPTIASQPLSLRPEACRPAAGGAVHTRGLDFACDIISFFLALTSTALLFLLFFLTLRFSVVKRGRKKLLYIFKQPFMRPVQTTQEEDGCSCRFPEEEEGGCELRVKFSRSADAPAYQQGQNQLYNELNLGRREEYDVLDKRRGRDPEMGGKPRRKNPQEGLYNELQKDKMAEAYSEIGMKGERRRGKGHDGLYQGLSTATKDTYDALHMQALPPR

SEQ ID NO: 6296 - protein, 466 aa, Artificial Sequence
  Description of Artificial Sequence: Synthetic Chimeric Antigen Receptor sequence
QVQLQQSGAELVRPGASVTLSCKASGYTFSDYEMHWVIQTPVHGLEWIGAIDPETGGTAYNQKFKGKAILTADKSSSTAYMELRSLTSEDSAVYYCTGYYDYDSFTYWGQGTLVTVSAGGGGSGGGGSGGGGSDIVMTQSQKIMSTTVGDRVSITCKASQNVDAAVAWYQQKPGQSPKLLIYSASNRYTGVPDRFTGSGSGTDFTLTISNMQSEDLADYFCQQYDIYPYTFGGGTKLEIKTTTPAPRPPTPAPTIASQPLSLRPEACRPAAGGAVHTRGLDFACDIISFFLALTSTALLFLLFFLTLRFSVVKRGRKKLLYIFKQPFMRPVQTTQEEDGCSCRFPEEEEGGCELRVKFSRSADAPAYQQGQNQLYNELNLGRREEYDVLDKRRGRDPEMGGKPRRKNPQEGLYNELQKDKMAEAYSEIGMKGERRRGKGHDGLYQGLSTATKDTYDALHMQALPPR

SEQ ID NO: 6297 - protein, 467 aa, Artificial Sequence
  Description of Artificial Sequence: Synthetic Chimeric Antigen Receptor sequence
EVKLVESGGGLVKPGGSLKLSCAASGFTFSSYAMSWVRQIPEKRLEWVASISRGGTTYYPDSVKGRFTISRDNVRNILYLQMSSLRSEDTAMYYCGRYDYDGYYAMDYWGQGTSVTVSSGGGGSGGGGSGGGGSDIKMTQSPSSMYASLGERVTITCKASPDINSYLSWFQQKPGKSPKTLIYRANRLVDGVPSRFSGGGSGQDYSLTINSLEYEDMGIYYCLQYDEFPYTFGGGTKLEMKTTTPAPRPPTPAPTIASQPLSLRPEACRPAAGGAVHTRGLDFACDIISFFLALTSTALLFLLFFLTLRFSVVKRGRKKLLYIFKQPFMRPVQTTQEEDGCSCRFPEEEEGGCELRVKFSRSADAPAYQQGQNQLYNELNLGRREEYDVLDKRRGRDPEMGGKPRRKNPQEGLYNELQKDKMAEAYSEIGMKGERRRGKGHDGLYQGLSTATKDTYDALHMQALPPR

SEQ ID NO: 6298 - protein, 467 aa, Artificial Sequence
  Description of Artificial Sequence: Synthetic Chimeric Antigen Receptor sequence
EVQLQQSGPELEKPGASVKISCKASGFAFTGYNMNWVKQTNGKSLEWIGSIDPYYGGSTYNQKFKDKATLTVDKSSSTAYMQLKSLTSDDSAVYYCARSPGGDYAMDYWGQGTSVTVSSGGGGSGGGGSGGGGSDIKMTQSPSSMYASVGERVTITCKASQGINSYSGWFQQKPGKSPKTLIYRGNRLVDGVPSRFSGSGSGQDYSLTISSLEYEDMGIYYCLQYDEFPYTFGGGTKLEIKTTTPAPRPPTPAPTIASQPLSLRPEACRPAAGGAVHTRGLDFACDIISFFLALTSTALLFLLFFLTLRFSVVKRGRKKLLYIFKQPFMRPVQTTQEEDGCSCRFPEEEEGGCELRVKFSRSADAPAYQQGQNQLYNELNLGRREEYDVLDKRRGRDPEMGGKPRRKNPQEGLYNELQKDKMAEAYSEIGMKGERRRGKGHDGLYQGLSTATKDTYDALHMQALPPR

SEQ ID NO: 6299 - protein, 467 aa, Artificial Sequence
  Description of Artificial Sequence: Synthetic Chimeric Antigen Receptor sequence
QVQLQQPGAELVKPGTSVKLSCKASGYNFTNYWINWVKLRPGQGLEWIGEIYPGSGSTNYNEKFKSKATLTADTSSSTAYMQLSSLASEDSALYYCARDGNYYAMDYWGQGTSVTVSSGGGGSGGGGSGGGGSDIQMTQTTSSLSASLGDRVTITCRASQDINNYLNWYQQKPDGTVKLLIYYTSALHSGVPSRFSGSGSGTDYSLTISNLEQEDIATYFCQQGNTLPPYTFGGGTKLEIKTTTPAPRPPTPAPTIASQPLSLRPEACRPAAGGAVHTRGLDFACDIISFFLALTSTALLFLLFFLTLRFSVVKRGRKKLLYIFKQPFMRPVQTTQEEDGCSCRFPEEEEGGCELRVKFSRSADAPAYQQGQNQLYNELNLGRREEYDVLDKRRGRDPEMGGKPRRKNPQEGLYNELQKDKMAEAYSEIGMKGERRRGKGHDGLYQGLSTATKDTYDALHMQALPPR

SEQ ID NO: 6300 - protein, 468 aa, Artificial Sequence
  Description of Artificial Sequence: Synthetic Chimeric Antigen Receptor sequence
EVKLQESGAELARPGASVKMSCKASGYTFTSYTMHWVKQRPGQGLEWIGYINPSSGYTEYNQKFKDKTTLTADKSSSTAYMQLSSLTSGDSAVYYCARRVLWLRRGDYWGQGTILTVSAGGGGSGGGGSGGGGSMEVLITQTPSSLSASLGERVSLTCRASQDIGSSLNWLQQEPDGTIKRLIYATSSLDSGVPKRFSGSRSGSDYSLTISSLESEDFVDYYCLQYASSPYTFGGGTKLELKTTTPAPRPPTPAPTIASQPLSLRPEACRPAAGGAVHTRGLDFACDIISFFLALTSTALLFLLFFLTLRFSVVKRGRKKLLYIFKQPFMRPVQTTQEEDGCSCRFPEEEEGGCELRVKFSRSADAPAYQQGQNQLYNELNLGRREEYDVLDKRRGRDPEMGGKPRRKNPQEGLYNELQKDKMAEAYSEIGMKGERRRGKGHDGLYQGLSTATKDTYDALHMQALPPR

SEQ ID NO: 6301 - protein, 483 aa, Artificial Sequence
  Description of Artificial Sequence: Synthetic Chimeric Antigen Receptor sequence
MALPVTALLLPLALLLHAARPEIVLTQSPGTLSLSPGERATLSCRASQSVSSSYLAWYQQKPGQAPRLLIYGASSRATGIPDRFSGSGSGTDFTLTISRLEPEDFAVYYCQQYGSSFGPGTKVDIKRGGGGSGGGGSGGGGSQVQLVQSGTEVKKPGSSVKVSCQASGGSLSSHGVSWLRQAPGQGLEWVGRIIPMFGVTDYAQKFQDRVTITADKSTSTVYMELISLGSDDTAVYFCARESRGATFEYWGQGTLVTVSSTTTPAPRPPTPAPTIASQPLSLRPEACRPAAGGAVHTRGLDFACDIYIWAPLAGTCGVLLLSLVITLYCKRGRKKLLYIFKQPFMRPVQTTQEEDGCSCRFPEEEEGGCELRVKFSRSADAPAYQQGQNQLYNELNLGRREEYDVLDKRRGRDPEMGGKPRRKNPQEGLYNELQKDKMAEAYSEIGMKGERRRGKGHDGLYQGLSTATKDTYDALHMQALPPR

SEQ ID NO: 6302 - protein, 483 aa, Artificial Sequence
  Description of Artificial Sequence: Synthetic Chimeric Antigen Receptor sequence
MALPVTALLLPLALLLHAARPQVQLQESGPGLVKPSETLSLTCTVSGFSLTSYGYVHWVRQPPGKGLEWLGVIWAGGFTNYNPSLKSRLTISKDNSKNQVSLKLSSVTAADTAVYYCARRGSSYSMDYWGQGTLVTVSSGGGGSGGGGSGGGGSEIVLTQSPATLSLSPGERATLSCRASSNVSYIHWYQQKPGQAPRPWIYEISKLATGIPARFSGSGSGTDYTLTISSLEPEDFAVYYCQQWNYPLITFGQGTKLEIKTTTPAPRPPTPAPTIASQPLSLRPEACRPAAGGAVHTRGLDFACDIYIWAPLAGTCGVLLLSLVITLYCKRGRKKLLYIFKQPFMRPVQTTQEEDGCSCRFPEEEEGGCELRVKFSRSADAPAYQQGQNQLYNELNLGRREEYDVLDKRRGRDPEMGGKPRRKNPQEGLYNELQKDKMAEAYSEIGMKGERRRGKGHDGLYQGLSTATKDTYDALHMQALPPR

SEQ ID NO: 6303 - protein, 484 aa, Artificial Sequence
  Description of Artificial Sequence: Synthetic Chimeric Antigen Receptor sequence
MALPVTALLLPLALLLHAARPEVQLVESGGGLVKPGGSLRLSCAASGFTFSSYAMSWVRQAPGKGLEWVASISTGASAYFADSVKGRFTISRDNAKNSLYLQMNSLRAEDTAVYYCARITTSTWYFDVWGQGTTVTVSSGGGGSGGGGSGGGGSDIQMTQSPSSLSASVGDRVTITCRASQDINSYLSWFQQKPGKAPKTLIYRANRLQSGVPSRFSGSGSGQDYTLTISSLQPEDFATYYCLQYDEFPYTFGQGTKLEIKTTTPAPRPPTPAPTIASQPLSLRPEACRPAAGGAVHTRGLDFACDIYIWAPLAGTCGVLLLSLVITLYCKRGRKKLLYIFKQPFMRPVQTTQEEDGCSCRFPEEEEGGCELRVKFSRSADAPAYQQGQNQLYNELNLGRREEYDVLDKRRGRDPEMGGKPRRKNPQEGLYNELQKDKMAEAYSEIGMKGERRRGKGHDGLYQGLSTATKDTYDALHMQALPPR

SEQ ID NO: 6304 - protein, 485 aa, Artificial Sequence
  Description of Artificial Sequence: Synthetic Chimeric Antigen Receptor sequence
MALPVTALLLPLALLLHAARPDIQMTQSPSSVSASVGDRVTITCRASQGISTLLAWYQQKPGKAPKLLISSASSLQSGVPARFSGSGSGTDFTLTISSLQPEDFATYYCQQSYRAPTFGQGTKVEIKRGGGGSGGGGSGGGGSQVTLKESGPTLLKPTQTLTLTCTFSGFSLSTRGVGVGWIRQPPGQALEWLTLIYWDDDKRYSPSLKSRLTITKDTSKNQVVLTMTNMESVDTATYYCAQQTMTGAFDIWGQGTTVTVSSTTTPAPRPPTPAPTIASQPLSLRPEACRPAAGGAVHTRGLDFACDIYIWAPLAGTCGVLLLSLVITLYCKRGRKKLLYIFKQPFMRPVQTTQEEDGCSCRFPEEEEGGCELRVKFSRSADAPAYQQGQNQLYNELNLGRREEYDVLDKRRGRDPEMGGKPRRKNPQEGLYNELQKDKMAEAYSEIGMKGERRRGKGHDGLYQGLSTATKDTYDALHMQALPPR

SEQ ID NO: 6305 - protein, 486 aa, Artificial Sequence
  Description of Artificial Sequence: Synthetic Chimeric Antigen Receptor sequence
MALPVTALLLPLALLLHAARPEVKLQESGAELARPGASVKMSCKASGYTFTSYTMHWVKQRPGQGLEWIGYINPSSGYTEYNQKFKDKTTLTADKSSSTAYMQLSSLTSGDSAVYYCARRVLWLRRGDYWGQGTILTVSAGGGGSGGGGSGGGGSMEVLITQTPSSLSASLGERVSLTCRASQDIGSSLNWLQQEPDGTIKRLIYATSSLDSGVPKRFSGSRSGSDYSLTISSLESEDFVDYYCLQYASSPYTFGGGTKLELKTTTPAPRPPTPAPTIASQPLSLRPEACRPAAGGAVHTRGLDFACDIYIWAPLAGTCGVLLLSLVITLYCKRGRKKLLYIFKQPFMRPVQTTQEEDGCSCRFPEEEEGGCELRVKFSRSADAPAYQQGQNQLYNELNLGRREEYDVLDKRRGRDPEMGGKPRRKNPQEGLYNELQKDKMAEAYSEIGMKGERRRGKGHDGLYQGLSTATKDTYDALHMQALPPR

SEQ ID NO: 6306 - protein, 486 aa, Artificial Sequence
  Description of Artificial Sequence: Synthetic Chimeric Antigen Receptor sequence
MALPVTALLLPLALLLHAARPQVQLQESGPGLVKPSETLSLTCTVSGFSLTSYGYVHWVRQPPGKGLEWLGVIWAGGFTNYNPSLKSRLTISKDNSKNQVSLKLSSVTAADTAVYYCARRGSSYSMDYWGQGTLVTVSSGGGGSGGGGSGGGGSEIVLTQSPATLSLSPGERATLSCRASSNVSYIHWYQQKPGQAPRPWIYEISKLATGIPARFSGSGSGTDYTLTISSLEPEDFAVYYCQQWNYPLITFGQGTKLEIKTTTPAPRPPTPAPTIASQPLSLRPEACRPAAGGAVHTRGLDFACDIISFFLALTSTALLFLLFFLTLRFSVVKRGRKKLLYIFKQPFMRPVQTTQEEDGCSCRFPEEEEGGCELRVKFSRSADAPAYQQGQNQLYNELNLGRREEYDVLDKRRGRDPEMGGKPRRKNPQEGLYNELQKDKMAEAYSEIGMKGERRRGKGHDGLYQGLSTATKDTYDALHMQALPPR

SEQ ID NO: 6307 - protein, 487 aa, Artificial Sequence
  Description of Artificial Sequence: Synthetic Chimeric Antigen Receptor sequence
MALPVTALLLPLALLLHAARPEVQLVESGGGLVKPGGSLRLSCAASGFTFSSYAMSWVRQAPGKGLEWVASISTGASAYFADSVKGRFTISRDNAKNSLYLQMNSLRAEDTAVYYCARITTSTWYFDVWGQGTTVTVSSGGGGSGGGGSGGGGSDIQMTQSPSSLSASVGDRVTITCRASQDINSYLSWFQQKPGKAPKTLIYRANRLQSGVPSRFSGSGSGQDYTLTISSLQPEDFATYYCLQYDEFPYTFGQGTKLEIKTTTPAPRPPTPAPTIASQPLSLRPEACRPAAGGAVHTRGLDFACDIISFFLALTSTALLFLLFFLTLRFSVVKRGRKKLLYIFKQPFMRPVQTTQEEDGCSCRFPEEEEGGCELRVKFSRSADAPAYQQGQNQLYNELNLGRREEYDVLDKRRGRDPEMGGKPRRKNPQEGLYNELQKDKMAEAYSEIGMKGERRRGKGHDGLYQGLSTATKDTYDALHMQALPPR

SEQ ID NO: 6308 - protein, 488 aa, Artificial Sequence
  Description of Artificial Sequence: Synthetic Chimeric Antigen Receptor sequence
MALPVTALLLPLALLLHAARPETTLTQSPAFMSATPGDKVNISCKASQDIDDDLNWYQQKPGEAPILIIQEATTLVPGIPPRFSGSGFGTDFTLTINSMQSEDVAYYFCLQHDNFPPTFGQGTKVEIKRGGGGSGGGGSGGGGSQVQLQESGPGLVKSSETLSLTCTVSGGSMNNYYWSWIRQPAGKGLEWMGRIYSSGSTNYNPALKSRVTMSVDTSKNQFSLNLSSVTAADTAIYYCARASWSGTYWALFDYWGQGTLVTVSSTTTPAPRPPTPAPTIASQPLSLRPEACRPAAGGAVHTRGLDFACDIYIWAPLAGTCGVLLLSLVITLYCKRGRKKLLYIFKQPFMRPVQTTQEEDGCSCRFPEEEEGGCELRVKFSRSADAPAYQQGQNQLYNELNLGRREEYDVLDKRRGRDPEMGGKPRRKNPQEGLYNELQKDKMAEAYSEIGMKGERRRGKGHDGLYQGLSTATKDTYDALHMQALPPR

SEQ ID NO: 6309 - protein, 489 aa, Artificial Sequence
  Description of Artificial Sequence: Synthetic Chimeric Antigen Receptor sequence
MALPVTALLLPLALLLHAARPDIQMTQSPSSLSASVGDRVTITCQASQDISNYLNWYQQKPGKAPKLLIYDASNLETGVPSRFSGSGSGTDFTFTISSLQPEDIATYYCQQYDNLPLTFGGGTKLEIKRGGGGSGGGGSGGGGSEVQLVESGGGLVKPGGSLRLSCAASGFTFSDYYMGWVRQAPGKGLKWLSYISDRAHTIYDTDSVKGRFTISRDDAKSSLYLRMNNLRVEDTAVYYCARAVGAGEGFDYWGQGTLVTVSSAAATTTPAPRPPTPAPTIASQPLSLRPEACRPAAGGAVHTRGLDFACDIYIWAPLAGTCGVLLLSLVITLYCKRGRKKLLYIFKQPFMRPVQTTQEEDGCSCRFPEEEEGGCELRVKFSRSADAPAYQQGQNQLYNELNLGRREEYDVLDKRRGRDPEMGGKPRRKNPQEGLYNELQKDKMAEAYSEIGMKGERRRGKGHDGLYQGLSTATKDTYDALHMQALPPR

SEQ ID NO: 6310 - protein, 490 aa, Artificial Sequence
  Description of Artificial Sequence: Synthetic Chimeric Antigen Receptor sequence
MALPVTALLLPLALLLHAARPQSALTQPASVSGSPGQSITISCTGTSSDVGGYNYVSWYQQHPGKAPKLMIYDVSKRPSGVSNRFSGSKSGNTASLTISGLQAEDEADYYCSSYTGRSTVFGGGTKLTVLGGGGGSGGGGSGGGGSEVQLVQSGGDLVQPGGSLRLSCAASGFTFSSYSMNWVRQAPGKGLEWVSSISSSSSYIYYADSVKGRFTISRDNAKNSLYLQMNSLRAEDTAVYYCARGLGGWTHDAFDIWGQGTTVTVSSTTTPAPRPPTPAPTIASQPLSLRPEACRPAAGGAVHTRGLDFACDIYIWAPLAGTCGVLLLSLVITLYCKRGRKKLLYIFKQPFMRPVQTTQEEDGCSCRFPEEEEGGCELRVKFSRSADAPAYQQGQNQLYNELNLGRREEYDVLDKRRGRDPEMGGKPRRKNPQEGLYNELQKDKMAEAYSEIGMKGERRRGKGHDGLYQGLSTATKDTYDALHMQALPPR

SEQ ID NO: 6311 - protein, 491 aa, Artificial Sequence
  Description of Artificial Sequence: Synthetic Chimeric Antigen Receptor sequence
MALPVTALLLPLALLLHAARPQSALTQPPSASGTPGQRVTISCPGSSSNIGSNYVYWYQQLPGTAPKLLIYRNNQRPSGVPDRFSGSKSGTSATLGITGLQTGDEADYYCGTWDSSLSAYVFGTGTKVTVLGGGGGSGGGGSGGGGSQVQLQQSGAEVKKPGASVKVSCKASGYTFSRYYIHWVRRAPGQGLEWMGLINPGGGSTNYAQKFQGRVTMTRDTSTNTVYLELSSLRSDDTAVYYCARDYGTIDARRFDFWGQGTLVTVSSTTTPAPRPPTPAPTIASQPLSLRPEACRPAAGGAVHTRGLDFACDIYIWAPLAGTCGVLLLSLVITLYCKRGRKKLLYIFKQPFMRPVQTTQEEDGCSCRFPEEEEGGCELRVKFSRSADAPAYQQGQNQLYNELNLGRREEYDVLDKRRGRDPEMGGKPRRKNPQEGLYNELQKDKMAEAYSEIGMKGERRRGKGHDGLYQGLSTATKDTYDALHMQALPPR

SEQ ID NO: 6312 - protein, 491 aa, Artificial Sequence
  Description of Artificial Sequence: Synthetic Chimeric Antigen Receptor sequence
MALPVTALLLPLALLLHAARPQSVLTQPPSASGTPGQRVTISCSGSSSNIGSNTVNWYQQLPGTAPKLLIYSNNQRPSGVPDRFSGSKSGTSASLAIRGLQSDDEAEYYCAAWDDSLKSFVFGKGTKVTVLGGGGGSGGGGSGGGGSQVQLVQSGAEVKKPGASVKVSCKASGYTFSRYYIHWVRQAPGQGLEWMGLINPGGGSTNYAQKFQGRVTMTRDTSTNTVYLELSSLRSDDTAVYYCARDYGTIDARRFDFWGQGTLVTVSSTTTPAPRPPTPAPTIASQPLSLRPEACRPAAGGAVHTRGLDFACDIYIWAPLAGTCGVLLLSLVITLYCKRGRKKLLYIFKQPFMRPVQTTQEEDGCSCRFPEEEEGGCELRVKFSRSADAPAYQQGQNQLYNELNLGRREEYDVLDKRRGRDPEMGGKPRRKNPQEGLYNELQKDKMAEAYSEIGMKGERRRGKGHDGLYQGLSTATKDTYDALHMQALPPR

SEQ ID NO: 6313 - protein, 492 aa, Artificial Sequence
  Description of Artificial Sequence: Synthetic Chimeric Antigen Receptor sequence
MALPVTALLLPLALLLHAARPQSALTQPASVSGSPGQSITISCTGTSSDFGDYDYVSWYQQHPGKAPKLMIYDVSDRPSGVSNRFSGSKSGNTASLTISGLQAEDEADYFCSSFTTSSTLVFGGGTKLTVLGGGGGSGGGGSGGGGSQVQLVQSGAEVKKPGASVKVSCKASGYTFTGYYMHWVRQAPGQGLEWMGWINPNSGGTNYAQKFQGRVTMTRDTSISTAYMELSRLRSDDTAVYYCARDGDMVYDSSGPDYWGQGTLVTVSSTTTPAPRPPTPAPTIASQPLSLRPEACRPAAGGAVHTRGLDFACDIYIWAPLAGTCGVLLLSLVITLYCKRGRKKLLYIFKQPFMRPVQTTQEEDGCSCRFPEEEEGGCELRVKFSRSADAPAYQQGQNQLYNELNLGRREEYDVLDKRRGRDPEMGGKPRRKNPQEGLYNELQKDKMAEAYSEIGMKGERRRGKGHDGLYQGLSTATKDTYDALHMQALPPR

SEQ ID NO: 6314 - protein, 494 aa, Artificial Sequence
  Description of Artificial Sequence: Synthetic Chimeric Antigen Receptor sequence
MALPVTALLLPLALLLHAARPQSALTQPPSASGTPGQRVTISCSGSSSNIGSNYVYWYQQLPGTAPKLLIYRNNQRPSGVPDRFSGSKSGTSASLAISGLRSEDEADYYCAAWDDSLSGYVFGTGTKVTVLGGGGGSGGGGSGGGGSQMQLVQSGAEVKKPGASVKVSCKASGYTFSRYYIHWVRQAPGQGLEWMGLINPGGGSTNYAQKFQGRVTMTRDTSTNTVYLELSSLRSDDTAVYYCARDYGTIDARRFDFWGQGTLVTVSSAAATTTPAPRPPTPAPTIASQPLSLRPEACRPAAGGAVHTRGLDFACDIYIWAPLAGTCGVLLLSLVITLYCKRGRKKLLYIFKQPFMRPVQTTQEEDGCSCRFPEEEEGGCELRVKFSRSADAPAYQQGQNQLYNELNLGRREEYDVLDKRRGRDPEMGGKPRRKNPQEGLYNELQKDKMAEAYSEIGMKGERRRGKGHDGLYQGLSTATKDTYDALHMQALPPR

SEQ ID NO: 6315 - protein, 495 aa, Artificial Sequence
  Description of Artificial Sequence: Synthetic Chimeric Antigen Receptor sequence
MALPVTALLLPLALLLHAARPQSALTQPALTQPASVSGSPGQSITISCTGTSSDFGDYDYVSWYQQHPGKAPKLMIYDVSDRPSGVSNRFSGSKSGNTASLTISGLQAEDEADYFCSSFTTSSTLVFGGGTKLTVLGGGGGSGGGGSGGGGSQVQLVQSGAEVKEPGASVKVSCKASGYTFRNSGITWVRQAPGQGLEWMGWINPNSGGAMYVDNFQGRATMTRDTSINTAYMELRSLSSDDTAVYYCARGMADLIDVFDIWGQGTLVTVSSTTTPAPRPPTPAPTIASQPLSLRPEACRPAAGGAVHTRGLDFACDIYIWAPLAGTCGVLLLSLVITLYCKRGRKKLLYIFKQPFMRPVQTTQEEDGCSCRFPEEEEGGCELRVKFSRSADAPAYQQGQNQLYNELNLGRREEYDVLDKRRGRDPEMGGKPRRKNPQEGLYNELQKDKMAEAYSEIGMKGERRRGKGHDGLYQGLSTATKDTYDALHMQALPPR

SEQ ID NO: 6316 - protein, 497 aa, Artificial Sequence
  Description of Artificial Sequence: Synthetic Chimeric Antigen Receptor sequence
MALPVTALLLPLALLLHAARPEIVMTQSPATLSVSPGERATLSCRASQSVSSNLAWYQQKPGQAPRLLIYGASTRATGIPARFSGSGSGTEFTLTISSLQSEDFAVYYCQQYNNWPPYTFGQGTKVEIKRGGGGSGGGGSGGGGSQVTLKESGPTLVKPTQTLTLTCTFSGFSLNSFGVAVGWFRQPPGKALEWLGLIYWDDDRRYFPSLEGRLSITKDASDNNVVLTMMNVDPADTATYYCARTSPMVQGIANYYAMDVWGQGTTVTVSSAAATTTPAPRPPTPAPTIASQPLSLRPEACRPAAGGAVHTRGLDFACDIYIWAPLAGTCGVLLLSLVITLYCKRGRKKLLYIFKQPFMRPVQTTQEEDGCSCRFPEEEEGGCELRVKFSRSADAPAYQQGQNQLYNELNLGRREEYDVLDKRRGRDPEMGGKPRRKNPQEGLYNELQKDKMAEAYSEIGMKGERRRGKGHDGLYQGLSTATKDTYDALHMQALPPR

SEQ ID NO: 6317 - protein, 645 aa, Artificial Sequence
  Description of Artificial Sequence: Synthetic Chimeric Antigen Receptor sequence
EVKLQQSGPELVKPGASVKISCKTSGYTFTEYTMHWVKQSHGKSLEWIGGINPNNGGTSYNQKFKGKATLTVDKSSSTAYMELRSLTSEDSAVYYCALQGFAYWGQGTPLTVSSGGGGSGGGGSGGGGSMEIEITQTPALMSASPGEKVTMTCSASSSVSYMYWYQQKPRSSPKPWIYLTSNLASGVPARFSGSGSGTSYSLTISSMEAEDAATYYCQQWSSNPYTFGGGTRLELKEPKSPDKTHTCPPCPAPPVAGPSVFLFPPKPKDTLMIARTPEVTCVVVDVSHEDPEVKFNWYVDGVEVHNAKTKPREEQYNSTYRVVSVLTVLHQDWLNGKEYKCKVSNKALPAPIEKTISKAKGQPREPQVYTLPPSRDELTKNQVSLTCLVKGFYPSDIAVEWESNGQPENNYKTTPPVLDSDGSFFLYSKLTVDKSRWQQGNVFSCSVMHEALHNHYTQKSLSLSPGKIYIWAPLAGTCGVLLLSLVITLYCKRGRKKLLYIFKQPFMRPVQTTQEEDGCSCRFPEEEEGGCELRVKFSRSADAPAYQQGQNQLYNELNLGRREEYDVLDKRRGRDPEMGGKPRRKNPQEGLYNELQKDKMAEAYSEIGMKGERRRGKGHDGLYQGLSTATKDTYDALHMQALPPR

SEQ ID NO: 6318 - protein, 647 aa, Artificial Sequence
  Description of Artificial Sequence: Synthetic Chimeric Antigen Receptor sequence
QVQLKESGPGLVAPSQTLSITCTVSGFSLTSYGVHWVRQPPGKGLEWLGVIWAGGFTNYNSALKSRLSISKDNSKSQVLLKMTSLQTDDTAMYYCARRGSSYSMDYWGQGTSVTVSSGGGGSGGGGSGGGGSEIVLSQSPAITAASLGQKVTITCSASSNVSYIHWYQQRSGTSPRPWIYEISKLASGVPVRFSGSGSGTSYSLTISSMEAEDAAIYYCQQWNYPLITFGSGTKLEIQEPKSPDKTHTCPPCPAPPVAGPSVFLFPPKPKDTLMIARTPEVTCVVVDVSHEDPEVKFNWYVDGVEVHNAKTKPREEQYNSTYRVVSVLTVLHQDWLNGKEYKCKVSNKALPAPIEKTISKAKGQPREPQVYTLPPSRDELTKNQVSLTCLVKGFYPSDIAVEWESNGQPENNYKTTPPVLDSDGSFFLYSKLTVDKSRWQQGNVFSCSVMHEALHNHYTQKSLSLSPGKIYIWAPLAGTCGVLLLSLVITLYCKRGRKKLLYIFKQPFMRPVQTTQEEDGCSCRFPEEEEGGCELRVKFSRSADAPAYQQGQNQLYNELNLGRREEYDVLDKRRGRDPEMGGKPRRKNPQEGLYNELQKDKMAEAYSEIGMKGERRRGKGHDGLYQGLSTATKDTYDALHMQALPPR

SEQ ID NO: 6319 - protein, 648 aa, Artificial Sequence
  Description of Artificial Sequence: Synthetic Chimeric Antigen Receptor sequence
EVKLQQSGPELVKPGASVKISCKTSGYTFTEYTMHWVKQSHGKSLEWIGGINPNNGGTSYNQKFKGKATLTVDKSSSTAYMELRSLTSEDSAVYYCALQGFAYWGQGTPLTVSSGGGGSGGGGSGGGGSMEIEITQTPALMSASPGEKVTMTCSASSSVSYMYWYQQKPRSSPKPWIYLTSNLASGVPARFSGSGSGTSYSLTISSMEAEDAATYYCQQWSSNPYTFGGGTRLELKEPKSPDKTHTCPPCPAPPVAGPSVFLFPPKPKDTLMIARTPEVTCVVVDVSHEDPEVKFNWYVDGVEVHNAKTKPREEQYNSTYRVVSVLTVLHQDWLNGKEYKCKVSNKALPAPIEKTISKAKGQPREPQVYTLPPSRDELTKNQVSLTCLVKGFYPSDIAVEWESNGQPENNYKTTPPVLDSDGSFFLYSKLTVDKSRWQQGNVFSCSVMHEALHNHYTQKSLSLSPGKIISFFLALTSTALLFLLFFLTLRFSVVKRGRKKLLYIFKQPFMRPVQTTQEEDGCSCRFPEEEEGGCELRVKFSRSADAPAYQQGQNQLYNELNLGRREEYDVLDKRRGRDPEMGGKPRRKNPQEGLYNELQKDKMAEAYSEIGMKGERRRGKGHDGLYQGLSTATKDTYDALHMQALPPR

SEQ ID NO: 6320 - protein, 649 aa, Artificial Sequence
  Description of Artificial Sequence: Synthetic Chimeric Antigen Receptor sequence
EVKLVESGGGLVKPGGSLKLSCAASGFTFSSYAMSWVRQTPEKRLEWVASISTGASAYFPDSVKGRFTISRDNARNILYLQMSSLRSEDTAMYYCARITTSTWYFDVWGAGTTVTVSSGGGGSGGGGSGGGGSDIKMTQSPSSMYASLGERVTITCKASQDINSYLSWFQQKPGKSPKTLIYRANRLVDGVPSRFSGSGSGQDYSLTISSLEYEDMGIYYCLQYDEFPYTFGGGTKLEIKEPKSPDKTHTCPPCPAPPVAGPSVFLFPPKPKDTLMIARTPEVTCVVVDVSHEDPEVKFNWYVDGVEVHNAKTKPREEQYNSTYRVVSVLTVLHQDWLNGKEYKCKVSNKALPAPIEKTISKAKGQPREPQVYTLPPSRDELTKNQVSLTCLVKGFYPSDIAVEWESNGQPENNYKTTPPVLDSDGSFFLYSKLTVDKSRWQQGNVFSCSVMHEALHNHYTQKSLSLSPGKIYIWAPLAGTCGVLLLSLVITLYCKRGRKKLLYIFKQPFMRPVQTTQEEDGCSCRFPEEEEGGCELRVKFSRSADAPAYQQGQNQLYNELNLGRREEYDVLDKRRGRDPEMGGKPRRKNPQEGLYNELQKDKMAEAYSEIGMKGERRRGKGHDGLYQGLSTATKDTYDALHMQALPPR

SEQ ID NO: 6321 - protein, 649 aa, Artificial Sequence
  Description of Artificial Sequence: Synthetic Chimeric Antigen Receptor sequence
QVQLQQSGAELVRPGASVTLSCKASGYTFSDYEMHWVIQTPVHGLEWIGAIDPETGGTAYNQKFKGKAILTADKSSSTAYMELRSLTSEDSAVYYCTGYYDYDSFTYWGQGTLVTVSAGGGGSGGGGSGGGGSDIVMTQSQKIMSTTVGDRVSITCKASQNVDAAVAWYQQKPGQSPKLLIYSASNRYTGVPDRFTGSGSGTDFTLTISNMQSEDLADYFCQQYDIYPYTFGGGTKLEIKEPKSPDKTHTCPPCPAPPVAGPSVFLFPPKPKDTLMIARTPEVTCVVVDVSHEDPEVKFNWYVDGVEVHNAKTKPREEQYNSTYRVVSVLTVLHQDWLNGKEYKCKVSNKALPAPIEKTISKAKGQPREPQVYTLPPSRDELTKNQVSLTCLVKGFYPSDIAVEWESNGQPENNYKTTPPVLDSDGSFFLYSKLTVDKSRWQQGNVFSCSVMHEALHNHYTQKSLSLSPGKIYIWAPLAGTCGVLLLSLVITLYCKRGRKKLLYIFKQPFMRPVQTTQEEDGCSCRFPEEEEGGCELRVKFSRSADAPAYQQGQNQLYNELNLGRREEYDVLDKRRGRDPEMGGKPRRKNPQEGLYNELQKDKMAEAYSEIGMKGERRRGKGHDGLYQGLSTATKDTYDALHMQALPPR

SEQ ID NO: 6322 - protein, 650 aa, Artificial Sequence
  Description of Artificial Sequence: Synthetic Chimeric Antigen Receptor sequence
EVKLVESGGGLVKPGGSLKLSCAASGFTFSSYAMSWVRQIPEKRLEWVASISRGGTTYYPDSVKGRFTISRDNVRNILYLQMSSLRSEDTAMYYCGRYDYDGYYAMDYWGQGTSVTVSSGGGGSGGGGSGGGGSDIKMTQSPSSMYASLGERVTITCKASPDINSYLSWFQQKPGKSPKTLIYRANRLVDGVPSRFSGGGSGQDYSLTINSLEYEDMGIYYCLQYDEFPYTFGGGTKLEMKEPKSPDKTHTCPPCPAPPVAGPSVFLFPPKPKDTLMIARTPEVTCVVVDVSHEDPEVKFNWYVDGVEVHNAKTKPREEQYNSTYRVVSVLTVLHQDWLNGKEYKCKVSNKALPAPIEKTISKAKGQPREPQVYTLPPSRDELTKNQVSLTCLVKGFYPSDIAVEWESNGQPENNYKTTPPVLDSDGSFFLYSKLTVDKSRWQQGNVFSCSVMHEALHNHYTQKSLSLSPGKIYIWAPLAGTCGVLLLSLVITLYCKRGRKKLLYIFKQPFMRPVQTTQEEDGCSCRFPEEEEGGCELRVKFSRSADAPAYQQGQNQLYNELNLGRREEYDVLDKRRGRDPEMGGKPRRKNPQEGLYNELQKDKMAEAYSEIGMKGERRRGKGHDGLYQGLSTATKDTYDALHMQALPPR

SEQ ID NO: 6323 - protein, 650 aa, Artificial Sequence
  Description of Artificial Sequence: Synthetic Chimeric Antigen Receptor sequence
EVQLQQSGPELEKPGASVKISCKASGFAFTGYNMNWVKQTNGKSLEWIGSIDPYYGGSTYNQKFKDKATLTVDKSSSTAYMQLKSLTSDDSAVYYCARSPGGDYAMDYWGQGTSVTVSSGGGGSGGGGSGGGGSDIKMTQSPSSMYASVGERVTITCKASQGINSYSGWFQQKPGKSPKTLIYRGNRLVDGVPSRFSGSGSGQDYSLTISSLEYEDMGIYYCLQYDEFPYTFGGGTKLEIKEPKSPDKTHTCPPCPAPPVAGPSVFLFPPKPKDTLMIARTPEVTCVVVDVSHEDPEVKFNWYVDGVEVHNAKTKPREEQYNSTYRVVSVLTVLHQDWLNGKEYKCKVSNKALPAPIEKTISKAKGQPREPQVYTLPPSRDELTKNQVSLTCLVKGFYPSDIAVEWESNGQPENNYKTTPPVLDSDGSFFLYSKLTVDKSRWQQGNVFSCSVMHEALHNHYTQKSLSLSPGKIYIWAPLAGTCGVLLLSLVITLYCKRGRKKLLYIFKQPFMRPVQTTQEEDGCSCRFPEEEEGGCELRVKFSRSADAPAYQQGQNQLYNELNLGRREEYDVLDKRRGRDPEMGGKPRRKNPQEGLYNELQKDKMAEAYSEIGMKGERRRGKGHDGLYQGLSTATKDTYDALHMQALPPR

SEQ ID NO: 6324 - protein, 650 aa, Artificial Sequence
  Description of Artificial Sequence: Synthetic Chimeric Antigen Receptor sequence
QVQLKESGPGLVAPSQTLSITCTVSGFSLTSYGVHWVRQPPGKGLEWLGVIWAGGFTNYNSALKSRLSISKDNSKSQVLLKMTSLQTDDTAMYYCARRGSSYSMDYWGQGTSVTVSSGGGGSGGGGSGGGGSEIVLSQSPAITAASLGQKVTITCSASSNVSYIHWYQQRSGTSPRPWIYEISKLASGVPVRFSGSGSGTSYSLTISSMEAEDAAIYYCQQWNYPLITFGSGTKLEIQEPKSPDKTHTCPPCPAPPVAGPSVFLFPPKPKDTLMIARTPEVTCVVVDVSHEDPEVKFNWYVDGVEVHNAKTKPREEQYNSTYRVVSVLTVLHQDWLNGKEYKCKVSNKALPAPIEKTISKAKGQPREPQVYTLPPSRDELTKNQVSLTCLVKGFYPSDIAVEWESNGQPENNYKTTPPVLDSDGSFFLYSKLTVDKSRWQQGNVFSCSVMHEALHNHYTQKSLSLSPGKIISFFLALTSTALLFLLFFLTLRFSVVKRGRKKLLYIFKQPFMRPVQTTQEEDGCSCRFPEEEEGGCELRVKFSRSADAPAYQQGQNQLYNELNLGRREEYDVLDKRRGRDPEMGGKPRRKNPQEGLYNELQKDKMAEAYSEIGMKGERRRGKGHDGLYQGLSTATKDTYDALHMQALPPR

SEQ ID NO: 6325 - protein, 650 aa, Artificial Sequence
  Description of Artificial Sequence: Synthetic Chimeric Antigen Receptor sequence
QVQLQQPGAELVKPGTSVKLSCKASGYNFTNYWINWVKLRPGQGLEWIGEIYPGSGSTNYNEKFKSKATLTADTSSSTAYMQLSSLASEDSALYYCARDGNYYAMDYWGQGTSVTVSSGGGGSGGGGSGGGGSDIQMTQTTSSLSASLGDRVTITCRASQDINNYLNWYQQKPDGTVKLLIYYTSALHSGVPSRFSGSGSGTDYSLTISNLEQEDIATYFCQQGNTLPPYTFGGGTKLEIKEPKSPDKTHTCPPCPAPPVAGPSVFLFPPKPKDTLMIARTPEVTCVVVDVSHEDPEVKFNWYVDGVEVHNAKTKPREEQYNSTYRVVSVLTVLHQDWLNGKEYKCKVSNKALPAPIEKTISKAKGQPREPQVYTLPPSRDELTKNQVSLTCLVKGFYPSDIAVEWESNGQPENNYKTTPPVLDSDGSFFLYSKLTVDKSRWQQGNVFSCSVMHEALHNHYTQKSLSLSPGKIYIWAPLAGTCGVLLLSLVITLYCKRGRKKLLYIFKQPFMRPVQTTQEEDGCSCRFPEEEEGGCELRVKFSRSADAPAYQQGQNQLYNELNLGRREEYDVLDKRRGRDPEMGGKPRRKNPQEGLYNELQKDKMAEAYSEIGMKGERRRGKGHDGLYQGLSTATKDTYDALHMQALPPR

SEQ ID NO: 6326 - protein, 651 aa, Artificial Sequence
  Description of Artificial Sequence: Synthetic Chimeric Antigen Receptor sequence
EVKLQESGAELARPGASVKMSCKASGYTFTSYTMHWVKQRPGQGLEWIGYINPSSGYTEYNQKFKDKTTLTADKSSSTAYMQLSSLTSGDSAVYYCARRVLWLRRGDYWGQGTILTVSAGGGGSGGGGSGGGGSMEVLITQTPSSLSASLGERVSLTCRASQDIGSSLNWLQQEPDGTIKRLIYATSSLDSGVPKRFSGSRSGSDYSLTISSLESEDFVDYYCLQYASSPYTFGGGTKLELKEPKSPDKTHTCPPCPAPPVAGPSVFLFPPKPKDTLMIARTPEVTCVVVDVSHEDPEVKFNWYVDGVEVHNAKTKPREEQYNSTYRVVSVLTVLHQDWLNGKEYKCKVSNKALPAPIEKTISKAKGQPREPQVYTLPPSRDELTKNQVSLTCLVKGFYPSDIAVEWESNGQPENNYKTTPPVLDSDGSFFLYSKLTVDKSRWQQGNVFSCSVMHEALHNHYTQKSLSLSPGKIYIWAPLAGTCGVLLLSLVITLYCKRGRKKLLYIFKQPFMRPVQTTQEEDGCSCRFPEEEEGGCELRVKFSRSADAPAYQQGQNQLYNELNLGRREEYDVLDKRRGRDPEMGGKPRRKNPQEGLYNELQKDKMAEAYSEIGMKGERRRGKGHDGLYQGLSTATKDTYDALHMQALPPR

SEQ ID NO: 6327 - protein, 652 aa, Artificial Sequence
  Description of Artificial Sequence: Synthetic Chimeric Antigen Receptor sequence
EVKLVESGGGLVKPGGSLKLSCAASGFTFSSYAMSWVRQTPEKRLEWVASISTGASAYFPDSVKGRFTISRDNARNILYLQMSSLRSEDTAMYYCARITTSTWYFDVWGAGTTVTVSSGGGGSGGGGSGGGGSDIKMTQSPSSMYASLGERVTITCKASQDINSYLSWFQQKPGKSPKTLIYRANRLVDGVPSRFSGSGSGQDYSLTISSLEYEDMGIYYCLQYDEFPYTFGGGTKLEIKEPKSPDKTHTCPPCPAPPVAGPSVFLFPPKPKDTLMIARTPEVTCVVVDVSHEDPEVKFNWYVDGVEVHNAKTKPREEQYNSTYRVVSVLTVLHQDWLNGKEYKCKVSNKALPAPIEKTISKAKGQPREPQVYTLPPSRDELTKNQVSLTCLVKGFYPSDIAVEWESNGQPENNYKTTPPVLDSDGSFFLYSKLTVDKSRWQQGNVFSCSVMHEALHNHYTQKSLSLSPGKIISFFLALTSTALLFLLFFLTLRFSVVKRGRKKLLYIFKQPFMRPVQTTQEEDGCSCRFPEEEEGGCELRVKFSRSADAPAYQQGQNQLYNELNLGRREEYDVLDKRRGRDPEMGGKPRRKNPQEGLYNELQKDKMAEAYSEIGMKGERRRGKGHDGLYQGLSTATKDTYDALHMQALPPR

SEQ ID NO: 6328 - protein, 652 aa, Artificial Sequence
  Description of Artificial Sequence: Synthetic Chimeric Antigen Receptor sequence
QVQLQQSGAELVRPGASVTLSCKASGYTFSDYEMHWVIQTPVHGLEWIGAIDPETGGTAYNQKFKGKAILTADKSSSTAYMELRSLTSEDSAVYYCTGYYDYDSFTYWGQGTLVTVSAGGGGSGGGGSGGGGSDIVMTQSQKIMSTTVGDRVSITCKASQNVDAAVAWYQQKPGQSPKLLIYSASNRYTGVPDRFTGSGSGTDFTLTISNMQSEDLADYFCQQYDIYPYTFGGGTKLEIKEPKSPDKTHTCPPCPAPPVAGPSVFLFPPKPKDTLMIARTPEVTCVVVDVSHEDPEVKFNWYVDGVEVHNAKTKPREEQYNSTYRVVSVLTVLHQDWLNGKEYKCKVSNKALPAPIEKTISKAKGQPREPQVYTLPPSRDELTKNQVSLTCLVKGFYPSDIAVEWESNGQPENNYKTTPPVLDSDGSFFLYSKLTVDKSRWQQGNVFSCSVMHEALHNHYTQKSLSLSPGKIISFFLALTSTALLFLLFFLTLRFSVVKRGRKKLLYIFKQPFMRPVQTTQEEDGCSCRFPEEEEGGCELRVKFSRSADAPAYQQGQNQLYNELNLGRREEYDVLDKRRGRDPEMGGKPRRKNPQEGLYNELQKDKMAEAYSEIGMKGERRRGKGHDGLYQGLSTATKDTYDALHMQALPPR

SEQ ID NO: 6329 - protein, 653 aa, Artificial Sequence
  Description of Artificial Sequence: Synthetic Chimeric Antigen Receptor sequence
EVKLVESGGGLVKPGGSLKLSCAASGFTFSSYAMSWVRQIPEKRLEWVASISRGGTTYYPDSVKGRFTISRDNVRNILYLQMSSLRSEDTAMYYCGRYDYDGYYAMDYWGQGTSVTVSSGGGGSGGGGSGGGGSDIKMTQSPSSMYASLGERVTITCKASPDINSYLSWFQQKPGKSPKTLIYRANRLVDGVPSRFSGGGSGQDYSLTINSLEYEDMGIYYCLQYDEFPYTFGGGTKLEMKEPKSPDKTHTCPPCPAPPVAGPSVFLFPPKPKDTLMIARTPEVTCVVVDVSHEDPEVKFNWYVDGVEVHNAKTKPREEQYNSTYRVVSVLTVLHQDWLNGKEYKCKVSNKALPAPIEKTISKAKGQPREPQVYTLPPSRDELTKNQVSLTCLVKGFYPSDIAVEWESNGQPENNYKTTPPVLDSDGSFFLYSKLTVDKSRWQQGNVFSCSVMHEALHNHYTQKSLSLSPGKIISFFLALTSTALLFLLFFLTLRFSVVKRGRKKLLYIFKQPFMRPVQTTQEEDGCSCRFPEEEEGGCELRVKFSRSADAPAYQQGQNQLYNELNLGRREEYDVLDKRRGRDPEMGGKPRRKNPQEGLYNELQKDKMAEAYSEIGMKGERRRGKGHDGLYQGLSTATKDTYDALHMQALPPR

SEQ ID NO: 6330 - protein, 653 aa, Artificial Sequence
  Description of Artificial Sequence: Synthetic Chimeric Antigen Receptor sequence
EVQLQQSGPELEKPGASVKISCKASGFAFTGYNMNWVKQTNGKSLEWIGSIDPYYGGSTYNQKFKDKATLTVDKSSSTAYMQLKSLTSDDSAVYYCARSPGGDYAMDYWGQGTSVTVSSGGGGSGGGGSGGGGSDIKMTQSPSSMYASVGERVTITCKASQGINSYSGWFQQKPGKSPKTLIYRGNRLVDGVPSRFSGSGSGQDYSLTISSLEYEDMGIYYCLQYDEFPYTFGGGTKLEIKEPKSPDKTHTCPPCPAPPVAGPSVFLFPPKPKDTLMIARTPEVTCVVVDVSHEDPEVKFNWYVDGVEVHNAKTKPREEQYNSTYRVVSVLTVLHQDWLNGKEYKCKVSNKALPAPIEKTISKAKGQPREPQVYTLPPSRDELTKNQVSLTCLVKGFYPSDIAVEWESNGQPENNYKTTPPVLDSDGSFFLYSKLTVDKSRWQQGNVFSCSVMHEALHNHYTQKSLSLSPGKIISFFLALTSTALLFLLFFLTLRFSVVKRGRKKLLYIFKQPFMRPVQTTQEEDGCSCRFPEEEEGGCELRVKFSRSADAPAYQQGQNQLYNELNLGRREEYDVLDKRRGRDPEMGGKPRRKNPQEGLYNELQKDKMAEAYSEIGMKGERRRGKGHDGLYQGLSTATKDTYDALHMQALPPR

SEQ ID NO: 6331 - protein, 653 aa, Artificial Sequence
  Description of Artificial Sequence: Synthetic Chimeric Antigen Receptor sequence
QVQLQQPGAELVKPGTSVKLSCKASGYNFTNYWINWVKLRPGQGLEWIGEIYPGSGSTNYNEKFKSKATLTADTSSSTAYMQLSSLASEDSALYYCARDGNYYAMDYWGQGTSVTVSSGGGGSGGGGSGGGGSDIQMTQTTSSLSASLGDRVTITCRASQDINNYLNWYQQKPDGTVKLLIYYTSALHSGVPSRFSGSGSGTDYSLTISNLEQEDIATYFCQQGNTLPPYTFGGGTKLEIKEPKSPDKTHTCPPCPAPPVAGPSVFLFPPKPKDTLMIARTPEVTCVVVDVSHEDPEVKFNWYVDGVEVHNAKTKPREEQYNSTYRVVSVLTVLHQDWLNGKEYKCKVSNKALPAPIEKTISKAKGQPREPQVYTLPPSRDELTKNQVSLTCLVKGFYPSDIAVEWESNGQPENNYKTTPPVLDSDGSFFLYSKLTVDKSRWQQGNVFSCSVMHEALHNHYTQKSLSLSPGKIISFFLALTSTALLFLLFFLTLRFSVVKRGRKKLLYIFKQPFMRPVQTTQEEDGCSCRFPEEEEGGCELRVKFSRSADAPAYQQGQNQLYNELNLGRREEYDVLDKRRGRDPEMGGKPRRKNPQEGLYNELQKDKMAEAYSEIGMKGERRRGKGHDGLYQGLSTATKDTYDALHMQALPPR

SEQ ID NO: 6332 - protein, 654 aa, Artificial Sequence
  Description of Artificial Sequence: Synthetic Chimeric Antigen Receptor sequence
EVKLQESGAELARPGASVKMSCKASGYTFTSYTMHWVKQRPGQGLEWIGYINPSSGYTEYNQKFKDKTTLTADKSSSTAYMQLSSLTSGDSAVYYCARRVLWLRRGDYWGQGTILTVSAGGGGSGGGGSGGGGSMEVLITQTPSSLSASLGERVSLTCRASQDIGSSLNWLQQEPDGTIKRLIYATSSLDSGVPKRFSGSRSGSDYSLTISSLESEDFVDYYCLQYASSPYTFGGGTKLELKEPKSPDKTHTCPPCPAPPVAGPSVFLFPPKPKDTLMIARTPEVTCVVVDVSHEDPEVKFNWYVDGVEVHNAKTKPREEQYNSTYRVVSVLTVLHQDWLNGKEYKCKVSNKALPAPIEKTISKAKGQPREPQVYTLPPSRDELTKNQVSLTCLVKGFYPSDIAVEWESNGQPENNYKTTPPVLDSDGSFFLYSKLTVDKSRWQQGNVFSCSVMHEALHNHYTQKSLSLSPGKIISFFLALTSTALLFLLFFLTLRFSVVKRGRKKLLYIFKQPFMRPVQTTQEEDGCSCRFPEEEEGGCELRVKFSRSADAPAYQQGQNQLYNELNLGRREEYDVLDKRRGRDPEMGGKPRRKNPQEGLYNELQKDKMAEAYSEIGMKGERRRGKGHDGLYQGLSTATKDTYDALHMQALPPR

SEQ ID NO: 6333 - protein, 669 aa, Artificial Sequence
  Description of Artificial Sequence: Synthetic Chimeric Antigen Receptor sequence
MALPVTALLLPLALLLHAARPQVQLQESGPGLVKPSETLSLTCTVSGFSLTSYGYVHWVRQPPGKGLEWLGVIWAGGFTNYNPSLKSRLTISKDNSKNQVSLKLSSVTAADTAVYYCARRGSSYSMDYWGQGTLVTVSSGGGGSGGGGSGGGGSEIVLTQSPATLSLSPGERATLSCRASSNVSYIHWYQQKPGQAPRPWIYEISKLATGIPARFSGSGSGTDYTLTISSLEPEDFAVYYCQQWNYPLITFGQGTKLEIKEPKSPDKTHTCPPCPAPPVAGPSVFLFPPKPKDTLMIARTPEVTCVVVDVSHEDPEVKFNWYVDGVEVHNAKTKPREEQYNSTYRVVSVLTVLHQDWLNGKEYKCKVSNKALPAPIEKTISKAKGQPREPQVYTLPPSRDELTKNQVSLTCLVKGFYPSDIAVEWESNGQPENNYKTTPPVLDSDGSFFLYSKLTVDKSRWQQGNVFSCSVMHEALHNHYTQKSLSLSPGKIYIWAPLAGTCGVLLLSLVITLYCKRGRKKLLYIFKQPFMRPVQTTQEEDGCSCRFPEEEEGGCELRVKFSRSADAPAYQQGQNQLYNELNLGRREEYDVLDKRRGRDPEMGGKPRRKNPQEGLYNELQKDKMAEAYSEIGMKGERRRGKGHDGLYQGLSTATKDTYDALHMQALPPR

SEQ ID NO: 6334 - protein, 670 aa, Artificial Sequence
  Description of Artificial Sequence: Synthetic Chimeric Antigen Receptor sequence
MALPVTALLLPLALLLHAARPEVQLVESGGGLVKPGGSLRLSCAASGFTFSSYAMSWVRQAPGKGLEWVASISTGASAYFADSVKGRFTISRDNAKNSLYLQMNSLRAEDTAVYYCARITTSTWYFDVWGQGTTVTVSSGGGGSGGGGSGGGGSDIQMTQSPSSLSASVGDRVTITCRASQDINSYLSWFQQKPGKAPKTLIYRANRLQSGVPSRFSGSGSGQDYTLTISSLQPEDFATYYCLQYDEFPYTFGQGTKLEIKEPKSPDKTHTCPPCPAPPVAGPSVFLFPPKPKDTLMIARTPEVTCVVVDVSHEDPEVKFNWYVDGVEVHNAKTKPREEQYNSTYRVVSVLTVLHQDWLNGKEYKCKVSNKALPAPIEKTISKAKGQPREPQVYTLPPSRDELTKNQVSLTCLVKGFYPSDIAVEWESNGQPENNYKTTPPVLDSDGSFFLYSKLTVDKSRWQQGNVFSCSVMHEALHNHYTQKSLSLSPGKIYIWAPLAGTCGVLLLSLVITLYCKRGRKKLLYIFKQPFMRPVQTTQEEDGCSCRFPEEEEGGCELRVKFSRSADAPAYQQGQNQLYNELNLGRREEYDVLDKRRGRDPEMGGKPRRKNPQEGLYNELQKDKMAEAYSEIGMKGERRRGKGHDGLYQGLSTATKDTYDALHMQALPPR

SEQ ID NO: 6335 - protein, 672 aa, Artificial Sequence
  Description of Artificial Sequence: Synthetic Chimeric Antigen Receptor sequence
MALPVTALLLPLALLLHAARPQVQLQESGPGLVKPSETLSLTCTVSGFSLTSYGYVHWVRQPPGKGLEWLGVIWAGGFTNYNPSLKSRLTISKDNSKNQVSLKLSSVTAADTAVYYCARRGSSYSMDYWGQGTLVTVSSGGGGSGGGGSGGGGSEIVLTQSPATLSLSPGERATLSCRASSNVSYIHWYQQKPGQAPRPWIYEISKLATGIPARFSGSGSGTDYTLTISSLEPEDFAVYYCQQWNYPLITFGQGTKLEIKEPKSPDKTHTCPPCPAPPVAGPSVFLFPPKPKDTLMIARTPEVTCVVVDVSHEDPEVKFNWYVDGVEVHNAKTKPREEQYNSTYRVVSVLTVLHQDWLNGKEYKCKVSNKALPAPIEKTISKAKGQPREPQVYTLPPSRDELTKNQVSLTCLVKGFYPSDIAVEWESNGQPENNYKTTPPVLDSDGSFFLYSKLTVDKSRWQQGNVFSCSVMHEALHNHYTQKSLSLSPGKIISFFLALTSTALLFLLFFLTLRFSVVKRGRKKLLYIFKQPFMRPVQTTQEEDGCSCRFPEEEEGGCELRVKFSRSADAPAYQQGQNQLYNELNLGRREEYDVLDKRRGRDPEMGGKPRRKNPQEGLYNELQKDKMAEAYSEIGMKGERRRGKGHDGLYQGLSTATKDTYDALHMQALPPR

SEQ ID NO: 6336 - protein, 673 aa, Artificial Sequence
  Description of Artificial Sequence: Synthetic Chimeric Antigen Receptor sequence
MALPVTALLLPLALLLHAARPEVQLVESGGGLVKPGGSLRLSCAASGFTFSSYAMSWVRQAPGKGLEWVASISTGASAYFADSVKGRFTISRDNAKNSLYLQMNSLRAEDTAVYYCARITTSTWYFDVWGQGTTVTVSSGGGGSGGGGSGGGGSDIQMTQSPSSLSASVGDRVTITCRASQDINSYLSWFQQKPGKAPKTLIYRANRLQSGVPSRFSGSGSGQDYTLTISSLQPEDFATYYCLQYDEFPYTFGQGTKLEIKEPKSPDKTHTCPPCPAPPVAGPSVFLFPPKPKDTLMIARTPEVTCVVVDVSHEDPEVKFNWYVDGVEVHNAKTKPREEQYNSTYRVVSVLTVLHQDWLNGKEYKCKVSNKALPAPIEKTISKAKGQPREPQVYTLPPSRDELTKNQVSLTCLVKGFYPSDIAVEWESNGQPENNYKTTPPVLDSDGSFFLYSKLTVDKSRWQQGNVFSCSVMHEALHNHYTQKSLSLSPGKIISFFLALTSTALLFLLFFLTLRFSVVKRGRKKLLYIFKQPFMRPVQTTQEEDGCSCRFPEEEEGGCELRVKFSRSADAPAYQQGQNQLYNELNLGRREEYDVLDKRRGRDPEMGGKPRRKNPQEGLYNELQKDKMAEAYSEIGMKGERRRGKGHDGLYQGLSTATKDTYDALHMQALPPR

SEQ ID NO: 6337 - protein, 689 aa, Artificial Sequence
  Description of Artificial Sequence: Synthetic Chimeric Antigen Receptor sequence
TAMDFQVQIFSFLLISASVIMSREVQLVETGGGLVQPGKSLELTCATSGFTFNTAWMHWVRQSPDKRLEWIARIKDTSNNYATDYVESMKGRFTISRDDSKGSVNLQMNSLKEEDTATYYCTTDFYDGTYYWNYWGQGVMVTVSSGGGGSGGGGSGGGGSSYELIQPPSAAVTLGNTVSLTCVGDELPKRYAYWYQQKPDQSIVRVIYEDSVRPPGISDRFSGSSSGTTATLTIRDAQNEDEADYYCQSTYGDDKLYIFGGGTKLTVLGDPAEPKSPDKTHTCPPCPAPELLGGPSVFLFPPKPKDTLMISRTPEVTCVVVDVSHEDPEVKFNWYVDGVEVHNAKTKPREEQYNSTYRVVSVLTVLHQDWLNGKEYKCKVSNKALPAPIEKTISKAKGQPREPQVYTLPPSRDELTKNQVSLTCLVKGFYPSDIAVEWESNGQPENNYKTTPPVLDSDGSFFLYSKLTVDKSRWQQGNVFSCSVMHEALHNHYTQKSLSLSPGKKDPKFWVLVVVGGVLACYSLLVTVAFIIFWVRSKRSRLLHSDYMNMTPRRPGPTRKHYQPYAPPRDFAAYRSLRVKFSRSADAPAYQQGQNQLYNELNLGRREEYDVLDKRRGRDPEMGGKPRRKNPQEGLYNELQKDKMAEAYSEIGMKGERRRGKGHDGLYQGLSTATKDTYDALHMQALPPR

SEQ ID NO: 6338 - protein, 679 aa, Artificial Sequence
  Description of Artificial Sequence: Synthetic Chimeric Antigen Receptor sequence
MDFQVQIFSFLLISASVIMSRQVQLKESGPGLVAPSQSLSITCTVSGFSLSSQGVYWVRQPPGKGLEWLGAIWAGGSTNYNSALMSRLSISKDNSKSQVFLKMNSLQTDDTAMYYCARVDGYRGYNMDYWGQGTSVTVSSGGGGSGGGGSGGGGSENVLTQSPAIMSASPGEKVTMTCSASSSVSYMHWYQQKSSTSPKLWIYDTSKLASGVPGRFSGSGSGNSYSLTISSMEAEDVATYYCFQGSGYPLTFGAGTKLELKAAALPAEPKSPDKTHTCPPCPAPPVAGPSVFLFPPKPKDTLMIARTPEVTCVVVDVSHEDPEVKFNWYVDGVEVHNAKTKPREEQYNSTYRVVSVLTVLHQDWLNGKEYKCKVSNKALPAPIEKTISKAKGQPREPQVYTLPPSRDELTKNQVSLTCLVKGFYPSDIAVEWESNGQPENNYKTTPPVLDSDGSFFLYSKLTVDKSRWQQGNVFSCSVMHEALHNHYTQKSLSSLSPGKKIYIWAPLAGTCGVLLLSLVITLYCKRGRKKLLYIFKQPFMRPVQTTQEEDGCSCRFPEEEEGGCELLRVKFSRSADAPAYQQGQNQLYNELNLGRREEYDVLDKRRGRDPEMGGKPRRKNPQEGLYNELQKDKMAEAYSEIGMKGERRRGKGHDGLYQGLSTATKDTYDALHMQALPPR

SEQ ID NO: 6339 - protein, 383 aa, Artificial Sequence
  Description of Artificial Sequence: Synthetic polypeptide
MALPVTALLLPLALLLHAARPQVQLQQSGPELEKPGASVKISCKASGYSFTGYTMNWVKQSHGKSLEWIGLITPYNGASSYNQKFRGKATLTVDKSSSTAYMDLLSLTSEDSAVYFCARGGYDGRGFDYWGQGTTVTVSSGGGGSGGGGSGGGGSDIELTQSPAIMSASPGEKVTMTCSASSSVSYMHWYQQKSGTSPKRWIYDTSKLASGVPGRFSGSGSGNSYSLTISSVEAEDDATYYCQQWSGYPLTFGAGTKLEITTTPAPRPPTPAPTIASQPLSLRPEACRPAAGGAVHTRGLDFACDIYIWAPLAGTCGVLLLSLVITLYCKRGRKKLLYIFKQPFMRPVQTTQEEDGCSCRFPEEEEGGCELRVKFSRSADAPA

SEQ ID NO: 6340 - protein, 458 aa, Artificial Sequence
  Description of Artificial Sequence: Synthetic Chimeric Antigen Receptor sequence
MALPVTALLLPLALLLHAARPEVQLQQSGPDLVKPGASVKISCKASGYSFTGYYMHWVKQSHGKSLEWIGRINPNNGVTLYNQKFKDKAILTVDKSSTTAYMELRSLTSEDSAVYYCARSTMITNYVMDYWGQVTSVTVSSGGGGSGGGGSGGGGSSIVMTQTPTFLLVSAGDRVTITCKASQSVSNDVAWYQQKPGQSPTLLISYTSSRYAGVPDRFIGSGYGTDFTFTISTLQAEDLAVYFCQQDYNSPPTFGGGTKLEIKRGLAVSTISSFFPPGYQIYIWAPLAGTCGVLLLSLVITLYCKRGRKKLLYIFKQPFMRPVQTTQEEDGCSCRFPEEEEGGCELRVKFSRSADAPAYQQGQNQLYNELNLGRREEYDVLDKRRGRDPEMGGKPRRKNPQEGLYNELQKDKMAEAYSEIGMKGERRRGKGHDGLYQGLSTATKDTYDALHMQALPPR

SEQ ID NO: 6341 - protein, 679 aa, Artificial Sequence
  Description of Artificial Sequence: Synthetic Chimeric Antigen Receptor sequence
MDFQVQIFSFLLISASVIMSRENVLTQSPAIMSASPGEKVTMTCSASSSVSYMHWYQQKSSTSPKLWIYDTSKLASGVPGRFSGSGSGNSYSLTISSMEAEDVATYYCFQGSGYPLTFGAGTKLELKGGGGSGGGGSGGGGSQVQLKESGPGLVAPSQSLSITCTVSGFSLSSQGVYWVRQPPGKGLEWLGAIWAGGSTNYNSALMSRLSISKDNSKSQVFLKMNSLQTDDTAMYYCARVDGYRGYNMDYWGQGTSVTVSSAAALPAEPKSPDKTHTCPPCPAPPVAGPSVFLFPPKPKDTLMIARTPEVTCVVVDVSHEDPEVKFNWYVDGVEVHNAKTKPREEQYNSTYRVVSVLTVLHQDWLNGKEYKCKVSNKALPAPIEKTISKAKGQPREPQVYTLPPSRDELTKNQVSLTCLVKGFYPSDIAVEWESNGQPENNYKTTPPVLDSDGSFFLYSKLTVDKSRWQQGNVFSCSVMHEALHNHYTQKSLSSLSPGKKIYIWAPLAGTCGVLLLSLVITLYCKRGRKKLLYIFKQPFMRPVQTTQEEDGCSCRFPEEEEGGCELLRVKFSRSADAPAYQQGQNQLYNELNLGRREEYDVLDKRRGRDPEMGGKPRRKNPQEGLYNELQKDKMAEAYSEIGMKGERRRGKGHDGLYQGLSTATKDTYDALHMQALPPR

SEQ ID NO: 6342 - protein, 1345 aa, Artificial Sequence
  Description of Artificial Sequence: Synthetic Chimeric Antigen Receptor sequence
MSLPVTALLLPLALLLHAARPDIQMTQTTSSLSASLGDRVTISCRASQDISKYLNWYQQKPDGTVKLLIYHTSRLHSGVPSRFSGSGSGTDYSLTISNLEQEDIATYFCQQGNTLPYTFGGGTKLEITKAGGGGSGGGGSGGGGSGGGGSEVKLQESGPGLVAPSQSLSVTCTVSGVSLPDYGVSWIRQPPRKGLEWLGVIWGSETTYYNSALKSRLTIIKDNSKSQVFLKMNSLQTDDTAIYYCAKHYYYGGSYAMDYWGQGTSVTVSSDPTTTPAPRPPTPAPTIASQPLSLRPEACRPAAGGAVHTRGLDFACDIFVLVWGGVLACYSLLVTVAFIIFVVVRRVKFSRSADAPAYQQGQNQLYNELNLGRREEYDVLDKRRGRDPEMGGKPRRKNPQEGLYNELQKDKMAEAYSEIGMKGERRRGKGHDGLYQGLSTATKDTYDALHMQALPPRRAEGRGSLLTCGDVEENPGPMAVPTQVLGLLLLWLTDARCDIQMTQSPSSLSASVGDRVTITCRASEDIYFNLVWYQQKPGKAPKLLIYDTNRLADGVPSRFSGSGSGTQYTLTISSLQPEDFATYYCQHYKNYPLTFGQGTKLEIKRSGGGGSGGGGSGGGGSGGGGSRSEVQLVESGGGLVQPGGSLRLSCAASGFTLSNYGMHWIRQAPGKGLEWVSSISLNGGSTYYRDSVKGRFTISRDNAKSTLYLQMNSLRAEDTAVYYCAAQDAYTGGYFDYWGQGTLVTVSSMDPAEPKSPDKTHTCPPCPAPPVAGPSVFLFPPKPKDTLMIARTPEVTCVWDVSHEDPEVKFNWYVDGVEVHNAKTKPREEQYNSTYRWSVLTVLHQDWLNGKEYKCKVSNALPAPIEKTISKAKGQPREPQVYTLPPSRDELTNQVSLTCLVKGFYPSDIAVEWESNGQPENNYKTTPPVLDSDGSFFLYSKLTVDKSRWQQGNVFSCSVMHEALHNHYTQKSLSLSPGKKDPKAVFGCIFGALVIVTVGGFIFWRKKRKDAKNNEVSFSQIKPKKSKLIRVENFEAYFKKQQADSNCGFAEEYEDLKLVGISQPKYAAELAENRGKNRYNNVLPYDISRVKLSVQTHSTDDYINANYMPGYHSKKDFIATQGPLPNTLKDFWRMVWEKNVYAIIMLTKCVEQGRTKCEEYWPSKQAQDYGDITVAMTSEIVLPEWTIRDFTVKNIQTSESHPLRQFHFTSWPDHGVPDTTDLLINFRYLVRDYMKQSPPESPILVHCSAGVGRTGTFIAIDRLIYQIENENTVDVYGIVYDLRMHRPLMVQTEDQYVFLNQCVLDIVRSQKDSKVDLIYQNTTAMTIYENLAPVTTFGKTNGYIA

SEQ ID NO: 6343 - protein, 912 aa, Artificial Sequence
  Description of Artificial Sequence: Synthetic Chimeric Antigen Receptor sequence
SLPVTALLLPLALLLHAARPDIQMTQTTSSLSASLGDRVTISCRASQDISKYLNWYQQKPDGTVKLLIYHTSRLHSGVPSRFSGSGSGTDYSLTISNLEQEDIATYFCQQGNTLPYTFGGGTKLEITKAGGGGSGGGGSGGGGSGGGGSEVKLQESGPGLVAPSQSLSVTCTVSGVSLPDYGVSWIRQPPRKGLEWLGVIWGSETTYYNSALKSRLTIIKDNSKSQVFLKMNSLQTDDTAIYYCAKHYYYGGSYAMDYWGQGTSVTVSSDPTTTPAPRPPTPAPTIASQPLSLRPEACRPAAGGAVHTRGLDFACDIFVWLVWGGVLACYSLLVTVAFIIFWVRRVKFSRSADAPAYQQGQNQLYNELNLGRREEYDVLDKRRGRDPEMGGKPRRKNPQEGLYNELQKDKMAEAYSEIGMKGERRRGKGHDGLYQGLSTATKDTYDALHMQALPPRRAEGRGSLLTCGDVEENPGPMAVPTQVLGLLLLWLTDARCDIQMTQSPSSLSASVGDRVTITCRASEDIYFNLVWYQQKPGKAPKLLIYDTNRLADGVPSRFSGSGSGTQYTLTISSLQPEDFATYYCQHYKNYPLTFGQGTKLEIKRSGGGGSGGGGSGGGGSGGGGSRSEVQLVESGGGLVQPGGSLRLSCAASGFTLSNYGMHWIRQAPGKGLEWVSSISLNGGSTYYRDSVKGRFTISRDNAKSTLYLQNSLRAEDTAVYYCAAQDAYTGGYFDYWGQGTLVTVSSMDPATTTKPVLRTPSPVHPTGTSQPQRPEDCRPRGSVKGTGLDFACDILIGVSWFLFCLLLLVLFCLHRQNQIKQGPPRSKDEEQKPQQRPDLAVDVLERTADKANGLPEKDRETDTSALAAGSSQEVTYAQLDHWALTQRTARAVSPQSTKPMAESITYAAVARH

SEQ ID NO: 6344 - protein, 1112 aa, Artificial Sequence
  Description of Artificial Sequence: Synthetic Chimeric Antigen Receptor sequence
MSLPVTALLLPLALLLHAARPDIQMTQTTSSLSASLGDRVTISCRASQDISKYLNWYQQKPDGTVKLLIYHTSRLHSGVPSRFSGSGSGTDYSLTISNLEQEDIATYFCQQGNTLPYTFGGGTKLEITKAGGGGSGGGGSGGGGSGGGGSEVKLQESGPGLVAPSQSLSVTCTVSGVSLPDYGVSWIRQPPRKGLEWLGVIWGSETTYYNSALKSRLTIIKDNSKSQVFLKMNSLQTDDTAIYYCAKHYYYGGSYAMDYWGQGTSVTVSSDPTTTPAPRPPTPAPTIASQPLSLRPEACRPAAGGAVHTRGLDFACDIFVWLWVGGVLACYSLLVTVAFIIFVWRRVKFSRSADAPAYQQGQNQLYNELNLGRREEYDVLDKRRGRDPEGGKPRRKNPQEGLYNELQKDKMAEAYSEIGKGERRRGKGHDGLYQGLSTATKDTYDALHMQALPPRRAEGRGSLLTCGDVEENPGPMAVPTQVLGLLLLWLTDARCDIQMTQSPSSLSASVGDRVTITCRASEDIYFNLNAAYQQKPGKAPKLLIYDTNRLADGVPSRFSGSGSGTQYTLTISSLQPEDFATYYCQHYKNYPLTFGQGTKLEIKRSGGGGSGGGGSGGGGSGGGGSRSEVQLVESGGGLVQPGGSLRLSCAASGFTLSNYGMHWIRQAPGKGLEWVSSISLNGGSTYYRDSVKGRFTISRDNAKSTLYLQMNSLRAEDTAVYYCAAQDAYTGGYFDYWGQGTLVTVSSMDPATTTKPVLRTPSPVHPTGTSQPQRPEDCRPRGSVKGTGLDFACDIYWAPLAGICVALLLSLIITLICYHRSRKRVCKSGGGSFWEEFESLQKQEVKNLHQRLEGQRPENKGKNRYKNILPFDHSRVILQGRDSNIPGSDYINANYIKNQLLGPDENAKTYIASQGCLEATVNDFWQMAWQENSRVIVMTTREVEKGRNKCVPYWPEVGMQRAYGPYSVTNCGEHDTTEYKLRTLQVSPLDNGDLIREIWHYQYLSWPDHGVPSEPGGVLSFLDQINQRQESLPHAGPIIVHCSAGIGRTGTIIVIDMLMENISTKGLDCDIDIQKTIQMVRAQRSGMVQTEAQYKFIYVAIAQFIETTKKKL

SEQ ID NO: 6345 - protein, 1363 aa, Artificial Sequence
  Description of Artificial Sequence: Synthetic Chimeric Antigen Receptor sequence
MSLPVTALLLPLALLLHAARPDIQMTQTTSSLSASLGDRVTISCRASQDISKYLNWYQQKPDGTVKLLIYHTSRLHSGVPSRFSGSGSGTDYSLTISNLEQEDIATYFCQQGNTLPYTFGGGTKLEITKAGGGGSGGGGSGGGGSGGGGSEVKLQESGPGLVAPSQSLSVTCTVSGVSLPDYGVSWIRQPPRKGLEWLGVIWGSETTYYNSALKSRLTIIKDNSKSQVFLKMNSLQTDDTAIYYCAKHYYYGGSYAMDYWGQGTSVTVSSDPTTTPAPRPPTPAPTIASQPLSLRPEACRPAAGGAVHTRGLDFACDIFWVLVVVGGVLACYSLLVTVAFIIFWVRRVKFSRSADAPAYQQGQNQLYNELNLGRREEYDVLDKRRGRDPEMGGKPRRKNPQEGLYNELQKDKMAEAYSEIGMKGERRRGKGHDGLYQGLSTATKDTYDALHMQALPPRRAEGRGSLLTCGDVEENPGPMAVPTQVLGLLLLWLTDARCDIQMTQSPSSLSASVGDRVTITCRASEDIYFNLVWYQQKPGKAPKLLIYDTNRLADGVPSRFSGSGSGTQYTLTISSLQPEDFATYYCQHYKNYPLTFGQGTKLEIKRSGGGGSGGGGSGGGGSGGGGSRSEVQLVESGGGLVQPGGSLRLSCAASGFTLSNYGMHWIRQAPGKGLEWVSSISLNGGSTYYRDSVKGRFTISRDNAKSTLYLQMNSLRAEDTAVYYCAAQDAYTGGYFDYWGQGTLVTVSSMDPATTTKPVLRTPSPVHPTGTSQPQRPEDCRPRGSVKGTGLDFACDILIGVSVVFLFCLLLLVLFCLHRQNQIKQGPPRSKDEEQKPQQRPDLAVDVLERTADKATVNGLPEKDRETDTSALAAGSSQEVTYAQLDHWALTQRTARAVSPQSTKPMAESITYAAVARHRAEGRGSLLTCGDVEENPGPWYHGHMSGGQAETLLQAKGEPWTFLVRESLSQPGDFVLSVLSDQPKAGPGSPLRVTHIKVMCEGGRYTVGGLETFDSLTDLVEHFKKTGIEEASGAFVYLRQPYSGGGGSFEAYFKKQQADSNCGFAEEYEDLKLVGISQPKYAAELAENRGKNRYNNVLPYDISRVKLSVQTHSTDDYINANYMPGYHSKKDFIATQGPLPNTLKDFWRMVWEKNVYAIIMLTKCVEQGRTKCEEYWPSKQAQDYGDITVAMTSEIVLPEWTIRDFTVKNIQTSESHPLRQFHFTSWPDHGVPDTTDLLINFRYLVRDYMKQSPPESPILVHCSAGVGRTGTFIAIDRLIYQIENENTVDVYGIVYDLRMHRPLMVQTEDQYVFLNQCVLDIVRSQKDSKVDLIYQNTTAMTIYENLAPVTTFGKTNGYIASGS

SEQ ID NO: 6346 - protein, 489 aa, Artificial Sequence
  Description of Artificial Sequence: Synthetic Chimeric Antigen Receptor sequence
MALPVTALLLPLALLLHAARPQVTLKESGPGILKPSQTLSLTCSFSGFSLSTSGMGVGWIRQPSGKGLEWLAHIWWDDDKYYNPSLKSQLTISKDTSRNQVFLKITSVDTADTATYYCSRRPRGTMDAMDYWGQGTSVTVSSGGGGSGGGGSGGGGSDIVMTQAASSLSASLGDRVTISCRASQDISKYLNWYQQKPDGTVKLLIYYTSRLHSGVPSRFSGSGSGTDYSLTIRNLEQEDIATYFCQQVYTLPWTFGGGTKLEIKSGTTTPAPRPPTPAPTIASQPLSLRPEACRPAAGGAVHTRGLDFACDIYIWAPLAGTCGVLLLSLVITLYCKRGRKKLLYIFKQPFMRPVQTTQEEDGCSCRFPEEEEGGCELRVKFSRSADAPAYKQGQNQLYNELNLGRREEYDVLDKRRGRDPEMGGKPRRKNPQEGLYNELQKDKMAEAYSEIGMKGERRRGKGHDGLYQGLSTATKDTYDALHMQALPPR

SEQ ID NO: 6347 - protein, 455 aa, Artificial Sequence
  Description of Artificial Sequence: Synthetic Chimeric Antigen Receptor sequence
MALPVTALLLPLALLLHAARPQIQLVQSGPELKKPGETVKISCKASGYTFTNFGMNWVKQGPGEGLKWMGWINTNTGEPRYAEEFKGRFAFSLETTASTAYLQINNLKNEDTATYFCARDWDGAYFFDYWGQGTTLTVSSGGGSGGGGSGGGGSSIVMTQTPKFLLVSAGDRVTITCKASQSVSNDVAWYQQKPGQSPKLLINFATNRYTGVPNRFTGSGYGTDFTFTISTVQAEDLALYFCQQDYSSPWTFGGGTKLEIKGLAVSTISSFFPPGYQIYIWAPLAGTCGVLLLSLVITLYCKRGRKKLLYIFKQPFMRPVQTTQEEDGCSCRFPEEEEGGCELRVKFSRSADAPAYQQGQNQLYNELNLGRREEYDVLDKRRGRDPEMGGKPRRKNPQEGLYNELQKDKMAEAYSEIGMKGERRRGKGHDGLYQGLSTATKDTYDALHMQALPPR

SEQ ID NO: 6348 - protein, 455 aa, Artificial Sequence
  Description of Artificial Sequence: Synthetic Chimeric Antigen Receptor sequence
MALPVTALLLPLALLLHAARPQVQLQQSRPELVKPGASVKMSCKASGYTFTDYVISWVKQRTGQGLEWIGEIYPGSNSIYYNEKFKGRATLTADKSSSTAYMQLSSLTSEDSAVYFCAMGGNYGFDYWGQGTTLTVSSGGGGSGGGGSGGGGSQIVLTQSPAIMSASLGERVTLTCTASSSVNSNYLHWYQQKPGSSPKLWIYSTSNLASGVPARFSGSGSGTSYSLTISSMEAEDAATYYCHQYHRSPLTFGAGTKLELKGLAVSTISSFFPPGYQIYIWAPLAGTCGVLLLSLVITLYCKRGRKKLLYIFKQPFMRPVQTTQEEDGCSCRFPEEEEGGCELRVKFSRSADAPAYQQGQNQLYNELNLGRREEYDVLDKRRGRDPEMGGKPRRKNPQEGLYNELQKDKMAEAYSEIGMKGERRRGKGHDGLYQGLSTATKDTYDALHMQALPPR

SEQ ID NO: 6349 - protein, 458 aa, Artificial Sequence
  Description of Artificial Sequence: Synthetic Chimeric Antigen Receptor sequence
MALPVTALLLPLALLLHAARPQIQLVQSGPELKKPGETVKISCKASGYTFTNFGMNWVKQGPGEGLKWMGWINTNTGEPRYAEEFKGRFAFSLETTASTAYLQINNLKNEDTATYFCARDWDGAYFFDYWGQGTTLTVSSGGGSGGGGSGGGGSSIVMTQTPKFLLVSAGDRVTITCKASQSVSNDVAWYQQKPGQSPKLLINFATNRYTGVPNRFTGSGYGTDFTFTISTVQAEDLALYFCQQDYSSPWTFGGGTKLEIKGLAVSTISSFFPPGYQIISFFLALTSTALLFLLFFLTLRFSVVKRGRKKLLYIFKQPFMRPVQTTQEEDGCSCRFPEEEEGGCELRVKFSRSADAPAYQQGQNQLYNELNLGRREEYDVLDKRRGRDPEMGGKPRRKNPQEGLYNELQKDKMAEAYSEIGMKGERRRGKGHDGLYQGLSTATKDTYDALHMQALPPR

SEQ ID NO: 6350 - protein, 458 aa, Artificial Sequence
  Description of Artificial Sequence: Synthetic Chimeric Antigen Receptor sequence
MALPVTALLLPLALLLHAARPQVQLQQSRPELVKPGASVKMSCKASGYTFTDYVISWVKQRTGQGLEWIGEIYPGSNSIYYNEKFKGRATLTADKSSSTAYMQLSSLTSEDSAVYFCAMGGNYGFDYWGQGTTLTVSSGGGGSGGGGSGGGGSQIVLTQSPAIMSASLGERVTLTCTASSSVNSNYLHWYQQKPGSSPKLWIYSTSNLASGVPARFSGSGSGTSYSLTISSMEAEDAATYYCHQYHRSPLTFGAGTKLELKGLAVSTISSFFPPGYQIISFFLALTSTALLFLLFFLTLRFSVVKRGRKKLLYIFKQPFMRPVQTTQEEDGCSCRFPEEEEGGCELRVKFSRSADAPAYQQGQNQLYNELNLGRREEYDVLDKRRGRDPEMGGKPRRKNPQEGLYNELQKDKMAEAYSEIGMKGERRRGKGHDGLYQGLSTATKDTYDALHMQALPPR

SEQ ID NO: 6351 - protein, 459 aa, Artificial Sequence
  Description of Artificial Sequence: Synthetic Chimeric Antigen Receptor sequence
MALPVTALLLPLALLLHAARPEVQLVESGGGLVQPKGSLKLSCAASGFTFNTYAMNWVRQAPGKGLEWVARIRSKSNNYATYYADSVKDRFTISRDDSQSMLYLQMNNLKTEDTAMYYCVRQWDYDVRAMNYWGQGTSVTVSSGGGGSGGGGSGGGGSDIVMTQSHIFMSTSVGDRVSITCKASQDVDTAVAWYQQKPGQSPKLLIYWASTRLTGVPDRFTGSGSGTDFTLTISNVQSEDLADYFCQQYSSYPYTFGGGTKLEIKGLAVSTISSFFPPGYQIYIWAPLAGTCGVLLLSLVITLYCKRGRKKLLYIFKQPFMRPVQTTQEEDGCSCRFPEEEEGGCELRVKFSRSADAPAYQQGQNQLYNELNLGRREEYDVLDKRRGRDPEMGGKPRRKNPQEGLYNELQKDKMAEAYSEIGMKGERRRGKGHDGLYQGLSTATKDTYDALHMQALPPR

SEQ ID NO: 6352 - protein, 461 aa, Artificial Sequence
  Description of Artificial Sequence: Synthetic Chimeric Antigen Receptor sequence
MALPVTALLLPLALLLHAARPEVQLQQSGPDLVKPGASVKISCKASGYSFTGYYMHWVKQSHGKSLEWIGRINPNNGVTLYNQKFKDKAILTVDKSSTTAYMELRSLTSEDSAVYYCARSTMITNYVMDYWGQVTSVTVSSGGGGSGGGGSGGGGSSIVMTQTPTFLLVSAGDRVTITCKASQSVSNDVAWYQQKPGQSPTLLISYTSSRYAGVPDRFIGSGYGTDFTFTISTLQAEDLAVYFCQQDYNSPPTFGGGTKLEIKRGLAVSTISSFFPPGYQIISFFLALTSTALLFLLFFLTLRFSVVKRGRKKLLYIFKQPFMRPVQTTQEEDGCSCRFPEEEEGGCELRVKFSRSADAPAYQQGQNQLYNELNLGRREEYDVLDKRRGRDPEMGGKPRRKNPQEGLYNELQKDKMAEAYSEIGMKGERRRGKGHDGLYQGLSTATKDTYDALHMQALPPR

SEQ ID NO: 6353 - protein, 462 aa, Artificial Sequence
  Description of Artificial Sequence: Synthetic Chimeric Antigen Receptor sequence
MALPVTALLLPLALLLHAARPEVQLVESGGGLVQPKGSLKLSCAASGFTFNTYAMNWVRQAPGKGLEWVARIRSKSNNYATYYADSVKDRFTISRDDSQSMLYLQMNNLKTEDTAMYYCVRQWDYDVRAMNYWGQGTSVTVSSGGGGSGGGGSGGGGSDIVMTQSHIFMSTSVGDRVSITCKASQDVDTAVAWYQQKPGQSPKLLIYWASTRLTGVPDRFTGSGSGTDFTLTISNVQSEDLADYFCQQYSSYPYTFGGGTKLEIKGLAVSTISSFFPPGYQIISFFLALTSTALLFLLFFLTLRFSVVKRGRKKLLYIFKQPFMRPVQTTQEEDGCSCRFPEEEEGGCELRVKFSRSADAPAYQQGQNQLYNELNLGRREEYDVLDKRRGRDPEMGGKPRRKNPQEGLYNELQKDKMAEAYSEIGMKGERRRGKGHDGLYQGLSTATKDTYDALHMQALPPR

SEQ ID NO: 6354 - protein, 484 aa, Artificial Sequence
  Description of Artificial Sequence: Synthetic Chimeric Antigen Receptor sequence
MALPVTALLLPLALLLHAARPQIQLVQSGPELKKPGETVKISCKASGYTFTNFGMNWVKQGPGEGLKWMGWINTNTGEPRYAEEFKGRFAFSLETTASTAYLQINNLKNEDTATYFCARDWDGAYFFDYWGQGTTLTVSSGGGSGGGGSGGGGSSIVMTQTPKFLLVSAGDRVTITCKASQSVSNDVAWYQQKPGQSPKLLINFATNRYTGVPNRFTGSGYGTDFTFTISTVQAEDLALYFCQQDYSSPWTFGGGTKLEIKTTTPAPRPPTPAPTIASQPLSLRPEACRPAAGGAVHTRGLDFACDIYIWAPLAGTCGVLLLSLVITLYCKRGRKKLLYIFKQPFMRPVQTTQEEDGCSCRFPEEEEGGCELRVKFSRSADAPAYQQGQNQLYNELNLGRREEYDVLDKRRGRDPEMGGKPRRKNPQEGLYNELQKDKMAEAYSEIGMKGERRRGKGHDGLYQGLSTATKDTYDALHMQALPPR

SEQ ID NO: 6355 - protein, 484 aa, Artificial Sequence
  Description of Artificial Sequence: Synthetic Chimeric Antigen Receptor sequence
MALPVTALLLPLALLLHAARPQVQLQQSRPELVKPGASVKMSCKASGYTFTDYVISWVKQRTGQGLEWIGEIYPGSNSIYYNEKFKGRATLTADKSSSTAYMQLSSLTSEDSAVYFCAMGGNYGFDYWGQGTTLTVSSGGGGSGGGGSGGGGSQIVLTQSPAIMSASLGERVTLTCTASSSVNSNYLHWYQQKPGSSPKLWIYSTSNLASGVPARFSGSGSGTSYSLTISSMEAEDAATYYCHQYHRSPLTFGAGTKLELKTTTPAPRPPTPAPTIASQPLSLRPEACRPAAGGAVHTRGLDFACDIYIWAPLAGTCGVLLLSLVITLYCKRGRKKLLYIFKQPFMRPVQTTQEEDGCSCRFPEEEEGGCELRVKFSRSADAPAYQQGQNQLYNELNLGRREEYDVLDKRRGRDPEMGGKPRRKNPQEGLYNELQKDKMAEAYSEIGMKGERRRGKGHDGLYQGLSTATKDTYDALHMQALPPR

SEQ ID NO: 6356 - protein, 487 aa, Artificial Sequence
  Description of Artificial Sequence: Synthetic Chimeric Antigen Receptor sequence
MALPVTALLLPLALLLHAARPEVQLQQSGPDLVKPGASVKISCKASGYSFTGYYMHWVKQSHGKSLEWIGRINPNNGVTLYNQKFKDKAILTVDKSSTTAYMELRSLTSEDSAVYYCARSTMITNYVMDYWGQVTSVTVSSGGGGSGGGGSGGGGSSIVMTQTPTFLLVSAGDRVTITCKASQSVSNDVAWYQQKPGQSPTLLISYTSSRYAGVPDRFIGSGYGTDFTFTISTLQAEDLAVYFCQQDYNSPPTFGGGTKLEIKRTTTPAPRPPTPAPTIASQPLSLRPEACRPAAGGAVHTRGLDFACDIYIWAPLAGTCGVLLLSLVITLYCKRGRKKLLYIFKQPFMRPVQTTQEEDGCSCRFPEEEEGGCELRVKFSRSADAPAYQQGQNQLYNELNLGRREEYDVLDKRRGRDPEMGGKPRRKNPQEGLYNELQKDKMAEAYSEIGMKGERRRGKGHDGLYQGLSTATKDTYDALHMQALPPR

SEQ ID NO: 6357 - protein, 487 aa, Artificial Sequence
  Description of Artificial Sequence: Synthetic Chimeric Antigen Receptor sequence
MALPVTALLLPLALLLHAARPQIQLVQSGPELKKPGETVKISCKASGYTFTNFGMNWVKQGPGEGLKWMGWINTNTGEPRYAEEFKGRFAFSLETTASTAYLQINNLKNEDTATYFCARDWDGAYFFDYWGQGTTLTVSSGGGSGGGGSGGGGSSIVMTQTPKFLLVSAGDRVTITCKASQSVSNDVAWYQQKPGQSPKLLINFATNRYTGVPNRFTGSGYGTDFTFTISTVQAEDLALYFCQQDYSSPWTFGGGTKLEIKTTTPAPRPPTPAPTIASQPLSLRPEACRPAAGGAVHTRGLDFACDIISFFLALTSTALLFLLFFLTLRFSVVKRGRKKLLYIFKQPFMRPVQTTQEEDGCSCRFPEEEEGGCELRVKFSRSADAPAYQQGQNQLYNELNLGRREEYDVLDKRRGRDPEMGGKPRRKNPQEGLYNELQKDKMAEAYSEIGMKGERRRGKGHDGLYQGLSTATKDTYDALHMQALPPR

SEQ ID NO: 6358 - protein, 487 aa, Artificial Sequence
  Description of Artificial Sequence: Synthetic Chimeric Antigen Receptor sequence
MALPVTALLLPLALLLHAARPQVQLQQSRPELVKPGASVKMSCKASGYTFTDYVISWVKQRTGQGLEWIGEIYPGSNSIYYNEKFKGRATLTADKSSSTAYMQLSSLTSEDSAVYFCAMGGNYGFDYWGQGTTLTVSSGGGGSGGGGSGGGGSQIVLTQSPAIMSASLGERVTLTCTASSSVNSNYLHWYQQKPGSSPKLWIYSTSNLASGVPARFSGSGSGTSYSLTISSMEAEDAATYYCHQYHRSPLTFGAGTKLELKTTTPAPRPPTPAPTIASQPLSLRPEACRPAAGGAVHTRGLDFACDIISFFLALTSTALLFLLFFLTLRFSVVKRGRKKLLYIFKQPFMRPVQTTQEEDGCSCRFPEEEEGGCELRVKFSRSADAPAYQQGQNQLYNELNLGRREEYDVLDKRRGRDPEMGGKPRRKNPQEGLYNELQKDKMAEAYSEIGMKGERRRGKGHDGLYQGLSTATKDTYDALHMQALPPR

SEQ ID NO: 6359 - protein, 488 aa, Artificial Sequence
  Description of Artificial Sequence: Synthetic Chimeric Antigen Receptor sequence
MALPVTALLLPLALLLHAARPEVQLVESGGGLVQPKGSLKLSCAASGFTFNTYAMNWVRQAPGKGLEWVARIRSKSNNYATYYADSVKDRFTISRDDSQSMLYLQMNNLKTEDTAMYYCVRQWDYDVRAMNYWGQGTSVTVSSGGGGSGGGGSGGGGSDIVMTQSHIFMSTSVGDRVSITCKASQDVDTAVAWYQQKPGQSPKLLIYWASTRLTGVPDRFTGSGSGTDFTLTISNVQSEDLADYFCQQYSSYPYTFGGGTKLEIKTTTPAPRPPTPAPTIASQPLSLRPEACRPAAGGAVHTRGLDFACDIYIWAPLAGTCGVLLLSLVITLYCKRGRKKLLYIFKQPFMRPVQTTQEEDGCSCRFPEEEEGGCELRVKFSRSADAPAYQQGQNQLYNELNLGRREEYDVLDKRRGRDPEMGGKPRRKNPQEGLYNELQKDKMAEAYSEIGMKGERRRGKGHDGLYQGLSTATKDTYDALHMQALPPR

SEQ ID NO: 6360 - protein, 490 aa, Artificial Sequence
  Description of Artificial Sequence: Synthetic Chimeric Antigen Receptor sequence
MALPVTALLLPLALLLHAARPEVQLQQSGPDLVKPGASVKISCKASGYSFTGYYMHWVKQSHGKSLEWIGRINPNNGVTLYNQKFKDKAILTVDKSSTTAYMELRSLTSEDSAVYYCARSTMITNYVMDYWGQVTSVTVSSGGGGSGGGGSGGGGSSIVMTQTPTFLLVSAGDRVTITCKASQSVSNDVAWYQQKPGQSPTLLISYTSSRYAGVPDRFIGSGYGTDFTFTISTLQAEDLAVYFCQQDYNSPPTFGGGTKLEIKRTTTPAPRPPTPAPTIASQPLSLRPEACRPAAGGAVHTRGLDFACDIISFFLALTSTALLFLLFFLTLRFSVVKRGRKKLLYIFKQPFMRPVQTTQEEDGCSCRFPEEEEGGCELRVKFSRSADAPAYQQGQNQLYNELNLGRREEYDVLDKRRGRDPEMGGKPRRKNPQEGLYNELQKDKMAEAYSEIGMKGERRRGKGHDGLYQGLSTATKDTYDALHMQALPPR

SEQ ID NO: 6361 - protein, 491 aa, Artificial Sequence
  Description of Artificial Sequence: Synthetic Chimeric Antigen Receptor sequence
MALPVTALLLPLALLLHAARPEVQLVESGGGLVQPKGSLKLSCAASGFTFNTYAMNWVRQAPGKGLEWVARIRSKSNNYATYYADSVKDRFTISRDDSQSMLYLQMNNLKTEDTAMYYCVRQWDYDVRAMNYWGQGTSVTVSSGGGGSGGGGSGGGGSDIVMTQSHIFMSTSVGDRVSITCKASQDVDTAVAWYQQKPGQSPKLLIYWASTRLTGVPDRFTGSGSGTDFTLTISNVQSEDLADYFCQQYSSYPYTFGGGTKLEIKTTTPAPRPPTPAPTIASQPLSLRPEACRPAAGGAVHTRGLDFACDIISFFLALTSTALLFLLFFLTLRFSVVKRGRKKLLYIFKQPFMRPVQTTQEEDGCSCRFPEEEEGGCELRVKFSRSADAPAYQQGQNQLYNELNLGRREEYDVLDKRRGRDPEMGGKPRRKNPQEGLYNELQKDKMAEAYSEIGMKGERRRGKGHDGLYQGLSTATKDTYDALHMQALPPR

SEQ ID NO: 6362 - protein, 670 aa, Artificial Sequence
  Description of Artificial Sequence: Synthetic Chimeric Antigen Receptor sequence
MALPVTALLLPLALLLHAARPQIQLVQSGPELKKPGETVKISCKASGYTFTNFGMNWVKQGPGEGLKWMGWINTNTGEPRYAEEFKGRFAFSLETTASTAYLQINNLKNEDTATYFCARDWDGAYFFDYWGQGTTLTVSSGGGSGGGGSGGGGSSIVMTQTPKFLLVSAGDRVTITCKASQSVSNDVAWYQQKPGQSPKLLINFATNRYTGVPNRFTGSGYGTDFTFTISTVQAEDLALYFCQQDYSSPWTFGGGTKLEIKEPKSPDKTHTCPPCPAPPVAGPSVFLFPPKPKDTLMIARTPEVTCVVVDVSHEDPEVKFNWYVDGVEVHNAKTKPREEQYNSTYRVVSVLTVLHQDWLNGKEYKCKVSNKALPAPIEKTISKAKGQPREPQVYTLPPSRDELTKNQVSLTCLVKGFYPSDIAVEWESNGQPENNYKTTPPVLDSDGSFFLYSKLTVDKSRWQQGNVFSCSVMHEALHNHYTQKSLSLSPGKIYIWAPLAGTCGVLLLSLVITLYCKRGRKKLLYIFKQPFMRPVQTTQEEDGCSCRFPEEEEGGCELRVKFSRSADAPAYQQGQNQLYNELNLGRREEYDVLDKRRGRDPEMGGKPRRKNPQEGLYNELQKDKMAEAYSEIGMKGERRRGKGHDGLYQGLSTATKDTYDALHMQALPPR

SEQ ID NO: 6363 - protein, 670 aa, Artificial Sequence
  Description of Artificial Sequence: Synthetic Chimeric Antigen Receptor sequence
MALPVTALLLPLALLLHAARPQVQLQQSRPELVKPGASVKMSCKASGYTFTDYVISWVKQRTGQGLEWIGEIYPGSNSIYYNEKFKGRATLTADKSSSTAYMQLSSLTSEDSAVYFCAMGGNYGFDYWGQGTTLTVSSGGGGSGGGGSGGGGSQIVLTQSPAIMSASLGERVTLTCTASSSVNSNYLHWYQQKPGSSPKLWIYSTSNLASGVPARFSGSGSGTSYSLTISSMEAEDAATYYCHQYHRSPLTFGAGTKLELKEPKSPDKTHTCPPCPAPPVAGPSVFLFPPKPKDTLMIARTPEVTCVVVDVSHEDPEVKFNWYVDGVEVHNAKTKPREEQYNSTYRVVSVLTVLHQDWLNGKEYKCKVSNKALPAPIEKTISKAKGQPREPQVYTLPPSRDELTKNQVSLTCLVKGFYPSDIAVEWESNGQPENNYKTTPPVLDSDGSFFLYSKLTVDKSRWQQGNVFSCSVMHEALHNHYTQKSLSLSPGKIYIWAPLAGTCGVLLLSLVITLYCKRGRKKLLYIFKQPFMRPVQTTQEEDGCSCRFPEEEEGGCELRVKFSRSADAPAYQQGQNQLYNELNLGRREEYDVLDKRRGRDPEMGGKPRRKNPQEGLYNELQKDKMAEAYSEIGMKGERRRGKGHDGLYQGLSTATKDTYDALHMQALPPR

SEQ ID NO: 6364 - protein, 673 aa, Artificial Sequence
  Description of Artificial Sequence: Synthetic Chimeric Antigen Receptor sequence
MALPVTALLLPLALLLHAARPQIQLVQSGPELKKPGETVKISCKASGYTFTNFGMNWVKQGPGEGLKWMGWINTNTGEPRYAEEFKGRFAFSLETTASTAYLQINNLKNEDTATYFCARDWDGAYFFDYWGQGTTLTVSSGGGSGGGGSGGGGSSIVMTQTPKFLLVSAGDRVTITCKASQSVSNDVAWYQQKPGQSPKLLINFATNRYTGVPNRFTGSGYGTDFTFTISTVQAEDLALYFCQQDYSSPWTFGGGTKLEIKEPKSPDKTHTCPPCPAPPVAGPSVFLFPPKPKDTLMIARTPEVTCVVVDVSHEDPEVKFNWYVDGVEVHNAKTKPREEQYNSTYRVVSVLTVLHQDWLNGKEYKCKVSNKALPAPIEKTISKAKGQPREPQVYTLPPSRDELTKNQVSLTCLVKGFYPSDIAVEWESNGQPENNYKTTPPVLDSDGSFFLYSKLTVDKSRWQQGNVFSCSVMHEALHNHYTQKSLSLSPGKIISFFLALTSTALLFLLFFLTLRFSVVKRGRKKLLYIFKQPFMRPVQTTQEEDGCSCRFPEEEEGGCELRVKFSRSADAPAYQQGQNQLYNELNLGRREEYDVLDKRRGRDPEMGGKPRRKNPQEGLYNELQKDKMAEAYSEIGMKGERRRGKGHDGLYQGLSTATKDTYDALHMQALPPR

SEQ ID NO: 6365 - protein, 673 aa, Artificial Sequence
  Description of Artificial Sequence: Synthetic Chimeric Antigen Receptor sequence
MALPVTALLLPLALLLHAARPQVQLQQSRPELVKPGASVKMSCKASGYTFTDYVISWVKQRTGQGLEWIGEIYPGSNSIYYNEKFKGRATLTADKSSSTAYMQLSSLTSEDSAVYFCAMGGNYGFDYWGQGTTLTVSSGGGGSGGGGSGGGGSQIVLTQSPAIMSASLGERVTLTCTASSSVNSNYLHWYQQKPGSSPKLWIYSTSNLASGVPARFSGSGSGTSYSLTISSMEAEDAATYYCHQYHRSPLTFGAGTKLELKEPKSPDKTHTCPPCPAPPVAGPSVFLFPPKPKDTLMIARTPEVTCVVVDVSHEDPEVKFNWYVDGVEVHNAKTKPREEQYNSTYRVVSVLTVLHQDWLNGKEYKCKVSNKALPAPIEKTISKAKGQPREPQVYTLPPSRDELTKNQVSLTCLVKGFYPSDIAVEWESNGQPENNYKTTPPVLDSDGSFFLYSKLTVDKSRWQQGNVFSCSVMHEALHNHYTQKSLSLSPGKIISFFLALTSTALLFLLFFLTLRFSVVKRGRKKLLYIFKQPFMRPVQTTQEEDGCSCRFPEEEEGGCELRVKFSRSADAPAYQQGQNQLYNELNLGRREEYDVLDKRRGRDPEMGGKPRRKNPQEGLYNELQKDKMAEAYSEIGMKGERRRGKGHDGLYQGLSTATKDTYDALHMQALPPR

SEQ ID NO: 6366 - protein, 674 aa, Artificial Sequence
  Description of Artificial Sequence: Synthetic Chimeric Antigen Receptor sequence
MALPVTALLLPLALLLHAARPEVQLVESGGGLVQPKGSLKLSCAASGFTFNTYAMNWVRQAPGKGLEWVARIRSKSNNYATYYADSVKDRFTISRDDSQSMLYLQMNNLKTEDTAMYYCVRQWDYDVRAMNYWGQGTSVTVSSGGGGSGGGGSGGGGSDIVMTQSHIFMSTSVGDRVSITCKASQDVDTAVAWYQQKPGQSPKLLIYWASTRLTGVPDRFTGSGSGTDFTLTISNVQSEDLADYFCQQYSSYPYTFGGGTKLEIKEPKSPDKTHTCPPCPAPPVAGPSVFLFPPKPKDTLMIARTPEVTCVVVDVSHEDPEVKFNWYVDGVEVHNAKTKPREEQYNSTYRVVSVLTVLHQDWLNGKEYKCKVSNKALPAPIEKTISKAKGQPREPQVYTLPPSRDELTKNQVSLTCLVKGFYPSDIAVEWESNGQPENNYKTTPPVLDSDGSFFLYSKLTVDKSRWQQGNVFSCSVMHEALHNHYTQKSLSLSPGKIYIWAPLAGTCGVLLLSLVITLYCKRGRKKLLYIFKQPFMRPVQTTQEEDGCSCRFPEEEEGGCELRVKFSRSADAPAYQQGQNQLYNELNLGRREEYDVLDKRRGRDPEMGGKPRRKNPQEGLYNELQKDKMAEAYSEIGMKGERRRGKGHDGLYQGLSTATKDTYDALHMQALPPR

SEQ ID NO: 6367 - protein, 676 aa, Artificial Sequence
  Description of Artificial Sequence: Synthetic Chimeric Antigen Receptor sequence
MALPVTALLLPLALLLHAARPEVQLQQSGPDLVKPGASVKISCKASGYSFTGYYMHWVKQSHGKSLEWIGRINPNNGVTLYNQKFKDKAILTVDKSSTTAYMELRSLTSEDSAVYYCARSTMITNYVMDYWGQVTSVTVSSGGGGSGGGGSGGGGSSIVMTQTPTFLLVSAGDRVTITCKASQSVSNDVAWYQQKPGQSPTLLISYTSSRYAGVPDRFIGSGYGTDFTFTISTLQAEDLAVYFCQQDYNSPPTFGGGTKLEIKREPKSPDKTHTCPPCPAPPVAGPSVFLFPPKPKDTLMIARTPEVTCVVVDVSHEDPEVKFNWYVDGVEVHNAKTKPREEQYNSTYRVVSVLTVLHQDWLNGKEYKCKVSNKALPAPIEKTISKAKGQPREPQVYTLPPSRDELTKNQVSLTCLVKGFYPSDIAVEWESNGQPENNYKTTPPVLDSDGSFFLYSKLTVDKSRWQQGNVFSCSVMHEALHNHYTQKSLSLSPGKIISFFLALTSTALLFLLFFLTLRFSVVKRGRKKLLYIFKQPFMRPVQTTQEEDGCSCRFPEEEEGGCELRVKFSRSADAPAYQQGQNQLYNELNLGRREEYDVLDKRRGRDPEMGGKPRRKNPQEGLYNELQKDKMAEAYSEIGMKGERRRGKGHDGLYQGLSTATKDTYDALHMQALPPR

SEQ ID NO: 6368 - protein, 677 aa, Artificial Sequence
  Description of Artificial Sequence: Synthetic Chimeric Antigen Receptor sequence
MALPVTALLLPLALLLHAARPEVQLVESGGGLVQPKGSLKLSCAASGFTFNTYAMNWVRQAPGKGLEWVARIRSKSNNYATYYADSVKDRFTISRDDSQSMLYLQMNNLKTEDTAMYYCVRQWDYDVRAMNYWGQGTSVTVSSGGGGSGGGGSGGGGSDIVMTQSHIFMSTSVGDRVSITCKASQDVDTAVAWYQQKPGQSPKLLIYWASTRLTGVPDRFTGSGSGTDFTLTISNVQSEDLADYFCQQYSSYPYTFGGGTKLEIKEPKSPDKTHTCPPCPAPPVAGPSVFLFPPKPKDTLMIARTPEVTCVVVDVSHEDPEVKFNWYVDGVEVHNAKTKPREEQYNSTYRVVSVLTVLHQDWLNGKEYKCKVSNKALPAPIEKTISKAKGQPREPQVYTLPPSRDELTKNQVSLTCLVKGFYPSDIAVEWESNGQPENNYKTTPPVLDSDGSFFLYSKLTVDKSRWQQGNVFSCSVMHEALHNHYTQKSLSLSPGKIISFFLALTSTALLFLLFFLTLRFSVVKRGRKKLLYIFKQPFMRPVQTTQEEDGCSCRFPEEEEGGCELRVKFSRSADAPAYQQGQNQLYNELNLGRREEYDVLDKRRGRDPEMGGKPRRKNPQEGLYNELQKDKMAEAYSEIGMKGERRRGKGHDGLYQGLSTATKDTYDALHMQALPPR

SEQ ID NO: 6369 - protein, 468 aa, Artificial Sequence
  Description of Artificial Sequence: Synthetic Chimeric Antigen Receptor sequence
QVTLKESGPGILKPSQTLSLTCSFSGFSLSTSGMGVGWIRQPSGKGLEWLAHIWWDDDKYYNPSLKSQLTISKDTSRNQVFLKITSVDTADTATYYCSRRPRGTMDAMDYWGQGTSVTVSSGGGGSGGGGSGGGGSDIVMTQAASSLSASLGDRVTISCRASQDISKYLNWYQQKPDGTVKLLIYYTSRLHSGVPSRFSGSGSGTDYSLTIRNLEQEDIATYFCQQVYTLPWTFGGGTKLEIKSGTTTPAPRPPTPAPTIASQPLSLRPEACRPAAGGAVHTRGLDFACDIYIWAPLAGTCGVLLLSLVITLYCKRGRKKLLYIFKQPFMRPVQTTQEEDGCSCRFPEEEEGGCELRVKFSRSADAPAYKQGQNQLYNELNLGRREEYDVLDKRRGRDPEMGGKPRRKNPQEGLYNELQKDKMAEAYSEIGMKGERRRGKGHDGLYQGLSTATKDTYDALHMQALPPR

SEQ ID NO: 6370 - protein, 470 aa, Artificial Sequence
  Description of Artificial Sequence: Synthetic Chimeric Antigen Receptor sequence
QVTLKESGPGILKPSQTLSLTCSFSGFSLNTSGMGVGWIRQPSGKGLEWLAHIWWDDDKYYNPSLKSQLTISKDTSRNQVFLKITSVDTADSATYYCARRASHVSTVDSFDFWGQGTTLTVSSGGGGSGGGGSGGGGSDIQMTQTTSSLSASLGDRVTISCRASQDISNYLNWFQQKPDGTVKLLIYYTSRLHSGVPSKFSGSGSGTDYSLTISNLEQEDIATYFCQQGYTLPWTFGGGTKLEIKSGTTTPAPRPPTPAPTIASQPLSLRPEACRPAAGGAVHTRGLDFACDIYIWAPLAGTCGVLLLSLVITLYCKRGRKKLLYIFKQPFMRPVQTTQEEDGCSCRFPEEEEGGCELRVKFSRSADAPAYKQGQNQLYNELNLGRREEYDVLDKRRGRDPEMGGKPRRKNPQEGLYNELQKDKMAEAYSEIGMKGERRRGKGHDGLYQGLSTATKDTYDALHMQALPPR

SEQ ID NO: 6371 - protein, 491 aa, Artificial Sequence
  Description of Artificial Sequence: Synthetic Chimeric Antigen Receptor sequence
MALPVTALLLPLALLLHAARPQVTLKESGPGILKPSQTLSLTCSFSGFSLNTSGMGVGWIRQPSGKGLEWLAHIWWDDDKYYNPSLKSQLTISKDTSRNQVFLKITSVDTADSATYYCARRASHVSTVDSFDFWGQGTTLTVSSGGGGSGGGGSGGGGSDIQMTQTTSSLSASLGDRVTISCRASQDISNYLNWFQQKPDGTVKLLIYYTSRLHSGVPSKFSGSGSGTDYSLTISNLEQEDIATYFCQQGYTLPWTFGGGTKLEIKSGTTTPAPRPPTPAPTIASQPLSLRPEACRPAAGGAVHTRGLDFACDIYIWAPLAGTCGVLLLSLVITLYCKRGRKKLLYIFKQPFMRPVQTTQEEDGCSCRFPEEEEGGCELRVKFSRSADAPAYKQGQNQLYNELNLGRREEYDVLDKRRGRDPEMGGKPRRKNPQEGLYNELQKDKMAEAYSEIGMKGERRRGKGHDGLYQGLSTATKDTYDALHMQALPPR

SEQ ID NO: 6372 - protein, 546 aa, Artificial Sequence
  Description of Artificial Sequence: Synthetic Chimeric Antigen Receptor sequence
MDFQVQIFSFLLISASVIMSRGDIQMTQSPSSVSASIGDRVTITCRASQGIDNWLGWYQQKPGKAPKLLIYDASNLDTGVPSRFSGSGSGTYFTLTISSLQAEDFAVYFCQQAKAFPPTFGGGTKVDIKGSTSGSGKPGSGEGSEVQLVQSGGGLVKPGGSLRLSCAASGFTFSSYSMNWVRQAPGKGLEWVSSISSSSSYIYYADSVKGRFTISRDNAKNSLYLQMNSLRAEDTAVYYCARVTDAFDIWGQGTMVTVSSAAAFVPVFLPAKPTTTPAPRPPTPAPTIASQPLSLRPEACRPAAGGAVHTRGLDFACDIYIWAPLAGTCGVLLLSLVITLYCNHRNRSKRSRLLHSDYMNMTPRRPGPTRKHYQPYAPPRDFAAYRSRFSVVKRGRKKLLYIFKQPFMRPVQTTQEEDGCSCRFPEEEEGGCELRVKFSRSADAPAYQQGQNQLYNELNLGRREEYDVLDKRRGRDPEMGGKPRRKNPQEGLYNELQKDKMAEAYSEIGMKGERRRGKGHDGLYQGLSTATKDTYDALHMQALPPR

SEQ ID NO: 6373 - protein, 709 aa, Artificial Sequence
  Description of Artificial Sequence: Synthetic Chimeric Antigen Receptor sequence
QVTLKESGPGILKPSQTLSLTCSFSGFSLSTSGMGVGWIRQPSGKGLEWLAHIWWDDDKYYNPSLKSQLTISKDTSRNQVFLKITSVDTADTATYYCSRRPRGTMDAMDYWGQGTSVTVSSGGGGSGGGGSGGGGSDIVMTQAASSLSASLGDRVTISCRASQDISKYLNWYQQKPDGTVKLLIYYTSRLHSGVPSRFSGSGSGTDYSLTIRNLEQEDIATYFCQQVYTLPWTFGGGTKLEIKLEDPAEPKSPDKTHTCPPCPAPELLGGPSVFLFPPKPKDTLMISRTPEVTCVVVDVSHEDPEVKFNWYVDGVEVHNAKTKPREEQYNSTYRVVSVLTVLHQDWLNGKEYKCKVSNKALPAPIEKTISKAKGQPREPQVYTLPPSRDELTKNQVSLTCLVKGFYPSDIAVEWESNGQPENNYKTTPPVLDSDGSFFLYSKLTVDKSRWQQGNVFSCSVMHEALHNHYTQKSLSLSPGKKDPKSGTTTPAPRPPTPAPTIASQPLSLRPEACRPAAGGAVHTRGLDFACDIYIWAPLAGTCGVLLLSLVITLYCKRGRKKLLYIFKQPFMRPVQTTQEEDGCSCRFPEEEEGGCELRVKFSRSADAPAYKQGQNQLYNELNLGRREEYDVLDKRRGRDPEMGGKPRRKNPQEGLYNELQKDKMAEAYSEIGMKGERRRGKGHDGLYQGLSTATKDTYDALHMQALPPR

SEQ ID NO: 6374 - protein, 711 aa, Artificial Sequence
  Description of Artificial Sequence: Synthetic Chimeric Antigen Receptor sequence
QVTLKESGPGILKPSQTLSLTCSFSGFSLNTSGMGVGWIRQPSGKGLEWLAHIWWDDDKYYNPSLKSQLTISKDTSRNQVFLKITSVDTADSATYYCARRASHVSTVDSFDFWGQGTTLTVSSGGGGSGGGGSGGGGSDIQMTQTTSSLSASLGDRVTISCRASQDISNYLNWFQQKPDGTVKLLIYYTSRLHSGVPSKFSGSGSGTDYSLTISNLEQEDIATYFCQQGYTLPWTFGGGTKLEIKLEDPAEPKSPDKTHTCPPCPAPELLGGPSVFLFPPKPKDTLMISRTPEVTCVVVDVSHEDPEVKFNWYVDGVEVHNAKTKPREEQYNSTYRVVSVLTVLHQDWLNGKEYKCKVSNKALPAPIEKTISKAKGQPREPQVYTLPPSRDELTKNQVSLTCLVKGFYPSDIAVEWESNGQPENNYKTTPPVLDSDGSFFLYSKLTVDKSRWQQGNVFSCSVMHEALHNHYTQKSLSLSPGKKDPKSGTTTPAPRPPTPAPTIASQPLSLRPEACRPAAGGAVHTRGLDFACDIYIWAPLAGTCGVLLLSLVITLYCKRGRKKLLYIFKQPFMRPVQTTQEEDGCSCRFPEEEEGGCELRVKFSRSADAPAYKQGQNQLYNELNLGRREEYDVLDKRRGRDPEMGGKPRRKNPQEGLYNELQKDKMAEAYSEIGMKGERRRGKGHDGLYQGLSTATKDTYDALHMQALPPR

SEQ ID NO: 6375 - protein, 730 aa, Artificial Sequence
  Description of Artificial Sequence: Synthetic Chimeric Antigen Receptor sequence
MALPVTALLLPLALLLHAARPQVTLKESGPGILKPSQTLSLTCSFSGFSLSTSGMGVGWIRQPSGKGLEWLAHIWWDDDKYYNPSLKSQLTISKDTSRNQVFLKITSVDTADTATYYCSRRPRGTMDAMDYWGQGTSVTVSSGGGGSGGGGSGGGGSDIVMTQAASSLSASLGDRVTISCRASQDISKYLNWYQQKPDGTVKLLIYYTSRLHSGVPSRFSGSGSGTDYSLTIRNLEQEDIATYFCQQVYTLPWTFGGGTKLEIKLEDPAEPKSPDKTHTCPPCPAPELLGGPSVFLFPPKPKDTLMISRTPEVTCVVVDVSHEDPEVKFNWYVDGVEVHNAKTKPREEQYNSTYRVVSVLTVLHQDWLNGKEYKCKVSNKALPAPIEKTISKAKGQPREPQVYTLPPSRDELTKNQVSLTCLVKGFYPSDIAVEWESNGQPENNYKTTPPVLDSDGSFFLYSKLTVDKSRWQQGNVFSCSVMHEALHNHYTQKSLSLSPGKKDPKSGTTTPAPRPPTPAPTIASQPLSLRPEACRPAAGGAVHTRGLDFACDIYIWAPLAGTCGVLLLSLVITLYCKRGRKKLLYIFKQPFMRPVQTTQEEDGCSCRFPEEEEGGCELRVKFSRSADAPAYKQGQNQLYNELNLGRREEYDVLDKRRGRDPEMGGKPRRKNPQEGLYNELQKDKMAEAYSEIGMKGERRRGKGHDGLYQGLSTATKDTYDALHMQALPPR

SEQ ID NO: 6376 - protein, 732 aa, Artificial Sequence
  Description of Artificial Sequence: Synthetic Chimeric Antigen Receptor sequence
MALPVTALLLPLALLLHAARPQVTLKESGPGILKPSQTLSLTCSFSGFSLNTSGMGVGWIRQPSGKGLEWLAHIWWDDDKYYNPSLKSQLTISKDTSRNQVFLKITSVDTADSATYYCARRASHVSTVDSFDFWGQGTTLTVSSGGGGSGGGGSGGGGSDIQMTQTTSSLSASLGDRVTISCRASQDISNYLNWFQQKPDGTVKLLIYYTSRLHSGVPSKFSGSGSGTDYSLTISNLEQEDIATYFCQQGYTLPWTFGGGTKLEIKLEDPAEPKSPDKTHTCPPCPAPELLGGPSVFLFPPKPKDTLMISRTPEVTCVVVDVSHEDPEVKFNWYVDGVEVHNAKTKPREEQYNSTYRVVSVLTVLHQDWLNGKEYKCKVSNKALPAPIEKTISKAKGQPREPQVYTLPPSRDELTKNQVSLTCLVKGFYPSDIAVEWESNGQPENNYKTTPPVLDSDGSFFLYSKLTVDKSRWQQGNVFSCSVMHEALHNHYTQKSLSLSPGKKDPKSGTTTPAPRPPTPAPTIASQPLSLRPEACRPAAGGAVHTRGLDFACDIYIWAPLAGTCGVLLLSLVITLYCKRGRKKLLYIFKQPFMRPVQTTQEEDGCSCRFPEEEEGGCELRVKFSRSADAPAYKQGQNQLYNELNLGRREEYDVLDKRRGRDPEMGGKPRRKNPQEGLYNELQKDKMAEAYSEIGMKGERRRGKGHDGLYQGLSTATKDTYDALHMQALPPR

SEQ ID NO: 6377 - protein, 726 aa, Artificial Sequence
  Description of Artificial Sequence: Synthetic Chimeric Antigen Receptor sequence
LLVTSLLLCELPHPAFLLIPDTDVKLQESGPGLVAPSQSLSITCTVSGFSLTSYAVSWVRQPPGKGLEWLGIIWSGGATNYNSALKSRLSISKDNSKSQVFLKMNGLQTDDTARYYCAREHYYGSSAMDYWGQGASITVSSGGGGSGGGGSGGGGSGIVMTQSPLSLPVSLGDQASISCRSSQSIVHSYGNTYLFWYLQKPGQSPKLLIYRVSNRFSGVPDRFSGSGSGTNFTLKISRVEAEDMGVYYCFQGTHVPYTFGGGTKLEIKEPKSCDKTHTCPPCPAPELLGGPSVFLFPPKPKDTLMISRTPEVTCVVVDVSHEDPEVKFNWYVDGVEVHNAKTKPREEQYNSTYRVVSVLTVLHQDWLNGKEYKCKVSNKALPAPIEKTISKAKGQPREPQVYTLPPSRDELTKNQVSLTCLVKGFYPSDIAVEWESNGQPENNYKTTPPVLDSDGSFFLYSKLTVDKSRWQQGNVFSCSVMHEALHNHYTQKSLSLSPGKKDPKAAAIEVMYPPPYLDNEKSNGTIIHVKGKHLCPSPLFPGPSKPFWVLVVVGGVLACYSLLVTVAFIIFWVRSKRSRLLHSDYMNMTPRRPGPTRKHYQPYAPPRDFAAYRSRVKFSRSADAPAYQQGQNQLYNELNLGRREEYDVLDKRRGRDPEMGGKPRRKNPQEGLYNELQKDKMAEAYSEIGMKGERRRGKGHDGLYQGLSTATKDTYDALHMQALPPR

SEQ ID NO: 6378 - protein, 481 aa, Artificial Sequence
  Description of Artificial Sequence: Synthetic Chimeric Antigen Receptor sequence
MDFQVQIFSFLLISASVIMSRGDIQMTQSPSSVSASIGDRVTITCRASQGIDNWLGWYQQKPGKAPKLLIYDASNLDTGVPSRFSGSGSGTYFTLTISSLQAEDFAVYFCQQAKAFPPTFGGGTKVDIKGSTSGSGKPGSGEGSEVQLVQSGGGLVKPGGSLRLSCAASGFTFSSYSMNWVRQAPGKGLEWVSSISSSSSYIYYADSVKGRFTISRDNAKNSLYLQMNSLRAEDTAVYYCARVTDAFDIWGQGTMVTVSSAAAIEVMYPPPYLDNEKSNGTIIHVKGKHLCPSPLFPGPSKPFWVLVVVGGVLACYSLLVTVAFIIFWRSKRSRLLHSDYMNMTPRRPGPTRKHYQPYAPPRDFAAYRSRVKFSRSADAPAYQQGQNQLYNELNLGRREEYDVLDKRRGRDPEMGGKPRRKNPQEGLYNELQKDKMAEAYSEIGMKGERRRGKGHDGLYQGLSTATKDTYDALHMQALPPR

SEQ ID NO: 6379 - protein, 487 aa, Artificial Sequence
  Description of Artificial Sequence: Synthetic Chimeric Antigen Receptor sequence
MGWSCIILFLVATATGVHSEVQLVETGGGLVQPGNSLKLSCATSGFIFSTTWMNWIRQTPGKRLEWLAQIEDKSNNYFISYSESVKGRFTISRDDSKSSVYLQMNNLKEEDTAIYYCSWKYRSNYYFDYWGQGVMVTVSSGSTSGSGKPGSGEGSDIVLTQSPALAVSLEQRATISCKTSQNVDYYGISYLHWYQQKPGQQPKLLIYEGSNLASGIPARFSGSGSGTDFTLTIDPVEADDIVTYYCQQSKDYPYTFGAGTKLELKAAAIEVMYPPPYLDNEKSNGTIIHVKGKHLCPSPLFPGPSKPFWVLVVVGGVLACYSLLVTVAFIIFWVRSKRSRLLHSDYMNMTPRRPGPTRKHYQPYAPPRDFAAYRSRVKFSRSADAPAYQQGQNQLYNELNLGRREEYDVLDKRRGRDPEMGGKPRRKNPQEGLYNELQKDKMAEAYSEIGMKGERRRGKGHDGLYQGLSTATKDTYDALHMQALPPR

SEQ ID NO: 6380 - protein, 494 aa, Artificial Sequence
  Description of Artificial Sequence: Synthetic Chimeric Antigen Receptor sequence
MGWSCIILFLVATATGVHSEVQLVETGGGLVQPGNSLKLSCATSGFIFSTTWMNWIRQTPGKRLEWLAQIEDKSNNYFISYSESVKGRFTISRDDSKSSVYLQMNNLKEEDTAIYYCSWKYRSNYYFDYWGQGVMVTVSSGSTSGSGKPGSGEGSDIVLTQSPALAVSLEQRATISCKTSQNVDYYGISYLHWYQQKPGQQPKLLIYEGSNLASGIPARFSGSGSGTDFTLTIDPVEADDIVTYYCQQSKDYPYTFGAGTKLELKAAATTTKPVLRTPSPVHPTGTSQPQRPEDCRPRGSVKGTGLDFACDIYIWAPLAGICVALLLSLIITLICYHRSRNSRRNRLLQVTTMNMTPRRPGLTRKPYQPYAPARDFAAYRPRAKFSRSAETAANLQDPNQLYNELNLGRREEYDVLEKKRARDPEMGGKQQRRRNPQEGVYNALQKDKMAEAYSEIGTKGERRRGKGHDGLYQGLSTATKDTYDALHMQTLAPR

SEQ ID NO: 6381 - protein, 539 aa, Artificial Sequence
  Description of Artificial Sequence: Synthetic Chimeric Antigen Receptor sequence
MGWSCIILFLVATATGVHSEVQLVETGGGLVQPGNSLKLSCATSGFIFSTTWMNWIRQTPGKRLEWLAQIEDKSNNYFISYSESVKGRFTISRDDSKSSVYLQMNNLKEEDTAIYYCSWKYRSNYYFDYWGQGVMVTVSSGSTSGSGKPGSGEGSDIVLTQSPALAVSLEQRATISCKTSQNVDYYGISYLHWYQQKPGQQPKLLIYEGSNLASGIPARFSGSGSGTDFTLTIDPVEADDIVTYYCQQSKDYPYTFGAGTKLELKAAATTTKPVLRTPSPVHPTGTSQPQRPEDCRPRGSVKGTGLDFACDIYIWAPLAGICVALLLSLIITLICYHRSRNSRRNRLLQVTTMNMTPRRPGLTRKPYQPYAPARDFAAYRPKWIRKKFPHIFKQPFKKTTGAAQEEDACSCRCPQEEEGGGGGYELRAKFSRSAETAANLQDPNQLYNELNLGRREEYDVLEKKRARDPEMGGKQQRRRNPQEGVYNALQKDKMAEAYSEIGTKGERRRGKGHDGLYQGLSTATKDTYDALHMQTLAPR

SEQ ID NO: 6382 - protein, 551 aa, Artificial Sequence
  Description of Artificial Sequence: Synthetic Chimeric Antigen Receptor sequence
MGWSCIILFLVATATGVHSEVQLVETGGGLVQPGNSLKLSCATSGFIFSTTWMNWIRQTPGKRLEWLAQIEDKSNNYFISYSESVKGRFTISRDDSKSSVYLQMNNLKEEDTAIYYCSWKYRSNYYFDYWGQGVMVTVSSGSTSGSGKPGSGEGSDIVLTQSPALAVSLEQRATISCKTSQNVDYYGISYLHWYQQKPGQQPKLLIYEGSNLASGIPARFSGSGSGTDFTLTIDPVEADDIVTYYCQQSKDYPYTFGAGTKLELKAAAFVPVFLPAKPTTTPAPRPPTPAPTIASQPLSLRPEACRPAAGGAVHTRGLDFACDIYIWAPLAGTCGVLLLSLVITLYCNHRNRSKRSRLLHSDYMNMTPRRPGPTRKHYQPYAPPRDFAAYRSRFSVVKRGRKKLLYIFKQPFMRPVQTTQEEDGCSCRFPEEEEGGCELRVKFSRSADAPAYQQGQNQLYNELNLGRREEYDVLDKRRGRDPEMGGKPRRKNPQEGLYNELQKDKMAEAYSEIGMKGERRRGKGHDGLYQGLSTATKDTYDALHMQALPPR

SEQ ID NO: 6383 - protein, 708 aa, Artificial Sequence [sequence omitted]

SEQ ID NO: 6384 - DNA, 603 bp, Artificial Sequence
  Description of Artificial Sequence: Synthetic Promoter sequence
aagcttgggagttccgcgttacataacttacggtaaatggcccgcctggctgaccgcccaacgacccccgcccattgacgtcaataatgacgtatgttcccatagtaacgccaatagggactttccattgacgtcaatgggtggagtatttacggtaaactgcccacttggcagtacatcaagtgtatcatatgccaagtacgccccctattgacgtcaatgacggtaaatggcccgcctggcattatgcccagtacatgaccttatgggactttcctacttggcagtacatctacgtattagtcatcgctattaccatggtgatgcggttttggcagtacatcaatgggcgtggatagcggtttgactcacggggatttccaagtctccaccccattgacgtcaatgggagtttgttttggcaccaaaatcaacgggactttccaaaatgtcgtaacaactccgccccattgacgcaaatgggcggtaggcgtgtacggtgggaggtctatataagcagagctcgtttagtgaaccgtcagatcgcctggagacgccatccacgctgttttgacctccatagaagacaccgactctactaga

SEQ ID NO: 6385 - DNA, 603 bp, Artificial Sequence
  Description of Artificial Sequence: Synthetic Promoter sequence
aagcttgggagttccgcgttacataacttacggtaaatggcccgcctggctgaccgcccaacgacccccgcccattgacgtcaataatgacgtatgttcccatagtaacgccaatagggactttccattgacgtcaatgggtggagtatttacggtaaactgcccacttggcagtacatcaagtgtatcatatgccaagtacgccccctattgacgtcaatgacggtaaatggcccgcctggcattatgcccagtacatgaccttacgggactttcctacttggcagtacatctacgtattagtcatcgctattaccatggtgatgcggttttggcagtacaccaatgggcgtggatagcggtttgactcacggggatttccaagtctccaccccattgacgtcaatgggagtttgttttggcaccaaaatcaacgggactttccaaaatgtcgtaacaactccgccccattgacgcaaatgggcggtaggcgtgtacggtgggaggtctatataagcagagctcgtttagtgaaccgtcagatcgcctggagacgccatccacgctgttttgacctccatagaagacaccgactctactaga

SEQ ID NO: 6386 - DNA, 508 bp, Artificial Sequence
  Description of Artificial Sequence: Synthetic Promoter sequence
cgttacataacttacggtaaatggcccgcctggctgaccgcccaacgacccccgcccattgacgtcaataatgacgtatgttcccatagtaacgccaatagggactttccattgacgtcaatgggtggagtatttacggtaaactgcccacttggcagtacatcaagtgtatcatatgccaagtacgccccctattgacgtcaatgacggtaaatggcccgcctggcattatgcccagtacatgaccttatgggactttcctacttggcagtacatctacgtattagtcatcgctattaccatggtgatgcggttttggcagtacatcaatgggcgtggatagcggtttgactcacggggatttccaagtctccaccccattgacgtcaatgggagtttgttttggcaccaaaatcaacgggactttccaaaatgtcgtaacaactccgccccattgacgcaaatgggcggtaggcgtgtacggtgggaggtctatataagcagagct

SEQ ID NO: 6387 - DNA, 1339 bp, Artificial Sequence
  Description of Artificial Sequence: Synthetic Promoter sequence
cgatagtaattcatacaaaaggactcgcccctgccttggggaatcccagggaccgtcgttaaactcccactaacgtagaacccagagatcgctgcgttcccgccccctcacccgcccgctctcgtcatcactgaggtggagaagagcatgcgtgaggctccggtgcccgtcagtgggcagagcgcacatcgcccacagtccccgagaagttggggggaggggtcggcaattgaaccggtgcctagagaaggtggcgcggggtaaactgggaaagtgatgtcgtgtactggctccgcctttttcccgagggtgggggagaaccgtatataagtgcagtagtcgccgtgaacgttctttttcgcaacgggtttgccgccagaacacaggtaagtgccgtgtgtggttcccgcgggcctggcctctttacgggttatggcccttgcgtgccttgaattacttccacgcccctggctgcagtacgtgattcttgatcccgagcttcgggttggaagtgggtgggagagttcgaggccttgcgcttaaggagccccttcgcctcgtgcttgagttgaggcctggcttgggcgctggggccgccgcgtgcgaatctggtggcaccttcgcgcctgtctcgctgctttcgataagtctctagccatttaaaatttttgatgacctgctgcgacgctttttttctggcaagatagtcttgtaaatgcgggccaagatctgcacactggtatttcggtttttggggccgcgggcggcgacggggcccgtgcgtcccagcgcacatgttcggcgaggcggggcctgcgagcgcggccaccgagaatcggacgggggtagtctcaagctggccggcctgctctggtgcctggcctcgcgccgccgtgtatcgccccgccctgggcggcaaggctggcccggtcggcaccagttgcgtgagcggaaagatggccgcttcccggccctgctgcagggagctcaaaatggaggacgcggcgctcgggagagcgggcgggtgagtcacccacacaaaggaaaagggcctttccgtcctcagccgtcgcttcatgtgactccacggagtaccgggcgccgtccaggcacctcgattagttctcgagcttttggagtacgtcgtctttaggttggggggaggggttttatgcgatggagtttccccacactgagtgggtggagactgaagttaggccagcttggcacttgatgtaattctccttggaatttgccctttttgagtttggatcttggttcattctcaagcctcagacagtggttcaaagtttttttcttccatttcaggtgtcgtgag

SEQ ID NO: 6388 - DNA, 1335 bp, Artificial Sequence
  Description of Artificial Sequence: Synthetic Promoter sequence
gagtaattcatacaaaaggactcgcccctgccttggggaatcccagggaccgtcgttaaactcccactaacgtagaacccagagatcgctgcgttcccgccccctcacccgcccgctctcgtcatcactgaggtggagaagagcatgcgtgaggctccggtgcccgtcagtgggcagagcgcacatcgcccacagtccccgagaagttggggggaggggtcggcaattgaaccggtgcctagagaaggtggcgcggggtaaactgggaaagtgatgtcgtgtactggctccgcctttttcccgagggtgggggagaaccgtatataagtgcagtagtcgccgtgaacgttctttttcgcaacgggtttgccgccagaacacaggtaagtgccgtgtgtggttcccgcgggcctggcctctttacgggttatggcccttgcgtgccttgaattacttccacgcccctggctgcagtacgtgattcttgatcccgagcttcgggttggaagtgggtgggagagttcgaggccttgcgcttaaggagccccttcgcctcgtgcttgagttgaggcctggcttgggcgctggggccgccgcgtgcgaatctggtggcaccttcgcgcctgtctcgctgctttcgataagtctctagccatttaaaatttttgatgacctgctgcgacgctttttttctggcaagatagtcttgtaaatgcgggccaagatctgcacactggtatttcggtttttggggccgcgggcggcgacggggcccgtgcgtcccagcgcacatgttcggcgaggcggggcctgcgagcgcggccaccgagaatcggacgggggtagtctcaagctggccggcctgctctggtgcctggcctcgcgccgccgtgtatcgccccgccctgggcggcaaggctggcccggtcggcaccagttgcgtgagcggaaagatggccgcttcccggccctgctgcagggagctcaaaatggaggacgcggcgctcgggagagcgggcgggtgagtcacccacacaaaggaaaagggcctttccgtcctcagccgtcgcttcatgtgactccacggagtaccgggcgccgtccaggcacctcgattagttctcgagcttttggagtacgtcgtctttaggttggggggaggggttttatgcgatggagtttccccacactgagtgggtggagactgaagttaggccagcttggcacttgatgtaattctccttggaatttgccctttttgagtttggatcttggttcattctcaagcctcagacagtggttcaaagtttttttcttccatttcaggtgtcgtga

SEQ ID NO: 6389 - DNA, 1184 bp, Artificial Sequence
  Description of Artificial Sequence: Synthetic Promoter sequence
cgtgaggctccggtgcccgtcagtgggcagagcgcacatcgcccacagtccccgagaagttggggggaggggtcggcaattgaaccggtgcctagagaaggtggcgcggggtaaactgggaaagtgatgtcgtgtactggctccgcctttttcccgagggtgggggagaaccgtatataagtgcagtagtcgccgtgaacgttctttttcgcaacgggtttgccgccagaacacaggtaagtgccgtgtgtggttcccgcgggcctggcctctttacgggttatggcccttgcgtgccttgaattacttccacctggctgcagtacgtgattcttgatcccgagcttcgggttggaagtgggtgggagagttcgaggccttgcgcttaaggagccccttcgcctcgtgcttgagttgaggcctggcctgggcgctggggccgccgcgtgcgaatctggtggcaccttcgcgcctgtctcgctgctttcgataagtctctagccatttaaaatttttgatgacctgctgcgacgctttttttctggcaagatagtcttgtaaatgcgggccaagatctgcacactggtatttcggtttttggggccgcgggcggcgacggggcccgtgcgtcccagcgcacatgttcggcgaggcggggcctgcgagcgcggccaccgagaatcggacgggggtagtctcaagctggccggcctgctctggtgcctggcctcgcgccgccgtgtatcgccccgccctgggcggcaaggctggcccggtcggcaccagttgcgtgagcggaaagatggccgcttcccggccctgctgcagggagctcaaaatggaggacgcggcgctcgggagagcgggcgggtgagtcacccacacaaaggaaaagggcctttccgtcctcagccgtcgcttcatgtgactccacggagtaccgggcgccgtccaggcacctcgattagttctcgagcttttggagtacgtcgtctttaggttggggggaggggttttatgcgatggagtttccccacactgagtgggtggagactgaagttaggccagcttggcacttgatgtaattctccttggaatttgccctttttgagtttggatcttggttcattctcaagcctcagacagtggttcaaagtttttttcttccatttcaggtgtcgtga

SEQ ID NO: 6390 - DNA, 1184 bp, Artificial Sequence
  Description of Artificial Sequence: Synthetic Promoter sequence
cgtgaggctccggtgcccgtcagtgggcagagcgcacatcgcccacagtccccgagaagttggggggaggggtcggcaattgaaccggtgcctagagaaggtggcgcggggtaaactgggaaagtgatgtcgtgtactggctccgcctttttcccgagggtgggggagaaccgtatataagtgcagtagtcgccgtgaacgttctttttcgcaacgggtttgccgccagaacacaggtaagtgccgtgtgtggttcccgcgggcctggcctctttacgggttatggcccttgcgtgccttgaattacttccacctggctgcagtacgtgattcttgatcccgagcttcgggttggaagtgggtgggagagttcgaggccttgcgcttaaggagccccttcgcctcgtgcttgagttgaggcctggcctgggcgctggggccgccgcgtgcgaatctggtggcaccttcgcgcctgtctcgctgctttcgataagtctctagccatttaaaatttttgatgacctgctgcgacgctttttttctggcaagatagtcttgtaaatgcgggccaagatctgcacactggtatttcggtttttggggccgcgggcggcgacggggcccgtgcgtcccagcgcacatgttcggcgaggcggggcctgcgagcgcggccaccgagaatcggacgggggtagtctcaagctggccggcctgctctggtgcctggcctcgcgccgccgtgtatcgccccgccctgggcggcaaggctggcccggtcggcaccagttgcgtgagcggaaagatggccgcttcccggccctgctgcagggagctcaaaatggaggacgcggcgctcgggagagcgggcgggtgagtcacccacacaaaggaaaagggcctttccgtcctcagccgtcgcttcatgtgactccactgagtaccgggcgccgtccaggcacctcgattagttctcgtgcttttggagtacgtcgtctttaggttggggggaggggttttatgcgatggagtttccccacactgagtgggtggagactgaagttaggccagcttggcacttgatgtaattctccttggaatttgccctttttgagtttggatcttggttcattctcaagcctcagacagtggttcaaagtttttttcttccatttcaggtgtcgtga

SEQ ID NO: 6391 - DNA, 1184 bp, Artificial Sequence
  Description of Artificial Sequence: Synthetic Promoter sequence
cgtgaggctccggtgcccgtcagtgggcagagcgcacatcgcccacagtccccgagaagttggggggaggggtcggcaattgaaccggtgcctagagaaggtggcgcggggtaaactgggaaagtgatgtcgtgtactggctccgcctttttcccgagggtgggggagaaccgtatataagtgcagtagtcgccgtgaacgttctttttcgcaacgggtttgccgccagaacacaggtaagtgccgtgtgtggttcccgcgggcctggcctctttacgggttatggcccttgcgtgccttgaattacttccacctggctgcagtacgtgattcttgatcccgagcttcgggttggaagtgggtgggagagttcgaggccttgcgcttaaggagccccttcgcctcgtgcttgagttgaggcctggcctgggcgctggggccgccgcgtgcgaatctggtggcaccttcgcgcctgtctcgctgctttcgataagtctctagccatttaaaatttttgatgacctgctgcgacgctttttttctggcaagatagtcttgtaaatgcgggccaagatctgcacactggtatttcggtttttggggccgcgggcggcgacggggcccgtgcgtcccagcgcacatgttcggcgaggcggggcctgcgagcgcggccaccgagaatcggacgggggtagtctcaagctggccggcctgctctggtgcctggcctcgcgccgccgtgtatcgccccgccctgggcggcaaggctggcccggtcggcaccagttgcgtgagcggaaagatggccgcttcccggccctgctgcagggagctcaaaatggaggacgcggcgctcgggagagcgggcgggtgagtcacccacacaaaggaaaagggcctttccgtcctcagccgtcgcttcatgtgactccactgagtaccgggcgccgtccaggcacctcgattagttctcgagcttttggagtacgtcgtctttaggttggggggaggggttttatgcgatggagtttccccacactgagtgggtggagactgaagttaggccagcttggcacttgatgtaattctccttggaatttgccctttttgagtttggatcttggttcattctcaagcctcagacagtggttcaaagtttttttcttccatttcaggtgtcgtga

SEQ ID NO: 6392 - DNA, 521 bp, Artificial Sequence
  Description of Artificial Sequence: Synthetic Promoter sequence
acccctctctccagccactaagccagttgctccctcggctgacggctgcacgcgaggcctccgaacgtcttacgccttgtggcgcgcccgtccttgtcccgggtgtgatggcggggtgtggggcggagggcgtggcggggaagggccggcgacgagagccgcgcgggacgactcgtcggcgataaccggtgtcgggtagcgccagccgcgcgacggtaacgagggaccgcgacaggcagacgctcccatgatcactctgcacgccgaaggcaaatagtgcaggccgtgcggcgcttggcgttccttggaagggctgaatccccgcctcgtccttcgcagcggccccccgggtgttcccatcgccgcttctaggcccactgcgacgcttgcctgcacttcttacacgctctgggtcccagccgcggcgacgcaaagggccttggtgcgggtctcgtcggcgcagggacgcgtttgggtcccgacggaaccttttccgcgttggggttggggcaccataagct

SEQ ID NO: 6393 - DNA, 118 bp, Artificial Sequence
  Description of Artificial Sequence: Synthetic Promoter sequence
acccctctctccagccactaagccagttgctccctcggctgacggctgcacgcgaggcctccgaacgtcttacgccttgtggcgcgcccgtccttgtcccgggtgtgatggcggggtg

SEQ ID NO: 6394 - DNA, 221 bp, Artificial Sequence
  Description of Artificial Sequence: Synthetic Promoter sequence
acccctctctccagccactaagccagttgctccctcggctgacggctgcacgcgaggcctccgaacgtcttacgccttgtggcgcgcccgtccttgtcccgggtgtgatggcggggtgtggggcggagggcgtggcggggaagggccggcgacgagagccgcgcgggacgactcgtcggcgataaccggtgtcgggtagcgccagccgcgcgacggtaacg

SEQ ID NO: 6395 - DNA, 324 bp, Artificial Sequence
  Description of Artificial Sequence: Synthetic Promoter sequence
acccctctctccagccactaagccagttgctccctcggctgacggctgcacgcgaggcctccgaacgtcttacgccttgtggcgcgcccgtccttgtcccgggtgtgatggcggggtgtggggcggagggcgtggcggggaagggccggcgacgagagccgcgcgggacgactcgtcggcgataaccggtgtcgggtagcgccagccgcgcgacggtaacgagggaccgcgacaggcagacgctcccatgatcactctgcacgccgaaggcaaatagtgcaggccgtgcggcgcttggcgttccttggaagggctgaatccccg

SEQ ID NO: 6396 - DNA, 422 bp, Artificial Sequence
  Description of Artificial Sequence: Synthetic Promoter sequence
acccctctctccagccactaagccagttgctccctcggctgacggctgcacgcgaggcctccgaacgtcttacgccttgtggcgcgcccgtccttgtcccgggtgtgatggcggggtgtggggcggagggcgtggcggggaagggccggcgacgagagccgcgcgggacgactcgtcggcgataaccggtgtcgggtagcgccagccgcgcgacggtaacgagggaccgcgacaggcagacgctcccatgatcactctgcacgccgaaggcaaatagtgcaggccgtgcggcgcttggcgttccttggaagggctgaatccccgcctcgtccttcgcagcggccccccgggtgttcccatcgccgcttctaggcccactgcgacgcttgcctgcacttcttacacgctctgggtcccagccg

SEQ ID NO: 6397 - DNA, 512 bp, Artificial Sequence
  Description of Artificial Sequence: Synthetic Promoter sequence
atcgatgggtaggggaggcgcttttcccaaggcagtctggagcatgcgctttagcagccccgctgggcacttggcgctacacaagtggcctctggcctcgcacacattccacatccaccggtaggcgccaaccggctccgttctttggtggccccttcgcgccaccttctactcctcccctagtcaggaagttcccccccgccccgcagctcgcgtcgtgcaggacgtgacaaatggaagtagcacgtctcactagtctcgtgcagatggacagcaccgctgagcaatggaagcgggtaggcctttggggcagcggccaatagcagctttgctccttcgctttctgggctcagaggctgggaaggggtgggtccgggggcgggctcaggggcgggctcaggggcggggcgggcgcccgaaggtcctccggaggcccggcattctgcacgcttcaaaagcgcacgtctgccgcgctgttctcctcttcctcatctccgggcctttcgctcgag

SEQ ID NO: 6398 - DNA, 507 bp, Artificial Sequence
  Description of Artificial Sequence: Synthetic Promoter sequence
atcgatgggtaggggaggcgcttttcccaaggcagtctggagcatgcgctttagcagccccgctgggcacttggcgctacacaagtggcctctggcctcgcacacattccacatccaccggtaggcgccaaccggctccgttctttggtggccccttcgcgccaccttctactcctcccctagtcaggaagttcccccccgccccgcagctcgcgtcgtgcaggacgtgacaaatggaagtagcacgtctcactagtctcgtgcagatggacagcaccgctgagcaatggaagcgggtaggcctttggggcagcggccaatagcagctttgctccttcgctttctgggctcagaggctgggaaggggtgggtccgggggcgggctcaggggcgggctcaggggcggggcgggcgcccgaaggtcctccggaggcccggcattctgcacgcttcaaaagcgcacgtctgccgcgctgttctcctcttcctcatctccgggcctttcgc

SEQ ID NO: 6399 - DNA, 399 bp, Artificial Sequence
  Description of Artificial Sequence: Synthetic Promoter sequence
ccggtaggcgccaaccggctccgttctttggtggccccttcgcgccaccttctactcctcccctagtcaggaagttcccccccgccccgcagctcgcgtcgtgcaggacgtgacaaatggaagtagcacgtctcactagtctcgtgcagatggacagcaccgctgagcaatggaagcgggtaggcctttggggcagcggccaatagcagctttgctccttcgctttctgggctcagaggctgggaaggggtgggtccgggggcgggctcaggggcgggctcaggggcggggcgggcgcccgaaggtcctccggaggcccggcattctgcacgcttcaaaagcgcacgtctgccgcgctgttctcctcttcctcatctccgggcctttcgacctgcagcc

SEQ ID NO: 6400 - protein, 4 aa, Homo sapiens
KTEL

SEQ ID NO: 6401 - protein, 4 aa, Homo sapiens
CWCV

SEQ ID NO: 6402 - protein, 590 aa, Artificial Sequence
  Description of Artificial Sequence: Synthetic Construct
MEETRELQSLAAAVVPSAQTLKITDFSFSDFELSDLETALCTIRMFTDLNLVQNFQMKHEVLCRWILSVKKNYRKNVAYHNWRHAFNTAQCMFAALKAGKIQNKLTDLEILALLIAALSADLDHRGVNNSYIQRSEHPLAQLYCHSIMEHHHFDQCLMILNSPGNQILSGLSIEEYKTTLKIIKQAILATDLALYIKRLGEFFELIRKNQFNLEDPHQKELFLAMLMTACDLSAITKPWPIQQRIAELVATEFFDQGDRERKELNIEPTDLMNREKKNKIPSMQVGFIDAICLQLYEALTHVSEDCFPLLDGCRKNRQKWQALAEQQMHMIETYNQTSPRSAATGLPISMKIFMYLLTVFLITQMIGSALFAVYLHRRLDKIEDERNLHEDFVFMKTIQRCNTGERSLSLLNCEEIKSQFEGFVKDIMLNKEETKKENSFEMQKGDQNPQIAAHVISEASSKTTSVLQWAEKGYYTMSNNLVTLENGKQLTVKRQGLYYIYAQVTFCSNREASSQAPFIASLCLKSPGRFERILLRAANTHSSAKPCGQQSIHLGGVFELQPGASVFVNVTDPSQVSHGTGFTSFGLLKL

SEQ ID NO: 6403 - DNA, 1773 bp, Artificial Sequence
  Description of Artificial Sequence: Synthetic Construct
atggaagaaacaagagagctacagtcgttagcggctgctgtggtgccatctgcccagacccttaaaattactgactttagcttcagtgactttgagctgtctgatctggaaacagcactgtgtacaattcggatgtttactgacctcaaccttgtgcagaacttccagatgaaacatgaggttctttgcagatggattttaagtgttaagaagaattatcggaagaatgttgcctatcataattggagacatgcctttaatacagctcagtgcatgtttgctgctctaaaagcaggcaaaattcagaacaagctgactgacctggagatacttgcattgctgattgctgcactaagcgccgatttggatcaccgtggtgtgaataactcttacatacagcgaagtgaacatccacttgcccagctttactgccattcaatcatggaacaccatcattttgaccagtgcctgatgattcttaatagtccaggcaatcagattctcagtggcctctccattgaagaatataagaccacgttgaaaataatcaagcaagctattttagctacagacctagcactgtacattaagaggctaggagaattttttgaacttataagaaaaaatcaattcaatttggaagatcctcatcaaaaggagttgtttttggcaatgctgatgacagcttgtgatctttctgcaattacaaaaccctggcctattcaacaacggatagcagaacttgtagcaactgaattttttgatcaaggagacagagagagaaaagaactcaacatagaacccactgatctaatgaacagggagaagaaaaacaaaatcccaagtatgcaagttgggttcatagatgccatctgcttgcaactgtatgaggccctgacccacgtgtcagaggactgtttccctttgctagatggctgcagaaagaacaggcagaaatggcaggcccttgcagaacagcagatgcatatgatcgaaacatacaaccaaacttctccccgatctgcggccactggactgcccatcagcatgaaaatttttatgtatttacttactgtttttcttatcacccagatgattgggtcagcactttttgctgtgtatcttcatagaaggttggacaagatagaagatgaaaggaatcttcatgaagattttgtattcatgaaaacgatacagagatgcaacacaggagaaagatccttatccttactgaactgtgaggagattaaaagccagtttgaaggctttgtgaaggatataatgttaaacaaagaggagacgaagaaagaaaacagctttgaaatgcaaaaaggtgatcagaatcctcaaattgcggcacatgtcataagtgaggccagcagtaaaacaacatctgtgttacagtgggctgaaaaaggatactacaccatgagcaacaacttggtaaccctggaaaatgggaaacagctgaccgttaaaagacaaggactctattatatctatgcccaagtcaccttctgttccaatcgggaagcttcgagtcaagctccatttatagccagcctctgcctaaagtcccccggtagattcgagagaatcttactcagagctgcaaatacccacagttccgccaaaccttgcgggcaacaatccattcacttgggaggagtatttgaattgcaaccaggtgcttcggtgtttgtcaatgtgactgatccaagccaagtgagccatggcactggcttcacgtcctttggcttactcaaactctga

SEQ ID NO: 6404 - protein, 590 aa, Artificial Sequence
  Description of Artificial Sequence: Synthetic Construct
MEETRELQSLAAAVVPSAQTLKITDFSFSDFELSDLETALCTIRMFTDLNLVQNFQMKHEVLCRWILSVKKNYRKNVAYHNWRHAFNTAQCMFAALKAGKIQNKLTDLEILALLIAALSHDLDHRGVNNSYIQRSEHPLAQLYCHSIMEHHHFDQCLMILNSPGNQILSGLSIEEYKTTLKIIKQAILATDLALYIKRLGEFAELIRKNQFNLEDPHQKELFLAMLMTACDLSAITKPWPIQQRIAELVATEFFDQGDRERKELNIEPTDLMNREKKNKIPSMQVGFIDAICLQLYEALTHVSEDCFPLLDGCRKNRQKWQALAEQQMHMIETYNQTSPRSAATGLPISMKIFMYLLTVFLITQMIGSALFAVYLHRRLDKIEDERNLHEDFVFMKTIQRCNTGERSLSLLNCEEIKSQFEGFVKDIMLNKEETKKENSFEMQKGDQNPQIAAHVISEASSKTTSVLQWAEKGYYTMSNNLVTLENGKQLTVKRQGLYYIYAQVTFCSNREASSQAPFIASLCLKSPGRFERILLRAANTHSSAKPCGQQSIHLGGVFELQPGASVFVNVTDPSQVSHGTGFTSFGLLKL

SEQ ID NO: 6405 - DNA, 1773 bp, Artificial Sequence
  Description of Artificial Sequence: Synthetic Construct
atggaagaaacaagagagctacagtcgttagcggctgctgtggtgccatctgcccagacccttaaaattactgactttagcttcagtgactttgagctgtctgatctggaaacagcactgtgtacaattcggatgtttactgacctcaaccttgtgcagaacttccagatgaaacatgaggttctttgcagatggattttaagtgttaagaagaattatcggaagaatgttgcctatcataattggagacatgcctttaatacagctcagtgcatgtttgctgctctaaaagcaggcaaaattcagaacaagctgactgacctggagatacttgcattgctgattgctgcactaagccacgatttggatcaccgtggtgtgaataactcttacatacagcgaagtgaacatccacttgcccagctttactgccattcaatcatggaacaccatcattttgaccagtgcctgatgattcttaatagtccaggcaatcagattctcagtggcctctccattgaagaatataagaccacgttgaaaataatcaagcaagctattttagctacagacctagcactgtacattaagaggctaggagaatttgctgaacttataagaaaaaatcaattcaatttggaagatcctcatcaaaaggagttgtttttggcaatgctgatgacagcttgtgatctttctgcaattacaaaaccctggcctattcaacaacggatagcagaacttgtagcaactgaattttttgatcaaggagacagagagagaaaagaactcaacatagaacccactgatctaatgaacagggagaagaaaaacaaaatcccaagtatgcaagttgggttcatagatgccatctgcttgcaactgtatgaggccctgacccacgtgtcagaggactgtttccctttgctagatggctgcagaaagaacaggcagaaatggcaggcccttgcagaacagcagatgcatatgatcgaaacatacaaccaaacttctccccgatctgcggccactggactgcccatcagcatgaaaatttttatgtatttacttactgtttttcttatcacccagatgattgggtcagcactttttgctgtgtatcttcatagaaggttggacaagatagaagatgaaaggaatcttcatgaagattttgtattcatgaaaacgatacagagatgcaacacaggagaaagatccttatccttactgaactgtgaggagattaaaagccagtttgaaggctttgtgaaggatataatgttaaacaaagaggagacgaagaaagaaaacagctttgaaatgcaaaaaggtgatcagaatcctcaaattgcggcacatgtcataagtgaggccagcagtaaaacaacatctgtgttacagtgggctgaaaaaggatactacaccatgagcaacaacttggtaaccctggaaaatgggaaacagctgaccgttaaaagacaaggactctattatatctatgcccaagtcaccttctgttccaatcgggaagcttcgagtcaagctccatttatagccagcctctgcctaaagtcccccggtagattcgagagaatcttactcagagctgcaaatacccacagttccgccaaaccttgcgggcaacaatccattcacttgggaggagtatttgaattgcaaccaggtgcttcggtgtttgtcaatgtgactgatccaagccaagtgagccatggcactggcttcacgtcctttggcttactcaaactctga

SEQ ID NO: 6406 - protein, 326 aa, Artificial Sequence
  Description of Artificial Sequence: Synthetic Destabilizing Domain (DD)
EETRELQSLAAAVVPSAQTLKITDFSFSDFELSDLETALCTIRMFTDLNLVQNFQMKHEVLCRWILSVKKNYRKNVAYHNWRHAFNTAQCMFAALKAGKIQNKLTDLEILALLIAALSHDLDHRGVNNSYIQRSEHPLAQLYCHSIMEHHHFDQCLMILNSPGNQILSGLSIEEYKTTLKIIKQAILATDLALYIKRDGEFSELIRKNQFNLEDPHQKELFLAMLMTACDLSAITKPWPIQQRIAELVATEFFDQGDRERKELNIEPTDLMNREKKNKIPSMQVGFIDAICLQLYEALTHVSEDCFPLLDGCRKNRQKWQALAEQQ

SEQ ID NO: 6407 - DNA, 978 bp, Artificial Sequence
  Description of Artificial Sequence: Synthetic Destabilizing Domain (DD)
gaagaaacaagagagctacagtcgttagcggctgctgtggtgccatctgcccagacccttaaaattactgactttagcttcagtgactttgagctgtctgatctggaaacagcactgtgtacaattcggatgtttactgacctcaaccttgtgcagaacttccagatgaaacatgaggttctttgcagatggattttaagtgttaagaagaattatcggaagaatgttgcctatcataattggagacatgcctttaatacagctcagtgcatgtttgctgctctaaaagcaggcaaaattcagaacaagctgactgacctggagatacttgcattgctgattgctgcactaagccacgatttggatcaccgtggtgtgaataactcttacatacagcgaagtgaacatccacttgcccagctttactgccattcaatcatggaacaccatcattttgaccagtgcctgatgattcttaatagtccaggcaatcagattctcagtggcctctccattgaagaatataagaccacgttgaaaataatcaagcaagctattttagctacagacctagcactgtacattaagagggatggagaatttagtgaacttataagaaaaaatcaattcaatttggaagatcctcatcaaaaggagttgtttttggcaatgctgatgacagcttgtgatctttctgcaattacaaaaccctggcctattcaacaacggatagcagaacttgtagcaactgaattttttgatcaaggagacagagagagaaaagaactcaacatagaacccactgatctaatgaacagggagaagaaaaacaaaatcccaagtatgcaagttgggttcatagatgccatctgcttgcaactgtatgaggccctgacccacgtgtcagaggactgtttccctttgctagatggctgcagaaagaacaggcagaaatggcaggcccttgcagaacagcag

SEQ ID NO: 6408 - protein, 326 aa, Artificial Sequence
  Description of Artificial Sequence: Synthetic Destabilizing Domain (DD)
EETRELQSLAAAVVPSAQTLKITDFSFSDFELSDLETALCTIRMFTDLNLVQNFQMKHEVLCRWILSVKKNYRKNVAYHNWRHAFNTAQCMFAALKAGKIQNKLTDLEILALLIAALSHDLDHRGVNNSYIQRSEHPLAQLYCHSIMEHHHFDQCLMILNSPGNQILSGLSIEEYKTTLKIIKQAILATDLALYIKREGEFDELIRKNQFNLEDPHQKELFLAMLMTACDLSAITKPWPIQQRIAELVATEFFDQGDRERKELNIEPTDLMNREKKNKIPSMQVGFIDAICLQLYEALTHVSEDCFPLLDGCRKNRQKWQALAEQQ

SEQ ID NO: 6409 - DNA, 978 bp, Artificial Sequence
  Description of Artificial Sequence: Synthetic Destabilizing Domain (DD)
gaagaaacaagagagctacagtcgttagcggctgctgtggtgccatctgcccagacccttaaaattactgactttagcttcagtgactttgagctgtctgatctggaaacagcactgtgtacaattcggatgtttactgacctcaaccttgtgcagaacttccagatgaaacatgaggttctttgcagatggattttaagtgttaagaagaattatcggaagaatgttgcctatcataattggagacatgcctttaatacagctcagtgcatgtttgctgctctaaaagcaggcaaaattcagaacaagctgactgacctggagatacttgcattgctgattgctgcactaagccacgatttggatcaccgtggtgtgaataactcttacatacagcgaagtgaacatccacttgcccagctttactgccattcaatcatggaacaccatcattttgaccagtgcctgatgattcttaatagtccaggcaatcagattctcagtggcctctccattgaagaatataagaccacgttgaaaataatcaagcaagctattttagctacagacctagcactgtacattaagagggagggagaatttgatgaacttataagaaaaaatcaattcaatttggaagatcctcatcaaaaggagttgtttttggcaatgctgatgacagcttgtgatctttctgcaattacaaaaccctggcctattcaacaacggatagcagaacttgtagcaactgaattttttgatcaaggagacagagagagaaaagaactcaacatagaacccactgatctaatgaacagggagaagaaaaacaaaatcccaagtatgcaagttgggttcatagatgccatctgcttgcaactgtatgaggccctgacccacgtgtcagaggactgtttccctttgctagatggctgcagaaagaacaggcagaaatggcaggcccttgcagaacagcag

SEQ ID NO: 6410 - protein, 326 aa, Artificial Sequence
  Description of Artificial Sequence: Synthetic Destabilizing Domain (DD)
EETRELQSLAAAVVPSAQTLKITDFSFSDFELSDLETALCTIRMFTDLNLVQNFQMKHEVLCRWILSVKKNYRKNVAYHNWRHAFNTAQCMFAALKAGKIQNKLTDLEILALLIAALSHDLDHRGVNNSYIQRSEHPLAQLYCHSIMEHHHFDQCLMILNSPGNQILSGLSIEEYKTTLKIIKQAILATDLALYIKRVGEFGELIRKNQFNLEDPHQKELFLAMLMTACDLSAITKPWPIQQRIAELVATEFFDQGDRERKELNIEPTDLMNREKKNKIPSMQVGFIDAICLQLYEALTHVSEDCFPLLDGCRKNRQKWQALAEQQ

SEQ ID NO: 6411 - DNA, 978 bp, Artificial Sequence
  Description of Artificial Sequence: Synthetic Destabilizing Domain (DD)
gaagaaacaagagagctacagtcgttagcggctgctgtggtgccatctgcccagacccttaaaattactgactttagcttcagtgactttgagctgtctgatctggaaacagcactgtgtacaattcggatgtttactgacctcaaccttgtgcagaacttccagatgaaacatgaggttctttgcagatggattttaagtgttaagaagaattatcggaagaatgttgcctatcataattggagacatgcctttaatacagctcagtgcatgtttgctgctctaaaagcaggcaaaattcagaacaagctgactgacctggagatacttgcattgctgattgctgcactaagccacgatttggatcaccgtggtgtgaataactcttacatacagcgaagtgaacatccacttgcccagctttactgccattcaatcatggaacaccatcattttgaccagtgcctgatgattcttaatagtccaggcaatcagattctcagtggcctctccattgaagaatataagaccacgttgaaaataatcaagcaagctattttagctacagacctagcactgtacattaagagggttggagaatttggtgaacttataagaaaaaatcaattcaatttggaagatcctcatcaaaaggagttgtttttggcaatgctgatgacagcttgtgatctttctgcaattacaaaaccctggcctattcaacaacggatagcagaacttgtagcaactgaattttttgatcaaggagacagagagagaaaagaactcaacatagaacccactgatctaatgaacagggagaagaaaaacaaaatcccaagtatgcaagttgggttcatagatgccatctgcttgcaactgtatgaggccctgacccacgtgtcagaggactgtttccctttgctagatggctgcagaaagaacaggcagaaatggcaggcccttgcagaacagcag

SEQ ID NO: 6412 - protein, 326 aa, Artificial Sequence
  Description of Artificial Sequence: Synthetic Destabilizing Domain (DD)
EETRELQSLAAAVVPSAQTLKITDFSFSDFELSDLETALCTIRMFTDLNLVQNFQMKHEVLCRWILSVKKNYRKNVAYHNWRHAFNTAQCMFAALKAGKIQNKLTDLEILALLIAALSHDLDHRGVNNSYIQRSEHPLAQLYCHSIMEHHHFDQCLMILNSPGNQILSGLSIEEYKTTLKIIKQAILATDLALYIKRWGEFGELIRKNQFNLEDPHQKELFLAMLMTACDLSAITKPWPIQQRIAELVATEFFDQGDRERKELNIEPTDLMNREKKNKIPSMQVGFIDAICLQLYEALTHVSEDCFPLLDGCRKNRQKWQALAEQQ

SEQ ID NO: 6413 - DNA, 978 bp, Artificial Sequence
  Description of Artificial Sequence: Synthetic Destabilizing Domain (DD)
gaagaaacaagagagctacagtcgttagcggctgctgtggtgccatctgcccagacccttaaaattactgactttagcttcagtgactttgagctgtctgatctggaaacagcactgtgtacaattcggatgtttactgacctcaaccttgtgcagaacttccagatgaaacatgaggttctttgcagatggattttaagtgttaagaagaattatcggaagaatgttgcctatcataattggagacatgcctttaatacagctcagtgcatgtttgctgctctaaaagcaggcaaaattcagaacaagctgactgacctggagatacttgcattgctgattgctgcactaagccacgatttggatcaccgtggtgtgaataactcttacatacagcgaagtgaacatccacttgcccagctttactgccattcaatcatggaacaccatcattttgaccagtgcctgatgattcttaatagtccaggcaatcagattctcagtggcctctccattgaagaatataagaccacgttgaaaataatcaagcaagctattttagctacagacctagcactgtacattaagaggtggggagaatttggggaacttataagaaaaaatcaattcaatttggaagatcctcatcaaaaggagttgtttttggcaatgctgatgacagcttgtgatctttctgcaattacaaaaccctggcctattcaacaacggatagcagaacttgtagcaactgaattttttgatcaaggagacagagagagaaaagaactcaacatagaacccactgatctaatgaacagggagaagaaaaacaaaatcccaagtatgcaagttgggttcatagatgccatctgcttgcaactgtatgaggccctgacccacgtgtcagaggactgtttccctttgctagatggctgcagaaagaacaggcagaaatggcaggcccttgcagaacagcag

SEQ ID NO: 6414 - protein, 326 aa, Artificial Sequence
  Description of Artificial Sequence: Synthetic Destabilizing Domain (DD)
EETRELQSLAAAVVPSAQTLKITDFSFSDFELSDLETALCTIRMFTDLNLVQNFQMKHEVLCRWILSVKKNYRKNVAYHNWRHAFNTAQCMFAALKAGKIQNKLTDLEILALLIAALSHDLDHRGVNNSYIQRSEHPLAQLYCHSIMEHHHFDQCLMILNSPGNQILSGLSIEEYKTTLKIIKQAILATDLALYIKRWGEFVELIRKNQFNLEDPHQKELFLAMLMTACDLSAITKPWPIQQRIAELVATEFFDQGDRERKELNIEPTDLMNREKKNKIPSMQVGFIDAICLQLYEALTHVSEDCFPLLDGCRKNRQKWQALAEQQ

SEQ ID NO: 6415 - DNA, 978 bp, Artificial Sequence
  Description of Artificial Sequence: Synthetic Destabilizing Domain (DD)
gaagaaacaagagagctacagtcgttagcggctgctgtggtgccatctgcccagacccttaaaattactgactttagcttcagtgactttgagctgtctgatctggaaacagcactgtgtacaattcggatgtttactgacctcaaccttgtgcagaacttccagatgaaacatgaggttctttgcagatggattttaagtgttaagaagaattatcggaagaatgttgcctatcataattggagacatgcctttaatacagctcagtgcatgtttgctgctctaaaagcaggcaaaattcagaacaagctgactgacctggagatacttgcattgctgattgctgcactaagccacgatttggatcaccgtggtgtgaataactcttacatacagcgaagtgaacatccacttgcccagctttactgccattcaatcatggaacaccatcattttgaccagtgcctgatgattcttaatagtccaggcaatcagattctcagtggcctctccattgaagaatataagaccacgttgaaaataatcaagcaagctattttagctacagacctagcactgtacattaagaggtggggagaatttgttgaacttataagaaaaaatcaattcaatttggaagatcctcatcaaaaggagttgtttttggcaatgctgatgacagcttgtgatctttctgcaattacaaaaccctggcctattcaacaacggatagcagaacttgtagcaactgaattttttgatcaaggagacagagagagaaaagaactcaacatagaacccactgatctaatgaacagggagaagaaaaacaaaatcccaagtatgcaagttgggttcatagatgccatctgcttgcaactgtatgaggccctgacccacgtgtcagaggactgtttccctttgctagatggctgcagaaagaacaggcagaaatggcaggcccttgcagaacagcag

SEQ ID NO: 6416 - protein, 326 aa, Artificial Sequence
  Description of Artificial Sequence: Synthetic Destabilizing Domain (DD)
EETRELQSLAAAVVPSAQTLKITDFSFSDFELSDLETALCTIRMFTDLNLVQNFQMKHEVLCRWILSVKKNYRKNVAYHNWRHAFNTAQCMFAALKAGKIQNKLTDLEILALLIAALSHDLDHRGVNNSYIQRSEHPLAQLYCHSIMEHHHFDQCLMILNSPGNQILSGLSIEEYKTTLKIIKQAILATDLALYIKRLGEFWELIRKNQFNLEDPHQKELFLAMLMTACDLSAITKPWPIQQRIAELVATEFFDQGDRERKELNIEPTDLMNREKKNKIPSMQVGFIDAICLQLYEALTHVSEDCFPLLDGCRKNRQKWQALAEQQ

SEQ ID NO: 6417 - DNA, 978 bp, Artificial Sequence
  Description of Artificial Sequence: Synthetic Destabilizing Domain (DD)
gaagaaacaagagagctacagtcgttagcggctgctgtggtgccatctgcccagacccttaaaattactgactttagcttcagtgactttgagctgtctgatctggaaacagcactgtgtacaattcggatgtttactgacctcaaccttgtgcagaacttccagatgaaacatgaggttctttgcagatggattttaagtgttaagaagaattatcggaagaatgttgcctatcataattggagacatgcctttaatacagctcagtgcatgtttgctgctctaaaagcaggcaaaattcagaacaagctgactgacctggagatacttgcattgctgattgctgcactaagccacgatttggatcaccgtggtgtgaataactcttacatacagcgaagtgaacatccacttgcccagctttactgccattcaatcatggaacaccatcattttgaccagtgcctgatgattcttaatagtccaggcaatcagattctcagtggcctctccattgaagaatataagaccacgttgaaaataatcaagcaagctattttagctacagacctagcactgtacattaagaggttgggagaattttgggaacttataagaaaaaatcaattcaatttggaagatcctcatcaaaaggagttgtttttggcaatgctgatgacagcttgtgatctttctgcaattacaaaaccctggcctattcaacaacggatagcagaacttgtagcaactgaattttttgatcaaggagacagagagagaaaagaactcaacatagaacccactgatctaatgaacagggagaagaaaaacaaaatcccaagtatgcaagttgggttcatagatgccatctgcttgcaactgtatgaggccctgacccacgtgtcagaggactgtttccctttgctagatggctgcagaaagaacaggcagaaatggcaggcccttgcagaacagcag

SEQ ID NO: 6418 - protein, 326 aa, Artificial Sequence
  Description of Artificial Sequence: Synthetic Destabilizing Domain (DD)
EETRELQSLAAAVVPSAQTLKITDFSFSDFELSDLETALCTIRMFTDLNLVQNFQMKHEVLCRWILSVKKNYRKNVAYHNWRHAFNTAQCMFAALKAGKIQNKLTDLEILALLIAALSHDLDHRGVNNSYIQRSEHPLAQLYCHSIMEHHHFDQCLMILNSPGNQILSGLSIEEYKTTLKIIKQAILATDLALYIKRPGEFQELIRKNQFNLEDPHQKELFLAMLMTACDLSAITKPWPIQQRIAELVATEFFDQGDRERKELNIEPTDLMNREKKNKIPSMQVGFIDAICLQLYEALTHVSEDCFPLLDGCRKNRQKWQALAEQQ

SEQ ID NO: 6419 - DNA, 978 bp, Artificial Sequence
  Description of Artificial Sequence: Synthetic Destabilizing Domain (DD)
gaagaaacaagagagctacagtcgttagcggctgctgtggtgccatctgcccagacccttaaaattactgactttagcttcagtgactttgagctgtctgatctggaaacagcactgtgtacaattcggatgtttactgacctcaaccttgtgcagaacttccagatgaaacatgaggttctttgcagatggattttaagtgttaagaagaattatcggaagaatgttgcctatcataattggagacatgcctttaatacagctcagtgcatgtttgctgctctaaaagcaggcaaaattcagaacaagctgactgacctggagatacttgcattgctgattgctgcactaagccacgatttggatcaccgtggtgtgaataactcttacatacagcgaagtgaacatccacttgcccagctttactgccattcaatcatggaacaccatcattttgaccagtgcctgatgattcttaatagtccaggcaatcagattctcagtggcctctccattgaagaatataagaccacgttgaaaataatcaagcaagctattttagctacagacctagcactgtacattaagaggccgggagaatttcaggaacttataagaaaaaatcaattcaatttggaagatcctcatcaaaaggagttgtttttggcaatgctgatgacagcttgtgatctttctgcaattacaaaaccctggcctattcaacaacggatagcagaacttgtagcaactgaattttttgatcaaggagacagagagagaaaagaactcaacatagaacccactgatctaatgaacagggagaagaaaaacaaaatcccaagtatgcaagttgggttcatagatgccatctgcttgcaactgtatgaggccctgacccacgtgtcagaggactgtttccctttgctagatggctgcagaaagaacaggcagaaatggcaggcccttgcagaacagcag

SEQ ID NO: 6420 - protein, 326 aa, Artificial Sequence
  Description of Artificial Sequence: Synthetic Destabilizing Domain (DD)
EETRELQSLAAAVVPSAQTLKITDFSFSDFELSDLETALCTIRMFTDLNLVQNFQMKHEVLCRWILSVKKNYRKNVAYHNWRHAFNTAQCMFAALKAGKIQNKLTDLEILALLIAALSHDLDHRGVNNSYIQRSEHPLAQLYCHSIMEHHHFDQCLMILNSPGNQILSGLSIEEYKTTLKIIKQAILATDLALYIKRAGEFAELIRKNQFNLEDPHQKELFLAMLMTACDLSAITKPWPIQQRIAELVATEFFDQGDRERKELNIEPTDLMNREKKNKIPSMQVGFIDAICLQLYEALTHVSEDCFPLLDGCRKNRQKWQALAEQQ

SEQ ID NO: 6421 - DNA, 978 bp, Artificial Sequence
  Description of Artificial Sequence: Synthetic Destabilizing Domain (DD)
gaagaaacaagagagctacagtcgttagcggctgctgtggtgccatctgcccagacccttaaaattactgactttagcttcagtgactttgagctgtctgatctggaaacagcactgtgtacaattcggatgtttactgacctcaaccttgtgcagaacttccagatgaaacatgaggttctttgcagatggattttaagtgttaagaagaattatcggaagaatgttgcctatcataattggagacatgcctttaatacagctcagtgcatgtttgctgctctaaaagcaggcaaaattcagaacaagctgactgacctggagatacttgcattgctgattgctgcactaagccacgatttggatcaccgtggtgtgaataactcttacatacagcgaagtgaacatccacttgcccagctttactgccattcaatcatggaacaccatcattttgaccagtgcctgatgattcttaatagtccaggcaatcagattctcagtggcctctccattgaagaatataagaccacgttgaaaataatcaagcaagctattttagctacagacctagcactgtacattaagagggctggagaatttgcggaacttataagaaaaaatcaattcaatttggaagatcctcatcaaaaggagttgtttttggcaatgctgatgacagcttgtgatctttctgcaattacaaaaccctggcctattcaacaacggatagcagaacttgtagcaactgaattttttgatcaaggagacagagagagaaaagaactcaacatagaacccactgatctaatgaacagggagaagaaaaacaaaatcccaagtatgcaagttgggttcatagatgccatctgcttgcaactgtatgaggccctgacccacgtgtcagaggactgtttccctttgctagatggctgcagaaagaacaggcagaaatggcaggcccttgcagaacagcag

SEQ ID NO: 6422 - protein, 326 aa, Artificial Sequence
  Description of Artificial Sequence: Synthetic Destabilizing Domain (DD)
EETRELQSLAAAVVPSAQTLKITDFSFSDFELSDLETALCTIRMFTDLNLVQNFQMKHEVLCRWILSVKKNYRKNVAYHNWRHAFNTAQCMFAALKAGKIQNKLTDLEILALLIAALSHDLDHRGVNNSYIQRSEHPLAQLYCHSIMEHHHFDQCLMILNSPGNQILSGLSIEEYKTTLKIIKQAILATDLALYIKRSGEFGELIRKNQFNLEDPHQKELFLAMLMTACDLSAITKPWPIQQRIAELVATEFFDQGDRERKELNIEPTDLMNREKKNKIPSMQVGFIDAICLQLYEALTHVSEDCFPLLDGCRKNRQKWQALAEQQ

SEQ ID NO: 6423 - DNA, 978 bp, Artificial Sequence
  Description of Artificial Sequence: Synthetic Destabilizing Domain (DD)
gaagaaacaagagagctacagtcgttagcggctgctgtggtgccatctgcccagacccttaaaattactgactttagcttcagtgactttgagctgtctgatctggaaacagcactgtgtacaattcggatgtttactgacctcaaccttgtgcagaacttccagatgaaacatgaggttctttgcagatggattttaagtgttaagaagaattatcggaagaatgttgcctatcataattggagacatgcctttaatacagctcagtgcatgtttgctgctctaaaagcaggcaaaattcagaacaagctgactgacctggagatacttgcattgctgattgctgcactaagccacgatttggatcaccgtggtgtgaataactcttacatacagcgaagtgaacatccacttgcccagctttactgccattcaatcatggaacaccatcattttgaccagtgcctgatgattcttaatagtccaggcaatcagattctcagtggcctctccattgaagaatataagaccacgttgaaaataatcaagcaagctattttagctacagacctagcactgtacattaagaggtctggagaatttggggaacttataagaaaaaatcaattcaatttggaagatcctcatcaaaaggagttgtttttggcaatgctgatgacagcttgtgatctttctgcaattacaaaaccctggcctattcaacaacggatagcagaacttgtagcaactgaattttttgatcaaggagacagagagagaaaagaactcaacatagaacccactgatctaatgaacagggagaagaaaaacaaaatcccaagtatgcaagttgggttcatagatgccatctgcttgcaactgtatgaggccctgacccacgtgtcagaggactgtttccctttgctagatggctgcagaaagaacaggcagaaatggcaggcccttgcagaacagcag

SEQ ID NO: 6424 - protein, 326 aa, Artificial Sequence
  Description of Artificial Sequence: Synthetic Destabilizing Domain (DD)
EETRELQSLAAAVVPSAQTLKITDFSFSDFELSDLETALCTIRMFTDLNLVQNFQMKHEVLCRWILSVKKNYRKNVAYHNWRHAFNTAQCMFAALKAGKIQNKLTDLEILALLIAALSHDLDHRGVNNSYIQRSEHPLAQLYCHSIMEHHHFDQCLMILNSPGNQILSGLSIEEYKTTLKIIKQAILATDLALYIKRTGEFPELIRKNQFNLEDPHQKELFLAMLMTACDLSAITKPWPIQQRIAELVATEFFDQGDRERKELNIEPTDLMNREKKNKIPSMQVGFIDAICLQLYEALTHVSEDCFPLLDGCRKNRQKWQALAEQQ

SEQ ID NO: 6425 - DNA, 978 bp, Artificial Sequence
  Description of Artificial Sequence: Synthetic Destabilizing Domain (DD)
gaagaaacaagagagctacagtcgttagcggctgctgtggtgccatctgcccagacccttaaaattactgactttagcttcagtgactttgagctgtctgatctggaaacagcactgtgtacaattcggatgtttactgacctcaaccttgtgcagaacttccagatgaaacatgaggttctttgcagatggattttaagtgttaagaagaattatcggaagaatgttgcctatcataattggagacatgcctttaatacagctcagtgcatgtttgctgctctaaaagcaggcaaaattcagaacaagctgactgacctggagatacttgcattgctgattgctgcactaagccacgatttggatcaccgtggtgtgaataactcttacatacagcgaagtgaacatccacttgcccagctttactgccattcaatcatggaacaccatcattttgaccagtgcctgatgattcttaatagtccaggcaatcagattctcagtggcctctccattgaagaatataagaccacgttgaaaataatcaagcaagctattttagctacagacctagcactgtacattaagaggacgggagaatttccggaacttataagaaaaaatcaattcaatttggaagatcctcatcaaaaggagttgtttttggcaatgctgatgacagcttgtgatctttctgcaattacaaaaccctggcctattcaacaacggatagcagaacttgtagcaactgaattttttgatcaaggagacagagagagaaaagaactcaacatagaacccactgatctaatgaacagggagaagaaaaacaaaatcccaagtatgcaagttgggttcatagatgccatctgcttgcaactgtatgaggccctgacccacgtgtcagaggactgtttccctttgctagatggctgcagaaagaacaggcagaaatggcaggcccttgcagaacagcag

SEQ ID NO: 6426 - protein, 326 aa, Artificial Sequence
  Description of Artificial Sequence: Synthetic Destabilizing Domain (DD)
EETRELQSLAAAVVPSAQTLKITDFSFSDFELSDLETALCTIRMFTDLNLVQNFQMKHEVLCRWILSVKKNYRKNVAYHNWRHAFNTAQCMFAALKAGKIQNKLTDLEILALLIAALSHDLDHRGVNNSYIQRSEHPLAQLYCHSIMEHHHFDQCLMILNSPGNQILSGLSIEEYKTTLKIIKQAILATDLALYIKRMGEFHELIRKNQFNLEDPHQKELFLAMLMTACDLSAITKPWPIQQRIAELVATEFFDQGDRERKELNIEPTDLMNREKKNKIPSMQVGFIDAICLQLYEALTHVSEDCFPLLDGCRKNRQKWQALAEQQ

SEQ ID NO: 6427 - DNA, 978 bp, Artificial Sequence
  Description of Artificial Sequence: Synthetic Destabilizing Domain (DD)
gaagaaacaagagagctacagtcgttagcggctgctgtggtgccatctgcccagacccttaaaattactgactttagcttcagtgactttgagctgtctgatctggaaacagcactgtgtacaattcggatgtttactgacctcaaccttgtgcagaacttccagatgaaacatgaggttctttgcagatggattttaagtgttaagaagaattatcggaagaatgttgcctatcataattggagacatgcctttaatacagctcagtgcatgtttgctgctctaaaagcaggcaaaattcagaacaagctgactgacctggagatacttgcattgctgattgctgcactaagccacgatttggatcaccgtggtgtgaataactcttacatacagcgaagtgaacatccacttgcccagctttactgccattcaatcatggaacaccatcattttgaccagtgcctgatgattcttaatagtccaggcaatcagattctcagtggcctctccattgaagaatataagaccacgttgaaaataatcaagcaagctattttagctacagacctagcactgtacattaagaggatgggagaatttcatgaacttataagaaaaaatcaattcaatttggaagatcctcatcaaaaggagttgtttttggcaatgctgatgacagcttgtgatctttctgcaattacaaaaccctggcctattcaacaacggatagcagaacttgtagcaactgaattttttgatcaaggagacagagagagaaaagaactcaacatagaacccactgatctaatgaacagggagaagaaaaacaaaatcccaagtatgcaagttgggttcatagatgccatctgcttgcaactgtatgaggccctgacccacgtgtcagaggactgtttccctttgctagatggctgcagaaagaacaggcagaaatggcaggcccttgcagaacagcag

SEQ ID NO: 6428 - protein, 326 aa, Artificial Sequence
  Description of Artificial Sequence: Synthetic Destabilizing Domain (DD)
EETRELQSLAAAVVPSAQTLKITDFSFSDFELSDLETALCTIRMFTDLNLVQNFQMKHEVLCRWILSVKKNYRKNVAYHNWRHAFNTAQCMFAALKAGKIQNKLTDLEILALLIAALSHDLDHRGVNNSYIQRSEHPLAQLYCHSIMEHHHFDQCLMILNSPGNQILSGLSIEEYKTTLKIIKQAILATDLALYIKRYGEFMELIRKNQFNLEDPHQKELFLAMLMTACDLSAITKPWPIQQRIAELVATEFFDQGDRERKELNIEPTDLMNREKKNKIPSMQVGFIDAICLQLYEALTHVSEDCFPLLDGCRKNRQKWQALAEQQ

SEQ ID NO: 6429 - DNA, 978 bp, Artificial Sequence
  Description of Artificial Sequence: Synthetic Destabilizing Domain (DD)
gaagaaacaagagagctacagtcgttagcggctgctgtggtgccatctgcccagacccttaaaattactgactttagcttcagtgactttgagctgtctgatctggaaacagcactgtgtacaattcggatgtttactgacctcaaccttgtgcagaacttccagatgaaacatgaggttctttgcagatggattttaagtgttaagaagaattatcggaagaatgttgcctatcataattggagacatgcctttaatacagctcagtgcatgtttgctgctctaaaagcaggcaaaattcagaacaagctgactgacctggagatacttgcattgctgattgctgcactaagccacgatttggatcaccgtggtgtgaataactcttacatacagcgaagtgaacatccacttgcccagctttactgccattcaatcatggaacaccatcattttgaccagtgcctgatgattcttaatagtccaggcaatcagattctcagtggcctctccattgaagaatataagaccacgttgaaaataatcaagcaagctattttagctacagacctagcactgtacattaagaggtatggagaatttatggaacttataagaaaaaatcaattcaatttggaagatcctcatcaaaaggagttgtttttggcaatgctgatgacagcttgtgatctttctgcaattacaaaaccctggcctattcaacaacggatagcagaacttgtagcaactgaattttttgatcaaggagacagagagagaaaagaactcaacatagaacccactgatctaatgaacagggagaagaaaaacaaaatcccaagtatgcaagttgggttcatagatgccatctgcttgcaactgtatgaggccctgacccacgtgtcagaggactgtttccctttgctagatggctgcagaaagaacaggcagaaatggcaggcccttgcagaacagcag

SEQ ID NO: 6430 - protein, 326 aa, Artificial Sequence
  Description of Artificial Sequence: Synthetic Destabilizing Domain (DD)
EETRELQSLAAAVVPSAQTLKITDFSFSDFELSDLETALCTIRMFTDLNLVQNFQMKHEVLCRWILSVKKNYRKNVAYHNWRHAFNTAQCMFAALKAGKIQNKLTDLEILALLIAALSHDLDHRGVNNSYIQRSEHPLAQLYCHSIMEHHHFDQCLMILNSPGNQILSGLSIEEYKTTLKIIKQAILATDLALYIKRPGEFDELIRKNQFNLEDPHQKELFLAMLMTACDLSAITKPWPIQQRIAELVATEFFDQGDRERKELNIEPTDLMNREKKNKIPSMQVGFIDAICLQLYEALTHVSEDCFPLLDGCRKNRQKWQALAEQQ

SEQ ID NO: 6431 - DNA, 978 bp, Artificial Sequence
  Description of Artificial Sequence: Synthetic Destabilizing Domain (DD)
gaagaaacaagagagctacagtcgttagcggctgctgtggtgccatctgcccagacccttaaaattactgactttagcttcagtgactttgagctgtctgatctggaaacagcactgtgtacaattcggatgtttactgacctcaaccttgtgcagaacttccagatgaaacatgaggttctttgcagatggattttaagtgttaagaagaattatcggaagaatgttgcctatcataattggagacatgcctttaatacagctcagtgcatgtttgctgctctaaaagcaggcaaaattcagaacaagctgactgacctggagatacttgcattgctgattgctgcactaagccacgatttggatcaccgtggtgtgaataactcttacatacagcgaagtgaacatccacttgcccagctttactgccattcaatcatggaacaccatcattttgaccagtgcctgatgattcttaatagtccaggcaatcagattctcagtggcctctccattgaagaatataagaccacgttgaaaataatcaagcaagctattttagctacagacctagcactgtacattaagaggcctggagaatttgatgaacttataagaaaaaatcaattcaatttggaagatcctcatcaaaaggagttgtttttggcaatgctgatgacagcttgtgatctttctgcaattacaaaaccctggcctattcaacaacggatagcagaacttgtagcaactgaattttttgatcaaggagacagagagagaaaagaactcaacatagaacccactgatctaatgaacagggagaagaaaaacaaaatcccaagtatgcaagttgggttcatagatgccatctgcttgcaactgtatgaggccctgacccacgtgtcagaggactgtttccctttgctagatggctgcagaaagaacaggcagaaatggcaggcccttgcagaacagcag

SEQ ID NO: 6432 - protein, 326 aa, Artificial Sequence
  Description of Artificial Sequence: Synthetic Destabilizing Domain (DD)
EETRELQSLAAAVVPSAQTLKITDFSFSDFELSDLETALCTIRMFTDLNLVQNFQMKHEVLCRWILSVKKNYRKNVAYHNWRHAFNTAQCMFAALKAGKIQNKLTDLEILALLIAALSHDLDHRGVNNSYIQRSEHPLAQLYCHSIMEHHHFDQCLMILNSPGNQILSGLSIEEYKTTLKIIKQAILATDLALYIKRPGEFGELIRKNQFNLEDPHQKELFLAMLMTACDLSAITKPWPIQQRIAELVATEFFDQGDRERKELNIEPTDLMNREKKNKIPSMQVGFIDAICLQLYEALTHVSEDCFPLLDGCRKNRQKWQALAEQQ

SEQ ID NO: 6433 - DNA, 978 bp, Artificial Sequence
  Description of Artificial Sequence: Synthetic Destabilizing Domain (DD)
gaagaaacaagagagctacagtcgttagcggctgctgtggtgccatctgcccagacccttaaaattactgactttagcttcagtgactttgagctgtctgatctggaaacagcactgtgtacaattcggatgtttactgacctcaaccttgtgcagaacttccagatgaaacatgaggttctttgcagatggattttaagtgttaagaagaattatcggaagaatgttgcctatcataattggagacatgcctttaatacagctcagtgcatgtttgctgctctaaaagcaggcaaaattcagaacaagctgactgacctggagatacttgcattgctgattgctgcactaagccacgatttggatcaccgtggtgtgaataactcttacatacagcgaagtgaacatccacttgcccagctttactgccattcaatcatggaacaccatcattttgaccagtgcctgatgattcttaatagtccaggcaatcagattctcagtggcctctccattgaagaatataagaccacgttgaaaataatcaagcaagctattttagctacagacctagcactgtacattaagaggcctggagaatttggggaacttataagaaaaaatcaattcaatttggaagatcctcatcaaaaggagttgtttttggcaatgctgatgacagcttgtgatctttctgcaattacaaaaccctggcctattcaacaacggatagcagaacttgtagcaactgaattttttgatcaaggagacagagagagaaaagaactcaacatagaacccactgatctaatgaacagggagaagaaaaacaaaatcccaagtatgcaagttgggttcatagatgccatctgcttgcaactgtatgaggccctgacccacgtgtcagaggactgtttccctttgctagatggctgcagaaagaacaggcagaaatggcaggcccttgcagaacagcag

SEQ ID NO: 6434 - protein, 326 aa, Artificial Sequence
  Description of Artificial Sequence: Synthetic Destabilizing Domain (DD)
EETRELQSLAAAVVPSAQTLKITDFSFSDFELSDLETALCTIRMFTDLNLVQNFQMKHEVLCRWILSVKKNYRKNVAYHNWRHAFNTAQCMFAALKAGKIQNKLTDLEILALLIAALSHDLDHRGVNNSYIQRSEHPLAQLYCHSIMEHHHFDQCLMILNSPGNQILSGLSIEEYKTTLKIIKQAILATDLALYIKRWGEFLELIRKNQFNLEDPHQKELFLAMLMTACDLSAITKPWPIQQRIAELVATEFFDQGDRERKELNIEPTDLMNREKKNKIPSMQVGFIDAICLQLYEALTHVSEDCFPLLDGCRKNRQKWQALAEQQ

SEQ ID NO: 6435 - DNA, 978 bp, Artificial Sequence
  Description of Artificial Sequence: Synthetic Destabilizing Domain (DD)
gaagaaacaagagagctacagtcgttagcggctgctgtggtgccatctgcccagacccttaaaattactgactttagcttcagtgactttgagctgtctgatctggaaacagcactgtgtacaattcggatgtttactgacctcaaccttgtgcagaacttccagatgaaacatgaggttctttgcagatggattttaagtgttaagaagaattatcggaagaatgttgcctatcataattggagacatgcctttaatacagctcagtgcatgtttgctgctctaaaagcaggcaaaattcagaacaagctgactgacctggagatacttgcattgctgattgctgcactaagccacgatttggatcaccgtggtgtgaataactcttacatacagcgaagtgaacatccacttgcccagctttactgccattcaatcatggaacaccatcattttgaccagtgcctgatgattcttaatagtccaggcaatcagattctcagtggcctctccattgaagaatataagaccacgttgaaaataatcaagcaagctattttagctacagacctagcactgtacattaagaggtggggagaatttttggaacttataagaaaaaatcaattcaatttggaagatcctcatcaaaaggagttgtttttggcaatgctgatgacagcttgtgatctttctgcaattacaaaaccctggcctattcaacaacggatagcagaacttgtagcaactgaattttttgatcaaggagacagagagagaaaagaactcaacatagaacccactgatctaatgaacagggagaagaaaaacaaaatcccaagtatgcaagttgggttcatagatgccatctgcttgcaactgtatgaggccctgacccacgtgtcagaggactgtttccctttgctagatggctgcagaaagaacaggcagaaatggcaggcccttgcagaacagcag

SEQ ID NO: 6436 - protein, 326 aa, Artificial Sequence
  Description of Artificial Sequence: Synthetic Destabilizing Domain (DD)
EETRELQSLAAAVVPSAQTLKITDFSFSDFELSDLETALCTIRMFTDLNLVQNFQMKHEVLCRWILSVKKNYRKNVAYHNWRHAFNTAQCMFAALKAGKIQNKLTDLEILALLIAALSHDLDHRGVNNSYIQRSEHPLAQLYCHSIMEHHHFDQCLMILNSPGNQILSGLSIEEYKTTLKIIKQAILATDLALYIKRLGEFSELIRKNQFNLEDPHQKELFLAMLMTACDLSAITKPWPIQQRIAELVATEFFDQGDRERKELNIEPTDLMNREKKNKIPSMQVGFIDAICLQLYEALTHVSEDCFPLLDGCRKNRQKWQALAEQQ

SEQ ID NO: 6437 - DNA, 978 bp, Artificial Sequence
  Description of Artificial Sequence: Synthetic Destabilizing Domain (DD)
gaagaaacaagagagctacagtcgttagcggctgctgtggtgccatctgcccagacccttaaaattactgactttagcttcagtgactttgagctgtctgatctggaaacagcactgtgtacaattcggatgtttactgacctcaaccttgtgcagaacttccagatgaaacatgaggttctttgcagatggattttaagtgttaagaagaattatcggaagaatgttgcctatcataattggagacatgcctttaatacagctcagtgcatgtttgctgctctaaaagcaggcaaaattcagaacaagctgactgacctggagatacttgcattgctgattgctgcactaagccacgatttggatcaccgtggtgtgaataactcttacatacagcgaagtgaacatccacttgcccagctttactgccattcaatcatggaacaccatcattttgaccagtgcctgatgattcttaatagtccaggcaatcagattctcagtggcctctccattgaagaatataagaccacgttgaaaataatcaagcaagctattttagctacagacctagcactgtacattaagaggttgggagaatttagtgaacttataagaaaaaatcaattcaatttggaagatcctcatcaaaaggagttgtttttggcaatgctgatgacagcttgtgatctttctgcaattacaaaaccctggcctattcaacaacggatagcagaacttgtagcaactgaattttttgatcaaggagacagagagagaaaagaactcaacatagaacccactgatctaatgaacagggagaagaaaaacaaaatcccaagtatgcaagttgggttcatagatgccatctgcttgcaactgtatgaggccctgacccacgtgtcagaggactgtttccctttgctagatggctgcagaaagaacaggcagaaatggcaggcccttgcagaacagcag

SEQ ID NO: 6438 - protein, 326 aa, Artificial Sequence
  Description of Artificial Sequence: Synthetic Destabilizing Domain (DD)
EETRELQSLAAAVVPSAQTLKITDFSFSDFELSDLETALCTIRMFTDLNLVQNFQMKHEVLCRWILSVKKNYRKNVAYHNWRHAFNTAQCMFAALKAGKIQNKLTDLEILALLIAALSHDLDHRGVNNSYIQRSEHPLAQLYCHSIMEHHHFDQCLMILNSPGNQILSGLSIEEYKTTLKIIKQAILATDLALYIKRDGEFTELIRKNQFNLEDPHQKELFLAMLMTACDLSAITKPWPIQQRIAELVATEFFDQGDRERKELNIEPTDLMNREKKNKIPSMQVGFIDAICLQLYEALTHVSEDCFPLLDGCRKNRQKWQALAEQQ

SEQ ID NO: 6439 - DNA, 978 bp, Artificial Sequence
  Description of Artificial Sequence: Synthetic Destabilizing Domain (DD)
gaagaaacaagagagctacagtcgttagcggctgctgtggtgccatctgcccagacccttaaaattactgactttagcttcagtgactttgagctgtctgatctggaaacagcactgtgtacaattcggatgtttactgacctcaaccttgtgcagaacttccagatgaaacatgaggttctttgcagatggattttaagtgttaagaagaattatcggaagaatgttgcctatcataattggagacatgcctttaatacagctcagtgcatgtttgctgctctaaaagcaggcaaaattcagaacaagctgactgacctggagatacttgcattgctgattgctgcactaagccacgatttggatcaccgtggtgtgaataactcttacatacagcgaagtgaacatccacttgcccagctttactgccattcaatcatggaacaccatcattttgaccagtgcctgatgattcttaatagtccaggcaatcagattctcagtggcctctccattgaagaatataagaccacgttgaaaataatcaagcaagctattttagctacagacctagcactgtacattaagagggatggagaatttacggaacttataagaaaaaatcaattcaatttggaagatcctcatcaaaaggagttgtttttggcaatgctgatgacagcttgtgatctttctgcaattacaaaaccctggcctattcaacaacggatagcagaacttgtagcaactgaattttttgatcaaggagacagagagagaaaagaactcaacatagaacccactgatctaatgaacagggagaagaaaaacaaaatcccaagtatgcaagttgggttcatagatgccatctgcttgcaactgtatgaggccctgacccacgtgtcagaggactgtttccctttgctagatggctgcagaaagaacaggcagaaatggcaggcccttgcagaacagcag

SEQ ID NO: 6440 - protein, 326 aa, Artificial Sequence
  Description of Artificial Sequence: Synthetic Destabilizing Domain (DD)
EETRELQSLAAAVVPSAQTLKITDFSFSDFELSDLETALCTIRMFTDLNLVQNFQMKHEVLCRWILSVKKNYRKNVAYHNWRHAFNTAQCMFAALKAGKIQNKLTDLEILALLIAALSHDLDHRGVNNSYIQRSEHPLAQLYCHSIMEHHHFDQCLMILNSPGNQILSGLSIEEYKTTLKIIKQAILATDLALYIKRLGEFVELIRKNQFNLEDPHQKELFLAMLMTACDLSAITKPWPIQQRIAELVATEFFDQGDRERKELNIEPTDLMNREKKNKIPSMQVGFIDAICLQLYEALTHVSEDCFPLLDGCRKNRQKWQALAEQQ

SEQ ID NO: 6441 - DNA, 978 bp, Artificial Sequence
  Description of Artificial Sequence: Synthetic Destabilizing Domain (DD)
gaagaaacaagagagctacagtcgttagcggctgctgtggtgccatctgcccagacccttaaaattactgactttagcttcagtgactttgagctgtctgatctggaaacagcactgtgtacaattcggatgtttactgacctcaaccttgtgcagaacttccagatgaaacatgaggttctttgcagatggattttaagtgttaagaagaattatcggaagaatgttgcctatcataattggagacatgcctttaatacagctcagtgcatgtttgctgctctaaaagcaggcaaaattcagaacaagctgactgacctggagatacttgcattgctgattgctgcactaagccacgatttggatcaccgtggtgtgaataactcttacatacagcgaagtgaacatccacttgcccagctttactgccattcaatcatggaacaccatcattttgaccagtgcctgatgattcttaatagtccaggcaatcagattctcagtggcctctccattgaagaatataagaccacgttgaaaataatcaagcaagctattttagctacagacctagcactgtacattaagaggttgggagaatttgttgaacttataagaaaaaatcaattcaatttggaagatcctcatcaaaaggagttgtttttggcaatgctgatgacagcttgtgatctttctgcaattacaaaaccctggcctattcaacaacggatagcagaacttgtagcaactgaattttttgatcaaggagacagagagagaaaagaactcaacatagaacccactgatctaatgaacagggagaagaaaaacaaaatcccaagtatgcaagttgggttcatagatgccatctgcttgcaactgtatgaggccctgacccacgtgtcagaggactgtttccctttgctagatggctgcagaaagaacaggcagaaatggcaggcccttgcagaacagcag

SEQ ID NO: 6442 - protein, 326 aa, Artificial Sequence
  Description of Artificial Sequence: Synthetic Destabilizing Domain (DD)
EETRELQSLAAAVVPSAQTLKITDFSFSDFELSDLETALCTIRMFTDLNLVQNFQMKHEVLCRWILSVKKNYRKNVAYHNWRHAFNTAQCMFAALKAGKIQNKLTDLEILALLIAALSHDLDHRGVNNSYIQRSEHPLAQLYCHSIMEHHHFDQCLMILNSPGNQILSGLSIEEYKTTLKIIKQAILATDLALYIKRGGEFVELIRKNQFNLEDPHQKELFLAMLMTACDLSAITKPWPIQQRIAELVATEFFDQGDRERKELNIEPTDLMNREKKNKIPSMQVGFIDAICLQLYEALTHVSEDCFPLLDGCRKNRQKWQALAEQQ

SEQ ID NO: 6443 - DNA, 978 bp, Artificial Sequence
  Description of Artificial Sequence: Synthetic Destabilizing Domain (DD)
gaagaaacaagagagctacagtcgttagcggctgctgtggtgccatctgcccagacccttaaaattactgactttagcttcagtgactttgagctgtctgatctggaaacagcactgtgtacaattcggatgtttactgacctcaaccttgtgcagaacttccagatgaaacatgaggttctttgcagatggattttaagtgttaagaagaattatcggaagaatgttgcctatcataattggagacatgcctttaatacagctcagtgcatgtttgctgctctaaaagcaggcaaaattcagaacaagctgactgacctggagatacttgcattgctgattgctgcactaagccacgatttggatcaccgtggtgtgaataactcttacatacagcgaagtgaacatccacttgcccagctttactgccattcaatcatggaacaccatcattttgaccagtgcctgatgattcttaatagtccaggcaatcagattctcagtggcctctccattgaagaatataagaccacgttgaaaataatcaagcaagctattttagctacagacctagcactgtacattaagagggggggagaatttgttgaacttataagaaaaaatcaattcaatttggaagatcctcatcaaaaggagttgtttttggcaatgctgatgacagcttgtgatctttctgcaattacaaaaccctggcctattcaacaacggatagcagaacttgtagcaactgaattttttgatcaaggagacagagagagaaaagaactcaacatagaacccactgatctaatgaacagggagaagaaaaacaaaatcccaagtatgcaagttgggttcatagatgccatctgcttgcaactgtatgaggccctgacccacgtgtcagaggactgtttccctttgctagatggctgcagaaagaacaggcagaaatggcaggcccttgcagaacagcag

SEQ ID NO: 6444 - protein, 326 aa, Artificial Sequence
  Description of Artificial Sequence: Synthetic Destabilizing Domain (DD)
EETRELQSLAAAVVPSAQTLKITDFSFSDFELSDLETALCTIRMFTDLNLVQNFQMKHEVLCRWILSVKKNYRKNVAYHNWRHAFNTAQCMFAALKAGKIQNKLTDLEILALLIAALSHDLDHRGVNNSYIQRSEHPLAQLYCHSIMEHHHFDQCLMILNSPGNQILSGLSIEEYKTTLKIIKQAILATDLALYIKRWGEFAELIRKNQFNLEDPHQKELFLAMLMTACDLSAITKPWPIQQRIAELVATEFFDQGDRERKELNIEPTDLMNREKKNKIPSMQVGFIDAICLQLYEALTHVSEDCFPLLDGCRKNRQKWQALAEQQ

SEQ ID NO: 6445 - DNA, 978 bp, Artificial Sequence
  Description of Artificial Sequence: Synthetic Destabilizing Domain (DD)
gaagaaacaagagagctacagtcgttagcggctgctgtggtgccatctgcccagacccttaaaattactgactttagcttcagtgactttgagctgtctgatctggaaacagcactgtgtacaattcggatgtttactgacctcaaccttgtgcagaacttccagatgaaacatgaggttctttgcagatggattttaagtgttaagaagaattatcggaagaatgttgcctatcataattggagacatgcctttaatacagctcagtgcatgtttgctgctctaaaagcaggcaaaattcagaacaagctgactgacctggagatacttgcattgctgattgctgcactaagccacgatttggatcaccgtggtgtgaataactcttacatacagcgaagtgaacatccacttgcccagctttactgccattcaatcatggaacaccatcattttgaccagtgcctgatgattcttaatagtccaggcaatcagattctcagtggcctctccattgaagaatataagaccacgttgaaaataatcaagcaagctattttagctacagacctagcactgtacattaagaggtggggagaatttgctgaacttataagaaaaaatcaattcaatttggaagatcctcatcaaaaggagttgtttttggcaatgctgatgacagcttgtgatctttctgcaattacaaaaccctggcctattcaacaacggatagcagaacttgtagcaactgaattttttgatcaaggagacagagagagaaaagaactcaacatagaacccactgatctaatgaacagggagaagaaaaacaaaatcccaagtatgcaagttgggttcatagatgccatctgcttgcaactgtatgaggccctgacccacgtgtcagaggactgtttccctttgctagatggctgcagaaagaacaggcagaaatggcaggcccttgcagaacagcag

SEQ ID NO: 6446 - protein, 326 aa, Artificial Sequence
  Description of Artificial Sequence: Synthetic Destabilizing Domain (DD)
EETRELQSLAAAVVPSAQTLKITDFSFSDFELSDLETALNTIRMFTDLNLVQNFQMKHEVLCRWILSVKKNYRKNVAYHNWRHAFNTAQCMFAALKAGKIQNKLTDLEILALLIAALSHDLDHRGVNNSYIQRSEHPLAQLYCHSIMEHHHFDQCLMILNSPGNQILSGLSIEEYKTTLKIIKQAILATDLALYIKRRGEFFELIRKNQFNLEDPHQKELFLAMLMTACDLSAITKPWPIQQRIAELVATEFFDQGDRERKELNIEPTDLMNREKKNKIPSMQVGFIDAICLQLYEALTHVSEDCFPLLDGCRKNRQKWQALAEQQ

SEQ ID NO: 6447 - DNA, 978 bp, Artificial Sequence
  Description of Artificial Sequence: Synthetic Destabilizing Domain (DD)
gaagaaacaagagagctacagtcgttagcggctgctgtggtgccatctgcccagacccttaaaattactgactttagcttcagtgactttgagctgtctgatctggaaacagcactgaatacaattcggatgtttactgacctcaaccttgtgcagaacttccagatgaaacatgaggttctttgcagatggattttaagtgttaagaagaattatcggaagaatgttgcctatcataattggagacatgcctttaatacagctcagtgcatgtttgctgctctaaaagcaggcaaaattcagaacaagctgactgacctggagatacttgcattgctgattgctgcactaagccacgatttggatcaccgtggtgtgaataactcttacatacagcgaagtgaacatccacttgcccagctttactgccattcaatcatggaacaccatcattttgaccagtgcctgatgattcttaatagtccaggcaatcagattctcagtggcctctccattgaagaatataagaccacgttgaaaataatcaagcaagctattttagctacagacctagcactgtacattaagaggcgaggagaattttttgaacttataagaaaaaatcaattcaatttggaagatcctcatcaaaaggagttgtttttggcaatgctgatgacagcttgtgatctttctgcaattacaaaaccctggcctattcaacaacggatagcagaacttgtagcaactgaattttttgatcaaggagacagagagagaaaagaactcaacatagaacccactgatctaatgaacagggagaagaaaaacaaaatcccaagtatgcaagttgggttcatagatgccatctgcttgcaactgtatgaggccctgacccacgtgtcagaggactgtttccctttgctagatggctgcagaaagaacaggcagaaatggcaggcccttgcagaacagcag

SEQ ID NO: 6448 - protein, 326 aa, Artificial Sequence
  Description of Artificial Sequence: Synthetic Destabilizing Domain (DD)
EKTRELQSLAAAVVPSAQTLKITDFSFSDFELSDLETALCTIRMFTDLNLVQNFQMKHEVLCRWILSVKKNYRKNVAYHNWRHAFNTAQCMFAALKAGKIQNKLTDLEILALLIAALSHDLDHRGVNNSYIQRSEHPLAQLYCHSIMEHHHFDQCLMILNSPGNQILSGLSIEEYKTTLKIIKQAILATDLALYIKRRGEFFELWRKNQFNLEDPHQKELFLAMLMTACDLSAITKPWPIQQRIAELVATEFFDQGDRERKELNIEPTDLMNREKKNKIPSMQVGFIDAICLQLYEALTHVSEDCFPLLDGCRKNRQKWQALAEQQ

SEQ ID NO: 6449 - DNA, 978 bp, Artificial Sequence
  Description of Artificial Sequence: Synthetic Destabilizing Domain (DD)
gaaaaaacaagagagctacagtcgttagcggctgctgtggtgccatctgcccagacccttaaaattactgactttagcttcagtgactttgagctgtctgatctggaaacagcactgtgtacaattcggatgtttactgacctcaaccttgtgcagaacttccagatgaaacatgaggttctttgcagatggattttaagtgttaagaagaattatcggaagaatgttgcctatcataattggagacatgcctttaatacagctcagtgcatgtttgctgctctaaaagcaggcaaaattcagaacaagctgactgacctggagatacttgcattgctgattgctgcactaagccacgatttggatcaccgtggtgtgaataactcttacatacagcgaagtgaacatccacttgcccagctttactgccattcaatcatggaacaccatcattttgaccagtgcctgatgattcttaatagtccaggcaatcagattctcagtggcctctccattgaagaatataagaccacgttgaaaataatcaagcaagctattttagctacagacctagcactgtacattaagaggcgaggagaattttttgaactttggagaaaaaatcaattcaatttggaagatcctcatcaaaaggagttgtttttggcaatgctgatgacagcttgtgatctttctgcaattacaaaaccctggcctattcaacaacggatagcagaacttgtagcaactgaattttttgatcaaggagacagagagagaaaagaactcaacatagaacccactgatctaatgaacagggagaagaaaaacaaaatcccaagtatgcaagttgggttcatagatgccatctgcttgcaactgtatgaggccctgacccacgtgtcagaggactgtttccctttgctagatggctgcagaaagaacaggcagaaatggcaggcccttgcagaacagcag

SEQ ID NO: 6450 - protein, 326 aa, Artificial Sequence
  Description of Artificial Sequence: Synthetic Destabilizing Domain (DD)
EETRELQSLAAAVVPSAQTLKITDFSFSDFELSDLETALCTIRMFTDLNLVQNFQMKHEVLCRWILSVKKNYRKNVAYHNWRHAFNTAQCMFAALKAGKIQNKLTDLEILALLIAALSHDLDHRGVNNSYIQRSEHPLAQLYCFSIMEHHHFDQCLMILNSPGNQILFGLSIEEYKTTLKIIKQAILATDLALYIKRRGEFFELIRKNQFNLEDPHQKELFLAMLMTACDLSAITKPWPIQQRIAELVATEFFDQGDRERKELNIEPTDLMNREKKNKIPSMQVGFIDAICLQLYEALTHVSEDCFPLLDGCRKNRQKWQALAEQQ

SEQ ID NO: 6451 - DNA, 978 bp, Artificial Sequence
  Description of Artificial Sequence: Synthetic Destabilizing Domain (DD)
gaagaaacaagagagctacagtcgttagcggctgctgtggtaccatctgcccagacccttaaaattactgactttagcttcagtgactttgagctgtctgatctggaaacagcactgtgtacaattcggatgtttactgacctcaaccttgtgcagaacttccagatgaaacatgaggttctttgcagatggattttaagtgttaagaagaattatcggaagaatgttgcctatcataattggagacatgcctttaatacagctcagtgcatgtttgctgctctaaaagcaggcaaaattcagaacaagctgactgacctggagatacttgcattgctgattgctgcactaagccacgatttggatcaccgtggtgtgaataactcttacatacagcgaagtgaacatccacttgcccagctttactgcttttcaatcatggaacaccatcattttgaccagtgcctgatgattcttaatagtccaggcaatcagattctctttggcctctccattgaagaatataagaccacgttgaaaataatcaagcaagctattttagctacagacctagcactgtacattaagaggcgaggagaattttttgaacttataagaaaaaatcaattcaatttggaagatcctcatcaaaaggagttgtttttggcaatgctgatgacagcttgtgatctttctgcaattacaaaaccctggcctattcaacaacggatagcagaacttgtagcaactgaattttttgatcaaggagacagagagagaaaagaactcaacatagaacccactgatctaatgaacagggagaagaaaaacaaaatcccaagtatgcaagttgggttcatagatgccatctgcttgcaactgtatgaggccctgacccacgtgtcagaggactgtttccctttgctagatggctgcagaaagaacaggcagaaatggcaggcccttgcagaacagcag

SEQ ID NO: 6452 - protein, 326 aa, Artificial Sequence
  Description of Artificial Sequence: Synthetic Destabilizing Domain (DD)
EETRELQSLAAAVVPSAQTLKITDFSFSDFELSDLETALCTIRMFTDLNLVQNFQMKHEVLCRWILSVKKNYRKNVAYHNWRHAFNTAQCMFAALKAGKIQNKLTDLEILALLIAALSHDLDHRGVNNSYIQRSGHPLAQLYCHSIMEHHHFDQCLMILNSPGNQTLSGLSIEEYKTTLKIIKQAILATDLALYIKRRGEFFELIRKNQFNLEDPHQKELFLAMLMTACDLSAITKPWPIQQRIAELVATEFFDQGDRERKELNIEPTDLMNREKKNKIPSMQVGFIDAICLQLYEALTHVSEDCFPLLDGCRKNRQKWQALAEQQ

SEQ ID NO: 6453 - DNA, 978 bp, Artificial Sequence
  Description of Artificial Sequence: Synthetic Destabilizing Domain (DD)
gaagaaacaagagagctacagtcgttagcggctgctgtggtgccatctgcccagacccttaaaattactgactttagcttcagtgactttgagctgtctgatctagaaacagcactgtgtacaattcggatgtttactgacctcaaccttgtgcagaacttccagatgaaacatgaggttctttgcagatggattttaagtgttaagaagaattatcggaagaatgttgcctatcataattggagacatgcctttaatacagctcagtgcatgtttgctgctctaaaagcaggcaaaattcagaacaagctgactgacctggagatacttgcattgctgattgctgcactaagccacgatttggatcaccgtggtgtgaataactcttacatacagcgaagtggacatccacttgcccagctttactgccattcaatcatggaacaccatcattttgaccagtgcctgatgattcttaatagtccaggcaatcagactctcagtggcctctccattgaagaatataagaccacgttgaaaataatcaagcaagctattttagctacagacctagcactgtacattaagaggcgaggagaattttttgaacttataagaaaaaatcaattcaatttggaagatcctcatcaaaaggagttgtttttggcaatgctgatgacagcttgtgatctttctgcaattacaaaaccctggcctattcaacaacggatagcagaacttgtagcaactgaattttttgatcaaggagacagagagagaaaagaactcaacatagaacccactgatctaatgaacagggagaagaaaaacaaaatcccaagtatgcaagttgggttcatagacgccatctgcttgcaactgtatgaggccctgacccacgtgtcagaggactgtttccctttgctagatggctgcagaaagaacaggcagaaatggcaggcccttgcagaacagcag

SEQ ID NO: 6454 - protein, 326 aa, Artificial Sequence
  Description of Artificial Sequence: Synthetic Destabilizing Domain (DD)
EETRELQSLAAAVVPSAQTLKITDFSFSDFELSDLETALCTIRMFTDLNLVQNFQMKHEVLCRWILSVKKNYRKNVAYHNWRHAFNTAQCMFAALKASKIQNKLTDLEILALLTAALSHDLDHRGVNNSYIQRSEHPLAQLYCHSIMEHHHFDQCLMILNSPGNQILSGLSIEEYKTTLKIIKQAILATDLALYIKRRGEFFELIRKNQFNLEDPHQKELFLAMLMTACDLSAITKPWPIQQRIAELVATEFFDQGDRERKELNIEPTDLMNREKKNKIPSMQVGFIDAICLQLYEALTHVSEDCFPLLDGCRKNRQKWQALAEQQ

SEQ ID NO: 6455 - DNA, 978 bp, Artificial Sequence
  Description of Artificial Sequence: Synthetic Destabilizing Domain (DD)
gaagaaacaagagagctacagtcgttagcggctgctgtggtgccatctgcccagacccttaaaattactgactttagcttcagtgactttgagctgtctgatctggaaacagcactgtgtacaattcggatgtttactgacctcaaccttgtgcagaacttccagatgaaacatgaggttctttgcagatggattttaagtgttaagaagaattatcggaagaatgttgcctatcataattggagacatgcctttaatacagctcagtgcatgtttgctgctctaaaagcaagcaaaattcagaacaagctgactgacctggagatacttgcattgctgactgctgcactaagccacgatttggatcaccgtggtgtgaataactcttacatacagcgaagtgaacatccacttgcccagctttactgccactcaatcatggaacaccatcattttgaccagtgcctgatgattcttaatagtccaggcaatcagattctcagtggcctctccattgaagaatataagaccacgttgaaaataatcaagcaagctattttagctacagacctagcactgtacattaagaggcgaggagaattttttgaacttataagaaaaaatcaattcaatttggaagatcctcatcaaaaggagttgtttttggcaatgctgatgacagcttgtgatctttctgcaattacaaaaccctggcctattcaacaacggatagcagaacttgtagcaactgaattttttgatcaaggagacagagagagaaaagaactcaacatagaacccactgatctaatgaacagggagaagaaaaacaaaatcccaagtatgcaagttgggttcatagatgccatctgcttgcaactgtatgaggccctgacccacgtgtcagaggactgtttccctttgctagatggctgcagaaagaacaggcagaaatggcaggcccttgcagaacagcag

SEQ ID NO: 6456 - protein, 240 aa, Artificial Sequence
  Description of Artificial Sequence: Synthetic Destabilizing Domain (DD)
EETRELQSLAAAVVPSAQTLKITDFSFSDFELSDLETALCTIRMFTDLNLVQNFQMKHEVLCRWILSVKKNYRKNVAYHNWRHAFNTAQCMFAALKAGKIQNKLTDLEILASLIAALSHDLDHRGVNNSYIQRSEHPLAQLYCHSIMEHHHFDQCLMILNSPGNQILSGLSIEEYKTTLKIIKQAILATDLALYIKRRGEFFELIRKNQFNLEDPHQKELFLAMLMTACDLSAITKPWPI

SEQ ID NO: 6457 - DNA, 720 bp, Artificial Sequence
  Description of Artificial Sequence: Synthetic Destabilizing Domain (DD)
gaagaaacaagagagctacagtcgttagcggctgctgtggtgccatctgcccagacccttaaaattactgactttagcttcagtgactttgagctgtctgatctggaaacagcactgtgtacaattcggatgtttactgacctcaaccttgtgcagaacttccagatgaaacatgaggttctttgcagatggattttaagtgttaagaagaattatcggaagaatgttgcctatcataattggagacatgcctttaatacagctcagtgcatgtttgctgctctaaaagcaggcaaaattcagaacaagctgactgacctggagatacttgcatcgctgattgctgcactaagccacgatttggatcaccgtggtgtgaataactcttacatacagcgaagtgaacatccacttgcccagctttactgccattcaatcatggaacaccatcattttgaccagtgcctgatgattcttaatagtccaggcaaccagattctcagtggcctctccattgaagaatataagaccacgttgaaaataatcaagcaagctattttagctacagacctagcactgtacattaagaggcgaggagaattttttgaacttataagaaaaaatcaattcaatttggaagatcctcatcaaaaggagttgtttttggcaatgctgatgacagcttgtgatctttctgcaattacaaaaccctggcctatt

SEQ ID NO: 6458 - protein, 326 aa, Artificial Sequence
  Description of Artificial Sequence: Synthetic Destabilizing Domain (DD)
EETRELQSLAAAVVPSAQTLKITDFSFSDFELSDLETALCTIRMFTDLNLVQNFQMKHEVLCRWILSVKKNYRKNVAYHNWRHAFNTAQCMFAALKAGKIQNKLTDLEILALLIAALSHDLDHRGVNNSYIQRSEHPLAQLYCHSIMEHHHFDQCLMILNSPGNQILSGLSIEEYKTTLKIIKQAILATDLALYIKRRGEFFELIRKNQFNLEDPHQKELFLAMLMTVCDLSAITKPWPIQQRIAELVATEFFDQGDRERKELNIEPTDLMNREKKNKIPSMQVGFIDAICLQLYEALTHVSEDCFPLLDGCRKNRQKWQALAEQQ

SEQ ID NO: 6459 - DNA, 978 bp, Artificial Sequence
  Description of Artificial Sequence: Synthetic Destabilizing Domain (DD)
gaagaaacaagagagctacagtcgttagcggctgctgtggtgccatctgcccagacccttaaaattactgactttagcttcagtgactttgagctgtctgatctggaaacagcactgtgtacaattcggatgtttactgacctcaaccttgtgcagaacttccagatgaaacatgaggttctttgcagatggattttaagtgttaagaagaattatcggaagaatgttgcctatcataattggagacatgcctttaatacagctcagtgcatgtttgctgctctaaaagcaggcaaaattcagaacaagctgactgacctggagatacttgcattgctgattgctgcactaagccacgatttggatcaccgtggtgtgaataactcttacatacagcgaagtgaacatccacttgcccagctttactgccattcaatcatggaacaccatcattttgaccagtgcctgatgattcttaatagtccaggcaatcagattctcagtggcctctccattgaagaatataagaccacgttgaaaataatcaagcaagctattttagctacagacctagcactgtacattaagaggcgaggagaattttttgaacttataagaaaaaatcaattcaatttggaagatcctcatcaaaaggagttgtttttggcaatgctgatgacagtttgtgatctttctgcaattacaaaaccctggcctattcaacaacggatagcagaacttgtagcaactgaattttttgatcaaggagacagagagagaaaagaactcaacatagaacccactgatctaatgaacagggagaagaaaaacaaaatcccaagtatgcaagttgggttcatagatgccatctgcttgcaactgtatgaggccctgacccacgtgtcagaggactgtttccctttgctagatggctgcagaaagaacaggcagaaatggcaggcccttgcagaacagcag

SEQ ID NO: 6460 - protein, 326 aa, Artificial Sequence
  Description of Artificial Sequence: Synthetic Destabilizing Domain (DD)
EETRELQSLAAAVVPSAQTLKITDFSFSDFELSDLETALCTIRMFTDLNLVQNFQMKHEVLCRWILSVKKNYRKNVAYHNWRHAFNTAQCMFAALKAGKIQNKLTNLEILALLIAALSHDLDHRGVNNSYIQRSEHPLAQLYCHSIMEHHHFDQCLMILNSPGNQILSGLSIEEYKTTLKIIKQAILATDLALYIKRRGEFFELIRKNQFNLEDPHQKELFLAMLMTACDLSAITKPWPIQQRIAELVATEFFDQGDRERKELNIEPTDLMNREKKNKIPSMQVGFIDAICLQLYEALTHVSEDCFPLLDGCRKNRQKWQALAEQQ

SEQ ID NO: 6461 - DNA, 978 bp, Artificial Sequence
  Description of Artificial Sequence: Synthetic Destabilizing Domain (DD)
gaagaaacaagagagctacagtcgttagcggctgctgtggtgccatctgcccagacccttaaaattactgactttagcttcagtgactttgagctgtctgatctggaaacagcactgtgtacaattcggatgtttactgacctcaaccttgtgcagaacttccagatgaaacatgaggttctttgcagatggattttaagtgttaagaagaattaccggaagaatgttgcctatcataattggagacatgcctttaatacagctcagtgcatgttcgctgctctaaaagcaggcaaaattcagaacaagctgactaacctggagatacttgcattgctgattgctgcactaagccacgatttggatcaccgtggtgtgaataactcttacatacagcgaagtgaacatccacttgcccagctttactgccattcaatcatggaacaccatcattttgaccagtgcctgatgattcttaatagtccaggcaatcagattctcagtggcctctccattgaagaatataagaccacgttgaaaataatcaagcaagctattttagctacagacctagcactgtacattaagaggcgaggagaattttttgaacttataagaaaaaatcaattcaatttggaagatcctcatcaaaaggagttgtttttggcaatgctgatgacagcttgtgatctttctgcaattacaaaaccctggcctattcaacaacggatagcagaacttgtagcaactgaattttttgatcaaggagacagagagagaaaagaactcaacatagaacccactgatctaatgaacagggagaagaaaaacaaaatcccaagtatgcaagttgggttcatagatgccatctgcttgcaactgtatgaggccctaacccacgtgtcagaggactgtttccctttgctagatggctgcagaaagaacaggcagaaatggcaggcccttgcagaacagcag

SEQ ID NO: 6462 - protein, 326 aa, Artificial Sequence; identical to SEQ ID NO: 332
  Description of Artificial Sequence: Synthetic Destabilizing Domain (DD)

SEQ ID NO: 6463 - DNA, 978 bp, Artificial Sequence
  Description of Artificial Sequence: Synthetic Destabilizing Domain (DD)
gaagaaacaagagagctacagtcgttagcggctgctgtggtgccatctgcccagacccttaaaattactgactttagcttcagtgactttgagctgtctgatctggaaacagcactgtgtacaattcggatgtttactgacctcaaccttgtgcagaacttccagatgaaacatgaggttctttgcagatggattttaagtgttaagaagaattatcggaagaatgttgcctatcataattggagacatgcctttaatacagctcagtgcatgtttgctgctctaaaagcaggcaaaattcagagcaagctgactgacctggagatacttgcattgctgattgctgcactaagccacgatttggatcaccgtggtgtgaataactcttacatacagcgaagtgagcatccacttgcccagctttactgccattcaatcatggaacaccatcattttgaccagtgcctgatgattcttaatagtccaggcaatcagattctcagtggcctctccattgaagaatataagaccacgttgaaaataatcaagcaagctattttagctacagacctagcactgtacattaagaggcgaggagaattttttgaacttataagaaaaaatcaattcaatttggaagatcctcatcaaaaggagttgtttttggcaatgctgatgacagcttgtgatctttctgcaattacaaaaccctggcctattcaacaacggatagcagaacttgtagcaactgaattttttgatcaaggagacagagagagaaaagaactcaacatagaacccactgatctaatgaacagggagaagaaaaacaaaatcccaagtatgcaagttgggttcatagatgccatctgcttgcaactgtatgaggccctgacccacgtgtcagaggactgtttccctttgctagatggctgcagaaagaacaggcagaaatggcaggcccttgcagaacagcag

SEQ ID NO: 6464 - protein, 326 aa, Artificial Sequence
  Description of Artificial Sequence: Synthetic Destabilizing Domain (DD)
EETRELQSLAAAVVPSAQTLKITDFSFSDFELSDLETALCTIRMFTDLNLVQNFQMKHEVLCRWILSVKKNYRKNVAYHNWRHAFNTARCMFAALKAGKIQNKLTDLEILALLIAALSHGLDHRGVNNSYIQRSEHPLAQLYCHSIMEHHHFDQCLMILNSPGNQILSGLSIEEYKTTLKIIKQAILATDLALYIKRRGEFFELIRNNQFNLEDPHQKELFLAMLMTACDLSAITKPWPIQQRIAELVATEFFDQGDRERKELNIEPTDLMNREKKNKIPSMQVGFIDAICLQLYEALTHVSEDCFPLLDGCRKNRQKWQALAEQQ

SEQ ID NO: 6465 - DNA, 978 bp, Artificial Sequence
  Description of Artificial Sequence: Synthetic Destabilizing Domain (DD)
gaagaaacaagagagctacagtcgttagcggctgctgtggtgccatctgcccagacccttaaaattactgactttagcttcagtgactttgagctgtctgatctggaaacagcactgtgtacaattcggatgtttactgacctcaaccttgtgcagaacttccagatgaaacatgaggttctttgcagatggattttaagtgttaagaagaattatcggaagaatgttgcctatcataattggagacatgcctttaatacagctcggtgcatgtttgctgctctaaaagcaggcaaaattcagaacaagctgactgacctggagatacttgcattgctgattgctgcactaagccacggtttggatcaccgtggtgtgaataactcttacatacagcgaagtgaacatccacttgcccagctttactgccattcaatcatggaacaccatcattttgaccagtgcctgatgattcttaatagtccaggcaatcagattctcagtggcctctccattgaagaatataagaccacgttgaaaataatcaagcaagctattttagctacagacctagcactgtacattaagaggcgaggagaattttttgaacttataagaaacaatcaattcaatttggaagatcctcatcaaaaggagttgtttttggcaatgctgatgacagcttgtgatctttctgcaattacaaaaccctggcctattcaacaacggatagcagaacttgtagcaactgaattttttgatcaaggagacagagagagaaaagaactcaacatagaacccactgatctaatgaacagggagaagaaaaacaaaatcccaagtatgcaagttgggttcatagatgccatctgcttgcaactgtatgaggccctgacccacgtgtcagaggactgtttccctttgctagatggctgcagaaagaacaggcagaaatggcaggcccttgcagaacagcag

SEQ ID NO: 6466 - protein, 326 aa, Artificial Sequence
  Description of Artificial Sequence: Synthetic Destabilizing Domain (DD)
EETRELQSLAAAVVPSAQTLKITDFSFSDFELSDLETALCTIRMFTDLNLVQNFQMKHEVLCRWILSVKKNYRKNVAYHNWRHAFNTAQCMFAALKAGKIQNKLTDLEILALLIAALSHDLDHRGVNNSYIQRSEHPLTQLYCHSIMEHHHFDQCLMILNSPGNQILSGLSIEEYKTTLKIIKQAILATDLALYIKRRGEFFELIRKNQFNLEDPHQKELFVAMLMTACDLSAITKPWPIQQRIAELVATEFFDQGDRERKELNIEPTDLMNREKKNKIPSMQVGFIDAICLQLYEALTHVSEDCFPLLDGYRKNRQKWQALAEQQ

SEQ ID NO: 6467 - DNA, 978 bp, Artificial Sequence
  Description of Artificial Sequence: Synthetic Destabilizing Domain (DD)
gaagaaacaagagagctacagtcgttagcggctgctgtggtgccatctgcccagacccttaaaattactgactttagcttcagtgactttgagctgtctgatctggaaacagcactgtgtacaattcggatgtttactgacctcaaccttgtgcagaacttccagatgaaacatgaggttctttgcagatggattttaagtgttaagaagaattatcggaagaatgttgcctatcataattggagacatgcctttaatacagctcagtgcatgtttgctgctctaaaagcaggcaaaattcagaacaagctgactgacctggagatacttgcattgctgattgctgcactaagccacgatttggatcaccgtggtgtgaataactcttacatacagcgaagtgaacatccacttacccagctttactgccattcaatcatggaacaccatcattttgaccagtgcctgatgattcttaatagtccaggcaatcagattctcagtggcctctccattgaagaatataagaccacgttgaaaataatcaagcaagctattttagctacagacctagcactgtacattaagaggcgaggagaattttttgaacttataagaaaaaatcaattcaatttggaagatcctcatcaaaaggagttgtttgtggcaatgctgatgacagcttgtgatctttctgcaattacaaaaccctggcctattcaacaacggatagcagaacttgtagcaactgaattttttgatcaaggagacagagagagaaaagaactcaacatagaacccactgatctaatgaacagggagaagaaaaacaaaatcccaagtatgcaagttgggttcatagatgccatctgcttgcaactgtatgaggccctgacccacgtgtcagaggactgtttccctttgctagatggctacagaaagaacaggcagaaatggcaggcccttgcagaacagcag

SEQ ID NO: 6468 - protein, 326 aa, Artificial Sequence
  Description of Artificial Sequence: Synthetic Destabilizing Domain (DD)
EETRELQSLAAAVVPSAQTLKITDFSFSDFELSDLETALCTIRMFTDLNLVQNFQMKHEVLCRWILSVKKNYRKNVAYHNWRHAFNTAQCMFAALKAGKIQNKLTDLEILALLIAALSHDLDHRGANNSYIQRSEHPLAQLYCHSIMEHHHFDQCLMILNSPGNQILSGLSIEEYKTTLKIIKQAILATDLALYIKRRGEFFELIRKNQFNLEDPHQKELFLAMLMTACDLSAITKPWPIQQRIAEFVATEFFDQGDREGKELNIEPTDLMNREKKNKIPSMQVGFIDAIRLQLYEALTHVSEDCFPLLDGCRKNRQKWQALAGQQ

SEQ ID NO: 6469 - DNA, 978 bp, Artificial Sequence
  Description of Artificial Sequence: Synthetic Destabilizing Domain (DD)
gaagaaacaagagagctacagtcgttagcggctgctgtggtgccatctgcccagacccttaaaatcactgactttagcttcagtgactttgagctgtctgatctggaaacggcactgtgtacaattcggatgtttactgacctcaaccttgtgcagaacttccagatgaaacatgaggttctttgcagatggattttaagtgttaagaagaattatcggaagaatgttgcctatcataattggagacatgcctttaatacagctcagtgcatgtttgctgctctaaaagcaggcaaaattcagaacaagctgactgacctggagatacttgcattgctgattgctgcactaagccacgatttggatcaccgtggtgcgaataactcttacatacagcgaagtgaacatccacttgcccagctttactgccattcaatcatggaacaccatcattttgaccagtgcctgatgattcttaatagtccaggcaatcagattctcagtggcctctccattgaagaatataagaccacgttgaaaataatcaagcaagctattttagctacagacctagcactgtacattaagaggcgaggagaattttttgaacttataagaaaaaatcaattcaatttggaagatcctcatcaaaaggagttgtttttggcaatgctgatgacagcttgtgatctttctgcaattacaaaaccctggcctattcaacaacggatagcagaatttgtagcaactgaattttttgatcaaggagacagagagggaaaagaactcaacatagaacccactgatctaatgaacagggagaagaaaaacaaaatcccaagtatgcaagttgggttcatagatgccatccgcttgcaactgtatgaggccctgacccacgtgtcagaggactgtttccctttgctagatggctgcagaaagaacaggcagaaatggcaggcccttgcaggacagcag

SEQ ID NO: 6470 - protein, 326 aa, Artificial Sequence
  Description of Artificial Sequence: Synthetic Destabilizing Domain (DD)
EETRELQSLAAAVVPSAQTLKITDFSFSDFELSDLETALCTIRMFTDLNLVQNFQMKHEVLCRWILSVKKNYRKNVAYHNWRHAFNTAQCMFAALKAGKIQNKLTDLGILALLIAALSHDLDHRGVNNSYIQRSEHPLAQLYCHSIMEHHHFDQCLMILNSPDNQILSGLSIEEYKTTLKIIKQAILATDLALYIKRRGEFFELIRKNQFNLEDPHQKELFLAMLMTACDLSAITKPWPIQQRIAELVATEFFDQGDRERKELNIEPTDLMNREKKNKTPSMQVGFIDAICLQLYEALTHVSEDCFPLLDGCRKNRQKWQALAEQQ

SEQ ID NO: 6471 - DNA, 978 bp, Artificial Sequence
  Description of Artificial Sequence: Synthetic Destabilizing Domain (DD)
gaagaaacaagagagctacagtcgttagcggctgctgtggtgccatctgcccagacccttaaaattactgactttagcttcagtgactttgagctgtctgatctggaaacagcactgtgtacaattcggatgtttactgacctcaaccttgtgcagaacttccagatgaaacatgaggttctttgcagatggattttaagtgttaagaagaattatcggaagaatgttgcctatcataattggagacatgcctttaatacagctcagtgcatgtttgctgctctaaaagcaggcaaaattcagaacaagctgactgacctggggatacttgcattgctgattgctgcactaagccacgatttggatcaccgtggtgtgaataactcttacatacagcgaagtgaacatccacttgcccagctttactgccattcaatcatggaacaccatcattttgaccagtgcctgatgattcttaatagtccagacaatcagattctcagtggcctctccattgaagaatataagaccacgttgaaaataatcaagcaagctattttagctacagacctagcactgtacattaagaggcgaggagaattttttgaacttataagaaaaaatcaattcaatttggaagatcctcatcaaaaggagttgtttttggcaatgctgatgacagcttgtgatctttctgcaattacaaaaccctggcctattcaacaacggatagcagaacttgtagcaactgaattttttgatcaaggagacagagagagaaaagagctcaacatagaacccactgatctaatgaacagggagaagaaaaacaaaaccccaagtatgcaagttgggttcatagatgccatctgcttgcaactgtatgaggccctgacccacgtgtcagaggactgtttccctttgctagatggctgcagaaagaacaggcagaaatggcaggcccttgcagaacagcag

SEQ ID NO: 6472 - protein, 326 aa, Artificial Sequence
  Description of Artificial Sequence: Synthetic Destabilizing Domain (DD)
EETRELQSLAAAVVPSAQTLKITDFSFSDFELSDLETALCTIRMFTDLNLVQNFQMKHEVLCRWILSVKKNYRKNVAYHNWRHAFNTAQCMFAALKAGKIQNKLTDLEILALLIAALSHDLDHRGVNNSYIQRSEHPLAQLYCHSIMEHHHFDQCLMILNSPGNQILSGLSIEEYKTTLKIIKQAILATDLALYIKRRGEFFELIRKNQFNLEDPHQKELFLATLMTACDLSAITKPWPIQQRIAELVATEFFDQGDRERKELNIEPTDLMNREKKNKIPSMQVGFIDAICLQLYEALTHVSEDCFPLLDGCRKNRQKWQALAEQQ

SEQ ID NO: 6473 - DNA, 978 bp, Artificial Sequence
  Description of Artificial Sequence: Synthetic Destabilizing Domain (DD)
gaagaaacaagagagctacagtcgttagcggctgctgtggtgccatctgcccagacccttaaaattactgactttagcttcagtgactttgagctgtctgatctggaaacagcactgtgtacaattcggatgtttactgacctcaaccttgtgcagaacttccagatgaaacatgaggttctttgcagatggattttaagtgttaagaagaattatcggaagaatgttgcctatcataattggagacatgcctttaatacagctcagtgcatgtttgctgccctaaaagcaggcaaaattcagaacaagctgactgacctggagatacttgcattgctgattgctgcactaagccacgatttggatcaccgtggtgtgaataactcttacatacagcgaagtgaacatccacttgcccagctttactgccattcaatcatggaacaccatcattttgaccagtgcctgatgattcttaatagtccaggcaatcagattctcagtggcctctccattgaagaatataagaccacgttgaaaataatcaagcaagctattttagctacagacctagcactgtacattaagaggcgaggagaattttttgaacttataagaaaaaatcaattcaatttggaagatcctcatcaaaaggagttgtttttggcaacgctgatgacagcttgtgatctttctgcaattacaaaaccctggcctattcaacaacgaatagcagaacttgtagcaactgaattttttgatcaaggagacagagagagaaaagaactcaacatagaacccactgatctaatgaacagggagaagaaaaacaaaatcccaagtatgcaagttgggttcatagatgccatctgcttgcaactgtatgaggccctgacccacgtgtcagaggactgtttccctttgctagatggctgcagaaagaacaggcagaaatggcaggcccttgcagaacagcag

SEQ ID NO: 6474 - protein, 326 aa, Artificial Sequence
  Description of Artificial Sequence: Synthetic Destabilizing Domain (DD)
EETRELQSLAAAVVPSAQTLKITDFSFSDFELSDLETALCTIRMFTDLNLVQNFQMKHEVLCRWILSVKKNYRKNVAYHNWRHAFNTAQCMFAALKAGKIQNKLTDLEILALLIAALSHDLDHRGVNNSYIQRSEHPLAQLYCHSIMEHHHFDQCLMILNSPGNQILSGLSIEEYKTTLKIIKQAILATDLALYIKRRGEFFELIRKNQFNLEDPHQEELFLAMLMTACDLSAITKPWPIQQRIAELVATEFFDQGDRERKELNIEPTDLMNREKKNKIPSMQVGFIDAICLQLYEALTHVSEDCFPLLDGCRKNRQKWQALAEQQ

SEQ ID NO: 6475 - DNA, 978 bp, Artificial Sequence
  Description of Artificial Sequence: Synthetic Destabilizing Domain (DD)
gaagaaacaagagagctacagtcgttagcggctgctgtggtgccatctgcccagacccttaaaattactgactttagcttcagtgactttgagctgtctgatctggaaacagcactgtgtacaattcggatgtttactgacctcaaccttgtgcagaacttccagatgaaacatgaggttctttgcagatggattttaagtgttaagaagaattatcggaagaatgttgcctatcataattggagacatgcctttaatacagctcagtgcatgtttgctgctctaaaagcaggcaaaattcagaacaagctgactgacctggagatacttgcattgctgattgctgcactaagccacgatttggatcaccgtggtgtgaataactcttacatacagcgaagtgaacatccacttgcccagctttactgccattcaatcatggaacaccatcattttgaccagtgcctgatgattcttaatagtccaggcaatcagattctcagtggcctctccattgaagaatataagaccacgttgaaaataatcaagcaagctattttagctacagacctagcactgtacattaagaggcgaggagaattttttgaacttataagaaaaaatcaattcaatttggaagatcctcatcaagaggagttgtttttggcaatgctgatgacagcttgtgatctttctgcaattacaaaaccctggcctattcaacaacggatagcagaacttgtagcaactgaattttttgatcaaggagacagagagagaaaagaactcaacatagaacccactgatctaatgaacagggagaagaaaaacaaaatcccgagtatgcaagttgggttcatagatgccatctgcttgcaactgtatgaggccctgacccacgtgtcagaggactgtttccctttgctagatggctgcagaaagaacaggcagaaatggcaggcccttgcagaacagcag

SEQ ID NO: 6476 - protein, 326 aa, Artificial Sequence
  Description of Artificial Sequence: Synthetic Destabilizing Domain (DD)
EETRELQSLAAAVVPSAQTLKITDFSFSDFELSDLETALCTIRMFTDLNLVQNFQMKHEVLCRWILSVKKNYRKNVAYHNWRHAFNTAQCMFAALKAGKIQNKLTDLEILALLIAALSHDLDHRGVNNSYIQRSEHPLAQLYYHSIMEHHRFDQCLMILNSPGNQILSGLSIEEYKTTLKIIKQAILVTDLALYIKRRGEFFELIRKNQFNLEDPHQKELFLAMLMTACDLSAITKPWPIQQRIAELVATEFFDQGDRERKELNIEPTDLMNREKKNKIPSMQVGFIDAICLQLYEALTHVSEDCFPLLDGCRKNRQKWQALAEQQ

SEQ ID NO: 6477 - DNA, 978 bp, Artificial Sequence
  Description of Artificial Sequence: Synthetic Destabilizing Domain (DD)
gaagaaacaagagagctacagtcgttagcggctgctgtggtgccatctgcccagacccttaaaattactgactttagcttcagtgactttgagctgtctgatctggaaacagcattgtgtacaattcggatgtttactgacctcaaccttgtgcagaacttccagatgaaacatgaggttctttgcagatggattttaagtgttaagaagaattatcggaagaatgttgcctatcataattggagacatgcctttaatacagctcagtgcatgtttgctgctctaaaagcaggcaaaattcagaacaagctgactgacctggagatacttgcattgttgattgctgcactaagccacgatttggatcaccgtggtgtgaataactcttacatacagcgaagtgaacatccacttgcccagctttactaccattcaatcatggaacaccatcgttttgaccagtgcctgatgattcttaatagtccaggcaatcagattctcagtggcctctccattgaagaatataagaccacgttgaaaataatcaagcaagctattttagttacagacctagcactgtacattaagaggcgaggagaattttttgaacttataagaaaaaatcaattcaatttggaagatcctcatcaaaaggagttgtttttggcaatgctgatgacagcttgtgatctttctgcaattacaaaaccctggcctattcaacaacggatagcagaacttgtagcaactgaattttttgatcaaggagacagagagagaaaagaactcaacatagaacccactgatctaatgaacagggagaagaaaaacaaaatcccaagtatgcaagttgggttcatagatgccatctgcttgcaactgtatgaggccctgacccacgtgtcagaggactgtttccctttgctagatggctgcagaaagaacaggcagaaatggcaggcccttgcagaacagcag

SEQ ID NO: 6478 - protein, 326 aa, Artificial Sequence
  Description of Artificial Sequence: Synthetic Destabilizing Domain (DD)
EETRELQSLAAAVVPSAQTLKITDFSFSDFELSDLETALCTIRMFTDLNLVQNFQMKHEVLCRWILSVKKNYRKNVAYHNWRHAFNTAQCMFAALKAGKIQNKLSDLEILALLIAALSHDLDHRGVNNSYIQRSEHPLAQLYCHSIMEHHHFDQCLMILNSPGNQILSGLSIEEYKTTLKIIKQAILATDLALYIKRRGEFFELIRKNQFNLEDPHQKELFLAMLMTACDLSAITKPWPIQQRIAELVATEFFDQGDRERKELNIEPTDLMNREKKNKIPSRQVGFIDAICLQLYEALTHVSEDCFPLLDGCRKNRQKWQALAEQQ

SEQ ID NO: 6479 - DNA, 978 bp, Artificial Sequence
  Description of Artificial Sequence: Synthetic Destabilizing Domain (DD)
gaagaaacaagagagctacagtcgttagcggctgctgtggtgccatctgcccagacccttaaaattactgactttagcttcagtgactttgagctgtctgatctggaaacagcactgtgtacaattcggatgtttactgacctcaaccttgtgcagaacttccagatgaaacatgaggttctttgcagatggattttaagtgttaagaagaattatcggaagaatgttgcctatcataattggagacatgcctttaatacagctcagtgcatgtttgctgctctaaaagcaggcaaaattcagaacaagctgtctgacctggagatacttgcattgctgattgctgcactaagccacgatttggatcaccgtggtgtgaataactcttacatacagcgaagtgaacatccacttgcccagctttactgccattcaatcatggaacaccatcattttgaccagtgcctgatgatccttaatagtccaggcaatcagattctcagtggcctctccattgaagaatataagaccacgttgaaaataatcaagcaagctattttagctacagacctagcgctgtacattaagaggcgaggagaattttttgaacttataagaaaaaatcaattcaatttggaagatcctcatcagaaggagttgtttttggcaatgctgatgacagcttgtgatctttctgcaattacaaaaccctggcctattcaacaacggatagcagaacttgtagcaactgaattttttgatcaaggagacagagagagaaaagaactcaacatagaacccactgatctaatgaacagggagaagaaaaacaaaatcccaagtaggcaagttgggttcatagatgccatctgcttgcaactgtatgaggccctgacccacgtgtcagaggactgtttccctttgctagatggctgcagaaagaacaggcagaaatggcaggcccttgcagaacagcag

SEQ ID NO: 6480 - protein, 326 aa, Artificial Sequence
  Description of Artificial Sequence: Synthetic Destabilizing Domain (DD)
EEARELQSLAAAVVPSAQTLKITGFSFSDFELSDLETALCTIRMFTDLNLVQNFQMKHEVLCRWILSVKKNYRKNVAYHNWRHAFNTAQCMFAALKAGKIQNKLTDLEILALLIAALSHDLDHRGVNNSYIQRSEHPLAQLYCHSIMEHHHFDQCLMILNSPGNQILSGLSTEEYKTTLKIIKQAILATDLALYIKRRGEFFELIRKNQLNLEDPHQKELFLAMLMTACNLSAITKPWPIQQRIAELVATEFFDQGDRERKELNIEPTDLMNREKKNKIPSMQVGFIDAICLQLYEALTHVSEDCFPLLDGCRKNRQKWQALAEQQ

SEQ ID NO: 6481 - DNA, 978 bp, Artificial Sequence
  Description of Artificial Sequence: Synthetic Destabilizing Domain (DD)
gaagaagcaagagagctacagtcgttagcggctgctgtggtgccatctgcccagacccttaaaattactggctttagcttcagtgactttgagctgtctgatctggaaacagcactgtgtacaattcggatgtttactgacctcaaccttgtgcagaacttccagatgaaacatgaggttctttgcagatggattttaagtgttaagaagaattatcggaagaatgttgcctatcataattggagacatgcctttaatacagctcagtgcatgtttgctgctctaaaagcaggcaaaattcagaacaagctgactgacctggagatacttgcattgctgattgctgcactaagccacgatttggatcaccgtggtgtgaataactcttacatacagcgaagtgaacatccacttgcccagctttactgccattcaatcatggaacaccatcattttgaccagtgcctgatgattcttaatagtccaggcaatcagattctcagtggcctctccactgaagaatataagaccacgttgaaaataatcaagcaagctattttagctacagacctagcactgtacattaagaggcgaggagaattttttgaacttataagaaaaaatcaactcaatttggaagatcctcatcaaaaggagttgtttttggcaatgctgatgacagcttgcaatctttctgcaattacaaaaccctggcctattcaacaacggatagcagaacttgtagcaactgaattttttgatcaaggagacagagagagaaaagaactcaacatagaacccactgatctaatgaacagggagaagaaaaacaaaatcccaagtatgcaagttgggttcatagatgccatctgcttgcagctgtatgaggccctgacccacgtgtcagaggactgtttccctttgctagatggctgcagaaagaacaggcagaaatggcaggcccttgcagaacagcag

SEQ ID NO: 6482 - protein, 326 aa, Artificial Sequence
  Description of Artificial Sequence: Synthetic Destabilizing Domain (DD)
EETRELQSLAAAVVPSAQTLKITDFSFSDFELSDLETALCTIRMFTDLNLVRNFQMKHEVLCRWILSVKKNYRKNVAYHNWRHAFNTAQCMFAALKAGKIQNKLTDLEILALLIAALSHDLDHRGVNNSYIQRSEHPLAQLYCHSIMEHHHFDQCLMILNSPGNQILSGLSIEEYKTTLKIIKQAILATGLALYIKRRGEFFELIRKNQFNLEDPHQKELFLAMLMTACDLSAITKPWPIQQRIAELVATEFFDQGDRERKELNIEPTDLMNREKKNKIPSMQVGFIDAICLQLYEALTHVSEDCFPLLDGCRKNRQKWQALAEQQ

SEQ ID NO: 6483 - DNA, 978 bp, Artificial Sequence
  Description of Artificial Sequence: Synthetic Destabilizing Domain (DD)
gaagaaacaagagagctacagtcgttagcggctgctgtggtgccatctgcccagacccttaaaattactgactttagcttcagtgactttgagctgtctgatctggaaacagcactgtgtacaattcggatgtttactgacctcaaccttgtgcggaacttccagatgaaacatgaggttctttgcagatggattttaagtgttaagaagaattatcggaagaatgttgcctatcataattggagacatgcctttaatacagctcagtgcatgtttgctgctctaaaagcaggcaaaattcagaacaagctgactgacctggagatacttgcattgctgattgctgcactaagccacgatttggatcaccgtggtgtgaataactcttacatacagcgaagtgaacatccacttgcccagctttactgccattcaatcatggaacaccatcattttgaccagtgcctgatgattcttaatagtccaggcaatcagattctcagtggcctctccattgaagaatataagaccacgttgaaaataatcaagcaagctattttagctacaggcctagcactgtacattaagaggcgaggagaattttttgaacttataagaaaaaatcaattcaatttggaagatcctcatcaaaaggagttgtttttggcaatgctgatgacagcttgtgatctttctgcaattacaaaaccctggcctattcaacaacggatagcagaacttgtagcaactgaattttttgatcaaggagacagagagagaaaagaactcaacatagaacccactgatctaatgaacagggagaagaaaaacaaaatcccaagtatgcaagttgggttcatagatgccatctgcttgcaactgtatgaggccctgacccacgtgtcagaggactgtttccctttgctggatggctgcagaaagaacaggcagaaatggcaggcccttgcagaacagcag

SEQ ID NO: 6484 - protein, 326 aa, Artificial Sequence
  Description of Artificial Sequence: Synthetic Destabilizing Domain (DD)
EETRELQSLAAAVVPSAQTLKITDFSFSDFELSDLETALCTIRMFTDLNLVQNFQMKHEVLCRWILSVKKNYRKNVAYHNWRHAFNTAQCMFAALKAGKIQNKLTDLEILALLIAALSHDLDHRGVNNSYIQRSEHPLAQLYCHSIMEHHHSDQCLMILNSPGNQILSGLSIEEYKTTLKIIKQAILATDLALYIKRRGEFFELIRKNQFNLEDPHQKELFLAMLMTACDLSAITKPWPIQQRIAELVATEFFDQGDRERKELNIEPTDLMNREKKNKIPSMQVGFIDAICLQLYEALTHVSEDCFPLLDGCRKNRQKWQALAEQQ

SEQ ID NO: 6485 - DNA, 978 bp, Artificial Sequence
  Description of Artificial Sequence: Synthetic Destabilizing Domain (DD)
gaagaaacaagagagctacagtcgttagcggctgctgtggtgccatctgcccagacccttaaaattactgactttagcttcagtgactttgagctgtctgatctggaaacagcactgtgtacaattcggatgtttactgacctcaaccttgtgcagaacttccagatgaaacatgaggttctttgcagatggattttaagtgttaagaagaattatcggaagaatgttgcctatcataattggagacatgcctttaatacagctcagtgcatgtttgctgctctaaaagcaggcaaaattcagaacaagctgactgacctggagatacttgcattgctgattgctgcactaagccacgatttggatcaccgtggtgtgaataactcttacatacagcgaagtgaacatccacttgcccagctttactgccattcaatcatggaacaccatcattctgaccagtgcctgatgattcttaatagtccaggcaatcagattctcagtggcctctccattgaagaatataagaccacgttgaaaataatcaagcaagctattttagctacagacctagcactgtacattaagaggcgaggagaattttttgaacttataagaaaaaatcaattcaatttggaagatcctcatcaaaaggagttgtttttggcaatgctgatgacagcttgtgatctttctgcaattacaaaaccctggcctattcaacaacggatagcagaacttgtagcaactgaattttttgatcaaggagacagagagagaaaagaactcaacatagaacccactgatctaatgaacagggagaagaaaaacaaaatcccaagtatgcaagttgggttcatagatgccatctgcttgcaactgtatgaggccctgacccacgtgtcagaggactgtttccctttgctagatggctgcagaaagaacaggcagaaatggcaggcccttgcagaacagcag

SEQ ID NO: 6486 - protein, 326 aa, Artificial Sequence
  Description of Artificial Sequence: Synthetic Destabilizing Domain (DD)
EETRGLQSLAAAVVPSAQTLKITDFSFSDFELSDLETALCTIRMFTDLNLVQNFQMKHEVLCRWILSVKKNYRKNVAYHNWRHAFNTAQCMFAALKAGKIQNKLTDLEILALLIAALSHDLDHRGVNNSYIQRSEHPLAQLYCHSIMEHHHFDQCLMILNSPGNQILSGLSIEEYKTTLKIIKQAILATDLALYIKRRGEFFEIIRKNQFNLEDPHQKELFLAMLMTACDLSAITKPWPIQQRIAELVATEFFDQGDRERKELNIEPTDLMNREKKNKIPSMQVGFIDAICLQLYEALTHVSEDCFPLLDGCRKNRQKWQALAEQQ

SEQ ID NO: 6487 - DNA, 978 bp, Artificial Sequence
  Description of Artificial Sequence: Synthetic Destabilizing Domain (DD)
gaagaaacaagagggctacagtcgttagcggctgctgtggtgccatctgcccagacccttaaaattactgactttagcttcagtgactttgagctgtctgatctggaaacagcactgtgtacaattcggatgtttactgacctcaaccttgtgcagaacttccagatgaaacatgaggttctttgcagatggattttaagtgttaagaagaattatcggaagaatgttgcctatcataattggagacatgcctttaatacagctcagtgcatgtttgctgctctaaaagcaggcaaaattcagaacaagctgactgacctggagatacttgcattgctgattgctgcactaagccacgatttggatcaccgtggtgtgaataactcttacatacagcgaagtgaacatccacttgcccagctttactgccattcaatcatggaacaccatcattttgaccagtgcctgatgattcttaatagtccaggcaatcagattctcagtggcctctccattgaagaatataagaccacgttgaaaataatcaagcaagctattttagctacagacctagcactgtacattaagaggcgaggagaattttttgaaattataagaaaaaatcaattcaatttggaagatcctcatcaaaaggagttgtttttggcaatgctgatgacagcttgtgatctttctgcaattacaaaaccctggcctattcaacaacggatagcagaacttgtagcaaccgaattttttgatcaaggagacagagagagaaaagaactcaacatagaacccactgatctaatgaacagggagaagaaaaacaaaatcccaagtatgcaagttgggttcatagatgccatctgcttgcaactgtatgaggccctgacccacgtgtcagaggactgtttccctttgctagatggctgcaggaagaacaggcagaaatggcaggcccttgcagaacagcag

SEQ ID NO: 6488 - protein, 326 aa, Artificial Sequence
  Description of Artificial Sequence: Synthetic Destabilizing Domain (DD)
EETRELQSLAAAVVPSAQTLKITDFSFSDFELSDLETALCTIRMFTDLNLVQNFQMKHEVLCRWILSVKKNYRKNVAYHNWRHAFNTAQCMFAALKAGKIRNKLTDLEILALLIAALSHDLDHRGVNNSYIQRSEHPLAQLYCHSIMEHHHFDQCLMILNSPGNQILSGLSIEEYKTTLKIIKQAILATDLALYIKRRGEFFELIRKNQFNLEDPHQKKLFLAMLMTACDLSAITKPWPIQQRIAELVATEFFDQGDRERKELNIEPTDLMNREKKNKTPSMQVGFIDAICLQLYEALTHVSEDCFPLLDGCRKNRQKWQALAEQQ

SEQ ID NO: 6489 - DNA, 978 bp, Artificial Sequence
  Description of Artificial Sequence: Synthetic Destabilizing Domain (DD)
gaagaaacaagagagctacagtcgttagcggctgctgtggtgccatctgcccagacccttaaaattactgactttagcttcagtgactttgagctgtctgatctggaaacagcactgtgtacaattcggatgtttactgacctcaaccttgtgcagaacttccagatgaaacatgaggttctttgcagatggattttaagtgttaagaagaattatcggaagaatgttgcctatcataattggagacatgcctttaatacagctcagtgcatgtttgctgctctaaaagcaggcaaaattcggaacaagctgactgacctggagatacttgcattgctgattgctgcactaagccacgatttggatcaccgtggtgtgaataactcttacatacagcgaagtgaacatccacttgcccagctttactgccattcaatcatggaacaccatcattttgaccagtgcctgatgattcttaatagtccaggcaatcagattctcagtggcctctccattgaagaatataagaccacgttgaaaataatcaagcaagctattttagctacagacctagcactgtacattaagaggcgaggagaattttttgaacttataagaaaaaatcaattcaatttggaagatcctcatcaaaagaagttgtttttggcaatgctgatgacagcttgtgatctttctgcaattacaaaaccctggcctattcaacaacggatagcagaacttgtagcaactgaattttttgatcaaggagacagagagagaaaagaactcaacatagaacccactgatctaatgaacagggagaagaaaaacaaaaccccaagtatgcaagttgggttcatagatgccatctgcttgcaactgtatgaggccctgacccacgtgtcagaggactgtttccctttgctagatggctgcagaaagaacaggcagaaatggcaggcccttgcagaacagcag

SEQ ID NO: 6490 - protein, 326 aa, Artificial Sequence
  Description of Artificial Sequence: Synthetic Destabilizing Domain (DD)
EETRELQSLAAAVVPSAQTLKITDFSFSDFELSDLETALCTIRMFTDLNLVQNFQMKHEVLCRWILSVKKNYRKNVAYHNWRHAFNTAQCMFAALKAGKIQNKLTDLEILALLIAALSHDLDHRGVNNSYIQRSEHPPAQLYCHSIMEHHHFDQCLMILNSPGNQILSGLSIEEYKTTLKIIKQAILATDLALYIKRRGEFFELIRKNQFNLEDPHQKELFLAMLMTACDLSAITKPWPIQQRIAELVATEFFDQGDRERKELNIEPTDLMNREKKNKIPSMQVGFIDAICLQLYEALTHVLEDCFPLLDGCRKNRQKWQALAEQQ

SEQ ID NO: 6491 - DNA, 978 bp, Artificial Sequence
  Description of Artificial Sequence: Synthetic Destabilizing Domain (DD)
gaagaaacaagagagctacagtcgttagcggctgccgtggtgccatctgcccagacccttaaaattactgactttagcttcagtgactttgagctgtctgatctggaaacagcactgtgtacaattcggatgtttactgacctcaaccttgtgcagaacttccagatgaaacatgaggttctttgcagatggattttaagtgttaagaagaattatcggaagaatgttgcctatcataattggagacatgcctttaatacagctcagtgcatgtttgctgctctaaaagcaggcaaaattcagaacaagctaactgacctggagatacttgcattgctgattgctgcactaagccacgatttggatcaccgtggtgtgaataactcttacatacagcgaagtgaacatccacctgcccagctttactgccattcaatcatggaacaccatcattttgaccagtgcctgatgattcttaatagtccaggcaatcagattctcagtggcctctccattgaagaatataagaccacgttgaaaataatcaagcaagctattttagctacagacctagcactgtacattaagaggcgaggagaattttttgaacttataagaaaaaatcaattcaatttggaagatcctcatcaaaaggagttgtttttggcaatgctgatgacagcttgtgatctttctgcaattacaaaaccctggcctattcaacaacggatagcagaacttgtagcaactgaattttttgatcaaggagacagagagagaaaagaactcaacatagaacccactgatctaatgaacagggagaagaaaaacaaaatcccaagtatgcaagttgggttcatagatgccatctgcttgcaactgtatgaggccctgacccacgtgttagaggactgtttccctttgctagatggctgcagaaagaacaggcagaaatggcaggcccttgcagaacagcag

SEQ ID NO: 6492 - protein, 326 aa, Artificial Sequence
  Description of Artificial Sequence: Synthetic Destabilizing Domain (DD)
EETRELQSLAAAVVPSAQTLKITDFSFSDFELSDLETALCTIRMFTDLNLVQNFQMKHEVLCRWILSVKKNYRKNVAYHNWRHAFNTAQCMFAALKAGKIQNKLTDLEILALLIAALSHDLDHRGVNNSYIQRSEHPLAQLYCHSIMEHHHFDQCLTILNSPGNQILSGLSIEEYKTTLKIIKQAILATDLALYIKRRGEFFELIRKNQFNLEDPHQKELFLAMLMTACNLSAITKPWPIQQRIAELVATEFFDQGDRERKELNIEPTDLMNREKKNKIPSMQVGFIDAICLQLYEALTHVSEDCFPLLDGCRKNRQKWQALAEQQ

SEQ ID NO: 6493 - DNA, 978 bp, Artificial Sequence
  Description of Artificial Sequence: Synthetic Destabilizing Domain (DD)
gaagaaacaagagagctacagtcgttagcggctgctgtggtgccatctgcccagacccttaaaattactgactttagcttcagtgactttgagctgtctgatctggaaacagcactgtgtacaattcggatgtttactgacctcaaccttgtgcagaacttccagatgaaacatgaggttctttgcagatggattttaagtgttaagaagaattatcggaagaatgttgcctatcataattggagacatgcctttaatacagctcagtgcatgtttgctgctctaaaagcaggcaaaattcagaacaagctgactgacctggagatacttgcattgctgattgctgcactaagccacgatttggatcaccgtggtgtgaataactcttacatacagcgaagtgaacatccacttgcccagctttactgccattcaatcatggaacaccatcattttgaccagtgcctgacgattcttaatagtccaggcaatcagattctcagtggcctctccattgaagaatataagaccacgttgaaaataatcaagcaagctattttagctacagacctagcactgtacattaagaggcgaggagagttttttgaacttataagaaaaaatcaattcaatttggaagatcctcatcaaaaggagttgtttttggcaatgctgatgacagcttgtaatctttctgcaattacaaaaccctggcctattcaacaacggatagcagaacttgtagcaactgaattttttgatcaaggagacagagagagaaaagaactcaacatagaacccactgatctaatgaacagggagaagaaaaacaaaatcccaagtatgcaagttgggttcatagatgccatctgcttgcaactgtatgaggccctgacccacgtgtcagaggactgtttccctttgctagatggctgcagaaagaacaggcagaaatggcaggcccttgcagaacagcag

SEQ ID NO: 6494 - protein, 326 aa, Artificial Sequence
  Description of Artificial Sequence: Synthetic Destabilizing Domain (DD)
EETRELQSLAAAVVPSAQTLKITDFSFSDFELSDLETALCTIRMFTDLNLVQNFQMKHEVLCRWILSVKKNYRKNVAYHNWRHAFNTAQCMFAALKAGKIQNKLTDLEILALLIAALSHDLDHRGVNNSYIQRSEHPLAQLYCHSIMEHHHFDQCLMILNSPGNQILSGLSIEEYKTTLKIIKQAILATDLALYIKRRGEFFELIRKNQFNLEDPHQKELFLAMLMTACDLSAITKPWPIQQRIAELVATEFFDQGDRERKELNIEPTDLMNGEKKNKIPSMQVGFIDAICLQLYEALTHVSEDCFPLLDGCRKNRQKWQALAEQQ

SEQ ID NO: 6495 - DNA, 978 bp, Artificial Sequence
  Description of Artificial Sequence: Synthetic Destabilizing Domain (DD)
gaagaaacaagagagctacagtcgttagcggctgctgtggtgccatctgcccagacccttaaaattactgactttagcttcagtgactttgagctgtctgatctggaaacagcactgtgtacaattcggatgtttactgacctcaaccttgtgcagaacttccagatgaaacatgaggttctttgcagatggattttaagtgttaagaagaattatcggaagaatgttgcctatcataattggagacatgcctttaatacagctcagtgcatgtttgctgctctaaaagcaggcaaaattcagaacaagctgactgacctggagatacttgcattgctgatcgctgcactaagccacgatttggatcaccgtggtgtgaataactcttacatacagcgaagtgaacatccacttgcccagctttactgccattcaatcatggaacaccatcattttgaccagtgcctgatgattcttaatagtccaggcaatcagattctcagtggcctctccattgaagaatataagaccacgttgaaaataatcaagcaagctattttagctacagacctagcactgtacattaagaggcgaggagaattttttgaacttataagaaaaaatcaattcaatttggaagatcctcatcaaaaggagttgtttttggcaatgctgatgacagcttgtgatctttctgccattacaaaaccctggcctattcaacaacggatagcagaacttgtagcaactgaattttttgatcaaggagacagagagagaaaagaactcaacatagaacccactgatctaatgaacggggagaagaaaaacaagatcccaagtatgcaagttgggttcatagatgccatctgcttgcaactgtatgaggccctgacccacgtgtcagaggactgtttcccattgctagatggctgcagaaagaacaggcagaaatggcaggcccttgcagaacagcag

SEQ ID NO: 6496 - protein, 326 aa, Artificial Sequence
  Description of Artificial Sequence: Synthetic Destabilizing Domain (DD)
EETRELQSLAAAVVPSAQTLKITDFSFSDFELSDLETALCTIQMFTDLNLVQNFQMKHEVLRRWILSVKKNYRKNVAYHNWRHAFNTAQCMFAALKAGKIQNKLTDLEILALLIAALSHDLDHRGANNSYIQRSEHPLAQLYCHSIMEHHHFDQCLMILNSPGNQILSGLSIEEYKTTLKVIKQAILATDLALYIKRRGEFFELIRKNQFNLEDPHQKELFLAMLMTACDLSAITKPWPIQQRIAELVATKFFDQGDRERKELNIEPTDLMNREKKNKIPSMQVGFIDAICLQLYEALTHVSEDCFPLLDGCRKNRQKWQAPAEQQ

SEQ ID NO: 6497 - DNA, 978 bp, Artificial Sequence
  Description of Artificial Sequence: Synthetic Destabilizing Domain (DD)
gaagaaacaagagagctacagtcgttggcggctgctgtggtgccatctgcccagacccttaaaattactgactttagcttcagtgactttgagttgtctgatctggaaacagcactgtgtacaattcagatgtttactgacctcaaccttgtgcagaacttccagatgaaacatgaggttcttcgcagatggattttaagtgttaagaagaattatcggaagaatgttgcctatcataattggagacatgcctttaatacagctcagtgcatgtttgctgctctaaaagcaggcaaaattcagaacaagctgactgacctggagatacttgcattgctgattgctgcactaagccacgatttggatcaccgtggtgcgaataactcttacatacagcgaagtgaacatccacttgcccagctttactgccattcaatcatggaacaccatcattttgaccagtgcctgatgattcttaatagtccaggcaatcagattctcagtggcctctccattgaagaatataagaccacgttgaaagtaatcaagcaagctattttagctacagacctagcactgtacattaagaggcgaggagaattttttgaacttataagaaaaaatcaattcaatttggaagatcctcatcaaaaggagttgtttttggcaatgctgatgacagcttgtgatctttctgcaattacaaaaccctggcctattcaacaacggatagcagaacttgtagcaactaaattttttgatcaaggagacagagagagaaaagaactcaacatagaacccactgatctaatgaacagggagaagaaaaacaaaatcccaagtatgcaagttgggttcatagatgccatctgcttgcaactgtatgaggccctgacccacgtgtcagaggactgtttccctttgctagatggctgcagaaagaacaggcagaaatggcaggcccctgcagaacagcag

SEQ ID NO: 6498 - protein, 326 aa, Artificial Sequence
  Description of Artificial Sequence: Synthetic Destabilizing Domain (DD)
EETRELQSLAAAVVPSAQTLKITDFSFSDFELSDLETALCTIRMFTDLNLVQNFQMKHEVLCRWILSVKKNYRKNVAYHNWRHAFNTAQCMFAALKAGKIQNKLTDLEILALLIAALSHDLDHRGVNNSYIQRSEHPLAQLYCHSIMEHHHFDQCLMILNSPGNQILSGLSIEEYKTTLKIIKQAVLATDLALYIKRRGEFFELIRKNQFNLEDPHQKELFLAMLMTACDLSAITKPWPIQQRIAELVATEFFDQGDRERKELNIEPTDLMNREKKNKIPSMQVGSIDAICLQLYEALTHVSEDCFPLLDGCRKNRQKWQALAEQQ

SEQ ID NO: 6499 - DNA, 978 bp, Artificial Sequence
  Description of Artificial Sequence: Synthetic Destabilizing Domain (DD)
gaagaaacaagagagctacagtcgttagcggctgctgtggtgccatctgcccagacccttaaaattactgactttagcttcagtgactttgagctgtctgatctggaaacagcactgtgtacaattcggatgtttactgacctcaaccttgtgcagaacttccagatgaaacatgaggttctttgcagatggattttaagtgttaagaagaattatcggaagaatgttgcctatcataattggagacatgcctttaatacagctcagtgcatgtttgctgctctaaaagcaggcaaaattcagaacaagctgactgacctggagatacttgcattgctgattgctgcactaagccacgacttggatcaccgtggtgtgaataactcttacatacagcgaagtgaacatccacttgcccagctttactgccattcaatcatggaacaccatcattttgaccagtgcctgatgattcttaatagtccaggcaatcagattctcagtggcctctccattgaagaatataagaccacgttgaaaataatcaagcaagctgttttagctacagacctagcactgtacattaagaggcgaggagaattttttgaacttataagaaaaaatcaattcaatttggaagatcctcatcaaaaggagttgtttttggcaatgctgatgacagcttgtgatctttctgcaattacaaaaccctggcctattcaacaacggatagcagaacttgtagcaactgaattttttgatcaaggagacagagagagaaaagaactcaacatagaacccactgatctaatgaacagggagaagaaaaacaaaatcccaagtatgcaagttgggtccatagatgccatctgcttgcaactgtatgaggccctgacccacgtgtcagaggactgtttccctttgctagatggctgcagaaagaacaggcagaaatggcaggcccttgcagaacagcag

SEQ ID NO: 6500 - protein, 326 aa, Artificial Sequence
  Description of Artificial Sequence: Synthetic Destabilizing Domain (DD)
EETRELQSLAAAVVPSAQTLKITDFSFSDFELSDLETALCTIRMFTDLNLVQNFQMKHEVLCRWILSVKKNYRKNVAYHNWRHAFNTAQCMFAALKAGKIQNKLTDLEILALLIAALSHDLDHRGVNNSYIQRSEHPLAQLYCHSIMEHHHFDQCLMILNGPGNQILSGLSIKEYKTTLKIIKQAILATDLALYIKRRGEFFELMRKNQFNLEDPHQKELFLAMLMTARDLSAITKPWPIQQRIAELVATEFFDQGDRERKELNIEPTDLMNREKKNKIPSMQVGFIDAICLQLYEALTHVSEDCFPLLDGCRKNRQKWQALAEQQ

SEQ ID NO: 6501 - DNA, 978 bp, Artificial Sequence
  Description of Artificial Sequence: Synthetic Destabilizing Domain (DD)
gaagaaacaagagagctacagtcgttagcggctgctgtggtgccatctgcccagacccttaaaattactgactttagcttcagtgactttgagctgtctgatctggaaacagcactgtgtacaattcggatgtttactgacctcaaccttgtgcagaacttccagatgaaacatgaggttctttgcagatggattttaagtgttaagaagaattatcggaagaatgttgcctatcataactggagacatgcctttaatacagctcagtgcatgtttgctgctctaaaagcaggcaaaattcagaacaagctgactgacctggagatacttgcattgctgattgctgcactaagccacgatttggatcaccgtggtgtgaataactcttacatacagcgaagtgaacatccacttgcccagctttactgccattcaatcatggaacaccatcattttgaccagtgcctgatgattcttaatggtccaggcaatcagattctcagtggcctctccattaaagaatataagaccacgttgaaaataatcaagcaagctattttagctacagacctagcactgtacattaagaggcgaggagaattttttgaacttatgagaaaaaatcaattcaatttggaagatcctcatcaaaaggagttgtttttggcaatgctgatgacagctcgtgatctttctgcaattacaaaaccctggcctattcaacaacggatagcagaacttgtagcaactgaattttttgatcaaggagacagagagagaaaagaactcaacatagaacccactgatctaatgaacagggagaagaaaaacaaaatcccaagtatgcaagttgggttcatagatgccatctgcttgcaactgtatgaggccctgacccacgtgtcagaggactgtttccctttgctagatggctgcagaaagaacaggcagaaatggcaggcccttgcagaacagcag

SEQ ID NO: 6502 - protein, 326 aa, Artificial Sequence
  Description of Artificial Sequence: Synthetic Destabilizing Domain (DD)
EETRELQSLAAAVVPSAQTLKITDFSFSDFELSDLETALCTIRMFTDLNLVQNFQMKHEVLCRWILSVKKNYRKNVAYHNWRHAFNTAQCMFAALKAGKIQNKLTDLEILALLIAALSHDLDHRGVNNSYIQRSEHPLAQLYCHSIMEHHHFDQCLMILNSPGNQILSGLSIEEHKTTLKIIKQAILATDLALYIKRRGEFFELIRKNQFNLEDPHQKELFLAMLMTACDLSAITKPWPIQQRIAELVATEFFDQGDRERKELNIEPTDLMNREKKNRIPSMQVGFIDAICLQLYEAPTHVSEDCFPLLDGCRKNRQKWQALAEQQ

SEQ ID NO: 6503 - DNA, 978 bp, Artificial Sequence
  Description of Artificial Sequence: Synthetic Destabilizing Domain (DD)
gaagaaacaagagagctacagtcgttagcggctgctgtggtgccatctgcccagacccttaaaattactgactttagcttcagtgactttgagctgtctgatctggaaacagcactgtgtacaattcggatgtttactgacctcaaccttgtgcagaacttccagatgaaacatgaggttctttgcagatggattttaagtgttaagaagaattatcggaagaatgttgcctatcataattggagacatgcctttaatacagctcagtgcatgtttgctgctctaaaagcaggcaaaattcagaacaagctgactgacctggagatacttgcattgctgattgctgcactaagccacgatttggatcaccgtggtgtgaataactcttacatacagcgaagtgaacatccactcgcccagctttactgccattcaatcatggaacaccatcattttgaccagtgcctgatgattcttaatagtccaggcaatcagattctcagtggcctctccattgaagaacataagaccacgttgaaaataatcaagcaagctattttagctacagacctagcactgtacattaagaggcgaggagaattttttgaacttataagaaaaaatcaattcaatttggaagatcctcatcaaaaggagttgtttttggcaatgctgatgacagcttgtgatctttctgcaattacaaaaccctggcctattcaacaacggatagcagaacttgtagcaactgaattttttgatcaaggagacagagagagaaaagaactcaacatagaacccactgatctaatgaacagggagaagaaaaacagaatcccaagtatgcaagttgggttcatagatgccatctgcttgcaactgtatgaggccccgacccacgtgtcagaggactgtttccctttgctagatggctgcagaaagaacaggcagaaatggcaggcccttgcagaacagcag

SEQ ID NO: 6504 - protein, 326 aa, Artificial Sequence
  Description of Artificial Sequence: Synthetic Destabilizing Domain (DD)
EETRELQSLAAAVVPSAQTLKITDFSFSDFELSDLETALCTIRMFTDLSLVQNFQMKHEVLCRWILSVKKNYRKNVAYHNWRHAFNTAQCMFAALKAGKIQNKLTDLEILALLIAALSHDLDHRGVNNSYIQRSEHPLAQLYCHSIMEHHHFDQCLMILNSPGNQILSGLSIEEYKTTLKIIKQAILATDLALYIKRRGEFFELIRKNQFNLEDPHQEELFLAMLMTACDLSAITKPWPIQQRIAELVATEFFDQGDRERKELNIEPTDLMNREKKNKIPSMQVGFIDAICLQLYEALTHVSEDCFPLLDGSRKNRQKWQALAEQQ

SEQ ID NO: 6505 - DNA, 978 bp, Artificial Sequence
  Description of Artificial Sequence: Synthetic Destabilizing Domain (DD)
gaagaaacaagagagctacagtcgttagcggctgctgtggtgccatctgcccagacccttaaaattactgactttagcttcagtgactttgagctgtctgatctggaaacagcactgtgtacaattcggatgtttactgacctcagccttgtgcagaacttccagatgaaacatgaggttctttgcagatggattttaagtgttaagaagaattatcggaagaatgttgcctatcataattggagacatgcctttaatacagctcagtgcatgtttgctgctctaaaagcaggcaaaattcagaacaagctgactgacctggagatacttgcattgctgattgctgcactaagccacgatttggatcaccgtggtgtgaataactcttacatacagcgaagtgaacatccacttgcccagctttactgccattcaatcatggaacaccatcattttgaccagtgcctgatgattcttaatagtccaggcaatcagattctcagtggcctctccattgaagaatataagaccacgttgaaaataatcaagcaagctattttagctacagacctagcactatacattaagaggcgaggagaattttttgaacttataagaaaaaatcaattcaatttggaagatcctcatcaagaggagttgtttttggcaatgctgatgacagcttgtgatctttctgcaattacaaaaccctggcctattcaacaacggatagcagaacttgtagcaactgaattttttgatcaaggagacagagagagaaaagaactcaacatagaacccactgatctaatgaacagggagaagaaaaacaaaatcccaagtatgcaagttgggttcatagatgccatctgcttgcaactgtatgaggccctgacccacgtgtcagaggactgtttccctttgctagatggctccagaaagaacaggcagaaatggcaggcccttgcagaacagcag

SEQ ID NO: 6506 - protein, 326 aa, Artificial Sequence
  Description of Artificial Sequence: Synthetic Destabilizing Domain (DD)
EETRELQSLAAAVVPSAQTLKITDFSFSDFELSDLETALCTIRMFTDLNLVQNFQMKHEVLCRWILSVKKNYRKNVAYHNWRHAFNTAQCMFAALKAGKIQNKLTDLEILALLIAALSHDLDHRGVNNSYIQRSEHPLAQLYCHSIMGHHHFDQCLMILNSPGNQILSGLSIEEYKTTLKIIKQAILATDLALYIKRRGEFFELIRKNQFNLENPHQKELFLAMLMTACDLSAITKPWPIQQRIAELVATEFFDQGDRERKELNIEPTDLMNREKKNKIPSMQVGFIDAICLQLYEALTHVSEDCFPLLDGCRKNRQKWQALAEQQ

SEQ ID NO: 6507 - DNA, 978 bp, Artificial Sequence
  Description of Artificial Sequence: Synthetic Destabilizing Domain (DD)
gaagaaacaagagagctacagtcgttagcggctgctgtggtgccatccgcccagacccttaaaattactgactttagcttcagtgactttgagctgtctgatctggaaacagcactgtgtacaattcggatgtttactgacctcaaccttgtgcagaacttccagatgaaacatgaggttctttgcagatggattttaagtgttaagaagaattatcggaagaatgttgcctatcataattggagacatgcctttaatacagctcagtgcatgtttgctgctctaaaagcaggcaaaattcagaacaagctgactgacctggagatacttgcattgctgattgctgcactaagccacgatttggatcaccgtggtgtgaataactcttacatacagcgaagtgaacatccacttgcccagctttactgccattcaattatgggacaccatcattttgaccagtgcctgatgattcttaatagtccaggcaatcagattctcagtggcctctccattgaagaatataagaccacgttgaaaataatcaagcaagctattttagctacagacctagcactgtacattaagaggcgaggagaattttttgaacttataagaaaaaatcaattcaatttggaaaatcctcatcaaaaggagttgtttttggcaatgctgatgacagcttgtgatctttctgcaattacaaaaccctggcctattcaacaacggatagcagaacttgtagcaactgaattttttgatcaaggagacagagagagaaaagaactcaacatagaacccactgatctaatgaacagggagaagaaaaacaaaatcccaagtatgcaagttgggttcatagatgccatctgcttgcaactgtatgaggccctgacccacgtgtcagaggactgtttccctttgctagatggctgcagaaagaacaggcagaaatggcaggcccttgcagaacagcag

SEQ ID NO: 6508 - protein, 326 aa, Artificial Sequence
  Description of Artificial Sequence: Synthetic Destabilizing Domain (DD)
EETRELQSLAAAVVPSAQTLKITDFSFSDFELSDLETALCTIRMFTDLNLVQNFQMRHEVLCRWILSVKKNYRKNVAYHNWRHAFNTAQCMFAALKAGKIQNKLTDLETLALLIAALSHDLDHRGVNNSYIQRSEHPLAQLYCHSIMEHHHFDQCLMILNSPGNQILSGLSIEEYKTTLKIIKQAILATDLALYIKRRGEFFELIRKNQFNLEDPHQKELFLAMLMTACDLSAITKPWPIQQRIAELVATEFFDQGDRERKELNIEPTDLMNREKKNKIPSMQVGFIDAICLQLYEALTHVSEDCFPLLDGCRKNRQKWQAPAEQQ

SEQ ID NO: 6509 - DNA, 978 bp, Artificial Sequence
  Description of Artificial Sequence: Synthetic Destabilizing Domain (DD)
gaagaaacaagagagctacagtcgttagcggctgctgtggtgccatctgcccagacccttaaaattactgactttagcttcagtgactttgagctgtctgatctggaaacagcactgtgtacaattcggatgtttactgacctcaaccttgtgcagaacttccagatgagacatgaggttctttgcagatggattttaagtgttaagaagaattatcggaagaatgttgcctatcataattggagacatgcctttaatacagctcagtgcatgtttgctgctctaaaagcaggcaaaattcagaacaagctgactgacctggagacacttgcattgctgattgctgcactaagccacgatttggatcaccgtggtgtgaataactcttacatacagcgaagtgaacatccacttgcccagctttactgccattcaatcatggaacaccatcattttgaccagtgcctgatgattcttaatagtccaggcaatcagattctcagtggcctctccattgaagaatataagaccacgttgaaaataatcaagcaagctattttagctacagacctagcactgtacattaagaggcgaggagaattttttgaacttataagaaaaaatcaattcaatttggaagatcctcatcaaaaggagttgtttttggcaatgctgatgacagcttgtgatctttctgcaattacaaaaccctggcctattcaacaacggatagcagaacttgtagcaactgaattttttgatcaaggagacagagagagaaaagaactcaacatagaacccactgatctaatgaacagggagaagaaaaacaaaatcccaagtatgcaagttgggttcatagatgccatctgcttgcaactgtatgaggccctgacccacgtgtcagaggactgcttccctttgctagatggctgcagaaagaacaggcagaaatggcaggcccctgcagaacagcag

SEQ ID NO: 6510 - protein, 326 aa, Artificial Sequence
  Description of Artificial Sequence: Synthetic Destabilizing Domain (DD)
EETRELQSLAAAVVPSAQTLKITDFSFSDFELSDLETALCTIRMFTDLNLVQNFQMKHEVLCRWILSVKKNYRKNVAYHNWRHASNTAQCMFAALKAGKIQNKLTDLEILALLIAALSHDLDHRGVNNSYIQRSEHPLAQLYCHSIMEHHHFDQCLMILNSPGNQILSGLSIEEYKTTLKIIKQAILATDLALYIKRRGEFFELIRKNQFNLEDPHQKELFLAMLMTACDLSAITKPWPIQQRIAELVATEFFDQGDRERKELNIEPTDLMNREKKNKIPSMQAGFIDAICLQLCEALTHVSEDCFPLLDGCRKNRQKWQALAEQQ

SEQ ID NO: 6511 - DNA, 978 bp, Artificial Sequence
  Description of Artificial Sequence: Synthetic Destabilizing Domain (DD)
gaagaaacaagagagctacagtcgttagcggctgctgtggtgccatctgcccagacccttaaaattactgactttagcttcagtgactttgagctgtctgatctggaaacagcactgtgtacaattcggatgtttactgacctcaaccttgtgcagaacttccagatgaaacatgaggttctttgcagatggattttaagtgttaagaagaattatcggaagaatgttgcctatcataactggagacatgcctctaatacagctcagtgcatgtttgctgctctaaaagcaggcaaaattcagaacaagctgactgacctggagatacttgcattgctgattgctgcactaagccacgatttggatcaccgtggtgtgaataactcttacatacagcgaagtgaacatccacttgcccagctttactgccattcaatcatggaacaccatcattttgaccagtgcctgatgattcttaatagtccaggcaatcagattctcagtggcctctccattgaagaatataagaccacgttgaaaataatcaagcaagctattttagctacagacctagcactgtacattaagaggcgaggagaattttttgaacttataagaaaaaatcaattcaatttggaagatcctcatcaaaaggagttgtttttggcaatgctgatgacagcttgtgatctttctgcaattacaaaaccctggcctattcaacaacggatagcagaacttgtagcaactgaattttttgatcaaggagacagagagagaaaagaactcaacatagaacccactgatctaatgaacagggagaagaaaaacaaaatcccaagtatgcaagctgggttcatagatgccatctgcttgcaactgtgtgaggccctgacccacgtgtcagaggactgtttccctttgctagatggctgcagaaagaacaggcagaaatggcaggcccttgcagaacagcag

SEQ ID NO: 6512 - protein, 326 aa, Artificial Sequence
  Description of Artificial Sequence: Synthetic Destabilizing Domain (DD)
EETRELQSLAAAVEPSAQTLKITDFSFSDFELSDLETALCTIRMFTDLNLVQNFLMKHEVLCRWILSVKKNYRKNVAYHNWRHAFNTAQCMFAALKAGIIQNKLTDLEILALLIAALSHDLDHRGVNNSYIQRSEHPLAQLYCHSITEHHHFDQCLMILNSPGNQILIGLSIEEYKTTLKIIKQAILATDLALYIKRRGEFFELIRKNQFNLEDPHQEELFLAMLMTACDLSAITKPWPIQQRIAEPVATEFFDQGDRERKELNIEPTDLMNREKKNKIPSMQVGFIDAICLQLYEALTHVSEDCFPLLDGCRKNRQKWQALTEQQ

SEQ ID NO: 6513 - DNA, 978 bp, Artificial Sequence
  Description of Artificial Sequence: Synthetic Destabilizing Domain (DD)
gaagaaacaagagagctacagtcgttagcggctgctgtggagccatctgcccagacccttaaaattactgactttagcttcagtgactttgagctgtctgatctggaaacagcactgtgtacaattcggatgtttactgacctcaaccttgtgcagaacttcctgatgaaacatgaggttctttgcagatggattttaagtgttaagaagaattatcggaagaatgttgcctatcataattggagacatgcctttaatacagctcagtgcatgtttgctgctctaaaagcaggcataattcagaacaagctgactgacctggagatacttgcattgctgattgctgcactaagccacgatttggatcaccgtggtgtgaataactcttacatacagcgaagtgaacatccacttgcccagctttactgccattcaatcacggaacaccatcattttgaccagtgcctgatgattcttaatagtccaggcaatcagattctcattggcctctccattgaagaatataagaccacgttgaaaataatcaagcaagctattttagctacagacctagcactgtacattaagaggcgaggagaattttttgaacttataagaaaaaatcaattcaatttggaagatcctcatcaagaggagttgtttttggcaatgctgatgacagcttgtgatctttctgcaattacaaaaccctggcctattcaacaacggatagcagaacctgtagcaactgaattttttgatcaaggagacagagagagaaaagaactcaacatagaacccactgatctaatgaacagggagaagaaaaacaaaatcccaagtatgcaagttgggttcatagatgccatctgcttgcaactgtatgaggccctgacccacgtgtcagaggactgtttccctttgctagatggctgcagaaagaacaggcagaaatggcaggcccttacagaacagcag

SEQ ID NO: 6514 - protein, 326 aa, Artificial Sequence
  Description of Artificial Sequence: Synthetic Destabilizing Domain (DD)
EETRELQSLAAAVVPSAQTLKITDFSFSDFELSDLETALCTIRMFTDLNLVQNFQMKHEVLCRWILSVKKNYRKNVAYHNWRHAFNTAQCMFAALKAGKIQNKLTDLEILALLIAALGHDLDHRGVNNSYIQRSEHPLAQLYCHSIMEHHHFDRCLMILNSPGNQILSGLSIEEYKTTLKIIKQAILATDLALYIKRRGEFFELIRKNQFNLEDPHQKELFLAMLMTACDLSAITKPWPIQQRIAELVATEFFDQGDRERKELNIEPTDLMNREKKNKIPSMQVGFIDAICLQLYEALTHVSEDCFPLLDGCRKNRQKWQALAEQQ

SEQ ID NO: 6515 - DNA, 978 bp, Artificial Sequence
  Description of Artificial Sequence: Synthetic Destabilizing Domain (DD)
gaagaaacaagagagctacagtcgttagcggctgctgtggtgccatctgcccagacccttaaaattactgactttagcttcagtgactttgagctgtctgatctggaaacagcactgtgtacaattcggatgtttactgacctcaaccttgtgcagaacttccagatgaaacatgaggttctttgcagatggattttaagtgttaagaagaattatcggaagaatgttgcctatcataattggagacatgcctttaatacagctcagtgcatgtttgctgctctaaaagcaggcaaaattcagaacaagctgactgacctggagatacttgcattgctgattgctgcactaggccacgatttggatcaccgtggtgtgaataactcttacatacagcgaagtgaacatccacttgcccagctttactgccattcaatcatggaacaccatcattttgaccggtgcctgatgattcttaatagtccaggcaatcagattctcagtggcctctccattgaagaatataagaccacgttgaaaataatcaagcaagctattttagctacagacctagcactgtacattaagaggcgaggagaattttttgaacttataagaaaaaatcaattcaatttggaagatcctcatcaaaaggagttgtttttggcaatgctgatgacagcttgtgatctttctgcaattacaaaaccctggcctattcaacaacggatagcagaacttgtagcaactgaattttttgatcaaggagacagagagagaaaagaactcaacatagaacccactgatctaatgaacagggagaagaaaaacaaaatcccaagtatgcaagttgggttcatagatgccatctgcttgcaactgtatgaggccctgacccacgtgtcagaggactgtttccctttgctagatggctgcagaaagaacaggcagaaatggcaggcccttgcagaacagcag

SEQ ID NO: 6516 - protein, 326 aa, Artificial Sequence
  Description of Artificial Sequence: Synthetic Destabilizing Domain (DD)
EETRELQSLAAAVVPSAQTLKITDFSFSDFGLSDLETALCTIRMFTDLNLVQNFQMKHEVLCRWILSVKKNYRKNVAYHNWRHAFNTAQCMFAALKAGKIQNKLTDLEILALLIAALSHDLDHRGVNNSYIQRSEHPLAQLYCHSIMEHHHFDQCLMILNSPGNQILSGLSIEEYKTTLKIIKQAILATDLALYIKRRGEFFELIRKNQFNLEDPHQKELFLAMLMTACDLSAITKPWPIQQRIAELVATEFFDQGDRERKELNIEPTDLMNREKKNKIPSMQVGFIDAICLQLYEALTHVSEDCFPLLDGCRKNRQKWQALAEQQ

SEQ ID NO: 6517 - DNA, 978 bp, Artificial Sequence
  Description of Artificial Sequence: Synthetic Destabilizing Domain (DD)
gaagaaacaagagagctacagtcgttagcggctgctgtggtgccatctgcccagacccttaaaattactgactttagcttcagtgactttgggctgtctgatctggaaacagcactgtgtacaattcggatgtttactgacctcaaccttgtgcagaacttccagatgaaacatgaggttctttgcagatggattttaagtgttaagaagaattatcggaagaatgttgcctatcataattggagacatgcctttaatacagctcagtgcatgtttgctgctctaaaagcaggcaaaattcagaacaagctgactgacctggagatacttgcattgctgattgctgcactaagccacgatttggatcaccgtggtgtgaataactcttacatacagcgaagtgaacatccacttgcccagctttactgccattcaatcatggaacaccatcattttgaccagtgcctgatgattcttaatagtccaggcaatcagattctcagtggcctctccattgaagaatataagaccacgttgaaaataatcaagcaagccattttagctacagacctagcactgtacattaagaggcgaggagaattttttgaacttataagaaaaaatcaattcaatttggaagatcctcatcaaaaggagttgtttttggcaatgctgatgacagcttgtgatctttctgcaattacaaaaccctggcctattcaacaacggatagcagaacttgtagcaactgaattttttgatcaaggagacagagagagaaaagaactcaacatagaacccactgatctaatgaacagggagaagaaaaacaaaatcccaagtatgcaagttgggttcatagatgccatctgcttgcaactgtatgaggccctgacccacgtgtcagaggactgtttccctttgctagatggctgcagaaagaacaggcagaaatggcaggcccttgcagaacagcag

SEQ ID NO: 6518 - protein, 326 aa, Artificial Sequence
  Description of Artificial Sequence: Synthetic Destabilizing Domain (DD)
EETRELQSLAAAVVPSAQTLKITDFSFSDFELSDLETALCTIRMFTDLNLVQNFQMKHEVLCRWILSVKKNYRKNVAYHNWRHAFNTAQCMFAALKAGKIQNKLTDLEILALLIAALSHDLDHRGVNNSYIQRSEHPLAQLYCHSIMEHHHFDQCLMILNSPGNQILSGLSIEEYKTTLKIIKQAILATDLALYIKRRGEFFELIRKNQFNLEDPHQKELFLAMLMTACDLSAITKPWPVQQRIAELVATEFFDQGDRERKELNIEPTDLMNREKKNKIPSMQVGFIDAICLQLYEALTHVSEDCFPLLDGCRKNRQKWQALAEQQ

SEQ ID NO: 6519 - DNA, 978 bp, Artificial Sequence
  Description of Artificial Sequence: Synthetic Destabilizing Domain (DD)
gaagaaacaagagagctacagtcgttagcggctgctgtggtgccatctgcccagacccttaaaattactgactttagcttcagtgactttgagctgtctgatctggaaacagcactgtgtacaattcggatgtttactgacctcaaccttgtgcagaacttccagatgaaacatgaggttctttgcagatggattttaagtgttaagaagaattatcggaagaatgttgcctatcataattggagacatgcctttaatacagctcagtgcatgtttgctgctctaaaagcaggcaaaattcagaacaagctgactgacctggagatacttgcattgctgattgctgcactaagccacgatttggatcaccgtggtgtgaataactcttacatacagcgaagtgaacatccacttgcccagctttactgccattcaatcatggaacaccatcattttgaccagtgcctgatgattcttaatagtccaggcaatcagattctcagtggcctctccattgaagaatataagaccacgttgaaaataatcaagcaagctattttagctacagacctagcactgtacattaagaggcgaggagaattttttgaacttataagaaaaaatcaattcaatttggaagatcctcatcaaaaggagttgtttttggcaatgctgatgacagcttgtgatctttctgcaattacaaaaccctggcctgttcaacaacggatagcagaacttgtagcaactgaattttttgatcaaggagacagagagagaaaagaactcaacatagaacccactgatctaatgaacagggagaagaaaaacaaaatcccaagtatgcaagttgggttcatagatgccatctgcttgcaactgtatgaggccctgacccacgtgtcagaggactgtttccctttgctagatggctgcagaaagaacaggcagaaatggcaggcccttgcagaacagcag

SEQ ID NO: 6520 - protein, 326 aa, Artificial Sequence
  Description of Artificial Sequence: Synthetic Destabilizing Domain (DD)
EETRELQSLAAAVVPSAQTLKITDFSFSDFELSDLETALCTIRMFTDLNLVQNFQMRHEVLCRWILSVKKNYRKNVAYHNWRHAFNTAQCMFAALKAGKIQNKLTDLEILALLIAALSHDLDHRGVNNSYIQRSEHPLAQLYCHSIMEHHHFDQCLMILNSPGNQILSGLSIEEYKTTLKIIKQAILATDLALYIKRRGEFFELIRKNQFNLEDPHQKELFLAMLMTACDLSAITKPWPIQQRIAELVATEFFDQGDRERKELNIEPTDLMNREKKNKIPSMQVGFIDAICLQLYEALTHVSEDCFPLLDGCRKNRQKWQALAEQQ

SEQ ID NO: 6521 - DNA, 978 bp, Artificial Sequence
  Description of Artificial Sequence: Synthetic Destabilizing Domain (DD)
gaagaaacaagagagctacagtcgttagcggctgctgtggtgccatctgcccagacccttaaaattactgactttagcttcagtgactttgagctgtctgatctggaaacagcactgtgtacaattcggatgtttactgacctcaaccttgtgcagaacttccagatgagacatgaggttctttgcagatggattttaagtgttaagaagaattatcggaagaatgttgcctatcataattggagacatgcctttaatacagctcagtgcatgtttgctgctctaaaagcaggcaaaattcagaacaagctgactgacctggagatacttgcattgctgattgctgcactaagccacgatttggatcaccgtggtgtgaataactcttacatacagcgaagtgaacatccacttgcccagctttactgccattcaatcatggaacaccatcattttgaccagtgcctgatgattcttaatagtccaggcaatcagattctcagtggcctctccattgaagaatataagaccacgttgaaaataatcaagcaagctattttagctacagacctagcactgtacattaagaggcgaggagaattttttgaacttataagaaaaaatcaattcaatttggaagatcctcatcaaaaggagttgtttttggcaatgctgatgacagcttgtgatctttctgcaattacaaaaccctggcctattcaacaacggatagcagaacttgtagcaactgaattttttgatcaaggagacagagagagaaaagaactcaacatagaacccactgatctaatgaacagggagaagaaaaacaaaatcccaagtatgcaagttgggttcatagatgccatctgcttgcaactgtatgaggccctgacccacgtgtcagaggactgtttccctttgctagatggctgcagaaagaacaggcagaaatggcaggcccttgcagaacagcag

SEQ ID NO: 6522 - protein, 326 aa, Artificial Sequence
  Description of Artificial Sequence: Synthetic Destabilizing Domain (DD)
EETRELQSLAAAVVPSAQTLKITDSSFSDFELSDLETALCTIRMFTDLNLVQNFQMKHEVLCRWILSVKKNYRKNVAYHNWRHAFNTAQCMFAALKAGKIQNKLTDLEILALLIAALSHDLDHRGVNNSYIQRSEHPLAQLYCHSIMEHHHFDQCLMILNSPGNQILSGLSIEECKTTLKIIKQAILATDLALYIKRRGEFFELIRKNQFNLEDPHQKELFLAMLTTACDLSAITKPWPIQQRIAELVATEFFDQGDRERKELNIEPTDLMNREKKNKIPSMQVGFIDAICLQLYEALTHVSEDCFPLLDGCRKNRQKWQALAEQQ

SEQ ID NO: 6523 - DNA, 978 bp, Artificial Sequence
  Description of Artificial Sequence: Synthetic Destabilizing Domain (DD)
gaagaaacaagagagctacagtcgttagcggctgctgtggtgccatctgcccagacccttaaaattactgactctagcttcagtgactttgagctgtctgatctggaaacagcactgtgtacaattcggatgtttactgacctcaaccttgtgcagaacttccagatgaaacatgaggttctttgcagatggattttaagtgttaagaagaattatcggaagaatgttgcctatcataattggagacatgcctttaatacagctcagtgcatgtttgctgctctaaaagcaggcaaaattcagaacaagctgactgacctggagatacttgcattgctgattgctgcactaagccacgatttggatcaccgtggtgtgaataactcttacatacagcgaagtgaacatccacttgcccagctttactgccattcaatcatggaacaccatcattttgaccagtgcctgatgattcttaatagtccaggcaatcagattctcagtggcctctccattgaagaatgtaagaccacgttgaaaataatcaagcaagctattttagctacagacctagcactgtacattaagaggcgaggagaattttttgaacttataagaaaaaatcaattcaatttggaagatcctcatcaaaaggagttgtttttggcaatgctgacgacagcttgtgatctttctgcaattacaaaaccctggcctattcaacaacggatagcagaacttgtagcaactgaattttttgatcaaggagacagagagagaaaagaactcaacatagaacccactgatctaatgaacagggagaagaaaaacaaaatcccaagtatgcaagttgggttcatagatgccatctgcttgcaactgtatgaggccctgacccacgtgtcagaggactgtttccctttgttagatggctgcagaaagaacaggcagaaatggcaggcccttgcagaacagcag

SEQ ID NO: 6524 - protein, 326 aa, Artificial Sequence
  Description of Artificial Sequence: Synthetic Destabilizing Domain (DD)
EETRELQSLAAAVVPSAQTLKITDFSFSDFELSDLETALCTIRMFTDLNLVQNFQMKHEVLCRWILSVKKNYRKNVAYHNWRHAFNTAQCMFAALKAGKIQNKLTDLEILALLIVTLSHDLDHRGVNNSYIQRSEHPLAQLYCHSIMEHHHFDQCLMILNSPGNQILSGLSIEEYKTTLKIIKQAILATDLALYIERRGEFFELIRKNQFNLEDPHQKELFLAMLMTACDLSAITKPWPIQQRIAELVATEFFDQGDRERKELNIEPTDLMNREKKNKIPSMQVGFIDAICLQLYKALTHVSEDCFPLLDGCRKNRQKWQALAEQQ

SEQ ID NO: 6525 - DNA, 978 bp, Artificial Sequence
  Description of Artificial Sequence: Synthetic Destabilizing Domain (DD)
gaagaaacaagagagctacagtcgttagcggctgctgtggtgccatctgcccagacccttaaaattactgactttagcttcagtgactttgagctgtctgatctggaaacagcactgtgtacaattcggatgtttactgacctcaaccttgtgcagaacttccagatgaaacatgaggttctttgcagatggattttaagtgttaagaagaattatcggaagaatgttgcctatcataattggagacatgcctttaatacagctcagtgcatgtttgctgctctaaaagcaggcaaaattcagaacaagctgactgacctggagatacttgcattgctgattgttacactaagccacgatttggatcaccgtggtgtgaataactcttacatacagcgaagtgaacatccacttgcccagctttactgccattcaatcatggaacaccatcattttgaccagtgcctgatgattcttaatagtccaggcaatcagattctcagtggcctctccattgaagaatataagaccacgttgaaaataatcaagcaagctattttagctacagacctagcactgtacattgagaggcgaggagaattttttgaacttataagaaaaaatcaattcaatttggaagatcctcatcaaaaggagttgtttttggcaatgctgatgacagcttgtgatctttctgcaattacaaaaccctggcctattcaacaacggatagcagaacttgtagcaactgaattttttgatcaaggagacagagagagaaaagaactcaatatagaacccactgatctaatgaacagggagaagaaaaacaaaatcccaagtatgcaagttgggttcatagatgccatctgcttgcaactgtataaggccctgacccacgtgtcagaggactgcttccctttgctagatggctgcagaaagaacaggcagaaatggcaggcccttgcagaacagcag

SEQ ID NO: 6526 - protein, 326 aa, Artificial Sequence
  Description of Artificial Sequence: Synthetic Destabilizing Domain (DD)
EETRELQSLAAAVVPSAQTLKITDFSFSDFELSDLETALCTIRMFTDLNLVQNFQMKHEVLCRWILSVKKNYRKNVAYHNWRHAFNTAQCMFAALKAGKIQNKLTDLEILALLIAALSHDLDHRGVNNSYIQRSEHPLAQLYCHSIMEHHHFDQCLMILNSPGNQILSGLSIEEYKTTLKIIKQAILATDLALCIKRRGEFFELIRKNQFNLEDPHQKELFLAMLMTACDLSAITKPWPIQQRIAELVATEFFDQGDRERKELNIEPTDLMNREKKNKIPSMRVGFIDAICLQLYEALTHVSEDCFPLLDGCRKNRQKWQALAEQQ

SEQ ID NO: 6527 - DNA, 978 bp, Artificial Sequence
  Description of Artificial Sequence: Synthetic Destabilizing Domain (DD)
gaagaaacaagagagctacagtcgttagcggctgctgtggtgccatctgcccagacccttaaaattactgactttagcttcagtgactttgagctgtctgatctggaaacagcactgtgtacaattcggatgtttactgacctcaaccttgtgcagaacttccagatgaaacatgaggttctttgcagatggattttaagtgttaagaagaattatcggaagaatgttgcctatcataattggagacatgcctttaatacagctcagtgcatgtttgctgctctaaaagcaggcaaaattcagaacaagctgactgacctggagatacttgcattgctgattgctgcactaagccacgatttggatcaccgtggtgtgaataactcttacatacagcgaagtgaacatccacttgcccagctttactgccattcaatcatggaacaccatcattttgaccagtgcctgatgattcttaatagtccaggcaatcagattctcagtggcctctccattgaagaatataagaccacgttgaaaataatcaagcaagctattttagctacagacctagcactgtgcattaagaggcgaggagaattttttgaacttataagaaaaaatcaattcaatttggaagatcctcatcaaaaggagttgtttttggcaatgctgatgacagcttgtgatctttctgcaattacaaaaccctggcctattcaacaacggatagcagaacttgtagcaactgaattttttgatcaaggagacagagagagaaaagaactcaacatagaacccactgatctaatgaacagggagaagaaaaacaaaatcccaagtatgcgagttgggttcatagatgccatctgcttgcaactgtatgaggccctgacccacgtgtcagaggactgtttccctttgctagatggctgcagaaagaacaggcagaaatggcaggcccttgcagaacagcag

SEQ ID NO: 6528 - protein, 326 aa, Artificial Sequence
  Description of Artificial Sequence: Synthetic Destabilizing Domain (DD)
EETRELQSLAAAVVPSAQTLKITDFSFSDFELSDLETALCTIRMFTDLNLVQNFQMKHEVPCRWILSVKKNYRKNVAYHNWRHAFNTAQCMFAALKAGKIQNKLTDLEILALLIAALSHDLDHRGVNNSYIQRSEHPLAQLYCHSIMEHHHFDQCLMILNSPGNQILSGLSIEEYKTTLKIIKQAILATDLALYIKRRGEFFELIRRNQFNLEDPHQKELFLAMLMTACDLSAITKPWPIQQRIAELVATEFFDQGDRERKELNIEPTDLMNREKKNKIPSMQVGFIDAICLQLYEALTHVSEDCFPLLDGCRKNRQKWQALAEQQ

SEQ ID NO: 6529 - DNA, 978 bp, Artificial Sequence
  Description of Artificial Sequence: Synthetic Destabilizing Domain (DD)
gaagaaacaagagagctacagtcgttagcggctgctgtggtgccatctgcccagacccttaaaattactgactttagcttcagtgactttgagctgtctgatctggaaacagcactgtgtacaattcggatgtttactgacctcaaccttgtgcagaacttccagatgaaacatgaggttccttgcagatggattttaagtgttaagaagaattatcggaagaatgttgcctatcataattggagacatgcctttaatacagctcagtgcatgtttgctgctctaaaagcaggcaaaattcagaacaagctgactgacctggagatacttgcattgctgattgctgcactaagccacgatttggatcaccgtggtgtgaataactcttacatacagcgaagtgaacatccacttgcccagctttactgccactcaatcatggaacaccatcattttgaccagtgcctgatgattcttaatagtccaggcaatcagattctcagtggcctctccattgaagaatataagaccacgttgaaaataatcaagcaagctattttagctacagacctagcactgtacattaagaggcgaggagaattttttgaacttataagaagaaatcaattcaatttggaagatcctcatcaaaaggagttgtttttggcaatgctgatgacagcttgtgatctttctgcaattacaaaaccctggcctattcaacaacggatagcagaacttgtagcaactgaattttttgatcaaggagacagagagagaaaagaactcaacatagaacccactgatctaatgaacagggagaagaaaaacaaaatcccaagtatgcaagttgggttcatagatgccatctgcttgcaactgtatgaggccctgacccacgtgtcagaggactgtttccctttgctagatggctgcagaaagaacaggcagaaatggcaggcccttgcagaacagcag

SEQ ID NO: 6530 - protein, 326 aa, Artificial Sequence
  Description of Artificial Sequence: Synthetic Destabilizing Domain (DD)
EETRELQSLAAAVVPSAQTLKITDFSFSDFELSDLETALCTIWMFTDLNLVQNFQMKHEVLCRWILSVKKNYRKNVAYHNRRHAFNTAQCMFAALKAGKIQNKLTDLEILALLIAALSHDLDHRGVNNSYIQRSEHPLAQLYCHSIMEHHHFDQCLMILNSPGNQILSGLSIEEYKTTLKIIKQAILATDLALYIKRRGEFFELIRKNQFNLEDPHQKELFLAMLMTACDLSAITKPWPIQQRIAELVATEFFDQGDRERKELNIEPTDLTNREKKNKIPSMQVGFVDAICLQLYEALTHVSEDCFPLLDGCRKNRQKWQALAEQQ

SEQ ID NO: 6531 - DNA, 978 bp, Artificial Sequence
  Description of Artificial Sequence: Synthetic Destabilizing Domain (DD)
gaagaaacaagagagctacagtcgttagcggctgctgtggtgccatctgcccagacccttaaaattactgactttagcttcagtgactttgagctgtctgatctggaaacagcactgtgtacaatttggatgtttactgacctcaaccttgtgcagaacttccagatgaaacatgaggttctttgcagatggattttaagtgttaagaagaattatcggaagaatgttgcctatcataatcggagacatgcctttaatacagctcagtgcatgtttgctgctctaaaagcaggcaaaattcagaacaagctgactgacctggagatacttgcattgctgattgctgcactaagccacgatttggatcaccgtggtgtgaataactcttacatacagcgaagtgaacatccacttgcccagctttactgccattcaatcatggaacaccatcattttgaccagtgcctgatgattcttaatagtccaggcaatcagattctcagtggcctctccattgaagaatataagaccacgttgaaaataatcaagcaagctattttagctacagacctagcactgtacattaagaggcgaggagaattttttgaacttataagaaaaaatcaattcaatttggaagatcctcatcaaaaggagttgtttttggcaatgctgatgacagcttgtgatctttctgcaattacaaaaccctggcctattcaacaacggatagcagaacttgtagcaactgaattttttgatcaaggagacagagagagaaaagaactcaacatagaacccactgatctaacgaacagggagaagaaaaacaaaatcccaagtatgcaagttgggttcgtagatgccatctgcttgcaactgtatgaggccctgacccacgtgtcagaggactgtttccctttgctagatggctgcagaaagaacaggcagaaatggcaggcccttgcagaacagcag

SEQ ID NO: 6532 - protein, 12 aa, Artificial Sequence
  Description of Artificial Sequence: Synthetic Linker
GGSGGGSGGGSG

SEQ ID NO: 6533 - DNA, 36 bp, Artificial Sequence
  Description of Artificial Sequence: Synthetic Linker
ggaggttctggaggtggaagtggaggtggatccggt

SEQ ID NO: 6534 - protein, 600 aa, Artificial Sequence
  Description of Artificial Sequence: Synthetic Construct
MEETRELQSLAAAVVPSAQTLKITDFSFSDFELSDLETALCTIRMFTDLNLVQNFQMKHEVLCRWILSVKKNYRKNVAYHNWRHAFNTAQCMFAALKAGKIQNKLTDLEILALLIAALSHDLDHRGVNNSYIQRSEHPLAQLYCHSIMEHHHFDQCLMILNSPGNQILSGLSIEEYKTTLKIIKQAILATDLALYIKRLGEFFELIRKNQFNLEDPHQKELFLAMLMTACDLSAITKPWPIQQRIAELVATEFFDQGDRERKELNIEPTDLMNREKKNKIPSMQVGFIDAICLQLYEALTHVSEDCFPLLDGCRKNRQKWQALAEQQGGSGGGSGGGSGMIETYNQTSPRSAATGLPISMKIFMYLLTVFLITQMIGSALFAVYLHRRLDKIEDERNLHEDFVFMKTIQRCNTGERSLSLLNCEEIKSQFEGFVKDIMLNKEETKKENSFEMQKGDQNPQIAAHVISEASSKTTSVLQWAEKGYYTMSNNLVTLENGKQLTVKRQGLYYIYAQVTFCSNREASSQAPFIASLCLKSPGRFERILLRAANTHSSAKPCGQQSIHLGGVFELQPGASVFVNVTDPSQVSHGTGFTSFGLLKL

SEQ ID NO: 6535 - DNA, 1803 bp, Artificial Sequence
  Description of Artificial Sequence: Synthetic Construct
atggaagaaacaagagagctacagtcgttagcggctgctgtggtgccatctgcccagacccttaaaattactgactttagcttcagtgactttgagctgtctgatctggaaacagcactgtgtacaattcggatgtttactgacctcaaccttgtgcagaacttccagatgaaacatgaggttctttgcagatggattttaagtgttaagaagaattatcggaagaatgttgcctatcataattggagacatgcctttaatacagctcagtgcatgtttgctgctctaaaagcaggcaaaattcagaacaagctgactgacctggagatacttgcattgctgattgctgcactaagccacgatttggatcaccgtggtgtgaataactcttacatacagcgaagtgaacatccacttgcccagctttactgccattcaatcatggaacaccatcattttgaccagtgcctgatgattcttaatagtccaggcaatcagattctcagtggcctctccattgaagaatataagaccacgttgaaaataatcaagcaagctattttagctacagacctagcactgtacattaagaggctaggagaattttttgaacttataagaaaaaatcaattcaatttggaagatcctcatcaaaaggagttgtttttggcaatgctgatgacagcttgtgatctttctgcaattacaaaaccctggcctattcaacaacggatagcagaacttgtagcaactgaattttttgatcaaggagacagagagagaaaagaactcaacatagaacccactgatctaatgaacagggagaagaaaaacaaaatcccaagtatgcaagttgggttcatagatgccatctgcttgcaactgtatgaggccctgacccacgtgtcagaggactgtttccctttgctagatggctgcagaaagaacaggcagaaatggcaggcccttgcagaacagcagggaggttctggaggtggaagtggaggtggatccggtatgatcgaaacatacaaccaaacttctccccgatctgcggccactggactgcccatcagcatgaaaatttttatgtatttacttactgtttttcttatcacccagatgattgggtcagcactttttgctgtgtatcttcatagaaggttggacaagatagaagatgaaaggaatcttcatgaagattttgtattcatgaaaacgatacagagatgcaacacaggagaaagatccttatccttactgaactgtgaggagattaaaagccagtttgaaggctttgtgaaggatataatgttaaacaaagaggagacgaagaaagaaaacagctttgaaatgcaaaaaggtgatcagaatcctcaaattgcggcacatgtcataagtgaggccagcagtaaaacaacatctgtgttacagtgggctgaaaaaggatactacaccatgagcaacaacttggtaaccctggaaaatgggaaacagctgaccgttaaaagacaaggactctattatatctatgcccaagtcaccttctgttccaatcgggaagcttcgagtcaagctccatttatagccagcctctgcctaaagtcccccggtagattcgagagaatcttactcagagctgcaaatacccacagttccgccaaaccttgcgggcaacaatccattcacttgggaggagtatttgaattgcaaccaggtgcttcggtgtttgtcaatgtgactgatccaagccaagtgagccatggcactggcttcacgtcctttggcttactcaaactctga

SEQ ID NO: 6536 - DNA, 11 bp, Artificial Sequence
  Description of Artificial Sequence: Synthetic oligonucleotide
atcgggctagc

SEQ ID NO: 6537 - DNA, 32 bp, Artificial Sequence
  Description of Artificial Sequence: Synthetic oligonucleotide
gcttgccacaacccacaaggagacgaccttcc

SEQ ID NO: 6538 - DNA, 576 bp, Artificial Sequence
  Description of Artificial Sequence: Synthetic polynucleotide
cgcccctctccctcccccccccctaacgttactggccgaagccgcttggaataaggccggtgtgcgtttgtctatatgttattttccaccatattgccgtcttttggcaatgtgagggcccggaaacctggccctgtcttcttgacgagcattcctaggggtctttcccctctcgccaaaggaatgcaaggtctgttgaatgtcgtgaaggaagcagttcctctggaagcttcttgaagacaaacaacgtctgtagcgaccctttgcaggcagcggaaccccccacctggcgacaggtgcctctgcggccaaaagccacgtgtataagatacacctgcaaaggcggcacaaccccagtgccacgttgtgagttggatagttgtggaaagagtcaaatggctctcctcaagcgtattcaacaaggggctgaaggatgcccagaaggtaccccattgtatgggatctgatctggggcctcggtgcacatgctttacatgtgtttagtcgaggttaaaaaaacgtctaggccccccgaaccacggggacgtggttttcctttgaaaaacacgatgataa

SEQ ID NO: 6539 - protein, 772 aa, Artificial Sequence
  Description of Artificial Sequence: Synthetic Construct
MALPVTALLLPLALLLHAARPDIQMTQTTSSLSASLGDRVTISCRASQDISKYLNWYQQKPDGTVKLLIYHTSRLHSGVPSRFSGSGSGTDYSLTISNLEQEDIATYFCQQGNTLPYTFGGGTKLEITGGGGSGGGGSGGGGSEVKLQESGPGLVAPSQSLSVTCTVSGVSLPDYGVSWIRQPPRKGLEWLGVIWGSETTYYNSALKSRLTIIKDNSKSQVFLKMNSLQTDDTAIYYCAKHYYYGGSYAMDYWGQGTSVTVSSTTTPAPRPPTPAPTIASQPLSLRPEACRPAAGGAVHTRGLDFACDIYIWAPLAGTCGVLLLSLVITLYCKRGRKKLLYIFKQPFMRPVQTTQEEDGCSCRFPEEEEGGCELRVKFSRSADAPAYKQGQNQLYNELNLGRREEYDVLDKRRGRDPEMGGKPRRKNPQEGLYNELQKDKMAEAYSEIGMKGERRRGKGHDGLYQGLSTATKDTYDALHMQALPPRGSATNFSLLKQAGDVEENPGPGSMHMIETYNQTSPRSAATGLPISMKIFMYLLTVFLITQMIGSALFAVYLHRRLDKIEDERNLHEDFVFMKTIQRCNTGERSLSLLNCEEIKSQFEGFVKDIMLNKEETKKENSFEMQKGDQNPQIAAHVISEASSKTTSVLQWAEKGYYTMSNNLVTLENGKQLTVKRQGLYYIYAQVTFCSNREASSQAPFIASLCLKSPGRFERILLRAANTHSSAKPCGQQSIHLGGVFELQPGASVFVNVTDPSQVSHGTGFTSFGLLKL

SEQ ID NO: 6540 - DNA, 2319 bp, Artificial Sequence
  Description of Artificial Sequence: Synthetic Construct
atggccttaccagtgaccgccttgctcctgccgctggccttgctgctccacgccgccaggccggacatccagatgacacagactacatcctccctgtctgcctctctgggagacagagtcaccatcagttgcagggcaagtcaggacattagtaaatatttaaattggtatcagcagaaaccagatggaactgttaaactcctgatctaccatacatcaagattacactcaggagtcccatcaaggttcagtggcagtgggtctggaacagattattctctcaccattagcaacctggagcaagaagatattgccacttacttttgccaacagggtaatacgcttccgtacacgttcggaggggggaccaagctggagatcacaggtggcggtggctcgggcggtggtgggtcgggtggcggcggatctgaggtgaaactgcaggagtcaggacctggcctggtggcgccctcacagagcctgtccgtcacatgcactgtctcaggggtctcattacccgactatggtgtaagctggattcgccagcctccacgaaagggtctggagtggctgggagtaatatggggtagtgaaaccacatactataattcagctctcaaatccagactgaccatcatcaaggacaactccaagagccaagttttcttaaaaatgaacagtctgcaaactgatgacacagccatttactactgtgccaaacattattactacggtggtagctatgctatggactactggggccaaggaacctcagtcaccgtctcctcaaccacgacgccagcgccgcgaccaccaacaccggcgcccaccatcgcgtcgcagcccctgtccctgcgcccagaggcgtgccggccagcggcggggggcgcagtgcacacgagggggctggacttcgcctgtgatatctacatctgggcgcccttggccgggacttgtggggtccttctcctgtcactggttatcaccctttactgcaaacggggcagaaagaaactcctgtatatattcaaacaaccatttatgagaccagtacaaactactcaagaggaagatggctgtagctgccgatttccagaagaagaagaaggaggatgtgaactgagagtgaagttcagcaggagcgcagacgcccccgcgtacaagcagggccagaaccagctctataacgagctcaatctaggacgaagagaggagtacgatgttttggacaagagacgtggccgggaccctgagatggggggaaagccgagaaggaagaaccctcaggaaggcctgtacaatgaactgcagaaagataagatggcggaggcctacagtgagattgggatgaaaggcgagcgccggaggggcaaggggcacgatggcctttaccagggtctcagtacagccaccaaggacacctacgacgcccttcacatgcaggccctgccccctcgcggatcagctactaacttcagcctgctgaagcaggctggagacgtggaggagaaccctggacctggatccatgcatatgatcgaaacatacaaccaaacttctccccgatctgcggccactggactgcccatcagcatgaaaatttttatgtatttacttactgtttttcttatcacccagatgattgggtcagcactttttgctgtgtatcttcatagaaggttggacaagatagaagatgaaaggaatcttcatgaagattttgtattcatgaaaacgatacagagatgcaacacaggagaaagatccttatccttactgaactgtgaggagattaaaagccagtttgaaggctttgtgaaggatataatgttaaacaaagaggagacgaagaaagaaaacagctttgaaatgcaaaaaggtgatcagaatcctcaaattgcggcacatgtcataagtgaggccagcagtaaaacaacatctgtgttacagtgggctgaaaaaggatactacaccatgagcaacaacttggtaaccctggaaaatgggaaacagctgaccgttaaaagacaaggactctattatatctatgcccaagtcaccttctgttccaatcgggaagcttcgagtcaagctccatttatagccagcctctgcctaaagtcccccggtagattcgagagaatcttactcagagctgcaaatacccacagttccgccaaaccttgcgggcaacaatccattcacttgggaggagtatttgaattgcaaccaggtgcttcggtgtttgtcaatgtgactgatccaagccaagtgagccatggcactggcttcacgtcctttggcttactcaaactctga

SEQ ID NO: 6541 - DNA, 2878 bp, Artificial Sequence
  Description of Artificial Sequence: Synthetic Construct
atggccttaccagtgaccgccttgctcctgccgctggccttgctgctccacgccgccaggccggacatccagatgacacagactacatcctccctgtctgcctctctgggagacagagtcaccatcagttgcagggcaagtcaggacattagtaaatatttaaattggtatcagcagaaaccagatggaactgttaaactcctgatctaccatacatcaagattacactcaggagtcccatcaaggttcagtggcagtgggtctggaacagattattctctcaccattagcaacctggagcaagaagatattgccacttacttttgccaacagggtaatacgcttccgtacacgttcggaggggggaccaagctggagatcacaggtggcggtggctcgggcggtggtgggtcgggtggcggcggatctgaggtgaaactgcaggagtcaggacctggcctggtggcgccctcacagagcctgtccgtcacatgcactgtctcaggggtctcattacccgactatggtgtaagctggattcgccagcctccacgaaagggtctggagtggctgggagtaatatggggtagtgaaaccacatactataattcagctctcaaatccagactgaccatcatcaaggacaactccaagagccaagttttcttaaaaatgaacagtctgcaaactgatgacacagccatttactactgtgccaaacattattactacggtggtagctatgctatggactactggggccaaggaacctcagtcaccgtctcctcaaccacgacgccagcgccgcgaccaccaacaccggcgcccaccatcgcgtcgcagcccctgtccctgcgcccagaggcgtgccggccagcggcggggggcgcagtgcacacgagggggctggacttcgcctgtgatatctacatctgggcgcccttggccgggacttgtggggtccttctcctgtcactggttatcaccctttactgcaaacggggcagaaagaaactcctgtatatattcaaacaaccatttatgagaccagtacaaactactcaagaggaagatggctgtagctgccgatttccagaagaagaagaaggaggatgtgaactgagagtgaagttcagcaggagcgcagacgcccccgcgtacaagcagggccagaaccagctctataacgagctcaatctaggacgaagagaggagtacgatgttttggacaagagacgtggccgggaccctgagatggggggaaagccgagaaggaagaaccctcaggaaggcctgtacaatgaactgcagaaagataagatggcggaggcctacagtgagattgggatgaaaggcgagcgccggaggggcaaggggcacgatggcctttaccagggtctcagtacagccaccaaggacacctacgacgcccttcacatgcaggccctgccccctcgctaaatcgggctagccgcccctctccctcccccccccctaacgttactggccgaagccgcttggaataaggccggtgtgcgtttgtctatatgttattttccaccatattgccgtcttttggcaatgtgagggcccggaaacctggccctgtcttcttgacgagcattcctaggggtctttcccctctcgccaaaggaatgcaaggtctgttgaatgtcgtgaaggaagcagttcctctggaagcttcttgaagacaaacaacgtctgtagcgaccctttgcaggcagcggaaccccccacctggcgacaggtgcctctgcggccaaaagccacgtgtataagatacacctgcaaaggcggcacaaccccagtgccacgttgtgagttggatagttgtggaaagagtcaaatggctctcctcaagcgtattcaacaaggggctgaaggatgcccagaaggtaccccattgtatgggatctgatctggggcctcggtgcacatgctttacatgtgtttagtcgaggttaaaaaaacgtctaggccccccgaaccacggggacgtggttttcctttgaaaaacacgatgataagcttgccacaacccacaaggagacgaccttccatgggatcccatatgatcgaaacatacaaccaaacttctccccgatctgcggccactggactgcccatcagcatgaaaatttttatgtatttacttactgtttttcttatcacccagatgattgggtcagcactttttgctgtgtatcttcatagaaggttggacaagatagaagatgaaaggaatcttcatgaagattttgtattcatgaaaacgatacagagatgcaacacaggagaaagatccttatccttactgaactgtgaggagattaaaagccagtttgaaggctttgtgaaggatataatgttaaacaaagaggagacgaagaaagaaaacagctttgaaatgcaaaaaggtgatcagaatcctcaaattgcggcacatgtcataagtgaggccagcagtaaaacaacatctgtgttacagtgggctgaaaaaggatactacaccatgagcaacaacttggtaaccctggaaaatgggaaacagctgaccgttaaaagacaaggactctattatatctatgcccaagtcaccttctgttccaatcgggaagcttcgagtcaagctccatttatagccagcctctgcctaaagtcccccggtagattcgagagaatcttactcagagctgcaaatacccacagttccgccaaaccttgcgggcaacaatccattcacttgggaggagtatttgaattgcaaccaggtgcttcggtgtttgtcaatgtgactgatccaagccaagtgagccatggcactggcttcacgtcctttggcttactcaaactctga

SEQ ID NO: 6542 - protein, 486 aa, Artificial Sequence; identical to SEQ ID NO: 5601
  Description of Artificial Sequence: Synthetic Construct

SEQ ID NO: 6543 - DNA, 1458 bp, Artificial Sequence
  Description of Artificial Sequence: Synthetic Construct
atggccttaccagtgaccgccttgctcctgccgctggccttgctgctccacgccgccaggccggacatccagatgacacagactacatcctccctgtctgcctctctgggagacagagtcaccatcagttgcagggcaagtcaggacattagtaaatatttaaattggtatcagcagaaaccagatggaactgttaaactcctgatctaccatacatcaagattacactcaggagtcccatcaaggttcagtggcagtgggtctggaacagattattctctcaccattagcaacctggagcaagaagatattgccacttacttttgccaacagggtaatacgcttccgtacacgttcggaggggggaccaagctggagatcacaggtggcggtggctcgggcggtggtgggtcgggtggcggcggatctgaggtgaaactgcaggagtcaggacctggcctggtggcgccctcacagagcctgtccgtcacatgcactgtctcaggggtctcattacccgactatggtgtaagctggattcgccagcctccacgaaagggtctggagtggctgggagtaatatggggtagtgaaaccacatactataattcagctctcaaatccagactgaccatcatcaaggacaactccaagagccaagttttcttaaaaatgaacagtctgcaaactgatgacacagccatttactactgtgccaaacattattactacggtggtagctatgctatggactactggggccaaggaacctcagtcaccgtctcctcaaccacgacgccagcgccgcgaccaccaacaccggcgcccaccatcgcgtcgcagcccctgtccctgcgcccagaggcgtgccggccagcggcggggggcgcagtgcacacgagggggctggacttcgcctgtgatatctacatctgggcgcccttggccgggacttgtggggtccttctcctgtcactggttatcaccctttactgcaaacggggcagaaagaaactcctgtatatattcaaacaaccatttatgagaccagtacaaactactcaagaggaagatggctgtagctgccgatttccagaagaagaagaaggaggatgtgaactgagagtgaagttcagcaggagcgcagacgcccccgcgtacaagcagggccagaaccagctctataacgagctcaatctaggacgaagagaggagtacgatgttttggacaagagacgtggccgggaccctgagatggggggaaagccgagaaggaagaaccctcaggaaggcctgtacaatgaactgcagaaagataagatggcggaggcctacagtgagattgggatgaaaggcgagcgccggaggggcaaggggcacgatggcctttaccagggtctcagtacagccaccaaggacacctacgacgcccttcacatgcaggccctgccccctcgc

SEQ ID NO: 6544 - protein, 261 aa, Artificial Sequence; identical to SEQ ID NO: 3820
  Description of Artificial Sequence: Synthetic Construct

SEQ ID NO: 6545 - DNA, 786 bp, Artificial Sequence
  Description of Artificial Sequence: Synthetic Construct
atgatcgaaacatacaaccaaacttctccccgatctgcggccactggactgcccatcagcatgaaaatttttatgtatttacttactgtttttcttatcacccagatgattgggtcagcactttttgctgtgtatcttcatagaaggttggacaagatagaagatgaaaggaatcttcatgaagattttgtattcatgaaaacgatacagagatgcaacacaggagaaagatccttatccttactgaactgtgaggagattaaaagccagtttgaaggctttgtgaaggatataatgttaaacaaagaggagacgaagaaagaaaacagctttgaaatgcaaaaaggtgatcagaatcctcaaattgcggcacatgtcataagtgaggccagcagtaaaacaacatctgtgttacagtgggctgaaaaaggatactacaccatgagcaacaacttggtaaccctggaaaatgggaaacagctgaccgttaaaagacaaggactctattatatctatgcccaagtcaccttctgttccaatcgggaagcttcgagtcaagctccatttatagccagcctctgcctaaagtcccccggtagattcgagagaatcttactcagagctgcaaatacccacagttccgccaaaccttgcgggcaacaatccattcacttgggaggagtatttgaattgcaaccaggtgcttcggtgtttgtcaatgtgactgatccaagccaagtgagccatggcactggcttcacgtcctttggcttactcaaactctga

SEQ ID NO: 6546 - protein, 519 aa, Artificial Sequence
  Description of Artificial Sequence: Synthetic Construct
MSLALSLTADQMVSALLDAEPPILYSEYDPTRPFSEASMMGLLTNLADRELVHMINWAKRVPGFVDLTLHDQVHLLECAWMEILMIGLVWRSMEHPGKLLFAPNLLLDRDQGKCVEGGVEIFDMLLATSSRFRMMNLQGEEFVCLKSIILLNSGVYTFLSSTLKSLEEKDHIHRVLDKITDTLIHLMAKAGLTLQQQHQRLAQLLLILSHIRHMSNKRMEHLYSMKCKNVVPLSDLLLEMLDAHRLGGSGGGSGGGSGMIETYNQTSPRSAATGLPISMKIFMYLLTVFLITQMIGSALFAVYLHRRLDKIEDERNLHEDFVFMKTIQRCNTGERSLSLLNCEEIKSQFEGFVKDIMLNKEETKKENSFEMQKGDQNPQIAAHVISEASSKTTSVLQWAEKGYYTMSNNLVTLENGKQLTVKRQGLYYIYAQVTFCSNREASSQAPFIASLCLKSPGRFERILLRAANTHSSAKPCGQQSIHLGGVFELQPGASVFVNVTDPSQVSHGTGFTSFGLLKL

SEQ ID NO: 6547 - DNA, 1560 bp, Artificial Sequence
  Description of Artificial Sequence: Synthetic Construct
atgtcactggcgctcagccttactgccgaccaaatggtatcagctcttctggacgcagaacccccaattctttattccgagtacgaccccacacgcccgttcagtgaagcttccatgatgggcctccttacgaaccttgccgaccgggaactcgtgcacatgatcaattgggcgaagcgggtgccggggttcgtagatttgacacttcacgaccaagttcatctcttggaatgtgcttggatggagatattgatgatcggactcgtgtggaggtcaatggagcatcctggtaaacttcttttcgcacccaatctgctcttggatagagatcagggtaagtgcgtcgagggtggcgttgaaatcttcgacatgctccttgcgacatccagccgattccgaatgatgaatcttcaaggagaggaatttgtctgtcttaagagcattatactcctcaatagtggagtttacaccttcttgtcctctacactgaaatcacttgaggaaaaagatcacatacatagggtgttggataaaatcacggatacactcatacatctgatggcaaaagcaggattgaccctgcaacagcagcaccaacgactggcccaactgctgttgatccttagccatatcagacacatgtctaacaaaaggatggaacatttgtacagcatgaaatgtaagaacgtagtgccactgtccgatttgttgctggaaatgctggacgctcatcggctcggaggttctggaggtggaagtggaggtggatccggtatgatcgaaacatacaaccaaacttctccccgatctgcggccactggactgcccatcagcatgaaaatttttatgtatttacttactgtttttcttatcacccagatgattgggtcagcactttttgctgtgtatcttcatagaaggttggacaagatagaagatgaaaggaatcttcatgaagattttgtattcatgaaaacgatacagagatgcaacacaggagaaagatccttatccttactgaactgtgaggagattaaaagccagtttgaaggctttgtgaaggatataatgttaaacaaagaggagacgaagaaagaaaacagctttgaaatgcaaaaaggtgatcagaatcctcaaattgcggcacatgtcataagtgaggccagcagtaaaacaacatctgtgttacagtgggctgaaaaaggatactacaccatgagcaacaacttggtaaccctggaaaatgggaaacagctgaccgttaaaagacaaggactctattatatctatgcccaagtcaccttctgttccaatcgggaagcttcgagtcaagctccatttatagccagcctctgcctaaagtcccccggtagattcgagagaatcttactcagagctgcaaatacccacagttccgccaaaccttgcgggcaacaatccattcacttgggaggagtatttgaattgcaaccaggtgcttcggtgtttgtcaatgtgactgatccaagccaagtgagccatggcactggcttcacgtcctttggcttactcaaactctga

SEQ ID NO: 6548 - protein, 187 aa, Artificial Sequence
  Description of Artificial Sequence: Synthetic Destabilizing Domain (DD)
MVGSLNCIVAVSQNMGIGKNGDLPWPPLRNEFRYFERMTTTSSVEGKQNLVIMGKKTWFSIPEKNRPLKGRINLVLSRELKEPPQGAHFLSRSLDDALKLTEHPELANKVDMVWIVGGSSVIKEAMNHPGHLKLFVTRIMQDFESDTFFPEIDLEKYKLLPEYPGVLSDVQEEKGIKYKFEVYEKND

SEQ ID NO: 6549 - DNA, 561 bp, Artificial Sequence
  Description of Artificial Sequence: Synthetic Destabilizing Domain (DD)
atggttggttcgctaaactgcatcgtcgctgtgtcccagaacatgggcatcggcaagaacggggacctgccctggccaccgctcaggaatgaattcagatatttcgagagaatgaccacaacctcttcagtagaaggtaaacagaatctggtgattatgggtaagaagacctggttctccattcctgagaagaatcgacctttaaagggtagaattaatttagttctcagcagagaactcaaggaacctccacaaggggctcattttctttccagaagtctagatgatgccttaaaacttactgaacatccagaattagcaaataaagtagacatggtctggatagttggtggcagttctgttattaaggaagccatgaatcacccaggccatcttaaactatttgtgacaaggatcatgcaagactttgagagtgacacgttttttccagaaattgatttggagaaatataaacttctgccagaatacccaggtgttctctctgatgtccaggaggagaaaggcattaagtacaaatttgaagtatatgagaagaatgat

SEQ ID NO: 6550 - protein, 449 aa, Artificial Sequence
  Description of Artificial Sequence: Synthetic Construct
MVGSLNCIVAVSQNMGIGKNGDLPWPPLRNEFRYFERMTTTSSVEGKQNLVIMGKKTWFSIPEKNRPLKGRINLVLSRELKEPPQGAHFLSRSLDDALKLTEHPELANKVDMVWIVGGSSVIKEAMNHPGHLKLFVTRIMQDFESDTFFPEIDLEKYKLLPEYPGVLSDVQEEKGIKYKFEVYEKNDHMIETYNQTSPRSAATGLPISMKIFMYLLTVFLITQMIGSALFAVYLHRRLDKIEDERNLHEDFVFMKTIQRCNTGERSLSLLNCEEIKSQFEGFVKDIMLNKEETKKENSFEMQKGDQNPQIAAHVISEASSKTTSVLQWAEKGYYTMSNNLVTLENGKQLTVKRQGLYYIYAQVTFCSNREASSQAPFIASLCLKSPGRFERILLRAANTHSSAKPCGQQSIHLGGVFELQPGASVFVNVTDPSQVSHGTGFTSFGLLKL

SEQ ID NO: 6551 - DNA, 1350 bp, Artificial Sequence
  Description of Artificial Sequence: Synthetic Construct
atggttggttcgctaaactgcatcgtcgctgtgtcccagaacatgggcatcggcaagaacggggacctgccctggccaccgctcaggaatgaattcagatatttcgagagaatgaccacaacctcttcagtagaaggtaaacagaatctggtgattatgggtaagaagacctggttctccattcctgagaagaatcgacctttaaagggtagaattaatttagttctcagcagagaactcaaggaacctccacaaggggctcattttctttccagaagtctagatgatgccttaaaacttactgaacatccagaattagcaaataaagtagacatggtctggatagttggtggcagttctgttattaaggaagccatgaatcacccaggccatcttaaactatttgtgacaaggatcatgcaagactttgagagtgacacgttttttccagaaattgatttggagaaatataaacttctgccagaatacccaggtgttctctctgatgtccaggaggagaaaggcattaagtacaaatttgaagtatatgagaagaatgatcatatgatcgaaacatacaaccaaacttctccccgatctgcggccactggactgcccatcagcatgaaaatttttatgtatttacttactgtttttcttatcacccagatgattgggtcagcactttttgctgtgtatcttcatagaaggttggacaagatagaagatgaaaggaatcttcatgaagattttgtattcatgaaaacgatacagagatgcaacacaggagaaagatccttatccttactgaactgtgaggagattaaaagccagtttgaaggctttgtgaaggatataatgttaaacaaagaggagacgaagaaagaaaacagctttgaaatgcaaaaaggtgatcagaatcctcaaattgcggcacatgtcataagtgaggccagcagtaaaacaacatctgtgttacagtgggctgaaaaaggatactacaccatgagcaacaacttggtaaccctggaaaatgggaaacagctgaccgttaaaagacaaggactctattatatctatgcccaagtcaccttctgttccaatcgggaagcttcgagtcaagctccatttatagccagcctctgcctaaagtcccccggtagattcgagagaatcttactcagagctgcaaatacccacagttccgccaaaccttgcgggcaacaatccattcacttgggaggagtatttgaattgcaaccaggtgcttcggtgtttgtcaatgtgactgatccaagccaagtgagccatggcactggcttcacgtcctttggcttactcaaactctga

SEQ ID NO: 6552 - protein, 186 aa, Artificial Sequence
  Description of Artificial Sequence: Synthetic Destabilizing Domain (DD)
VGSLNCIVAVSQNMGIGKNGDLPWPPLRNEFRYFQRMTTTSSVEGKQNLVIMGRKTWFSIPEKKRPLKGRINLVLSRELKEPPQGAHFLSRSLDDALKLTEQPELANKVDMVWIVGGSSVIKEAMNHPGHLKLFVTRIMQDFESDTFFPEIDLEKYKLLPEYPGVLSDVQEEKGIKYKFEVYEKND

SEQ ID NO: 6553 - DNA, 558 bp, Artificial Sequence
  Description of Artificial Sequence: Synthetic Destabilizing Domain (DD)
gttggttcgctaaactgcatcgtcgctgtgtcccagaacatgggcatcggcaagaacggggacctgccctggccaccgctcaggaatgaattcagatatttccagagaatgaccacaacctcttcagtagaaggtaaacagaatctggtgattatgggtaggaagacctggttctccattcctgagaagaaacgacctttaaagggtagaattaatttagttctcagcagagaactcaaggaacctccacaaggagctcattttctttccagaagtctagatgatgccttaaaacttactgaacaaccagaattagcaaataaagtagacatggtctggatagttggtggcagttctgttattaaggaagccatgaatcacccaggccatcttaaactatttgtgacaaggatcatgcaagactttgaaagtgacacgttttttccagaaattgatttggagaaatataaacttctgccagaatacccaggtgttctctctgatgtccaggaggagaaaggcattaagtacaaatttgaagtatatgagaagaatgat

SEQ ID NO: 6554 - protein, 158 aa, Artificial Sequence
  Description of Artificial Sequence: Synthetic Destabilizing Domain (DD)
ISLIAALAVDRVIGMENAMPWNLPADLAWFKRNTLNKPVIMGRHTWESIGRPLPGRKNIILSSQPGTDDRVTWVKSVDEAIAACGDVPEIMVIGGGRVAEQFLPKAQKLYLTHIDAEVEGDTHFPDYEPDDWESVFSEFHDADAQNSHSYCFEILERR

SEQ ID NO: 6555 - DNA, 474 bp, Artificial Sequence
  Description of Artificial Sequence: Synthetic Destabilizing Domain (DD)
atctcacttatcgcagccttggcagttgatcgtgtgatcggcatggaaaatgcgatgccatggaatcttccggccgacctcgcttggttcaaacgcaacaccctgaacaaacccgttattatgggccgacatacatgggaaagtatcggcaggccattgcccggtcggaaaaacataatcctttcctcccagccgggcacggacgatagagtgacttgggtcaaatcagttgacgaggccattgctgcctgcggcgatgtacccgagattatggttatcggaggtggccgagttgccgagcagtttctgcccaaagcgcagaagttgtaccttactcatatagatgcagaggtagagggcgacacgcatttccccgactacgaaccggatgattgggaatccgtattttccgaattccacgacgcggatgcccaaaacagtcactcttactgttttgaaattcttgagcgacgc

SEQ ID NO: 6556 - protein, 158 aa, Artificial Sequence
  Description of Artificial Sequence: Synthetic Destabilizing Domain (DD)
ISLIAALAVDRVIGMENAMPWNLPADLAWFKRNTLNKPVIMGRHTWESIGRPLPGRKNIILSSQPGTDDRVTWVKSVDEAIAACGDVPEIMVIGGGRVCEQFLPKAQKLYLTHIDAEVEGDTHFPDYEPDDWESVFSEFHDADAQNSHSYCFEILERR

SEQ ID NO: 6557 - DNA, 474 bp, Artificial Sequence
  Description of Artificial Sequence: Synthetic Destabilizing Domain (DD)
atctcacttatcgcagccttggcagttgatcgtgtgatcggcatggaaaatgcgatgccatggaatcttccggccgacctcgcttggttcaaacgcaacaccctgaacaaacccgttattatgggccgacatacatgggaaagtatcggcaggccattgcccggtcggaaaaacataatcctttcctcccagccgggcacggacgatagagtgacttgggtcaaatcagttgacgaggccattgctgcctgcggcgatgtacccgagattatggttatcggaggtggccgagtttgcgagcagtttctgcccaaagcgcagaagttgtaccttactcatatagatgcagaggtagagggcgacacgcatttccccgactacgaaccggatgattgggaatccgtattttccgaattccacgacgcggatgcccaaaacagtcactcttactgttttgaaattcttgagcgacgc

SEQ ID NO: 6558 - protein, 158 aa, Artificial Sequence
  Description of Artificial Sequence: Synthetic Destabilizing Domain (DD)
ISLIAALAVDRVIGMENAMPWNLPADLAWFKRNTLNKPVIMGRHTWESIGRPLPGRKNIILSSQPGTDDRVTWVKSVDEAIAACGDVPEIMVIGGGRVDEQFLPKAQKLYLTHIDAEVEGDTHFPDYEPDDWESVFSEFHDADAQNSHSYCFEILERR

SEQ ID NO: 6559 - DNA, 474 bp, Artificial Sequence
  Description of Artificial Sequence: Synthetic Destabilizing Domain (DD)
atctcacttatcgcagccttggcagttgatcgtgtgatcggcatggaaaatgcgatgccatggaatcttccggccgacctcgcttggttcaaacgcaacaccctgaacaaacccgttattatgggccgacatacatgggaaagtatcggcaggccattgcccggtcggaaaaacataatcctttcctcccagccgggcacggacgatagagtgacttgggtcaaatcagttgacgaggccattgctgcctgcggcgatgtacccgagattatggttatcggaggtggccgagttgatgagcagtttctgcccaaagcgcagaagttgtaccttactcatatagatgcagaggtagagggcgacacgcatttccccgactacgaaccggatgattgggaatccgtattttccgaattccacgacgcggatgcccaaaacagtcactcttactgttttgaaattcttgagcgacgc

SEQ ID NO: 6560 - protein, 158 aa, Artificial Sequence
  Description of Artificial Sequence: Synthetic Destabilizing Domain (DD)
ISLIAALAVDRVIGMENAMPWNLPADLAWFKRNTLNKPVIMGRHTWESIGRPLPGRKNIILSSQPGTDDRVTWVKSVDEAIAACGDVPEIMVIGGGRVEEQFLPKAQKLYLTHIDAEVEGDTHFPDYEPDDWESVFSEFHDADAQNSHSYCFEILERR

SEQ ID NO: 6561 - DNA, 474 bp, Artificial Sequence
  Description of Artificial Sequence: Synthetic Destabilizing Domain (DD)
atctcacttatcgcagccttggcagttgatcgtgtgatcggcatggaaaatgcgatgccatggaatcttccggccgacctcgcttggttcaaacgcaacaccctgaacaaacccgttattatgggccgacatacatgggaaagtatcggcaggccattgcccggtcggaaaaacataatcctttcctcccagccgggcacggacgatagagtgacttgggtcaaatcagttgacgaggccattgctgcctgcggcgatgtacccgagattatggttatcggaggtggccgagttgaagagcagtttctgcccaaagcgcagaagttgtaccttactcatatagatgcagaggtagagggcgacacgcatttccccgactacgaaccggatgattgggaatccgtattttccgaattccacgacgcggatgcccaaaacagtcactcttactgttttgaaattcttgagcgacgc

SEQ ID NO: 6562 - protein, 158 aa, Artificial Sequence
  Description of Artificial Sequence: Synthetic Destabilizing Domain (DD)
ISLIAALAVDRVIGMENAMPWNLPADLAWFKRNTLNKPVIMGRHTWESIGRPLPGRKNIILSSQPGTDDRVTWVKSVDEAIAACGDVPEIMVIGGGRVFEQFLPKAQKLYLTHIDAEVEGDTHFPDYEPDDWESVFSEFHDADAQNSHSYCFEILERR

SEQ ID NO: 6563 - DNA, 474 bp, Artificial Sequence
  Description of Artificial Sequence: Synthetic Destabilizing Domain (DD)
atctcacttatcgcagccttggcagttgatcgtgtgatcggcatggaaaatgcgatgccatggaatcttccggccgacctcgcttggttcaaacgcaacaccctgaacaaacccgttattatgggccgacatacatgggaaagtatcggcaggccattgcccggtcggaaaaacataatcctttcctcccagccgggcacggacgatagagtgacttgggtcaaatcagttgacgaggccattgctgcctgcggcgatgtacccgagattatggttatcggaggtggccgagtttttgagcagtttctgcccaaagcgcagaagttgtaccttactcatatagatgcagaggtagagggcgacacgcatttccccgactacgaaccggatgattgggaatccgtattttccgaattccacgacgcggatgcccaaaacagtcactcttactgttttgaaattcttgagcgacgc

SEQ ID NO: 6564 - protein, 158 aa, Artificial Sequence
  Description of Artificial Sequence: Synthetic Destabilizing Domain (DD)
ISLIAALAVDRVIGMENAMPWNLPADLAWFKRNTLNKPVIMGRHTWESIGRPLPGRKNIILSSQPGTDDRVTWVKSVDEAIAACGDVPEIMVIGGGRVGEQFLPKAQKLYLTHIDAEVEGDTHFPDYEPDDWESVFSEFHDADAQNSHSYCFEILERR

SEQ ID NO: 6565 - DNA, 474 bp, Artificial Sequence
  Description of Artificial Sequence: Synthetic Destabilizing Domain (DD)
atctcacttatcgcagccttggcagttgatcgtgtgatcggcatggaaaatgcgatgccatggaatcttccggccgacctcgcttggttcaaacgcaacaccctgaacaaacccgttattatgggccgacatacatgggaaagtatcggcaggccattgcccggtcggaaaaacataatcctttcctcccagccgggcacggacgatagagtgacttgggtcaaatcagttgacgaggccattgctgcctgcggcgatgtacccgagattatggttatcggaggtggccgagttggcgagcagtttctgcccaaagcgcagaagttgtaccttactcatatagatgcagaggtagagggcgacacgcatttccccgactacgaaccggatgattgggaatccgtattttccgaattccacgacgcggatgcccaaaacagtcactcttactgttttgaaattcttgagcgacgc

SEQ ID NO: 6566 - protein, 158 aa, Artificial Sequence
  Description of Artificial Sequence: Synthetic Destabilizing Domain (DD)
ISLIAALAVDRVIGMENAMPWNLPADLAWFKRNTLNKPVIMGRHTWESIGRPLPGRKNIILSSQPGTDDRVTWVKSVDEAIAACGDVPEIMVIGGGRVHEQFLPKAQKLYLTHIDAEVEGDTHFPDYEPDDWESVFSEFHDADAQNSHSYCFEILERR

SEQ ID NO: 6567 - DNA, 474 bp, Artificial Sequence
  Description of Artificial Sequence: Synthetic Destabilizing Domain (DD)
atctcacttatcgcagccttggcagttgatcgtgtgatcggcatggaaaatgcgatgccatggaatcttccggccgacctcgcttggttcaaacgcaacaccctgaacaaacccgttattatgggccgacatacatgggaaagtatcggcaggccattgcccggtcggaaaaacataatcctttcctcccagccgggcacggacgatagagtgacttgggtcaaatcagttgacgaggccattgctgcctgcggcgatgtacccgagattatggttatcggaggtggccgagttcatgagcagtttctgcccaaagcgcagaagttgtaccttactcatatagatgcagaggtagagggcgacacgcatttccccgactacgaaccggatgattgggaatccgtattttccgaattccacgacgcggatgcccaaaacagtcactcttactgttttgaaattcttgagcgacgc

SEQ ID NO: 6568 - protein, 158 aa, Artificial Sequence
  Description of Artificial Sequence: Synthetic Destabilizing Domain (DD)
ISLIAALAVDRVIGMENAMPWNLPADLAWFKRNTLNKPVIMGRHTWESIGRPLPGRKNIILSSQPGTDDRVTWVKSVDEAIAACGDVPEIMVIGGGRVIEQFLPKAQKLYLTHIDAEVEGDTHFPDYEPDDWESVFSEFHDADAQNSHSYCFEILERR

SEQ ID NO: 6569 - DNA, 474 bp, Artificial Sequence
  Description of Artificial Sequence: Synthetic Destabilizing Domain (DD)
atctcacttatcgcagccttggcagttgatcgtgtgatcggcatggaaaatgcgatgccatggaatcttccggccgacctcgcttggttcaaacgcaacaccctgaacaaacccgttattatgggccgacatacatgggaaagtatcggcaggccattgcccggtcggaaaaacataatcctttcctcccagccgggcacggacgatagagtgacttgggtcaaatcagttgacgaggccattgctgcctgcggcgatgtacccgagattatggttatcggaggtggccgagttattgagcagtttctgcccaaagcgcagaagttgtaccttactcatatagatgcagaggtagagggcgacacgcatttccccgactacgaaccggatgattgggaatccgtattttccgaattccacgacgcggatgcccaaaacagtcactcttactgttttgaaattcttgagcgacgc

SEQ ID NO: 6570 - protein, 158 aa, Artificial Sequence
  Description of Artificial Sequence: Synthetic Destabilizing Domain (DD)
ISLIAALAVDRVIGMENAMPWNLPADLAWFKRNTLNKPVIMGRHTWESIGRPLPGRKNIILSSQPGTDDRVTWVKSVDEAIAACGDVPEIMVIGGGRVKEQFLPKAQKLYLTHIDAEVEGDTHFPDYEPDDWESVFSEFHDADAQNSHSYCFEILERR

SEQ ID NO: 6571 - DNA, 474 bp, Artificial Sequence
  Description of Artificial Sequence: Synthetic Destabilizing Domain (DD)
atctcacttatcgcagccttggcagttgatcgtgtgatcggcatggaaaatgcgatgccatggaatcttccggccgacctcgcttggttcaaacgcaacaccctgaacaaacccgttattatgggccgacatacatgggaaagtatcggcaggccattgcccggtcggaaaaacataatcctttcctcccagccgggcacggacgatagagtgacttgggtcaaatcagttgacgaggccattgctgcctgcggcgatgtacccgagattatggttatcggaggtggccgagttaaagagcagtttctgcccaaagcgcagaagttgtaccttactcatatagatgcagaggtagagggcgacacgcatttccccgactacgaaccggatgattgggaatccgtattttccgaattccacgacgcggatgcccaaaacagtcactcttactgttttgaaattcttgagcgacgc

SEQ ID NO: 6572 - protein, 158 aa, Artificial Sequence
  Description of Artificial Sequence: Synthetic Destabilizing Domain (DD)
ISLIAALAVDRVIGMENAMPWNLPADLAWFKRNTLNKPVIMGRHTWESIGRPLPGRKNIILSSQPGTDDRVTWVKSVDEAIAACGDVPEIMVIGGGRVLEQFLPKAQKLYLTHIDAEVEGDTHFPDYEPDDWESVFSEFHDADAQNSHSYCFEILERR

SEQ ID NO: 6573 - DNA, 474 bp, Artificial Sequence
  Description of Artificial Sequence: Synthetic Destabilizing Domain (DD)
atctcacttatcgcagccttggcagttgatcgtgtgatcggcatggaaaatgcgatgccatggaatcttccggccgacctcgcttggttcaaacgcaacaccctgaacaaacccgttattatgggccgacatacatgggaaagtatcggcaggccattgcccggtcggaaaaacataatcctttcctcccagccgggcacggacgatagagtgacttgggtcaaatcagttgacgaggccattgctgcctgcggcgatgtacccgagattatggttatcggaggtggccgagttcttgagcagtttctgcccaaagcgcagaagttgtaccttactcatatagatgcagaggtagagggcgacacgcatttccccgactacgaaccggatgattgggaatccgtattttccgaattccacgacgcggatgcccaaaacagtcactcttactgttttgaaattcttgagcgacgc

SEQ ID NO: 6574 - protein, 158 aa, Artificial Sequence
  Description of Artificial Sequence: Synthetic Destabilizing Domain (DD)
ISLIAALAVDRVIGMENAMPWNLPADLAWFKRNTLNKPVIMGRHTWESIGRPLPGRKNIILSSQPGTDDRVTWVKSVDEAIAACGDVPEIMVIGGGRVMEQFLPKAQKLYLTHIDAEVEGDTHFPDYEPDDWESVFSEFHDADAQNSHSYCFEILERR

SEQ ID NO: 6575 - DNA, 474 bp, Artificial Sequence
  Description of Artificial Sequence: Synthetic Destabilizing Domain (DD)
atctcacttatcgcagccttggcagttgatcgtgtgatcggcatggaaaatgcgatgccatggaatcttccggccgacctcgcttggttcaaacgcaacaccctgaacaaacccgttattatgggccgacatacatgggaaagtatcggcaggccattgcccggtcggaaaaacataatcctttcctcccagccgggcacggacgatagagtgacttgggtcaaatcagttgacgaggccattgctgcctgcggcgatgtacccgagattatggttatcggaggtggccgagttatggagcagtttctgcccaaagcgcagaagttgtaccttactcatatagatgcagaggtagagggcgacacgcatttccccgactacgaaccggatgattgggaatccgtattttccgaattccacgacgcggatgcccaaaacagtcactcttactgttttgaaattcttgagcgacgc

SEQ ID NO: 6576 - protein, 158 aa, Artificial Sequence
  Description of Artificial Sequence: Synthetic Destabilizing Domain (DD)
ISLIAALAVDRVIGMENAMPWNLPADLAWFKRNTLNKPVIMGRHTWESIGRPLPGRKNIILSSQPGTDDRVTWVKSVDEAIAACGDVPEIMVIGGGRVNEQFLPKAQKLYLTHIDAEVEGDTHFPDYEPDDWESVFSEFHDADAQNSHSYCFEILERR

SEQ ID NO: 6577 - DNA, 474 bp, Artificial Sequence
  Description of Artificial Sequence: Synthetic Destabilizing Domain (DD)
atctcacttatcgcagccttggcagttgatcgtgtgatcggcatggaaaatgcgatgccatggaatcttccggccgacctcgcttggttcaaacgcaacaccctgaacaaacccgttattatgggccgacatacatgggaaagtatcggcaggccattgcccggtcggaaaaacataatcctttcctcccagccgggcacggacgatagagtgacttgggtcaaatcagttgacgaggccattgctgcctgcggcgatgtacccgagattatggttatcggaggtggccgagttaacgagcagtttctgcccaaagcgcagaagttgtaccttactcatatagatgcagaggtagagggcgacacgcatttccccgactacgaaccggatgattgggaatccgtattttccgaattccacgacgcggatgcccaaaacagtcactcttactgttttgaaattcttgagcgacgc

SEQ ID NO: 6578 - protein, 158 aa, Artificial Sequence
  Description of Artificial Sequence: Synthetic Destabilizing Domain (DD)
ISLIAALAVDRVIGMENAMPWNLPADLAWFKRNTLNKPVIMGRHTWESIGRPLPGRKNIILSSQPGTDDRVTWVKSVDEAIAACGDVPEIMVIGGGRVPEQFLPKAQKLYLTHIDAEVEGDTHFPDYEPDDWESVFSEFHDADAQNSHSYCFEILERR

SEQ ID NO: 6579 - DNA, 474 bp, Artificial Sequence
  Description of Artificial Sequence: Synthetic Destabilizing Domain (DD)
atctcacttatcgcagccttggcagttgatcgtgtgatcggcatggaaaatgcgatgccatggaatcttccggccgacctcgcttggttcaaacgcaacaccctgaacaaacccgttattatgggccgacatacatgggaaagtatcggcaggccattgcccggtcggaaaaacataatcctttcctcccagccgggcacggacgatagagtgacttgggtcaaatcagttgacgaggccattgctgcctgcggcgatgtacccgagattatggttatcggaggtggccgagttcccgagcagtttctgcccaaagcgcagaagttgtaccttactcatatagatgcagaggtagagggcgacacgcatttccccgactacgaaccggatgattgggaatccgtattttccgaattccacgacgcggatgcccaaaacagtcactcttactgttttgaaattcttgagcgacgc

SEQ ID NO: 6580 - protein, 158 aa, Artificial Sequence
  Description of Artificial Sequence: Synthetic Destabilizing Domain (DD)
ISLIAALAVDRVIGMENAMPWNLPADLAWFKRNTLNKPVIMGRHTWESIGRPLPGRKNIILSSQPGTDDRVTWVKSVDEAIAACGDVPEIMVIGGGRVQEQFLPKAQKLYLTHIDAEVEGDTHFPDYEPDDWESVFSEFHDADAQNSHSYCFEILERR

SEQ ID NO: 6581 - DNA, 474 bp, Artificial Sequence
  Description of Artificial Sequence: Synthetic Destabilizing Domain (DD)
atctcacttatcgcagccttggcagttgatcgtgtgatcggcatggaaaatgcgatgccatggaatcttccggccgacctcgcttggttcaaacgcaacaccctgaacaaacccgttattatgggccgacatacatgggaaagtatcggcaggccattgcccggtcggaaaaacataatcctttcctcccagccgggcacggacgatagagtgacttgggtcaaatcagttgacgaggccattgctgcctgcggcgatgtacccgagattatggttatcggaggtggccgagttcaagagcagtttctgcccaaagcgcagaagttgtaccttactcatatagatgcagaggtagagggcgacacgcatttccccgactacgaaccggatgattgggaatccgtattttccgaattccacgacgcggatgcccaaaacagtcactcttactgttttgaaattcttgagcgacgc

SEQ ID NO: 6582 - protein, 158 aa, Artificial Sequence
  Description of Artificial Sequence: Synthetic Destabilizing Domain (DD)
ISLIAALAVDRVIGMENAMPWNLPADLAWFKRNTLNKPVIMGRHTWESIGRPLPGRKNIILSSQPGTDDRVTWVKSVDEAIAACGDVPEIMVIGGGRVREQFLPKAQKLYLTHIDAEVEGDTHFPDYEPDDWESVFSEFHDADAQNSHSYCFEILERR

SEQ ID NO: 6583 - DNA, 474 bp, Artificial Sequence
  Description of Artificial Sequence: Synthetic Destabilizing Domain (DD)
atctcacttatcgcagccttggcagttgatcgtgtgatcggcatggaaaatgcgatgccatggaatcttccggccgacctcgcttggttcaaacgcaacaccctgaacaaacccgttattatgggccgacatacatgggaaagtatcggcaggccattgcccggtcggaaaaacataatcctttcctcccagccgggcacggacgatagagtgacttgggtcaaatcagttgacgaggccattgctgcctgcggcgatgtacccgagattatggttatcggaggtggccgagttagagagcagtttctgcccaaagcgcagaagttgtaccttactcatatagatgcagaggtagagggcgacacgcatttccccgactacgaaccggatgattgggaatccgtattttccgaattccacgacgcggatgcccaaaacagtcactcttactgttttgaaattcttgagcgacgc

SEQ ID NO: 6584 - protein, 158 aa, Artificial Sequence
  Description of Artificial Sequence: Synthetic Destabilizing Domain (DD)
ISLIAALAVDRVIGMENAMPWNLPADLAWFKRNTLNKPVIMGRHTWESIGRPLPGRKNIILSSQPGTDDRVTWVKSVDEAIAACGDVPEIMVIGGGRVSEQFLPKAQKLYLTHIDAEVEGDTHFPDYEPDDWESVFSEFHDADAQNSHSYCFEILERR

SEQ ID NO: 6585 - DNA, 474 bp, Artificial Sequence
  Description of Artificial Sequence: Synthetic Destabilizing Domain (DD)
atctcacttatcgcagccttggcagttgatcgtgtgatcggcatggaaaatgcgatgccatggaatcttccggccgacctcgcttggttcaaacgcaacaccctgaacaaacccgttattatgggccgacatacatgggaaagtatcggcaggccattgcccggtcggaaaaacataatcctttcctcccagccgggcacggacgatagagtgacttgggtcaaatcagttgacgaggccattgctgcctgcggcgatgtacccgagattatggttatcggaggtggccgagtttccgagcagtttctgcccaaagcgcagaagttgtaccttactcatatagatgcagaggtagagggcgacacgcatttccccgactacgaaccggatgattgggaatccgtattttccgaattccacgacgcggatgcccaaaacagtcactcttactgttttgaaattcttgagcgacgc

SEQ ID NO: 6586 - protein, 158 aa, Artificial Sequence
  Description of Artificial Sequence: Synthetic Destabilizing Domain (DD)
ISLIAALAVDRVIGMENAMPWNLPADLAWFKRNTLNKPVIMGRHTWESIGRPLPGRKNIILSSQPGTDDRVTWVKSVDEAIAACGDVPEIMVIGGGRVTEQFLPKAQKLYLTHIDAEVEGDTHFPDYEPDDWESVFSEFHDADAQNSHSYCFEILERR

SEQ ID NO: 6587 - DNA, 474 bp, Artificial Sequence
  Description of Artificial Sequence: Synthetic Destabilizing Domain (DD)
atctcacttatcgcagccttggcagttgatcgtgtgatcggcatggaaaatgcgatgccatggaatcttccggccgacctcgcttggttcaaacgcaacaccctgaacaaacccgttattatgggccgacatacatgggaaagtatcggcaggccattgcccggtcggaaaaacataatcctttcctcccagccgggcacggacgatagagtgacttgggtcaaatcagttgacgaggccattgctgcctgcggcgatgtacccgagattatggttatcggaggtggccgagttaccgagcagtttctgcccaaagcgcagaagttgtaccttactcatatagatgcagaggtagagggcgacacgcatttccccgactacgaaccggatgattgggaatccgtattttccgaattccacgacgcggatgcccaaaacagtcactcttactgttttgaaattcttgagcgacgc

SEQ ID NO: 6588 - protein, 158 aa, Artificial Sequence
  Description of Artificial Sequence: Synthetic Destabilizing Domain (DD)
ISLIAALAVDRVIGMENAMPWNLPADLAWFKRNTLNKPVIMGRHTWESIGRPLPGRKNIILSSQPGTDDRVTWVKSVDEAIAACGDVPEIMVIGGGRVVEQFLPKAQKLYLTHIDAEVEGDTHFPDYEPDDWESVFSEFHDADAQNSHSYCFEILERR

SEQ ID NO: 6589 - DNA, 474 bp, Artificial Sequence
  Description of Artificial Sequence: Synthetic Destabilizing Domain (DD)
atctcacttatcgcagccttggcagttgatcgtgtgatcggcatggaaaatgcgatgccatggaatcttccggccgacctcgcttggttcaaacgcaacaccctgaacaaacccgttattatgggccgacatacatgggaaagtatcggcaggccattgcccggtcggaaaaacataatcctttcctcccagccgggcacggacgatagagtgacttgggtcaaatcagttgacgaggccattgctgcctgcggcgatgtacccgagattatggttatcggaggtggccgagttgtggagcagtttctgcccaaagcgcagaagttgtaccttactcatatagatgcagaggtagagggcgacacgcatttccccgactacgaaccggatgattgggaatccgtattttccgaattccacgacgcggatgcccaaaacagtcactcttactgttttgaaattcttgagcgacgc

SEQ ID NO: 6590 - protein, 158 aa, Artificial Sequence
  Description of Artificial Sequence: Synthetic Destabilizing Domain (DD)
ISLIAALAVDRVIGMENAMPWNLPADLAWFKRNTLNKPVIMGRHTWESIGRPLPGRKNIILSSQPGTDDRVTWVKSVDEAIAACGDVPEIMVIGGGRVWEQFLPKAQKLYLTHIDAEVEGDTHFPDYEPDDWESVFSEFHDADAQNSHSYCFEILERR

SEQ ID NO: 6591 - DNA, 474 bp, Artificial Sequence
  Description of Artificial Sequence: Synthetic Destabilizing Domain (DD)
atctcacttatcgcagccttggcagttgatcgtgtgatcggcatggaaaatgcgatgccatggaatcttccggccgacctcgcttggttcaaacgcaacaccctgaacaaacccgttattatgggccgacatacatgggaaagtatcggcaggccattgcccggtcggaaaaacataatcctttcctcccagccgggcacggacgatagagtgacttgggtcaaatcagttgacgaggccattgctgcctgcggcgatgtacccgagattatggttatcggaggtggccgagtttgggagcagtttctgcccaaagcgcagaagttgtaccttactcatatagatgcagaggtagagggcgacacgcatttccccgactacgaaccggatgattgggaatccgtattttccgaattccacgacgcggatgcccaaaacagtcactcttactgttttgaaattcttgagcgacgc

SEQ ID NO: 6592 - protein, 158 aa, Artificial Sequence
  Description of Artificial Sequence: Synthetic Destabilizing Domain (DD)
ISLIAALAVDRVIGMENAMPWNLPADLAWFKRNTLNKPVIMGRHTWESIGRPLPGRKNIILSSQPGTDDRVTWVKSVDEAIAACGDVPEIMVIGGGRVYEQFLPKAQKLYLTHIDAEVEGDTHFPDYEPDDWESVFSEFHDADAQNSHSYCFEILERR

SEQ ID NO: 6593 - DNA, 474 bp, Artificial Sequence
  Description of Artificial Sequence: Synthetic Destabilizing Domain (DD)
atctcacttatcgcagccttggcagttgatcgtgtgatcggcatggaaaatgcgatgccatggaatcttccggccgacctcgcttggttcaaacgcaacaccctgaacaaacccgttattatgggccgacatacatgggaaagtatcggcaggccattgcccggtcggaaaaacataatcctttcctcccagccgggcacggacgatagagtgacttgggtcaaatcagttgacgaggccattgctgcctgcggcgatgtacccgagattatggttatcggaggtggccgagtttatgagcagtttctgcccaaagcgcagaagttgtaccttactcatatagatgcagaggtagagggcgacacgcatttccccgactacgaaccggatgattgggaatccgtattttccgaattccacgacgcggatgcccaaaacagtcactcttactgttttgaaattcttgagcgacgc

SEQ ID NO: 6594 - DNA, 36 bp, Artificial Sequence
  Description of Artificial Sequence: Synthetic Linker
ggaggatccggaggtggaagtggaggtggatctggt

SEQ ID NO: 6595 - DNA, 36 bp, Artificial Sequence
  Description of Artificial Sequence: Synthetic Linker
ggaggatccggaggtggaagtggaggtggatcaggt

SEQ ID NO: 6596 - DNA, 36 bp, Artificial Sequence
  Description of Artificial Sequence: Synthetic Linker
ggtggatccggaggtggaagtggaggtggatctggt

SEQ ID NO: 6597 - DNA, 36 bp, Artificial Sequence
  Description of Artificial Sequence: Synthetic Linker
ggaggttctggtggtggtagtggaggaggatcaggt

SEQ ID NO: 6598 - protein, 261 aa, Artificial Sequence
  Description of Artificial Sequence: Synthetic Payload sequence
MIETYNQTSPRSAATGLPISMKIFMYLLTVFLITQMIGSALFAVYLHRRLDKIEDERNLHEDFVFMKTIQRCNTGERSLSLLNCEEIKSQFEGFVKDIMLNKEETKKENSFEMQKGDQNPQIAAHVISEASSKTTSVLQWAEKGYYTMSNNLVTLENGKQLTVKRQGLYYIYAQVTFCSNREASSQAPFIASLCLKSPGRFERILLRAANTHSSAKPCGQQSIGLFGVFELQPGASVFVNVTDPSQVSHGTGFTSFGLLKL

SEQ ID NO: 6599 - DNA, 783 bp, Artificial Sequence
  Description of Artificial Sequence: Synthetic Payload sequence
atgatcgaaacatacaaccaaacttctccccgatctgcggccactggactgcccatcagcatgaaaatttttatgtatttacttactgtttttcttatcacccagatgattgggtcagcactttttgctgtgtatcttcatagaaggttggacaagatagaagatgaaaggaatcttcatgaagattttgtattcatgaaaacgatacagagatgcaacacaggagaaagatccttatccttactgaactgtgaggagattaaaagccagtttgaaggctttgtgaaggatataatgttaaacaaagaggagacgaagaaagaaaacagctttgaaatgcaaaaaggtgatcagaatcctcaaattgcggcacatgtcataagtgaggccagcagtaaaacaacatctgtgttacagtgggctgaaaaaggatactacaccatgagcaacaacttggtaaccctggaaaatgggaaacagctgaccgttaaaagacaaggactctattatatctatgcccaagtcaccttctgttccaatcgggaagcttcgagtcaagctccatttatagccagcctctgcctaaagtcccccggtagattcgagagaatcttactcagagctgcaaatacccacagttccgccaaaccttgcgggcaacaatccattggcttgttcggagtatttgaattgcaaccaggtgcttcggtgtttgtcaatgtgactgatccaagccaagtgagccatggcactggcttcacgtcctttggcttactcaaactc

SEQ ID NO: 6600 - protein, 261 aa, Artificial Sequence
  Description of Artificial Sequence: Synthetic Payload sequence
MIETYNQTSPRSAATGLPISMKIFMYLLTVFLITQMIGSALFAVYLHRRLDKIEDERNLHEDFVFMKTIQRCNTGERSLSLLNCEEIKSQFEGFVKDIMLNKEETKKENSFEMQKGDQNPQIAAHVISEASSKTTSVLQWAEKGYYTMSNNLVTLENGKQLTVKRQGLYYIYAQVTFCSNREASSQAPFIASLCLKSPGRFERILLRAANTHSSAKPCGQQSIGLHGVFELQPGASVFVNVTDPSQVSHGTGFTSFGLLKL

SEQ ID NO: 6601 - DNA, 783 bp, Artificial Sequence
  Description of Artificial Sequence: Synthetic Payload sequence
atgatcgaaacatacaaccaaacttctccccgatctgcggccactggactgcccatcagcatgaaaatttttatgtatttacttactgtttttcttatcacccagatgattgggtcagcactttttgctgtgtatcttcatagaaggttggacaagatagaagatgaaaggaatcttcatgaagattttgtattcatgaaaacgatacagagatgcaacacaggagaaagatccttatccttactgaactgtgaggagattaaaagccagtttgaaggctttgtgaaggatataatgttaaacaaagaggagacgaagaaagaaaacagctttgaaatgcaaaaaggtgatcagaatcctcaaattgcggcacatgtcataagtgaggccagcagtaaaacaacatctgtgttacagtgggctgaaaaaggatactacaccatgagcaacaacttggtaaccctggaaaatgggaaacagctgaccgttaaaagacaaggactctattatatctatgcccaagtcaccttctgttccaatcgggaagcttcgagtcaagctccatttatagccagcctctgcctaaagtcccccggtagattcgagagaatcttactcagagctgcaaatacccacagttccgccaaaccttgcgggcaacaatccattggcttgcacggagtatttgaattgcaaccaggtgcttcggtgtttgtcaatgtgactgatccaagccaagtgagccatggcactggcttcacgtcctttggcttactcaaactc

SEQ ID NO: 6602 - protein, 261 aa, Artificial Sequence
  Description of Artificial Sequence: Synthetic Payload sequence
MIETYNQTSPRSAATGLPISMKIFMYLLTVFLITQMIGSALFAVYLHRRLDKIEDERNLHEDFVFMKTIQRCNTGERSLSLLNCEEIKSQFEGFVKDIMLNKEETKKENSFEMQKGDQNPQIAAHVISEASSKTTSVLQWAEKGYYTMSNNLVTLENGKQLTVKRQGLYYIGAQVTFCSNREASSQAPFIASLCLKSPGRFERILLRAANTHSSAKPCGQQSIHLFGVFELQPGASVFVNVTDPSQVSHGTGFTSFGLLKL

SEQ ID NO: 6603 - DNA, 783 bp, Artificial Sequence
  Description of Artificial Sequence: Synthetic Payload sequence
atgatcgaaacatacaaccaaacttctccccgatctgcggccactggactgcccatcagcatgaaaatttttatgtatttacttactgtttttcttatcacccagatgattgggtcagcactttttgctgtgtatcttcatagaaggttggacaagatagaagatgaaaggaatcttcatgaagattttgtattcatgaaaacgatacagagatgcaacacaggagaaagatccttatccttactgaactgtgaggagattaaaagccagtttgaaggctttgtgaaggatataatgttaaacaaagaggagacgaagaaagaaaacagctttgaaatgcaaaaaggtgatcagaatcctcaaattgcggcacatgtcataagtgaggccagcagtaaaacaacatctgtgttacagtgggctgaaaaaggatactacaccatgagcaacaacttggtaaccctggaaaatgggaaacagctgaccgttaaaagacaaggactctattatatcggtgcccaagtcaccttctgttccaatcgggaagcttcgagtcaagctccatttatagccagcctctgcctaaagtcccccggtagattcgagagaatcttactcagagctgcaaatacccacagttccgccaaaccttgcgggcaacaatccattcacttgtttggagtatttgaattgcaaccaggtgcttcggtgtttgtcaatgtgactgatccaagccaagtgagccatggcactggcttcacgtcctttggcttactcaaactc

SEQ ID NO: 6604 - protein, 261 aa, Artificial Sequence
  Description of Artificial Sequence: Synthetic Payload sequence
MIETYNQTSPRSAATGLPISMKIFMYLLTVFLITQMIGSALFAVYLHRRLDKIEDERNLHEDFVFMKTIQRCNTGERSLSLLNCEEIKSQFEGFVKDIMLNKEETKKENSFEMQKGDQNPQIAAHVISEASSKTTSVLQWAEKGYYTMSNNLVTLENGKQLTVKRQGLYGIYAQVTFCSNREASSQAPFIASLCLKSPGRFERILLRAANTHSSAKPCGQQSIGLWGVFELQPGASVFVNVTDPSQVSHGTGFTSFGLLKL

SEQ ID NO: 6605 - DNA, 783 bp, Artificial Sequence
  Description of Artificial Sequence: Synthetic Payload sequence
atgatcgaaacatacaaccaaacttctccccgatctgcggccactggactgcccatcagcatgaaaatttttatgtatttacttactgtttttcttatcacccagatgattgggtcagcactttttgctgtgtatcttcatagaaggttggacaagatagaagatgaaaggaatcttcatgaagattttgtattcatgaaaacgatacagagatgcaacacaggagaaagatccttatccttactgaactgtgaggagattaaaagccagtttgaaggctttgtgaaggatataatgttaaacaaagaggagacgaagaaagaaaacagctttgaaatgcaaaaaggtgatcagaatcctcaaattgcggcacatgtcataagtgaggccagcagtaaaacaacatctgtgttacagtgggctgaaaaaggatactacaccatgagcaacaacttggtaaccctggaaaatgggaaacagctgaccgttaaaagacaaggactctatggtatctatgcccaagtcaccttctgttccaatcgggaagcttcgagtcaagctccatttatagccagcctctgcctaaagtcccccggtagattcgagagaatcttactcagagctgcaaatacccacagttccgccaaaccttgcgggcaacaatccattggcttgtggggagtatttgaattgcaaccaggtgcttcggtgtttgtcaatgtgactgatccaagccaagtgagccatggcactggcttcacgtcctttggcttactcaaactc

SEQ ID NO: 6606 - protein, 261 aa, Artificial Sequence
  Description of Artificial Sequence: Synthetic Payload sequence
MIETYNQTSPRSAATGLPISMKIFMYLLTVFLITQMIGSALFAVYLHRRLDKIEDERNLHEDFVFMKTIQRCNTGERSLSLLNCEEIKSQFEGFVKDIMLNKEETKKENSFEMQKGDQNPQIAAGVISEASSKTTSVLQWAEKGYYTMSNNLVTLENGKQLTVKRQGLYYIYAQVTFCSNREASSQAPFIASLCLKSPGRFERILLRAANTHSSAKPCGQQSIHLGFVFELQPGASVFVNVTDPSQVSHGTGFTSFGLLKL

SEQ ID NO: 6607 - DNA, 783 bp, Artificial Sequence
  Description of Artificial Sequence: Synthetic Payload sequence
atgatcgaaacatacaaccaaacttctccccgatctgcggccactggactgcccatcagcatgaaaatttttatgtatttacttactgtttttcttatcacccagatgattgggtcagcactttttgctgtgtatcttcatagaaggttggacaagatagaagatgaaaggaatcttcatgaagattttgtattcatgaaaacgatacagagatgcaacacaggagaaagatccttatccttactgaactgtgaggagattaaaagccagtttgaaggctttgtgaaggatataatgttaaacaaagaggagacgaagaaagaaaacagctttgaaatgcaaaaaggtgatcagaatcctcaaattgcggcaggtgtcataagtgaggccagcagtaaaacaacatctgtgttacagtgggctgaaaaaggatactacaccatgagcaacaacttggtaaccctggaaaatgggaaacagctgaccgttaaaagacaaggactctattatatctatgcccaagtcaccttctgttccaatcgggaagcttcgagtcaagctccatttatagccagcctctgcctaaagtcccccggtagattcgagagaatcttactcagagctgcaaatacccacagttccgccaaaccttgcgggcaacaatccattcacttgggattcgtatttgaattgcaaccaggtgcttcggtgtttgtcaatgtgactgatccaagccaagtgagccatggcactggcttcacgtcctttggcttactcaaactc

SEQ ID NO: 6608 - protein, 6 aa, Artificial Sequence
  Description of Artificial Sequence: Synthetic peptide
NHRNRR

SEQ ID NO: 6609 - DNA, 18 bp, Artificial Sequence
  Description of Artificial Sequence: Synthetic oligonucleotide
aaccatagaaacaggcga

SEQ ID NO: 6610 - protein, 274 aa, Artificial Sequence
  Description of Artificial Sequence: Synthetic Construct
MGGSGGGSGGGSGMIETYNQTSPRSAATGLPISMKIFMYLLTVFLITQMIGSALFAVYLHRRLDKIEDERNLHEDFVFMKTIQRCNTGERSLSLLNCEEIKSQFEGFVKDIMLNKEETKKENSFEMQKGDQNPQIAAHVISEASSKTTSVLQWAEKGYYTMSNNLVTLENGKQLTVKRQGLYYIYAQVTFCSNREASSQAPFIASLCLKSPGRFERILLRAANTHSSAKPCGQQSIGLFGVFELQPGASVFVNVTDPSQVSHGTGFTSFGLLKL

SEQ ID NO: 6611 - DNA, 825 bp, Artificial Sequence
  Description of Artificial Sequence: Synthetic Construct
atgggaggatccggaggtggaagtggaggtggatcaggtatgatcgaaacatacaaccaaacttctccccgatctgcggccactggactgcccatcagcatgaaaatttttatgtatttacttactgtttttcttatcacccagatgattgggtcagcactttttgctgtgtatcttcatagaaggttggacaagatagaagatgaaaggaatcttcatgaagattttgtattcatgaaaacgatacagagatgcaacacaggagaaagatccttatccttactgaactgtgaggagattaaaagccagtttgaaggctttgtgaaggatataatgttaaacaaagaggagacgaagaaagaaaacagctttgaaatgcaaaaaggtgatcagaatcctcaaattgcggcacatgtcataagtgaggccagcagtaaaacaacatctgtgttacagtgggctgaaaaaggatactacaccatgagcaacaacttggtaaccctggaaaatgggaaacagctgaccgttaaaagacaaggactctattatatctatgcccaagtcaccttctgttccaatcgggaagcttcgagtcaagctccatttatagccagcctctgcctaaagtcccccggtagattcgagagaatcttactcagagctgcaaatacccacagttccgccaaaccttgcgggcaacaatccattggcttgttcggagtatttgaattgcaaccaggtgcttcggtgtttgtcaatgtgactgatccaagccaagtgagccatggcactggcttcacgtcctttggcttactcaaactctga

SEQ ID NO: 6612 - protein, 274 aa, Artificial Sequence
  Description of Artificial Sequence: Synthetic Construct
MGGSGGGSGGGSGMIETYNQTSPRSAATGLPISMKIFMYLLTVFLITQMIGSALFAVYLHRRLDKIEDERNLHEDFVFMKTIQRCNTGERSLSLLNCEEIKSQFEGFVKDIMLNKEETKKENSFEMQKGDQNPQIAAHVISEASSKTTSVLQWAEKGYYTMSNNLVTLENGKQLTVKRQGLYYIYAQVTFCSNREASSQAPFIASLCLKSPGRFERILLRAANTHSSAKPCGQQSIGLHGVFELQPGASVFVNVTDPSQVSHGTGFTSFGLLKL

SEQ ID NO: 6613 - DNA, 825 bp, Artificial Sequence
  Description of Artificial Sequence: Synthetic Construct
atgggaggatccggaggtggaagtggaggtggatcaggtatgatcgaaacatacaaccaaacttctccccgatctgcggccactggactgcccatcagcatgaaaatttttatgtatttacttactgtttttcttatcacccagatgattgggtcagcactttttgctgtgtatcttcatagaaggttggacaagatagaagatgaaaggaatcttcatgaagattttgtattcatgaaaacgatacagagatgcaacacaggagaaagatccttatccttactgaactgtgaggagattaaaagccagtttgaaggctttgtgaaggatataatgttaaacaaagaggagacgaagaaagaaaacagctttgaaatgcaaaaaggtgatcagaatcctcaaattgcggcacatgtcataagtgaggccagcagtaaaacaacatctgtgttacagtgggctgaaaaaggatactacaccatgagcaacaacttggtaaccctggaaaatgggaaacagctgaccgttaaaagacaaggactctattatatctatgcccaagtcaccttctgttccaatcgggaagcttcgagtcaagctccatttatagccagcctctgcctaaagtcccccggtagattcgagagaatcttactcagagctgcaaatacccacagttccgccaaaccttgcgggcaacaatccattggcttgcacggagtatttgaattgcaaccaggtgcttcggtgtttgtcaatgtgactgatccaagccaagtgagccatggcactggcttcacgtcctttggcttactcaaactctga

SEQ ID NO: 6614 - protein, 274 aa, Artificial Sequence
  Description of Artificial Sequence: Synthetic Construct
MGGSGGGSGGGSGMIETYNQTSPRSAATGLPISMKIFMYLLTVFLITQMIGSALFAVYLHRRLDKIEDERNLHEDFVFMKTIQRCNTGERSLSLLNCEEIKSQFEGFVKDIMLNKEETKKENSFEMQKGDQNPQIAAHVISEASSKTTSVLQWAEKGYYTMSNNLVTLENGKQLTVKRQGLYYIGAQVTFCSNREASSQAPFIASLCLKSPGRFERILLRAANTHSSAKPCGQQSIHLFGVFELQPGASVFVNVTDPSQVSHGTGFTSFGLLKL

SEQ ID NO: 6615 - DNA, 825 bp, Artificial Sequence
  Description of Artificial Sequence: Synthetic Construct
atgggaggatccggaggtggaagtggaggtggatcaggtatgatcgaaacatacaaccaaacttctccccgatctgcggccactggactgcccatcagcatgaaaatttttatgtatttacttactgtttttcttatcacccagatgattgggtcagcactttttgctgtgtatcttcatagaaggttggacaagatagaagatgaaaggaatcttcatgaagattttgtattcatgaaaacgatacagagatgcaacacaggagaaagatccttatccttactgaactgtgaggagattaaaagccagtttgaaggctttgtgaaggatataatgttaaacaaagaggagacgaagaaagaaaacagctttgaaatgcaaaaaggtgatcagaatcctcaaattgcggcacatgtcataagtgaggccagcagtaaaacaacatctgtgttacagtgggctgaaaaaggatactacaccatgagcaacaacttggtaaccctggaaaatgggaaacagctgaccgttaaaagacaaggactctattatatcggtgcccaagtcaccttctgttccaatcgggaagcttcgagtcaagctccatttatagccagcctctgcctaaagtcccccggtagattcgagagaatcttactcagagctgcaaatacccacagttccgccaaaccttgcgggcaacaatccattcacttgtttggagtatttgaattgcaaccaggtgcttcggtgtttgtcaatgtgactgatccaagccaagtgagccatggcactggcttcacgtcctttggcttactcaaactctga

SEQ ID NO: 6616 - protein, 274 aa, Artificial Sequence
  Description of Artificial Sequence: Synthetic Construct
MGGSGGGSGGGSGMIETYNQTSPRSAATGLPISMKIFMYLLTVFLITQMIGSALFAVYLHRRLDKIEDERNLHEDFVFMKTIQRCNTGERSLSLLNCEEIKSQFEGFVKDIMLNKEETKKENSFEMQKGDQNPQIAAHVISEASSKTTSVLQWAEKGYYTMSNNLVTLENGKQLTVKRQGLYGIYAQVTFCSNREASSQAPFIASLCLKSPGRFERILLRAANTHSSAKPCGQQSIGLWGVFELQPGASVFVNVTDPSQVSHGTGFTSFGLLKL

SEQ ID NO: 6617 - DNA, 825 bp, Artificial Sequence
  Description of Artificial Sequence: Synthetic Construct
atgggaggatccggaggtggaagtggaggtggatcaggtatgatcgaaacatacaaccaaacttctccccgatctgcggccactggactgcccatcagcatgaaaatttttatgtatttacttactgtttttcttatcacccagatgattgggtcagcactttttgctgtgtatcttcatagaaggttggacaagatagaagatgaaaggaatcttcatgaagattttgtattcatgaaaacgatacagagatgcaacacaggagaaagatccttatccttactgaactgtgaggagattaaaagccagtttgaaggctttgtgaaggatataatgttaaacaaagaggagacgaagaaagaaaacagctttgaaatgcaaaaaggtgatcagaatcctcaaattgcggcacatgtcataagtgaggccagcagtaaaacaacatctgtgttacagtgggctgaaaaaggatactacaccatgagcaacaacttggtaaccctggaaaatgggaaacagctgaccgttaaaagacaaggactctatggtatctatgcccaagtcaccttctgttccaatcgggaagcttcgagtcaagctccatttatagccagcctctgcctaaagtcccccggtagattcgagagaatcttactcagagctgcaaatacccacagttccgccaaaccttgcgggcaacaatccattggcttgtggggagtatttgaattgcaaccaggtgcttcggtgtttgtcaatgtgactgatccaagccaagtgagccatggcactggcttcacgtcctttggcttactcaaactctga

SEQ ID NO: 6618 - protein, 274 aa, Artificial Sequence
  Description of Artificial Sequence: Synthetic Construct
MGGSGGGSGGGSGMIETYNQTSPRSAATGLPISMKIFMYLLTVFLITQMIGSALFAVYLHRRLDKIEDERNLHEDFVFMKTIQRCNTGERSLSLLNCEEIKSQFEGFVKDIMLNKEETKKENSFEMQKGDQNPQIAAGVISEASSKTTSVLQWAEKGYYTMSNNLVTLENGKQLTVKRQGLYYIYAQVTFCSNREASSQAPFIASLCLKSPGRFERILLRAANTHSSAKPCGQQSIHLGFVFELQPGASVFVNVTDPSQVSHGTGFTSFGLLKL

SEQ ID NO: 6619 - DNA, 825 bp, Artificial Sequence
  Description of Artificial Sequence: Synthetic Construct
atgggaggatccggaggtggaagtggaggtggatcaggtatgatcgaaacatacaaccaaacttctccccgatctgcggccactggactgcccatcagcatgaaaatttttatgtatttacttactgtttttcttatcacccagatgattgggtcagcactttttgctgtgtatcttcatagaaggttggacaagatagaagatgaaaggaatcttcatgaagattttgtattcatgaaaacgatacagagatgcaacacaggagaaagatccttatccttactgaactgtgaggagattaaaagccagtttgaaggctttgtgaaggatataatgttaaacaaagaggagacgaagaaagaaaacagctttgaaatgcaaaaaggtgatcagaatcctcaaattgcggcaggtgtcataagtgaggccagcagtaaaacaacatctgtgttacagtgggctgaaaaaggatactacaccatgagcaacaacttggtaaccctggaaaatgggaaacagctgaccgttaaaagacaaggactctattatatctatgcccaagtcaccttctgttccaatcgggaagcttcgagtcaagctccatttatagccagcctctgcctaaagtcccccggtagattcgagagaatcttactcagagctgcaaatacccacagttccgccaaaccttgcgggcaacaatccattcacttgggattcgtatttgaattgcaaccaggtgcttcggtgtttgtcaatgtgactgatccaagccaagtgagccatggcactggcttcacgtcctttggcttactcaaactctga

SEQ ID NO: 6620 - protein, 509 aa, Artificial Sequence
  Description of Artificial Sequence: Synthetic Construct
MSLALSLTADQMVSALLDAEPPILYSEYDPTRPFSEASMMGLLTNLADRELVHMINWAKRVPGFVDLTLHDQVHLLECAWMEILMIGLVWRSMEHPGKLLFAPNLLLDRDQGKCVEGGVEIFDMLLATSSRFRMMNLQGEEFVCLKSIILLNSGVYTFLSSTLKSLEEKDHIHRVLDKITDTLIHLMAKAGLTLQQQHQRLAQLLLILSHIRHMSNKRMEHLYSMKCKNVVPLSDLLLEMLDAHRLGSMIETYNQTSPRSAATGLPISMKIFMYLLTVFLITQMIGSALFAVYLHRRLDKIEDERNLHEDFVFMKTIQRCNTGERSLSLLNCEEIKSQFEGFVKDIMLNKEETKKENSFEMQKGDQNPQIAAHVISEASSKTTSVLQWAEKGYYTMSNNLVTLENGKQLTVKRQGLYYIYAQVTFCSNREASSQAPFIASLCLKSPGRFERILLRAANTHSSAKPCGQQSIHLGGVFELQPGASVFVNVTDPSQVSHGTGFTSFGLLKL

SEQ ID NO: 6621 - DNA, 1530 bp, Artificial Sequence
  Description of Artificial Sequence: Synthetic Construct
atgtcactggcgctcagccttactgccgaccaaatggtatcagctcttctggacgcagaacccccaattctttattccgagtacgaccccacacgcccgttcagtgaagcttccatgatgggcctccttacgaaccttgccgaccgggaactcgtgcacatgatcaattgggcgaagcgggtgccggggttcgtagatttgacacttcacgaccaagttcatctcttggaatgtgcttggatggagatattgatgatcggactcgtgtggaggtcaatggagcatcctggtaaacttcttttcgcacccaatctgctcttggatagagatcagggtaagtgcgtcgagggtggcgttgaaatcttcgacatgctccttgcgacatccagccgattccgaatgatgaatcttcaaggagaggaatttgtctgtcttaagagcattatactcctcaatagtggagtttacaccttcttgtcctctacactgaaatcacttgaggaaaaagatcacatacatagggtgttggataaaatcacggatacactcatacatctgatggcaaaagcaggattgaccctgcaacagcagcaccaacgactggcccaactgctgttgatccttagccatatcagacacatgtctaacaaaaggatggaacatttgtacagcatgaaatgtaagaacgtagtgccactgtccgatttgttgctggaaatgctggacgctcatcggctcggatccatgatcgaaacatacaaccaaacttctccccgatctgcggccactggactgcccatcagcatgaaaatttttatgtatttacttactgtttttcttatcacccagatgattgggtcagcactttttgctgtgtatcttcatagaaggttggacaagatagaagatgaaaggaatcttcatgaagattttgtattcatgaaaacgatacagagatgcaacacaggagaaagatccttatccttactgaactgtgaggagattaaaagccagtttgaaggctttgtgaaggatataatgttaaacaaagaggagacgaagaaagaaaacagctttgaaatgcaaaaaggtgatcagaatcctcaaattgcggcacatgtcataagtgaggccagcagtaaaacaacatctgtgttacagtgggctgaaaaaggatactacaccatgagcaacaacttggtaaccctggaaaatgggaaacagctgaccgttaaaagacaaggactctattatatctatgcccaagtcaccttctgttccaatcgggaagcttcgagtcaagctccatttatagccagcctctgcctaaagtcccccggtagattcgagagaatcttactcagagctgcaaatacccacagttccgccaaaccttgcgggcaacaatccattcacttgggaggagtatttgaattgcaaccaggtgcttcggtgtttgtcaatgtgactgatccaagccaagtgagccatggcactggcttcacgtcctttggcttactcaaactctga

SEQ ID NO: 6622 - protein, 510 aa, Artificial Sequence
  Description of Artificial Sequence: Synthetic Construct
MSLALSLTADQMVSALLDAEPPILYSEYDPTRPFSEASMMGLLTNLADRELVHMINWAKRVPGFVDLTLHDQVHLLECAWMEILMIGLVWRSMEHPGKLLFAPNLLLDRDQGKCVEGGVEIFDMLLATSSRFRMMNLQGEEFVCLKSIILLNSGVYTFLSSTLKSLEEKDHIHRVLDKITDTLIHLMAKAGLTLQQQHQRLAQLLLILSHIRHMSNKRMEHLYSMKCKNVVPLSDLLLEMLDAHRLGSGMIETYNQTSPRSAATGLPISMKIFMYLLTVFLITQMIGSALFAVYLHRRLDKIEDERNLHEDFVFMKTIQRCNTGERSLSLLNCEEIKSQFEGFVKDIMLNKEETKKENSFEMQKGDQNPQIAAHVISEASSKTTSVLQWAEKGYYTMSNNLVTLENGKQLTVKRQGLYYIYAQVTFCSNREASSQAPFIASLCLKSPGRFERILLRAANTHSSAKPCGQQSIHLGGVFELQPGASVFVNVTDPSQVSHGTGFTSFGLLKL

SEQ ID NO: 6623 - DNA, 1533 bp, Artificial Sequence
  Description of Artificial Sequence: Synthetic Construct
atgtcactggcgctcagccttactgccgaccaaatggtatcagctcttctggacgcagaacccccaattctttattccgagtacgaccccacacgcccgttcagtgaagcttccatgatgggcctccttacgaaccttgccgaccgggaactcgtgcacatgatcaattgggcgaagcgggtgccggggttcgtagatttgacacttcacgaccaagttcatctcttggaatgtgcttggatggagatattgatgatcggactcgtgtggaggtcaatggagcatcctggtaaacttcttttcgcacccaatctgctcttggatagagatcagggtaagtgcgtcgagggtggcgttgaaatcttcgacatgctccttgcgacatccagccgattccgaatgatgaatcttcaaggagaggaatttgtctgtcttaagagcattatactcctcaatagtggagtttacaccttcttgtcctctacactgaaatcacttgaggaaaaagatcacatacatagggtgttggataaaatcacggatacactcatacatctgatggcaaaagcaggattgaccctgcaacagcagcaccaacgactggcccaactgctgttgatccttagccatatcagacacatgtctaacaaaaggatggaacatttgtacagcatgaaatgtaagaacgtagtgccactgtccgatttgttgctggaaatgctggacgctcatcggctcggatccggtatgatcgaaacatacaaccaaacttctccccgatctgcggccactggactgcccatcagcatgaaaatttttatgtatttacttactgtttttcttatcacccagatgattgggtcagcactttttgctgtgtatcttcatagaaggttggacaagatagaagatgaaaggaatcttcatgaagattttgtattcatgaaaacgatacagagatgcaacacaggagaaagatccttatccttactgaactgtgaggagattaaaagccagtttgaaggctttgtgaaggatataatgttaaacaaagaggagacgaagaaagaaaacagctttgaaatgcaaaaaggtgatcagaatcctcaaattgcggcacatgtcataagtgaggccagcagtaaaacaacatctgtgttacagtgggctgaaaaaggatactacaccatgagcaacaacttggtaaccctggaaaatgggaaacagctgaccgttaaaagacaaggactctattatatctatgcccaagtcaccttctgttccaatcgggaagcttcgagtcaagctccatttatagccagcctctgcctaaagtcccccggtagattcgagagaatcttactcagagctgcaaatacccacagttccgccaaaccttgcgggcaacaatccattcacttgggaggagtatttgaattgcaaccaggtgcttcggtgtttgtcaatgtgactgatccaagccaagtgagccatggcactggcttcacgtcctttggcttactcaaactctga

SEQ ID NO: 6624 - protein, 449 aa, Artificial Sequence
  Description of Artificial Sequence: Synthetic Construct
MVGSLNCIVAVSQNMGIGKNGDLPWPPLRNEFRYFQRMTTTSSVEGKQNLVIMGKKTWFSIPEKNRPLKGRINLVLSRELKEPPQGAHFLSRSLDDALKLTEQPELANKVDMVWIVGGSSVIKEAMNHPGHLKLFVTRIMQDFESDTFFPEIDLEKYKLLPEYPGVLSDVQEEKGIKYKFEVYEKNDHMIETYNQTSPRSAATGLPISMKIFMYLLTVFLITQMIGSALFAVYLHRRLDKIEDERNLHEDFVFMKTIQRCNTGERSLSLLNCEEIKSQFEGFVKDIMLNKEETKKENSFEMQKGDQNPQIAAHVISEASSKTTSVLQWAEKGYYTMSNNLVTLENGKQLTVKRQGLYYIYAQVTFCSNREASSQAPFIASLCLKSPGRFERILLRAANTHSSAKPCGQQSIHLGGVFELQPGASVFVNVTDPSQVSHGTGFTSFGLLKL

SEQ ID NO: 6625 - DNA, 1350 bp, Artificial Sequence
  Description of Artificial Sequence: Synthetic Construct
atggttggttcgctaaactgcatcgtcgctgtgtcccagaacatgggcatcggcaagaacggggacctgccctggccaccgctcaggaatgaattcagatatttccagagaatgaccacaacctcttcagtagaaggtaaacagaatctggtgattatgggtaagaagacctggttctccattcctgagaagaatcgacctttaaagggtagaattaatttagttctcagcagagaactcaaggaacctccacaaggagctcattttctttccagaagtctagatgatgccttaaaacttactgaacaaccagaattagcaaataaagtagacatggtctggatagttggtggcagttctgttattaaggaagccatgaatcacccaggccatcttaaactatttgtgacaaggatcatgcaagactttgaaagtgacacgttttttccagaaattgatttggagaaatataaacttctgccagaatacccaggtgttctctctgatgtccaggaggagaaaggcattaagtacaaatttgaagtatatgagaagaatgatcatatgatcgaaacatacaaccaaacttctccccgatctgcggccactggactgcccatcagcatgaaaatttttatgtatttacttactgtttttcttatcacccagatgattgggtcagcactttttgctgtgtatcttcatagaaggttggacaagatagaagatgaaaggaatcttcatgaagattttgtattcatgaaaacgatacagagatgcaacacaggagaaagatccttatccttactgaactgtgaggagattaaaagccagtttgaaggctttgtgaaggatataatgttaaacaaagaggagacgaagaaagaaaacagctttgaaatgcaaaaaggtgatcagaatcctcaaattgcggcacatgtcataagtgaggccagcagtaaaacaacatctgtgttacagtgggctgaaaaaggatactacaccatgagcaacaacttggtaaccctggaaaatgggaaacagctgaccgttaaaagacaaggactctattatatctatgcccaagtcaccttctgttccaatcgggaagcttcgagtcaagctccatttatagccagcctctgcctaaagtcccccggtagattcgagagaatcttactcagagctgcaaatacccacagttccgccaaaccttgcgggcaacaatccattcacttgggaggagtatttgaattgcaaccaggtgcttcggtgtttgtcaatgtgactgatccaagccaagtgagccatggcactggcttcacgtcctttggcttactcaaactctga

SEQ ID NO: 6626 - protein, 449 aa, Artificial Sequence
  Description of Artificial Sequence: Synthetic Construct
MVGSLNCIVAVSQNMGIGKNGDLPWPPLRNEFRYFQRMTTTSSVEGKQNLVIMGRKTWFSIPEKKRPLKGRINLVLSRELKEPPQGAHFLSRSLDDALKLTEQPELANKVDMVWIVGGSSVIKEAMNHPGHLKLFVTRIMQDFESDTFFPEIDLEKYKLLPEYPGVLSDVQEEKGIKYKFEVYEKNDHMIETYNQTSPRSAATGLPISMKIFMYLLTVFLITQMIGSALFAVYLHRRLDKIEDERNLHEDFVFMKTIQRCNTGERSLSLLNCEEIKSQFEGFVKDIMLNKEETKKENSFEMQKGDQNPQIAAHVISEASSKTTSVLQWAEKGYYTMSNNLVTLENGKQLTVKRQGLYYIYAQVTFCSNREASSQAPFIASLCLKSPGRFERILLRAANTHSSAKPCGQQSIHLGGVFELQPGASVFVNVTDPSQVSHGTGFTSFGLLKL

SEQ ID NO: 6627 - DNA, 1350 bp, Artificial Sequence
  Description of Artificial Sequence: Synthetic Construct
atggttggttcgctaaactgcatcgtcgctgtgtcccagaacatgggcatcggcaagaacggggacctgccctggccaccgctcaggaatgaattcagatatttccagagaatgaccacaacctcttcagtagaaggtaaacagaatctggtgattatgggtaggaagacctggttctccattcctgagaagaaacgacctttaaagggtagaattaatttagttctcagcagagaactcaaggaacctccacaaggagctcattttctttccagaagtctagatgatgccttaaaacttactgaacaaccagaattagcaaataaagtagacatggtctggatagttggtggcagttctgttattaaggaagccatgaatcacccaggccatcttaaactatttgtgacaaggatcatgcaagactttgaaagtgacacgttttttccagaaattgatttggagaaatataaacttctgccagaatacccaggtgttctctctgatgtccaggaggagaaaggcattaagtacaaatttgaagtatatgagaagaatgatcatatgatcgaaacatacaaccaaacttctccccgatctgcggccactggactgcccatcagcatgaaaatttttatgtatttacttactgtttttcttatcacccagatgattgggtcagcactttttgctgtgtatcttcatagaaggttggacaagatagaagatgaaaggaatcttcatgaagattttgtattcatgaaaacgatacagagatgcaacacaggagaaagatccttatccttactgaactgtgaggagattaaaagccagtttgaaggctttgtgaaggatataatgttaaacaaagaggagacgaagaaagaaaacagctttgaaatgcaaaaaggtgatcagaatcctcaaattgcggcacatgtcataagtgaggccagcagtaaaacaacatctgtgttacagtgggctgaaaaaggatactacaccatgagcaacaacttggtaaccctggaaaatgggaaacagctgaccgttaaaagacaaggactctattatatctatgcccaagtcaccttctgttccaatcgggaagcttcgagtcaagctccatttatagccagcctctgcctaaagtcccccggtagattcgagagaatcttactcagagctgcaaatacccacagttccgccaaaccttgcgggcaacaatccattcacttgggaggagtatttgaattgcaaccaggtgcttcggtgtttgtcaatgtgactgatccaagccaagtgagccatggcactggcttcacgtcctttggcttactcaaactctga

SEQ ID NO: 6628 - protein, 416 aa, Artificial Sequence
  Description of Artificial Sequence: Synthetic Construct
MSGISLIAALAVDYVIGMENAMPWNLPADLAWFKRNTLNKPVIMGRHTWESIGRPLPGRKNIILSSQPGTDDRVTWVKSVDEAIAACGDVPEIMVIGGGRVIEQFLPKAQKLYLTHIDAEVEGDTHFPDYEPDDWESVFSEFHDADAQNSHSYCFEILERRHMIETYNQTSPRSAATGLPISMKIFMYLLTVFLITQMIGSALFAVYLHRRLDKIEDERNLHEDFVFMKTIQRCNTGERSLSLLNCEEIKSQFEGFVKDIMLNKEETKKENDQNPQIAAHVISEASSKTTSVLQWAEKGYYTMSNNLVTLENGKQLTVKRQGLYYIYAQVTFCSNREASSQAPFIASLCLKSPGRFERILLRAANTHSSAKPCGQQSIHLGGVFELQPGASVFVNVTDPSQVSHGTGFTSFGLLKL

SEQ ID NO: 6629 - DNA, 1251 bp, Artificial Sequence
  Description of Artificial Sequence: Synthetic Construct
atgtcagggatctcacttatcgcagccttggcagttgattatgtgatcggcatggaaaatgcgatgccatggaatcttccggccgacctcgcttggttcaaacgcaacaccctgaacaaacccgttattatgggccgacatacatgggaaagtatcggcaggccattgcccggtcggaaaaacataatcctttcctcccagccgggcacggacgatagagtgacttgggtcaaatcagttgacgaggccattgctgcctgcggcgatgtacccgagattatggttatcggaggggggcgagttattgagcagtttctgcccaaagcgcagaagttgtaccttactcatatagatgcagaggtagagggcgacacgcatttccccgactacgaaccggatgattgggaatccgtattttccgaattccacgacgcggatgcccaaaacagtcactcttactgttttgaaattcttgagcgacgccatatgatcgaaacatacaaccaaacttctccccgatctgcggccactggactgcccatcagcatgaaaatttttatgtatttacttactgtttttcttatcacccagatgattgggtcagcactttttgctgtgtatcttcatagaaggttggacaagatagaagatgaaaggaatcttcatgaagattttgtattcatgaaaacgatacagagatgcaacacaggagaaagatccttatccttactgaactgtgaggagattaaaagccagtttgaaggctttgtgaaggatataatgttaaacaaagaggagacgaagaaagaaaacgatcagaatcctcaaattgcggcacatgtcataagtgaggccagcagtaaaacaacatctgtgttacagtgggctgaaaaaggatactacaccatgagcaacaacttggtaaccctggaaaatgggaaacagctgaccgttaaaagacaaggactctattatatctatgcccaagtcaccttctgttccaatcgggaagcttcgagtcaagctccatttatagccagcctctgcctaaagtcccccggtagattcgagagaatcttactcagagctgcaaatacccacagttccgccaaaccttgcgggcaacaatccattcacttgggaggagtatttgaattgcaaccaggtgcttcggtgtttgtcaatgtgactgatccaagccaagtgagccatggcactggcttcacgtcctttggcttactcaaactctga

SEQ ID NO: 6630 - protein, 515 aa, Artificial Sequence
  Description of Artificial Sequence: Synthetic Construct
MSLALSLTADQMVSALLDAEPPILYSEYDPTRPFSEASMMGLLTNLADRELVHMINWAKRVPGFVDLTLHDQVHLLECAWMEILMIGLVWRSMEHPGKLLFAPNLLLDRDQGKCVEGGVEIFDMLLATSSRFRMMNLQGEEFVCLKSIILLNSGVYTFLSSTLKSLEEKDHIHRVLDKITDTLIHLMAKAGLTLQQQHQRLAQLLLILSHIRHMSNKRMEHLYSMKCKNVVPLSDLLLEMLDAHRLNHRNRRGSMIETYNQTSPRSAATGLPISMKIFMYLLTVFLITQMIGSALFAVYLHRRLDKIEDERNLHEDFVFMKTIQRCNTGERSLSLLNCEEIKSQFEGFVKDIMLNKEETKKENSFEMQKGDQNPQIAAHVISEASSKTTSVLQWAEKGYYTMSNNLVTLENGKQLTVKRQGLYYIYAQVTFCSNREASSQAPFIASLCLKSPGRFERILLRAANTHSSAKPCGQQSIHLGGVFELQPGASVFVNVTDPSQVSHGTGFTSFGLLKL

SEQ ID NO: 6631 - DNA, 1548 bp, Artificial Sequence
  Description of Artificial Sequence: Synthetic Construct
atgtcactggcgctcagccttactgccgaccaaatggtatcagctcttctggacgcagaacccccaattctttattccgagtacgaccccacacgcccgttcagtgaagcttccatgatgggcctccttacgaaccttgccgaccgggaactcgtgcacatgatcaattgggcgaagcgggtgccggggttcgtagatttgacacttcacgaccaagttcatctcttggaatgtgcttggatggagatattgatgatcggactcgtgtggaggtcaatggagcatcctggtaaacttcttttcgcacccaatctgctcttggatagagatcagggtaagtgcgtcgagggtggcgttgaaatcttcgacatgctccttgcgacatccagccgattccgaatgatgaatcttcaaggagaggaatttgtctgtcttaagagcattatactcctcaatagtggagtttacaccttcttgtcctctacactgaaatcacttgaggaaaaagatcacatacatagggtgttggataaaatcacggatacactcatacatctgatggcaaaagcaggattgaccctgcaacagcagcaccaacgactggcccaactgctgttgatccttagccatatcagacacatgtctaacaaaaggatggaacatttgtacagcatgaaatgtaagaacgtagtgccactgtccgatttgttgctggaaatgctggacgctcatcggctcaaccatagaaacaggcgaggatctatgatcgaaacatacaaccaaacttctccccgatctgcggccactggactgcccatcagcatgaaaatttttatgtatttacttactgtttttcttatcacccagatgattgggtcagcactttttgctgtgtatcttcatagaaggttggacaagatagaagatgaaaggaatcttcatgaagattttgtattcatgaaaacgatacagagatgcaacacaggagaaagatccttatccttactgaactgtgaggagattaaaagccagtttgaaggctttgtgaaggatataatgttaaacaaagaggagacgaagaaagaaaacagctttgaaatgcaaaaaggtgatcagaatcctcaaattgcggcacatgtcataagtgaggccagcagtaaaacaacatctgtgttacagtgggctgaaaaaggatactacaccatgagcaacaacttggtaaccctggaaaatgggaaacagctgaccgttaaaagacaaggactctattatatctatgcccaagtcaccttctgttccaatcgggaagcttcgagtcaagctccatttatagccagcctctgcctaaagtcccccggtagattcgagagaatcttactcagagctgcaaatacccacagttccgccaaaccttgcgggcaacaatccattcacttgggaggagtatttgaattgcaaccaggtgcttcggtgtttgtcaatgtgactgatccaagccaagtgagccatggcactggcttcacgtcctttggcttactcaaactctga

SEQ ID NO: 6632 - protein, 527 aa, Artificial Sequence
  Description of Artificial Sequence: Synthetic Construct
MNHRNRRGSSLALSLTADQMVSALLDAEPPILYSEYDPTRPFSEASMMGLLTNLADRELVHMINWAKRVPGFVDLTLHDQVHLLECAWMEILMIGLVWRSMEHPGKLLFAPNLLLDRDQGKCVEGGVEIFDMLLATSSRFRMMNLQGEEFVCLKSIILLNSGVYTFLSSTLKSLEEKDHIHRVLDKITDTLIHLMAKAGLTLQQQHQRLAQLLLILSHIRHMSNKRMEHLYSMKCKNVVPLSDLLLEMLDAHRLGGSGGGSGGGSGMIETYNQTSPRSAATGLPISMKIFMYLLTVFLITQMIGSALFAVYLHRRLDKIEDERNLHEDFVFMKTIQRCNTGERSLSLLNCEEIKSQFEGFVKDIMLNKEETKKENSFEMQKGDQNPQIAAHVISEASSKTTSVLQWAEKGYYTMSNNLVTLENGKQLTVKRQGLYYIYAQVTFCSNREASSQAPFIASLCLKSPGRFERILLRAANTHSSAKPCGQQSIHLGGVFELQPGASVFVNVTDPSQVSHGTGFTSFGLLKL

SEQ ID NO: 6633 - DNA, 1584 bp, Artificial Sequence
  Description of Artificial Sequence: Synthetic Construct
atgaaccatagaaacaggcgaggatcctcactggcgctcagccttactgccgaccaaatggtatcagctcttctggacgcagaacccccaattctttattccgagtacgaccccacacgcccgttcagtgaagcttccatgatgggcctccttacgaaccttgccgaccgggaactcgtgcacatgatcaattgggcgaagcgggtgccggggttcgtagatttgacacttcacgaccaagttcatctcttggaatgtgcttggatggagatattgatgatcggactcgtgtggaggtcaatggagcatcctggtaaacttcttttcgcacccaatctgctcttggatagagatcagggtaagtgcgtcgagggtggcgttgaaatcttcgacatgctccttgcgacatccagccgattccgaatgatgaatcttcaaggagaggaatttgtctgtcttaagagcattatactcctcaatagtggagtttacaccttcttgtcctctacactgaaatcacttgaggaaaaagatcacatacatagggtgttggataaaatcacggatacactcatacatctgatggcaaaagcaggattgaccctgcaacagcagcaccaacgactggcccaactgctgttgatccttagccatatcagacacatgtctaacaaaaggatggaacatttgtacagcatgaaatgtaagaacgtagtgccactgtccgatttgttgctggaaatgctggacgctcatcggctcggaggttctggaggtggaagtggaggtggatccggtatgatcgaaacatacaaccaaacttctccccgatctgcggccactggactgcccatcagcatgaaaatttttatgtatttacttactgtttttcttatcacccagatgattgggtcagcactttttgctgtgtatcttcatagaaggttggacaagatagaagatgaaaggaatcttcatgaagattttgtattcatgaaaacgatacagagatgcaacacaggagaaagatccttatccttactgaactgtgaggagattaaaagccagtttgaaggctttgtgaaggatataatgttaaacaaagaggagacgaagaaagaaaacagctttgaaatgcaaaaaggtgatcagaatcctcaaattgcggcacatgtcataagtgaggccagcagtaaaacaacatctgtgttacagtgggctgaaaaaggatactacaccatgagcaacaacttggtaaccctggaaaatgggaaacagctgaccgttaaaagacaaggactctattatatctatgcccaagtcaccttctgttccaatcgggaagcttcgagtcaagctccatttatagccagcctctgcctaaagtcccccggtagattcgagagaatcttactcagagctgcaaatacccacagttccgccaaaccttgcgggcaacaatccattcacttgggaggagtatttgaattgcaaccaggtgcttcggtgtttgtcaatgtgactgatccaagccaagtgagccatggcactggcttcacgtcctttggcttactcaaactctga

SEQ ID NO: 6634 - protein, 423 aa, Artificial Sequence
  Description of Artificial Sequence: Synthetic Construct
MSGISLIAALAVDRVIGMENAMPWNLPADLAWFKRNTLNKPVIMGRHTWESIGRPLPGRKNIILSSQPGTDDRVTWVKSVDEAIAACGDVPEIMVIGGGRVAEQFLPKAQKLYLTHIDAEVEGDTHFPDYEPDDWESVFSEFHDADAQNSHSYCFEILERRHMIETYNQTSPRSAATGLPISMKIFMYLLTVFLITQMIGSALFAVYLHRRLDKIEDERNLHEDFVFMKTIQRCNTGERSLSLLNCEEIKSQFEGFVKDIMLNKEETKKENSFEMQKGDQNPQIAAHVISEASSKTTSVLQWAEKGYYTMSNNLVTLENGKQLTVKRQGLYYIYAQVTFCSNREASSQAPFIASLCLKSPGRFERILLRAANTHSSAKPCGQQSIHLGGVFELQPGASVFVNVTDPSQVSHGTGFTSFGLLKL

SEQ ID NO: 6635 - DNA, 1272 bp, Artificial Sequence
  Description of Artificial Sequence: Synthetic Construct
atgtcagggatctcacttatcgcagccttggcagttgatcgtgtgatcggcatggaaaatgcgatgccatggaatcttccggccgacctcgcttggttcaaacgcaacaccctgaacaaacccgttattatgggccgacatacatgggaaagtatcggcaggccattgcccggtcggaaaaacataatcctttcctcccagccgggcacggacgatagagtgacttgggtcaaatcagttgacgaggccattgctgcctgcggcgatgtacccgagattatggttatcggaggtggccgagttgccgagcagtttctgcccaaagcgcagaagttgtaccttactcatatagatgcagaggtagagggcgacacgcatttccccgactacgaaccggatgattgggaatccgtattttccgaattccacgacgcggatgcccaaaacagtcactcttactgttttgaaattcttgagcgacgccatatgatcgaaacatacaaccaaacttctccccgatctgcggccactggactgcccatcagcatgaaaatttttatgtatttacttactgtttttcttatcacccagatgattgggtcagcactttttgctgtgtatcttcatagaaggttggacaagatagaagatgaaaggaatcttcatgaagattttgtattcatgaaaacgatacagagatgcaacacaggagaaagatccttatccttactgaactgtgaggagattaaaagccagtttgaaggctttgtgaaggatataatgttaaacaaagaggagacgaagaaagaaaacagctttgaaatgcaaaaaggtgatcagaatcctcaaattgcggcacatgtcataagtgaggccagcagtaaaacaacatctgtgttacagtgggctgaaaaaggatactacaccatgagcaacaacttggtaaccctggaaaatgggaaacagctgaccgttaaaagacaaggactctattatatctatgcccaagtcaccttctgttccaatcgggaagcttcgagtcaagctccatttatagccagcctctgcctaaagtcccccggtagattcgagagaatcttactcagagctgcaaatacccacagttccgccaaaccttgcgggcaacaatccattcacttgggaggagtatttgaattgcaaccaggtgcttcggtgtttgtcaatgtgactgatccaagccaagtgagccatggcactggcttcacgtcctttggcttactcaaactctga

SEQ ID NO: 6636 - protein, 423 aa, Artificial Sequence
  Description of Artificial Sequence: Synthetic Construct
MSGISLIAALAVDRVIGMENAMPWNLPADLAWFKRNTLNKPVIMGRHTWESIGRPLPGRKNIILSSQPGTDDRVTWVKSVDEAIAACGDVPEIMVIGGGRVCEQFLPKAQKLYLTHIDAEVEGDTHFPDYEPDDWESVFSEFHDADAQNSHSYCFEILERRHMIETYNQTSPRSAATGLPISMKIFMYLLTVFLITQMIGSALFAVYLHRRLDKIEDERNLHEDFVFMKTIQRCNTGERSLSLLNCEEIKSQFEGFVKDIMLNKEETKKENSFEMQKGDQNPQIAAHVISEASSKTTSVLQWAEKGYYTMSNNLVTLENGKQLTVKRQGLYYIYAQVTFCSNREASSQAPFIASLCLKSPGRFERILLRAANTHSSAKPCGQQSIHLGGVFELQPGASVFVNVTDPSQVSHGTGFTSFGLLKL

SEQ ID NO: 6637 - DNA, 1272 bp, Artificial Sequence
  Description of Artificial Sequence: Synthetic Construct
atgtcagggatctcacttatcgcagccttggcagttgatcgtgtgatcggcatggaaaatgcgatgccatggaatcttccggccgacctcgcttggttcaaacgcaacaccctgaacaaacccgttattatgggccgacatacatgggaaagtatcggcaggccattgcccggtcggaaaaacataatcctttcctcccagccgggcacggacgatagagtgacttgggtcaaatcagttgacgaggccattgctgcctgcggcgatgtacccgagattatggttatcggaggtggccgagtttgcgagcagtttctgcccaaagcgcagaagttgtaccttactcatatagatgcagaggtagagggcgacacgcatttccccgactacgaaccggatgattgggaatccgtattttccgaattccacgacgcggatgcccaaaacagtcactcttactgttttgaaattcttgagcgacgccatatgatcgaaacatacaaccaaacttctccccgatctgcggccactggactgcccatcagcatgaaaatttttatgtatttacttactgtttttcttatcacccagatgattgggtcagcactttttgctgtgtatcttcatagaaggttggacaagatagaagatgaaaggaatcttcatgaagattttgtattcatgaaaacgatacagagatgcaacacaggagaaagatccttatccttactgaactgtgaggagattaaaagccagtttgaaggctttgtgaaggatataatgttaaacaaagaggagacgaagaaagaaaacagctttgaaatgcaaaaaggtgatcagaatcctcaaattgcggcacatgtcataagtgaggccagcagtaaaacaacatctgtgttacagtgggctgaaaaaggatactacaccatgagcaacaacttggtaaccctggaaaatgggaaacagctgaccgttaaaagacaaggactctattatatctatgcccaagtcaccttctgttccaatcgggaagcttcgagtcaagctccatttatagccagcctctgcctaaagtcccccggtagattcgagagaatcttactcagagctgcaaatacccacagttccgccaaaccttgcgggcaacaatccattcacttgggaggagtatttgaattgcaaccaggtgcttcggtgtttgtcaatgtgactgatccaagccaagtgagccatggcactggcttcacgtcctttggcttactcaaactctga

SEQ ID NO: 6638 - protein, 423 aa, Artificial Sequence
  Description of Artificial Sequence: Synthetic Construct
MSGISLIAALAVDRVIGMENAMPWNLPADLAWFKRNTLNKPVIMGRHTWESIGRPLPGRKNIILSSQPGTDDRVTWVKSVDEAIAACGDVPEIMVIGGGRVDEQFLPKAQKLYLTHIDAEVEGDTHFPDYEPDDWESVFSEFHDADAQNSHSYCFEILERRHMIETYNQTSPRSAATGLPISMKIFMYLLTVFLITQMIGSALFAVYLHRRLDKIEDERNLHEDFVFMKTIQRCNTGERSLSLLNCEEIKSQFEGFVKDIMLNKEETKKENSFEMQKGDQNPQIAAHVISEASSKTTSVLQWAEKGYYTMSNNLVTLENGKQLTVKRQGLYYIYAQVTFCSNREASSQAPFIASLCLKSPGRFERILLRAANTHSSAKPCGQQSIHLGGVFELQPGASVFVNVTDPSQVSHGTGFTSFGLLKL

SEQ ID NO: 6639 - DNA, 1272 bp, Artificial Sequence
  Description of Artificial Sequence: Synthetic Construct
atgtcagggatctcacttatcgcagccttggcagttgatcgtgtgatcggcatggaaaatgcgatgccatggaatcttccggccgacctcgcttggttcaaacgcaacaccctgaacaaacccgttattatgggccgacatacatgggaaagtatcggcaggccattgcccggtcggaaaaacataatcctttcctcccagccgggcacggacgatagagtgacttgggtcaaatcagttgacgaggccattgctgcctgcggcgatgtacccgagattatggttatcggaggtggccgagttgatgagcagtttctgcccaaagcgcagaagttgtaccttactcatatagatgcagaggtagagggcgacacgcatttccccgactacgaaccggatgattgggaatccgtattttccgaattccacgacgcggatgcccaaaacagtcactcttactgttttgaaattcttgagcgacgccatatgatcgaaacatacaaccaaacttctccccgatctgcggccactggactgcccatcagcatgaaaatttttatgtatttacttactgtttttcttatcacccagatgattgggtcagcactttttgctgtgtatcttcatagaaggttggacaagatagaagatgaaaggaatcttcatgaagattttgtattcatgaaaacgatacagagatgcaacacaggagaaagatccttatccttactgaactgtgaggagattaaaagccagtttgaaggctttgtgaaggatataatgttaaacaaagaggagacgaagaaagaaaacagctttgaaatgcaaaaaggtgatcagaatcctcaaattgcggcacatgtcataagtgaggccagcagtaaaacaacatctgtgttacagtgggctgaaaaaggatactacaccatgagcaacaacttggtaaccctggaaaatgggaaacagctgaccgttaaaagacaaggactctattatatctatgcccaagtcaccttctgttccaatcgggaagcttcgagtcaagctccatttatagccagcctctgcctaaagtcccccggtagattcgagagaatcttactcagagctgcaaatacccacagttccgccaaaccttgcgggcaacaatccattcacttgggaggagtatttgaattgcaaccaggtgcttcggtgtttgtcaatgtgactgatccaagccaagtgagccatggcactggcttcacgtcctttggcttactcaaactctga

SEQ ID NO: 6640 - protein, 423 aa, Artificial Sequence
  Description of Artificial Sequence: Synthetic Construct
MSGISLIAALAVDRVIGMENAMPWNLPADLAWFKRNTLNKPVIMGRHTWESIGRPLPGRKNIILSSQPGTDDRVTWVKSVDEAIAACGDVPEIMVIGGGRVEEQFLPKAQKLYLTHIDAEVEGDTHFPDYEPDDWESVFSEFHDADAQNSHSYCFEILERRHMIETYNQTSPRSAATGLPISMKIFMYLLTVFLITQMIGSALFAVYLHRRLDKIEDERNLHEDFVFMKTIQRCNTGERSLSLLNCEEIKSQFEGFVKDIMLNKEETKKENSFEMQKGDQNPQIAAHVISEASSKTTSVLQWAEKGYYTMSNNLVTLENGKQLTVKRQGLYYIYAQVTFCSNREASSQAPFIASLCLKSPGRFERILLRAANTHSSAKPCGQQSIHLGGVFELQPGASVFVNVTDPSQVSHGTGFTSFGLLKL

SEQ ID NO: 6641 - DNA, 1272 bp, Artificial Sequence
  Description of Artificial Sequence: Synthetic Construct
atgtcagggatctcacttatcgcagccttggcagttgatcgtgtgatcggcatggaaaatgcgatgccatggaatcttccggccgacctcgcttggttcaaacgcaacaccctgaacaaacccgttattatgggccgacatacatgggaaagtatcggcaggccattgcccggtcggaaaaacataatcctttcctcccagccgggcacggacgatagagtgacttgggtcaaatcagttgacgaggccattgctgcctgcggcgatgtacccgagattatggttatcggaggtggccgagttgaagagcagtttctgcccaaagcgcagaagttgtaccttactcatatagatgcagaggtagagggcgacacgcatttccccgactacgaaccggatgattgggaatccgtattttccgaattccacgacgcggatgcccaaaacagtcactcttactgttttgaaattcttgagcgacgccatatgatcgaaacatacaaccaaacttctccccgatctgcggccactggactgcccatcagcatgaaaatttttatgtatttacttactgtttttcttatcacccagatgattgggtcagcactttttgctgtgtatcttcatagaaggttggacaagatagaagatgaaaggaatcttcatgaagattttgtattcatgaaaacgatacagagatgcaacacaggagaaagatccttatccttactgaactgtgaggagattaaaagccagtttgaaggctttgtgaaggatataatgttaaacaaagaggagacgaagaaagaaaacagctttgaaatgcaaaaaggtgatcagaatcctcaaattgcggcacatgtcataagtgaggccagcagtaaaacaacatctgtgttacagtgggctgaaaaaggatactacaccatgagcaacaacttggtaaccctggaaaatgggaaacagctgaccgttaaaagacaaggactctattatatctatgcccaagtcaccttctgttccaatcgggaagcttcgagtcaagctccatttatagccagcctctgcctaaagtcccccggtagattcgagagaatcttactcagagctgcaaatacccacagttccgccaaaccttgcgggcaacaatccattcacttgggaggagtatttgaattgcaaccaggtgcttcggtgtttgtcaatgtgactgatccaagccaagtgagccatggcactggcttcacgtcctttggcttactcaaactctga

SEQ ID NO: 6642 - protein, 423 aa, Artificial Sequence
  Description of Artificial Sequence: Synthetic Construct
MSGISLIAALAVDRVIGMENAMPWNLPADLAWFKRNTLNKPVIMGRHTWESIGRPLPGRKNIILSSQPGTDDRVTWVKSVDEAIAACGDVPEIMVIGGGRVFEQFLPKAQKLYLTHIDAEVEGDTHFPDYEPDDWESVFSEFHDADAQNSHSYCFEILERRHMIETYNQTSPRSAATGLPISMKIFMYLLTVFLITQMIGSALFAVYLHRRLDKIEDERNLHEDFVFMKTIQRCNTGERSLSLLNCEEIKSQFEGFVKDIMLNKEETKKENSFEMQKGDQNPQIAAHVISEASSKTTSVLQWAEKGYYTMSNNLVTLENGKQLTVKRQGLYYIYAQVTFCSNREASSQAPFIASLCLKSPGRFERILLRAANTHSSAKPCGQQSIHLGGVFELQPGASVFVNVTDPSQVSHGTGFTSFGLLKL

SEQ ID NO: 6643 - DNA, 1272 bp, Artificial Sequence
  Description of Artificial Sequence: Synthetic Construct
atgtcagggatctcacttatcgcagccttggcagttgatcgtgtgatcggcatggaaaatgcgatgccatggaatcttccggccgacctcgcttggttcaaacgcaacaccctgaacaaacccgttattatgggccgacatacatgggaaagtatcggcaggccattgcccggtcggaaaaacataatcctttcctcccagccgggcacggacgatagagtgacttgggtcaaatcagttgacgaggccattgctgcctgcggcgatgtacccgagattatggttatcggaggtggccgagtttttgagcagtttctgcccaaagcgcagaagttgtaccttactcatatagatgcagaggtagagggcgacacgcatttccccgactacgaaccggatgattgggaatccgtattttccgaattccacgacgcggatgcccaaaacagtcactcttactgttttgaaattcttgagcgacgccatatgatcgaaacatacaaccaaacttctccccgatctgcggccactggactgcccatcagcatgaaaatttttatgtatttacttactgtttttcttatcacccagatgattgggtcagcactttttgctgtgtatcttcatagaaggttggacaagatagaagatgaaaggaatcttcatgaagattttgtattcatgaaaacgatacagagatgcaacacaggagaaagatccttatccttactgaactgtgaggagattaaaagccagtttgaaggctttgtgaaggatataatgttaaacaaagaggagacgaagaaagaaaacagctttgaaatgcaaaaaggtgatcagaatcctcaaattgcggcacatgtcataagtgaggccagcagtaaaacaacatctgtgttacagtgggctgaaaaaggatactacaccatgagcaacaacttggtaaccctggaaaatgggaaacagctgaccgttaaaagacaaggactctattatatctatgcccaagtcaccttctgttccaatcgggaagcttcgagtcaagctccatttatagccagcctctgcctaaagtcccccggtagattcgagagaatcttactcagagctgcaaatacccacagttccgccaaaccttgcgggcaacaatccattcacttgggaggagtatttgaattgcaaccaggtgcttcggtgtttgtcaatgtgactgatccaagccaagtgagccatggcactggcttcacgtcctttggcttactcaaactctga

SEQ ID NO: 6644 - protein, 423 aa, Artificial Sequence
  Description of Artificial Sequence: Synthetic Construct
MSGISLIAALAVDRVIGMENAMPWNLPADLAWFKRNTLNKPVIMGRHTWESIGRPLPGRKNIILSSQPGTDDRVTWVKSVDEAIAACGDVPEIMVIGGGRVGEQFLPKAQKLYLTHIDAEVEGDTHFPDYEPDDWESVFSEFHDADAQNSHSYCFEILERRHMIETYNQTSPRSAATGLPISMKIFMYLLTVFLITQMIGSALFAVYLHRRLDKIEDERNLHEDFVFMKTIQRCNTGERSLSLLNCEEIKSQFEGFVKDIMLNKEETKKENSFEMQKGDQNPQIAAHVISEASSKTTSVLQWAEKGYYTMSNNLVTLENGKQLTVKRQGLYYIYAQVTFCSNREASSQAPFIASLCLKSPGRFERILLRAANTHSSAKPCGQQSIHLGGVFELQPGASVFVNVTDPSQVSHGTGFTSFGLLKL

SEQ ID NO: 6645 - DNA, 1272 bp, Artificial Sequence
  Description of Artificial Sequence: Synthetic Construct
atgtcagggatctcacttatcgcagccttggcagttgatcgtgtgatcggcatggaaaatgcgatgccatggaatcttccggccgacctcgcttggttcaaacgcaacaccctgaacaaacccgttattatgggccgacatacatgggaaagtatcggcaggccattgcccggtcggaaaaacataatcctttcctcccagccgggcacggacgatagagtgacttgggtcaaatcagttgacgaggccattgctgcctgcggcgatgtacccgagattatggttatcggaggtggccgagttggcgagcagtttctgcccaaagcgcagaagttgtaccttactcatatagatgcagaggtagagggcgacacgcatttccccgactacgaaccggatgattgggaatccgtattttccgaattccacgacgcggatgcccaaaacagtcactcttactgttttgaaattcttgagcgacgccatatgatcgaaacatacaaccaaacttctccccgatctgcggccactggactgcccatcagcatgaaaatttttatgtatttacttactgtttttcttatcacccagatgattgggtcagcactttttgctgtgtatcttcatagaaggttggacaagatagaagatgaaaggaatcttcatgaagattttgtattcatgaaaacgatacagagatgcaacacaggagaaagatccttatccttactgaactgtgaggagattaaaagccagtttgaaggctttgtgaaggatataatgttaaacaaagaggagacgaagaaagaaaacagctttgaaatgcaaaaaggtgatcagaatcctcaaattgcggcacatgtcataagtgaggccagcagtaaaacaacatctgtgttacagtgggctgaaaaaggatactacaccatgagcaacaacttggtaaccctggaaaatgggaaacagctgaccgttaaaagacaaggactctattatatctatgcccaagtcaccttctgttccaatcgggaagcttcgagtcaagctccatttatagccagcctctgcctaaagtcccccggtagattcgagagaatcttactcagagctgcaaatacccacagttccgccaaaccttgcgggcaacaatccattcacttgggaggagtatttgaattgcaaccaggtgcttcggtgtttgtcaatgtgactgatccaagccaagtgagccatggcactggcttcacgtcctttggcttactcaaactctga

(The sequence listing continues in the following parts.)

1. A composition comprising an effector module, said effector module comprising a stimulus response element (SRE) operably linked to a payload, wherein said payload comprises a mutant CD40L comprising a deletion of S110-G116 relative to SEQ ID NO:3820 or one or more mutations selected from Y170G, Y172G, H224G, G226F, G226H, G226W, or G227F relative to SEQ ID NO: 3820.

2. The composition of claim 1, wherein said SRE comprises, in whole or in part, a DRD selected from an ER, an ecDHFR, a FKBP, a PDE5, or a hDHFR protein, wherein the DRD comprises one or more mutations.

3. The composition of claim 2, wherein the DRD is derived from an ER protein and wherein the DRD has an amino acid sequence comprising SEQ ID NO: 633, 637, 641, 642, 644, 646, 648, 650, 652, 654, 656, 658, 660, 662, 664, 666, 668, 670, 672, 674, 676, 678, 680, 682, 684, 686, 688, 690, 692, 694, 696, 698, 700, 702, 704, 706, 708, 710, 712, 714, 716, 718, 720, 722, 724, or 726.

4. The composition of claim 2, wherein the DRD is derived from an ecDHFR protein, and wherein the DRD has an amino acid sequence comprising SEQ ID NO: 253, 255, 264, 267, 269, 6554, 6556, 6558, 6560, 6562, 6564, 6566, 6568, 6570, 6572, 6574, 6576, 6578, 6580, 6582, 6584, 6586, 6588, or 6590.

5. The composition of claim 2, wherein the DRD is derived from a FKBP protein, and wherein the DRD has an amino acid sequence comprising SEQ ID NO: 270, 271, 272, 274, 277, 285 or 286.

6. The composition of claim 2, wherein the DRD is derived from a PDE5 protein, and wherein the DRD has an amino acid sequence comprising SEQ ID NO: 294, 296, 298, 300, 302, 306, 308, 313, 315, 317, 318, 319, 320, 321, 322, 323, 324, 325, 326, 327, 328, 329, 330, 331, 332, 333, 335, 336, 337, 338, 339, 340, 341, 342, 343, 344, 345, 346, 347, 348, 349, 350, 351, 352, 353, 354, 355, 356, 357, 358, 359, 360, 361, 362, 363, 364, 365, 366, 367, 368, 369, 370, 371, 372, 375, 378, 381, 384, 387, 389, 391, 394, 397, 400, 403, 406, 409, 412, 415, 417, 420, 422, 424, 426, 428, 430, 432, 434, 436, 438, 440, 442, 444, 446, 448, 450, 452, 454, 456, 458, 460, 462, 464, 466, 468, 470, 472, 474, 476, 478, 480, 482, 484, 486, 488, 490, 492, 494, 496, 498, 500, 502, 504, 506, 508, 510, 512, 514, 516, 518, 520, 522, 524, 526, 528, 530, 532, 534, 536, 538, 540, 542, 544, 546, 548, 550, 552, 554, 556, 558, 560, 563, 565, 567, 569, 571, 573, 575, 577, 579, 581, 583, 585, 587, 589, 591, 593, 595, 597, 599, 601, 603, 605, 607, 609, 611, 613, 615, 617, 619, 621, 623, 625, 627, 629, 631, 6406, 6408, 6410, 6412, 6414, 6416, 6418, 6420, 6422, 6424, 6426, 6428, 6430, 6432, 6434, 6436, 6438, 6440, 6442, 6444, 6446, 6448, 6450, 6452, 6454, 6456, 6458, 6460, 6462, 6464, 6466, 6468, 6470, 6472, 6474, 6476, 6478, 6480, 6482, 6484, 6486, 6488, 6490, 6492, 6494, 6496, 6498, 6500, 6502, 6504, 6506, 6508, 6510, 6512, 6514, 6516, 6518, 6520, 6522, 6524, 6526, 6528, or 6530.

7. The composition of claim 2, wherein the DRD is derived from an hDHFR protein, and wherein the DRD has an amino acid sequence comprising SEQ ID NO: 78, 80, 82, 84, 86, 88, 90, 92, 94, 96, 98, 100, 102, 104, 106, 108, 110, 112, 114, 116, 118, 119, 121, 123, 125, 127, 129, 131, 133, 135, 137, 139, 141, 143, 145, 149, 151, 153, 155, 157, 159, 161, 163, 165, 166, 168, 170, 172, 174, 176, 179, 181, 183, 187, 189, 191, 193, 195, 197, 201, 203, 205, 207, 209, 210, 212, 214, 216, 218, 221, 223, 225, 227, 229, 231, 233, 235, 237, 239, 241, 243, 245, 247, 249, 251, or 6552.

8. The composition of claim 1, wherein the DRD is responsive to or interacts with at least one stimulus.

9. The composition of claim 8, wherein the stimulus is a small molecule.

10-12. (canceled)

13. An effector module, said effector module comprising a drug responsive element (DRD) operably linked to a payload, wherein said DRD comprises, in whole or in part, an ER, an ecDHFR, a FKBP, a PDE5, or an hDHFR protein comprising one or more mutations and wherein said payload comprises in whole or in part a human CD40L comprising one or more mutations.

14. The effector module of claim 13, wherein the effector module comprises an amino acid sequence selected from: SEQ ID NO: 6546, or SEQ ID NO: 6550, or SEQ ID NO: 6620, or SEQ ID NO: 6622, or SEQ ID NO: 6624, or SEQ ID NO: 6626, or SEQ ID NO: 6628, or SEQ ID NO: 6630, or SEQ ID NO: 6632, or SEQ ID NO: 6634, or SEQ ID NO: 6636, or SEQ ID NO: 6638, or SEQ ID NO: 6640, or SEQ ID NO: 6642, or SEQ ID NO: 6644, or SEQ ID NO: 6646, or SEQ ID NO: 6648, or SEQ ID NO: 6650, or SEQ ID NO: 6652, or SEQ ID NO: 6654, or SEQ ID NO: 6656, or SEQ ID NO: 6658, or SEQ ID NO: 6660, or SEQ ID NO: 6662, or SEQ ID NO: 6664, or SEQ ID NO: 6666, or SEQ ID NO: 6668, or SEQ ID NO: 6670, or SEQ ID NO: 6672.

15. (canceled)

16. The effector module of claim 13, wherein the DRD comprises an amino acid sequence of SEQ ID NO: 253, 255, 264, 267, 269, 6554, 6556, 6558, 6560, 6562, 6564, 6566, 6568, 6570, 6572, 6574, 6576, 6578, 6580, 6582, 6584, 6586, 6588, or 6590.

17. The effector module of claim 13, wherein the DRD comprises an amino acid sequence of SEQ ID NO: 633, 637, 641, 642, 644, 646, 648, 650, 652, 654, 656, 658, 660, 662, 664, 666, 668, 670, 672, 674, 676, 678, 680, 682, 684, 686, 688, 690, 692, 694, 696, 698, 700, 702, 704, 706, 708, 710, 712, 714, 716, 718, 720, 722, 724, or 726.

18. The effector module of claim 13, wherein the DRD comprises an amino acid sequence of SEQ ID NO: 270, 271, 272, 274, 277, 285 or 286.

19. The effector module of claim 13, wherein the DRD comprises an amino acid sequence of SEQ ID NO: 294, 296, 298, 300, 302, 306, 308, 313, 315, 317, 318, 319, 320, 321, 322, 323, 324, 325, 326, 327, 328, 329, 330, 331, 332, 333, 335, 336, 337, 338, 339, 340, 341, 342, 343, 344, 345, 346, 347, 348, 349, 350, 351, 352, 353, 354, 355, 356, 357, 358, 359, 360, 361, 362, 363, 364, 365, 366, 367, 368, 369, 370, 371, 372, 375, 378, 381, 384, 387, 389, 391, 394, 397, 400, 403, 406, 409, 412, 415, 417, 420, 422, 424, 426, 428, 430, 432, 434, 436, 438, 440, 442, 444, 446, 448, 450, 452, 454, 456, 458, 460, 462, 464, 466, 468, 470, 472, 474, 476, 478, 480, 482, 484, 486, 488, 490, 492, 494, 496, 498, 500, 502, 504, 506, 508, 510, 512, 514, 516, 518, 520, 522, 524, 526, 528, 530, 532, 534, 536, 538, 540, 542, 544, 546, 548, 550, 552, 554, 556, 558, 560, 563, 565, 567, 569, 571, 573, 575, 577, 579, 581, 583, 585, 587, 589, 591, 593, 595, 597, 599, 601, 603, 605, 607, 609, 611, 613, 615, 617, 619, 621, 623, 625, 627, 629, 631, 6406, 6408, 6410, 6412, 6414, 6416, 6418, 6420, 6422, 6424, 6426, 6428, 6430, 6432, 6434, 6436, 6438, 6440, 6442, 6444, 6446, 6448, 6450, 6452, 6454, 6456, 6458, 6460, 6462, 6464, 6466, 6468, 6470, 6472, 6474, 6476, 6478, 6480, 6482, 6484, 6486, 6488, 6490, 6492, 6494, 6496, 6498, 6500, 6502, 6504, 6506, 6508, 6510, 6512, 6514, 6516, 6518, 6520, 6522, 6524, 6526, 6528, or 6530.

20. The effector module of claim 13, wherein the DRD comprises an amino acid sequence of SEQ ID NO: 78, 80, 82, 84, 86, 88, 90, 92, 94, 96, 98, 100, 102, 104, 106, 108, 110, 112, 114, 116, 118, 119, 121, 123, 125, 127, 129, 131, 133, 135, 137, 139, 141, 143, 145, 149, 151, 153, 155, 157, 159, 161, 163, 165, 166, 168, 170, 172, 174, 176, 179, 181, 183, 187, 189, 191, 193, 195, 197, 201, 203, 205, 207, 209, 210, 212, 214, 216, 218, 221, 223, 225, 227, 229, 231, 233, 235, 237, 239, 241, 243, 245, 247, 249, 251, or 6552.

21. The effector module of claim 13, wherein the DRD is responsive to or interacts with at least one stimulus.

22. The effector module of claim 20, wherein the stimulus is a small molecule, and said molecule is TMP or MTX.

23. The effector module of claim 19, wherein the stimulus is a small molecule, and said small molecule is Vardenafil, Tadalafil or Sildenafil.

24. The effector module of claim 17, wherein the stimulus is a small molecule, said small molecule is Bazedoxifene, Raloxifene, or Shield-1.

25.-44. (canceled)
